United States Patent Application Publication US 2008/0114160 A1 - sequence listing, part 85

SEQ ID NO: 47339 - DNA, 586 bp, Oryza sativa
agctcggtaccctcatatgcgccacttgtccatttcatatgattcttctcccattagactacggccattttctttttgtaatactaagacaaaatggaccataattgactcggttcatcactcttcaaatcaataagaaatattgaagactaagagacaaactaagcacgatcttgttaatcttgtcatttgatggcaaagatgaagcttcactaagggggagtgttgcaacttccaaatttaatgataataaagctcatattcctcgcaaggggaaatcaaattgcctctatgtcctatgtatgctactcttgaaattttcttgggtaagttctttgcaaaaaatagggacatgcttaatgggctgaattaagaaagtaggtaataagaagattaatggcattattttggggtgaactattatgagacgttgtcaaaattatggccttaatattcggccacatttcaaggggagaatggaccgctcattgagatcgagacacttcacccttagaaatttctgacatctattattacttagatgataaatcaccaagtaaaattcagcgattcaagtttatgaaaa

SEQ ID NO: 47340 - DNA, 562 bp, Oryza sativa
aaaatatactgttataagttgtgcactaattaaacacagttttctattctagtagcaacatgttgtgtgttttctgcctaacacattgatatggttgtgaaagacatgtcccatgatcgaattattaagctaagcatttgctaatggatccatattctaaaggctcataaattaagattaattaagattatgttttggccagtacatatgtaaattagagccttactaagatcctggatgagggggacttaatttttcaatcaacactcactaagttaagcttgagtttatttgagtattatagtgagctataggtcttgttgtctcagtgacgcataatgttgttgaagacacattgccttgggagctattttatttaatagactcataagtaagtctcgaaatcaaggggagaatgttagctgattttgtcgacttgagtcgataaggattaggagaagaactaaaccaccggtttccttatcctaacaagaaacaaactaagagataaattcttttttttgtgtgatcggcacagaaaacagaatcctaaactaattga

SEQ ID NO: 47341 - DNA, 551 bp, Oryza sativa
ccatgcctttccctccttttctcattttctttttgccatgaactttcccaagaaaagaaagcatagttcattgtaggagtttatttgaatgatatttttgtggaaagccaacttctagtgtagaagcttagcttaattttatatgtgaaattggaaagtggaaatgatactgactccttgatcatgacagtatgaaagatatctaacacaagtcacacaaatttgacaaaactcaatataatgtcaagcagtcatatgcatgataatgtttgattattaatgtacttgcatatggtcttggtaggtataaggtaaagtcaactggaggatagagtttttaaaatagttctatttttgaaaacaaattcccaagagtcataagaaagttgcaaggattcctttcatcttaatcatctcacataaagcaattacttagatgcataaggttccctaatcatggatggttattcacaagcacaagttcagctgagaataatgaatatacaagatcaatcacatgaagaatttcattagttggaaattttatctct

SEQ ID NO: 47342 - DNA, 786 bp, Oryza sativa
agcaccaaccggggctaaagatcccggtgatctttagccccggttggtgctactaaccgagactaaagatcttaactttagtcccggttggtaataccaaccgggactaatgatcccggtgatctttagccccggttggtgctaccaaccgggactaaagtcccacccctatatatatgtcttcttcctcctccagctgcccgagcaagcttcaaaatttcttcaaaaaagaggggaggtcatgccaaaatttctattgaatttattttggtgattacatacaaatcggaggtgcctaaaaggtttgcaacttcatcctccaatgttttttttgtcatactacatttgcacctatgttttgcacactttttttgtctccaaaatttagttgtaagttgatgagagagaaaatgtgtgtggggaagaaagaatatatagaaatttagttcatttgctaaacaagattttataaaatagttgagaaggaaaactctagtgaaagttaatattaaataataaaaaacaaactaaaataaaaattaaaagaagtaaaacacattaaaattagtttaaaactttacaaatagattttaagaattatttggtgtaatattttatgatttttgtatgaataaagatatcttataattattgaatgactgccattattgtaaaaataattatttgggtgcggttttttgattcatgtaaatggatcgccaatggatgtacgttgacgggcggtccaaagagtttatggacggcgtgcactattttttaagagtg

SEQ ID NO: 47343 - DNA, 542 bp, Oryza sativa
ataattatgtatgattattagaatttttaacaattttaaatcatgcatatgctagttatatgcgataattaaaaattttaaaagttttaaatcatgcatgtggcatttacatatgttaattagagtttttaaaaattttaaatcatgcatatgctaataaaatatgattattagaatttttattaattttaaatcatgcatgtggtatttacatatgttaattagaatttttaacaatttaatatcatgcatatgctaattatatatgattattagaatttttaacaattttaaatcattcatgcgcttattgcgtattatccacttaatttactatagacaacaataatttttcgaagtaattgtcattaattttttaactttaaataattttaattcattatttactatttgagaaacacatatgtaatgaaattcaatattctgtgctattttctgtagtcccggttcttaaccctaaccgggtttaataagaatttggaaatagcgggaaaatatctttagtcccggttggtgagaac

SEQ ID NO: 47344 - DNA, 757 bp, Oryza sativa
ctccgccacttctcagtctggtgccccgcaatgaaccatgctatacaaaagataaagccgttgcccacgctggcttgtggttggcacggttaatgtttcacaaccgaaactcgtgaacctgtccttaattgtcatgagcacgaccatcaaaaccatgtgctcacaacccaccattaccaggttttagttggcacattaattaattaaccaatcacgattgaccatcgtgaactatcattaagccatcattaagtaatagtgagtcataagttatcccaatagtgagctaatgtttctaagcagggctaagctattatacctaatatctagttgaaccaatataaataaagctcacctagtcaaattataataacccaaggtatcaaggaataaagtaatcaagaacaaaagggctataacaaacaataggttaattccacccaatgacattcgaaaataaatgcaatagttgaatagaaacaatagctttaaataggatcaacatgctcaaagggttgtttgggatctgtgtgacttgccttgctggccttggaactcttcaaactcttctccggcgaaaacggactctccggaaacgacggaatctaagcagaaaagagcaaaatcaccaaaacagcacataaacaagcatgaacagtacatgtggatatttttaatatgtagatctcaattttagaaaaatttagagacttgaaccaactaaatcggagctaagatgaattagttatgaattttt

SEQ ID NO: 47345 - DNA, 677 bp, Oryza sativa
ctgttgttgtttttttttaagaatttgtgatttattgcagtatcatgtgatgaatttgatttgtgtgtgatgtgaacttgtgatgtatttgtgatgaattttgtagaaacttgtgatgtaatttgatttgtgtgtattttttttaggatttgtgatgtaattttttagaactttaaaatttgtaatgtggacttgggatcttacttcgatttgggatatgcataccacccatattagggagaaaataaaaaaaaggatatgcataccacccagattagggagaaaataaaaaaggaaaaaaaacctggctatcctctttagtcgcggttggtaacaacaaccgggactaaagatactctatctttagtcccggttggtccatctttagtcccagttggtaccaaccgggactaaagatgggcatctttagtcccggattgctactcccggttggaaacccgggactaaagggattcccaaccgggagtaaaaagggtttctctaccagtgtctcaacaaaacttgataaagattgggtaagttttgacgtattttagagaaaaaaatattcacttacaaactcagaactgaagttcgatatactccttaaatataaatatgcttactagttataatccagattcctaaatgaaatatgcgcacatatcgtgattaga

SEQ ID NO: 47346 - DNA, 714 bp, Oryza sativa
tgtggttatagctggtttatagcttgctattgtacctgctctaatagattagttataaggttgactacaattttcttctcatctttctatctctcacttatacattaagagcaaggataataatacagccagctgcttacttatagcctatctatcagctcactcatataatggttagctcttcactataaatatatggtgcacatgtctatctcacaaattttcttggttattgtgcctaagccggctgtaaacttacagcccgcttctcatctctctcctcttttctcccatccacctcagcattcagacttcttatagcccactattatacttgctctaattgtatatgtcttggagcttgtgttaagctagctcttgcatgagagccaacacctttaactttttgttacatctcttctccacataagtttatagtaatcttatagctcactattatacttgctcttacaagttacaacccgtgaaatgaaattcatgaggtcatgcccgagctttgaattcgtcatatgttctgaaaaagatgcagagaatcaggatatcaattactccgtgcaagagttcgaagctagaggaagagttcgcttcggtcccgcccataacagcccagatgaaagcttatatcgatcgattcacctgctattgcccggcccatatgatggcgtttttgcaccggttcttatttgggccaga

SEQ ID NO: 47347 - DNA, 708 bp, Oryza sativa
agggtgatttataaattcaattttaggattaggaggagaacttcagggtgtgacaccgcggagctcgccccctctcctgccggccgcccctacgagctcgcctcatccctcgcgccgctcccatcggccgccctctcaccggcgcggcgcgcaccgccgcccttcttcctcccacccgtcggccggctcgatgagctcgtctcatccctcgcgccgctcccatgggccgccctctcgccagcgcggcgcgcgccgccacccttcttcttcccactcgtcggccggctcgacgagctcgccccctccctctcggcgctcgcgtcggcctccctctccgccggcgcggcgctcgcgtcagtcgccctcttcgccgggacggcgctcccgccggccgcctctcggctcaccgacgtgatcacgaggagggaggctccgccgccgctcccgcggcatcagccgccaaggccgcgagggagagggatggaggcggtggggagttcccatgcgcatcggcggcggcggtgctgggggcgtcctcttggtggtgcgcgttgtggcgacgatagggaagatgggagtgagccgagaggagagatgggatgacatgtggggcccacgtgtgacccaccatatttattttgctgggtagctgacatgtggacccacatgggtcccaccatttttaaataaatttttgggcagctgaca

SEQ ID NO: 47348 - DNA, 815 bp, Oryza sativa
tccgtcggatctggcgtcgctctgctcgtgagagaggaagaatatattgtcgccgctcttgctcacggtatctgctcgcgggtgaataaggaaaagataattttcaaattgattgccacctataattaatttcatttaaggtgctggttaaaaaaaatacacatatagtatttgtgctttttttttctaaaaccgacacctatagtttattaaaggtactggttatacatctttttaattcgtggagatgagaaatgttttaataggtatcgattttagaattgttggtatttatagtgttgttcattcatgatgtcctgcaatagtgatggtactagattgtaccatctggtcctagattgttatatgatagaatgaagagaatatattcttgtgacggatcctgagctactcttaatttcttaactaaacgattatacacataatttgttgtactatgaaatgtatcatccaattttatattgctatattatgggacaaagggagtatattcttgactaaactaatacaagtactatttgctagaacaatgctatacgtacgacgtgtttgtccgaccaacgtacgatcaaacggtaaaacaactccatacatggctgagtaaggtgacaacatggcttagtccaacagagattaacgtcatgaactcaggacattaagttcgttccaaagtcgaacaagtttagtcgtatatatagcattttcctacatactattgttccacccttatctagagccttgaagaacatattcaatccaatggtgagttagttgccacagttatcatccaatgg

SEQ ID NO: 47349 - DNA, 783 bp, Oryza sativa
tgaaattggtcatctcaactctgaactggttacgtccacttctttcgaactgatcactgatatcgatcggttgatggcgggaactgcaactctgcaagagatagttttgctgggtgttgtctgtctgctgtcctctttcaagggtgagagtgacagaaatctctcgtgtgctcatcagctcatgcttgctggaccagtagctacttggcaggtgcagagcacgatttgatgcgaaacagacggtcagtactgtcgatcagccaacgcagattaagaggtccactcgtcctacctaccaccggagatacgaagtgttactgttacaaaaacaacacgaggaaattagaaaatactatgcatacgatttatgtgtacgatcattgtacgattgctaacagatggtggatgtgtgttaacaaccaaatttgttaatatcttaatatcttaatatagagtaaaaacacgagattcatgtgtttcttcgttagaaacggccagaaaatgccatgggatttggctggcaaatgttgcatcgtacaagtatcgtatgcaaatactatgcatacgatttatgtgtacttttcaaattaggggttcttttagtcgatggagaaatactttagcctgggccctggagagtttaagatggaccatgaccattgttgggaaccaaggtcaagaaataaatttggggataggtttcatttccaaaaagtgaagtgaacttgagatatattgacagacacttgccaccattgtttcagtaaaaagtatcatgtctct

SEQ ID NO: 47350 - DNA, 649 bp, Oryza sativa
agtataaggagtataaatgtataaaatttgacgatctaaaagtacaaacaataatttttgtacaatttttagtgagatatgtgtgtgtatgtgtgttagttggtttacaccatgtgttcacgtagtctgtgcataatcttcaatgcgaagcctgcaatacctaccctattttatcttctttctttgaaacaattaggcatttaaacaatcatggtagtttattatgtccattgctataagatggcataagtacactgaaagtaaaagttttactcatgatgatagtttttaggtttgcaatatatgtggtttatactacatattttaccttataattaattaaacctctgtttatatgcatcgcgccgccctcggtcccggcggtgcacatgtaaaatcgtttgcttgaactaaccagaaaacaaattcactccaagttgtttggtgcttatgtatggcattatatatatctatggcctgtgtttatgagtatgcttaagtatatatatcaatcgttagtttggtctagccaacgaacaatttagcacaatacagtatgaatcgggacatattcatcttcataaagtgaaagtgtgtggatacaatataaagtgtgctcataaaaaaacctgacacgggacagcgatct

SEQ ID NO: 47351 - DNA, 593 bp, Oryza sativa
ctactttattagtaactttctgccctcgagaaattcagactggtaagattttagaccaattcctatattcctgacatctaactgatttagcaaaaaaaaaaaaaatcaccggccggcggcgaaagaagcccaggccaattttattaagatcatgagtgaagtacagtttataactgatgaagcatgatatgagcatataaatgttgctagctctcattggaaactacacatatatacacatataagaaattaataattctgtaaaattcagctgaaatagctaggcagttcaatccgtgcctatcagaagagtaactaagttcataccagatgcagttttctccagaattagcctcccacaagtacccttggagattgctcctttcctataggcagcgttggatgtgtatgccatgccagtatatatggagatgtattgcacatcaatgtcatcgtggaaggcgtggaacaagtccacgcaaacaatacaaaggcgccgggggtaaaaagtcatatatagcaaaaggccatggatgataggcagcgcatgcatgcaggtgtgtgccattgagcatatatataaagtattaggg

SEQ ID NO: 47352 - DNA, 1524 bp, Oryza sativa
tagtacaactaaaaccctaaaaatataatgcatttattcaaacaaatttttaaagaatacacactatttaactcaatagtcacatataggatctatgaatattacctgaaattggcgtctgaatccggcagggcttcgccccttcttctcttctcctcccctctcttctttttttttcactggaattgaggagagaagaatgagggctgggggctgggcagcaggccttttataggcagcgaggcctgccgcccggccagagggcggcaaggggccgcctgcaaaatagccggccccgactggcttttttgcattcgggccccttgccgccccaccagagggcggcaagggttttcctgcaaaaaaccctccctccgtcaccgcccgttcctcccccgtttgccacgtcagcttgccgccccagaggtgggcggcagggtctatttttgtaatttttttggccgatagattatttctgtaaatattttttaaaaaaaatctaaaaccgaaaaaaattcaccagatgaatgtgtaccccagctacggaaaatacaatccctctgcagtctgcaccatgcctcccatgcatgcatcaaatcgagggtgtgtttagttcacgttaaaattggaagtttaattgaaattagaatgatgtgatggaaaagttgaaagtttgtatgtgtagaaaagttttgacgtgatggaaaatttggaagtttgaagaaaaagttgggaactaagccagacccgagtctccacctaaccgaagtgctgcagtacgtactgctccaagatttgtgacccgacgtactacgacctgcaccactgttttattgcgatctgaaattctgaagactagccgtacatcgttatcgtgcgtttctcagtctaagcttgcagagcattgagttttacgcagtctggttgatcatcaatttcagaggtgcatgcatcgatgtatatgcctcaatttctcacttctgtgtgcatcaatttcgtagggtggaggactataactggcttcgtttgctttgtgtttggagctttggatctgtgggagcgtgggctgcagtcttgcagatagtaatcccaagttaatcagctcaacttgcctagttgacatctgtgcagttttgcttaggtaggcccatttaaattgggcctaaacaaaaactcacaaacacctcagctcagtattgttcatcctaccaaccgtcaatggaataagttcactttgattcccttaaaagtgaccctcaaccgtaaaaccggataggatgactccccgaactattgaaacccgtgcaatttgactctgtagcgcccgttccgtcgtggcgcctagcgggaaaattatctcttaaaaaccctaattgcgaaatttgtttcttcgcttgtcgtctagggtccgtgccatctcaagatctcaatccccgatctatcgtcaagttcaaatccgaatccaaatctttccaaatcaaattcctccgcaaaagtctattttgcctcccccggggtcgatgg

SEQ ID NO: 47353 - DNA, 1154 bp, Oryza sativa
gcgtatcatatataatgttagaacttgtcggccgtggatcctcctcatcatagcactcgtcttcttgatatgcagcagcactaccctccatctgacttacgtaataaaaatgcctatggtcaaatgtctgtacaacttgccaattttcacccagctttgtatctggcaaatagaaaaccttcgtagcatgagtggccaatatgaaacaatcattcttgtaccacaaacttccaacattgatgcttttaaaaaagccatcatctttaagtgcagtcctctttccatccagtttgaaccagtcacactcaaacaaaactacggacctctcctctaagttatagtccaactgaattatctcttttatgtttccaaaaaaatcaattaactgaccattatgtgtagcttgtgacattactccactattcagtgtcttcttgttcttgtcacggttaactgtgttaaaccgcacaccattcactatgcacgaggagtattttctaactctcaaatcaggaccgcatgccaaggagaagatatcaacatccacctcttctggatttgtactatgcttcttcaaaatctgccacatgcatacaacacacatatattagaaaaatagaagttacattatgcaatatataacttgacaatgaacactaacatggttcctaaaccaggtctgaaatccttgtcaaagcattctttcaatgttaggcaccccttgtgtctctaactcttctatgaacaaactgcagaaaaaaaaataaattagtgtgcaacacaaaggtagcatatagaagaagtctaaaagtaagtatatagaacatacttgacgtaatactcaacttgggcacagttgtttagcacaaaccacaccatttgatcaatgccattttcatcatatacatattcaggtgcagaagtaaaattaactccatgcccaaaaacatcaacaccataagcttcttcattggagaaacctttatttcttggctcccgattaaatcttgtttcaacatcgtccatgtatttagagcaaaatgtcagacactcatcagcaatataagcctcggcaattgaaccttctggtcgtgacctattcctcacatatcgcttcaaagtatatagtcgcctttcaattgggtacatccacc

SEQ ID NO: 47354 - DNA, 649 bp, Oryza sativa
tcccctgtattacgggacggagggagtactactaggtgaaaccccgcacattgctgcgggaatttagtatgataacaataaaaaaataacgtgtaagatagctagataacatcagattaagtaaattaatgtggtttatgataatttaaatttaaatagtatgtagaatggtgattcaaacgtaaaaagtaaggtggtatcactttatgaaagaagaaaagtagggagatagtttggactgtagattaatcatctaaaggctaaaaacaatcgatgtgatatgacttaattagagaaaaaaaggagaaagataatttataccatagattaattatttaagcactaagtgaggatgaaccatataagtatataggatatcataaaacataataaggatatacattaaaacattatgtgaattatgttggatgataatttaacatgtttgtatttgaaaagctcttaaattataaaaactataaagatatagtatgtttgcatgatgtttaaatgtgattattgttagtggatgatgacgtggcatcttgttagtggatgatgatgtggtatctttgcatgttaaacttaagaagttagtggggggataacttatagcaagataggattagtatagatcttaccggtgggg

SEQ ID NO: 47355 - DNA, 674 bp, Oryza sativa
  unsure (1)..(674): unsure at all n locations
ttttgatagatgaagccgggtataaaatatccattatctaaaaaaaagatgttgtaacccatcgatagtgaatcgtttgtactgatttcatctatactaatataaaaaggaggagttgcccccctccaatgctacaggccaaatcacccggattaatctgagccgtccatccgcgcacaacttttttcacctcacgatttggcacccgaggattgcacgcgcgaagacattgctcctcatccacccgcagccccgaagaccgcacctctcctcctcgctcgctcctcctcctccccgcgtcctggcaggagctcctccccgctgccgccgctccttcgcgccatgccgtagccgccgccgggtccttcttctttcccacctccgggtcttgcttcttccccatccccaccgacacggccgacctcttcgctcatgccttctncctcctgctgccgncgatctgacgcatacttgccggagctctgccggagctccgccggactcttactcggagccgcgccggagcaggcctcggcccctcatcaagtaaggtcctcaataaagtcctcaaatgctgtctctttcctaaatactaatcttctccgtacgaacacgatctaaaacaagtgaccataattttccatttttgtgaagttgatatgtttctatgcgct

SEQ ID NO: 47356 - DNA, 553 bp, Oryza sativa
  unsure (1)..(553): unsure at all n locations
gcgatcncnnattgaanttttgattccagcttggtaccccgccttccgctgatgccgaccccaacctcgatgcggccgccactgccggcgacgtcacgccggcactgccgacgacgtatgccgatgccactaccacgtcgccgtccccgccttgacatgccgtcaggctgagccacaccgtcgagacggcacgccaccgtcacgccgtcacggcgtcgacacgccgtcgtcgcgccacgccggcacctgtgctcaaagtctgtttataaaaattttttttggtggcggggggccccccccccccggctatgaggtgtttgtttcgatagtgaaccaacgtgaactttacgagaacaacnnnnnnnnnnnnnnnncnnnnnnnnnnttccnntgcgccgcctgannnnnnnnnnttnttttnnngggtactatcccattttnnnaatctgagggtatnagaacccnacgtcaccaacgtgaccttaacttaattntactaaccttaccnaattnccctccctaactaaccntnccttaactnnttttactccct

SEQ ID NO: 47357 - DNA, 1043 bp, Oryza sativa
ccttaatttttttcctccatgaagcatttctcccaatataccccacacacttggccaattaatgttttgaggaatgttaagtaatctccttaagtataaggtttttgcctaataaaaaaatgtgaatccaagtttcccatgtttgatcctacccagtcccacaattccaaacccttagagtgggatccaaaaaagcaaatttggtagggatttcatattattacacttggcgagattaagtaaatcaattgaggaacttgcttttcttttgcaaattcatttgaaacttgttgaaataagagtttgaataaaaatggggtgattgggctcctaattgttgtttttcctttcaccgggcaaggcaagaacaaacagagtctcgtgaaaataaggggtaagggtaagccacccgtgccaaagattatttaaatgtaagagagagtacatatcccttgcacctgtatctttgagatatgcagcatagtagcaactcctgatcaacaagcaagtctttgtttcctttcttccttcactcgggacgagcaaaggttcaagcttgggggggggggggtttgacggtcgttatcgatcagtttcgaccgtcaatattaccaaaatagaagagaactagtgatgcttgcgttgcacaaatatgatagaataataatattctactagtattaggtctactaacattttgcagagaataacaataaagtggagaagaatcggcatcaactcaaacgataaatcaatgagacgatgtcgagaatcagacttatgcatgaatgggcctagaactcagagttgacacgtcaaactgggctaaaattcacaagtctatataaaggagcaacagaggaggccgccagccgaaaggtgggctggttgggccagcccctggttcggccgaacctcccttacctccgttggatccaggttttggttgtacggtggagatgaagccccaatgacggttggagggtattacctaccattccaaccgtcacaaccatcatagttcggctataaaaggagctcct

SEQ ID NO: 47358 - DNA, 796 bp, Oryza sativa
tataatatatgccatagataaacatatttttacttttgtataggtgaattataagccaaatatatatatatatatatatatatatatatatatattatattatattgtgtttaaactaaatgttttaaagttactgatagtcatagttataatagttatagaagtttaataatcttaatataaacgtcaagaattataaaatcggagggagtacgaataaacgattgctcttaactagttgatgaacaaattgcagaggaacatgttgggtttaagtcaggtacagctagtctacttctcgttacctttccttttgggggctaccaaattaatcacgttaattaattcccatccctcttcttaccttcttttttttttggggccaattatcatgccaatccagtccttgttagggtaaatggtggtaaagttaatagtactattaaaatagctttattattcaattctgacaacaacctactaacttggatgtaatttactacactctctccatccttttctaattgtaatgtactagtgtggtctttttgcaacgtactactgctggtctgcacgcctacagaggactgaaatacatgttctacctactcggagtaattattagtgcaatgactgctcctttaacctgtaccatacttatcatattactcctacatgcaccttcagggtaattatttttttaaaaaaaaacattacgtaccattactaatctttataaatacaaattatgaaggttctgatattaaccctacttaatcaaaaaataaaaaggtta

SEQ ID NO: 47359 - DNA, 799 bp, Oryza sativa
tgggttgattaaatgccgttggatgtgatgggggggttaggtcccgatcttccgataggtattgataaacaacgagttcgatggagtcgtgacacaactcgatccggcttccgaacgaacacgctactgagcccggcaatcgcagcaccacgtctcctctggttatcaaccgtgccaaaacccggttgacctcgccgagaaggctaatccctggatgcgaatcgaagaacacaagcaagaacaggatagattgcaaccaaattgcatatgaatgattaagcactcgaatttggggttctacaaaccgatctagcggcgaaactgttcttgacagaataatctaagcaaaacccgactctaaacgatgacggctactgaataaatgtgcttagggacgtcatagggttgccctagggcgcacacccccttgagctaagcccatgacacaattacaaggctcaaaactcaaaatcagattcggactggatgagatacgtggcttgttttgcagattcccggcagctcggtaggaattttgacatgggaccaaaaccatttgaaagtagactccataatctttccaacaagtactcatgggcctcgaaattccttctagatcagtggctaggtccgtttgaagttgatgctgtcaggaggcccgaatccgaatccaaaacgtgtacaacttgatctcttgtcttctatggaccaatagtgacgtggtgaggtagaagtagacttgaagaaggtcttggtttggtccccaatcaacttatttaatcatccatgcattagttac

SEQ ID NO: 47360 - DNA, 689 bp, Oryza sativa
  unsure (1)..(689): unsure at all n locations
tcccaaanaatagagattggaggagattgaggataaataattcccattcccaatagagatggaataaatccccttcatatcccctcaataccattgtgagagggattaaccgaacaagacgttactggggaataaactatcttaatttgcctgggatttctgcatagatcgaagcatctgaagcaacgtgttaggttaactactacatgcgctagtggcaagatttagtcatatttaggcttgtaaagagaaacatggagtactttagtgctttcgccggacgtatacgtacatttttgtcgtccggtgaccagccgtgattggtggttgtccaacaatatgaaattgtcattgtccgaaacaatctgcatccaaatatatgtaatttaatgtgtcagaattacgatttaagaaataatgaaattacgaaagccgccacagaatttgatagtcaaatggtctgcagtgcccgttcaggggactcggcaccacttccaacgttaacttccatgtgaaagactgggcccgttcgtttgggctgttcgatcggtttgggtaactctatatttagttaacagaactaaaattttcacgctgtcatatcaaatatttagacacatatatagagtattaaatataaaaaaaaaataattacatagattacgtgtaaattatgagacaaatcttaa

SEQ ID NO: 47361 - DNA, 688 bp, Oryza sativa
ttgagagatgaagtgaataattcaagtcatcaaagaaacataatgaaacattcgacgcctcgagagaagaatattggagacattgctgggcttttagcctgccagtcaacttcagcctgagatgtgcccgtcaaaccactcgaaggcggcgaccagatgtgttacacattcaggagacttgacaaaaatggctaaagatctacaacatctcaaatattcttaacacatactcatgtgaatctacttcccaagatgtgcactagattcacactttcatcttaagcatggaaatacatagcaaaatacacttaagacgaaaataatctaaatcacaactacttcatagttacataggccgaccggcgaaataaagatatagaatagcgggaagcttgactacccaatcctcaagcacaccgactaggggtttaccccattaagttcaagtcctagaagaagcaatcgatcacccgcatcactcaaagactaaatttaaaacatgcaagcaaaagttaattcaacagcaagagtcagtacattattaaaaataatgtactggcaagtgccaagacaagcctaacaccctactggcaggcatataaacaaaggaaggatagtatgttctttttagcataaagcaagttttatttgataaaacatttttaaataaaattggtttccaataatg

SEQ ID NO: 47362 - DNA, 719 bp, Oryza sativa
tttccgggatattaaatcacggtatattatttccaacccaaagcctaatattctttaatgaaataagatcttggcataaagggcggatttaacatgtcactgaagcatatagagcgaatatggttaaatcagataagaccgactgaagctccgatactaccctaatcggcaatcagaaggcaggctagagattgatattctaagcacgacttgatagatcaaactcaactaatgcagcattaagtataaaaaaatgaataatatctagacaatcaagccgctggaagtttcatagagtggtagatatcttatataatctaaatcaacatcaaaatctaacctaatcggctgccctctactaacagatgttagccgattataggttagatagcgatcttgccagagattatgtacgatatatgataccttgatgaattacgtaaacacgattagagtatcataaagatggaagctctaatcccgagaacacaagccgtcataccaagttttacctcttattgaagatcgaaaccgatgcagctcaacccgaaagcaagaacccgtcgaaataaaactaaagcaaaaaggtggcgatgcgccgaaattgtattgaacgtgtgtgttttttattacatagggctcggggtctatttatacccgagaattacaagatatgtccataccggacatgactattatctctaacaaactctaagata

SEQ ID NO: 47363 - DNA, 675 bp, Oryza sativa
caccagggtcacaaccattgaatctggcatatgagcatatgtttattcagttaagatcatcatatggctttggtgggaatttatgatcgttgaggaacttttaaatttacttttttaaaaaaatgctctgaaattccaatatcacttagagtaatatcatagcaactttatttcaccaactcatatccaacaacaatctagacttggatcatgctttttgcaacccacaagtttcaagttcatggcaaagattttgtttttaactaacaaactcaaaaactatagtgaaggttaagctccaaactaagtactagatagaaataaaaacatcgcaactattcgtcatttcaactgggaaaacttaaaacattcttatcacgtatacaaaagtaaatatttttggtatttttatgttttgcaaatttttacttttttttctttttatgatgcaaatgcaaaaatgtaaagatataagttatcttggtgggggtggcactccctcaagctagcttcttcttggggtgcgtgatggggtttgaatccctgtgatcagaagtaagccatcatgtcggcctaattctgctgtatggcggtgttgatgtccaccatctagtcggtggtatgctgccgccacgaatgggtctcccagacatgctggtttaacatgtcatgcat

SEQ ID NO: 47364 - DNA, 800 bp, Oryza sativa
  unsure (1)..(800): unsure at all n locations
cccgctcgccaaagcggcttgaacaagcgccgcctccccaaggccgaatcgggcgggggggttgccccctgcccggatccgccaatgttgcggaccagcccgtcggtggcggcggggtgcccggatctagggttaaggtttcaatttttattttcccgtgcgggcgacattagaacccgcacgcgaaaatcggattttctcgtgcgggggcgccacccgcacgcgaaaatcgcgattttcctagacagcccgctccagacgggcgaatctactgcacgggataatcgaaacaaccgcacgcaaaaatagcttctgtagtagtgcggcgtgtgttggcttgtgtgtatgttgtgtcttatggctttgtggcgtgtcccttcacctcgtagggggttatatttatacccatagatgccccctttccaagtagaactagggagataaatatggatacgatcttatacccatagatgcccccttgttcaagtagaactagggagataaatatggatacgattcgattagtccttgtcgtttccatagagaactctttttgtccttccttatctggaactctttctatatacgaggtttgtttccgtataagatatgttatgtggtgggacttgccgagatttagtcaactactattaggtatgtggtatggataaccctaacacatatgttcaaagattcaatgtcacgtttttcgagataaaagtctgagaactaaaccagggaccttagagtcggcctgcaggcatgcaagcttgaggttntatatttngatntcacggccc

SEQ ID NO: 47365 - DNA, 715 bp, Oryza sativa
agagaatccattgaatcccggaaaatgctttcctcctagcctttcgtaccacgtggggtcacgtactaagcaagccaaaggcaagaagagtaagaatcagaagagaaaagcaccgatgcgaactgaagaagaagtacgtaagatgactattaccagcaccgaatggcctccagcagggataactattcctagacgtcaaagaggaaataccttccgaggtgcacgacagttgacccagcacctcctaagccatggcggcagagtatctgatagtgaagggtcagatcaagtctcctcggattatgaagatgagtctctccgacatctcggcgaggaagagatggaatcaaaagcatgcccccgttgtggagaaattggacacgttgctagcatgtgtctcacactttgccctcattgtgaggaagaccatccaccaggtggatgtcccacccgcaaggtcacatgttttctatgcgaaggtacaaaccatgtgcccaaggattgccaactcagtgtgttgttgaccaagactgcagaaatccaacgaacaaccctacgattgtctcatcagctagtcagctccaacatcaacatcgacgatatcatccccagcaccaatgctcctcctgctgcacctgactctgcagtaaatcatagcaataataccttcaacaccaaccattctctggaccgacggcctcagcaaagaattgtg

SEQ ID NO: 47366 - DNA, 710 bp, Oryza sativa
ccgatgcaaaccacgcgctacacacacaagcaaggaacacacgactaacaacactaccctatagggtggcttaggttctgcgacgggttctccaagatcttcactcctgcttcacagctggcttcactacttcctttgcttcgctagcggatcctgcagtcttccggagcttcggcaaacgactgacgacatcttcttcttcgcaaagctgaccatctagtactagttgaaaattgaagacggaagaaaagggtaaaccttttgcaaatagcattaggggaaggagaaaaagaggaactttcgcaaatagttttatttataaaatatgtccttaggtttttatcccctgggcttatcctacagtcgagatggctctgataccagcttgtcgcgaccgagaaaattaccttttcccgaatgctagtgtattaatccccgtcccaggaaaagccggggtacaccgaacaaacatgatacaaaaggcacatctttattatatcgataatatttacattattacaaaggcacttaggcctgaccatcaaaaataaacagcagcggactagcgggcctacggcttcatttcacaggcgctcaactggggtataagccaagactccacctaagacttcttctccaaagcttctcttactgaaggggggagaaagatagagcaagaatgagtacaaccacagtactcagcaagcact

SEQ ID NO: 47367 - DNA, 702 bp, Oryza sativa
tatgctaaaaagaaccatactatgccttccttgattatatgccttgcaagtagggtgttaggcttgtcttggcacttgccagtacattatttttaataatgtactgactcttgctgttgaattaacttttgcttgcatgttttagatttagtctttgagtgatgcgggtgatcgattgcttcttctaggacttgaacttaatggggtaaacccctagtcggtgtgcttgaggattgggtagtcaagcttcccgctattctatatctttatttcgccggtcggcctatgtaactatgaagtagttgtgatttagattattttcgtcttaagtgtattttgctatgtatttccatgcttaagatgaaagtgtgaatctagtgcacatcttgggaagtagattcacatgagtatgtgttaagaatatttgagatgttgtagatctttagccatttttgtcaagtctcctgaatgtgtaacacatctggtcgccgccttcgagtggtttgacgggcacatctcaggctgaagttgactggcaggctaaaagcccagcaatgtcttcaatattcttctctcgaggcgtcgaatgtttcattatgtttctttgatgacttgaattattcacttcatctctcaaatataatgggaggtcccgagagcctatgacacaatccaacttattcttgactgtccacgtcatag

SEQ ID NO: 47368 - DNA, 543 bp, Oryza sativa
aatacctctctgggcaagctttgttggacaacaattgctttgagcagttcttatcaagcctgctcattttgtgcaaatacccattcgcagaacagcaggcattagctactgactggatggtcgtcgtgaccactattctgctgccaatatccttatcagtcggaaaagccgatttgatgcttttccactgatcttctgtttgaatgtcatcgataacaatgaagtacctgcaagacgaggcagatcaagaaagaataattgtaaacatccccatctggagccacagtaatcaacaaattgaaacgaataatttgtataatttcatacggtagagcaatttagaagcagtgaattgttttttccatttttattctattatagtaaatttgtaaaagataaagcgcatgagaaatgcactgtatgcatttgatgactaaattagtgcagctaacacctagcagttagcaagatatagtatctgttcatgattcactttgctattgaaagtgtcagtcgcactgaacttgtgcaaaagaacaggcg

SEQ ID NO: 47369 - DNA, 735 bp, Oryza sativa
agggtcatctggatctagtggaccatgactattagggggccaggcctgatcatggttagaaatttcggactgaaatttctgaaaattcgctcatttcggacccctctgatatgatattattctggccgaaattttttacttttttaaatttttcatgatttaggtaatatttgttcaaatttaactaaattttgttcgaaatttcggtatatcggtgaccttcgatcaaatcagctaaaccaaaaaagtaaaccctaggctgacgtctcgcactttgttaccactagaactacggatgttgacaacaagagtagaaagaggaagtggaagctgctttggatctagacagcccagtgacaaggacggcgagcttggttgggtgatctcgaggcatcgacaacattaaggaggaggtggaaagctccactatgggaacacaatatgtgcggtagcggtggagttggagcaagaggtgaggccatggcaaagagggcaagtgcgagagggtcagtaagcagcagggtacgagcaagagagaaggtgagcagtttggtagacggggaacaaagatacgtcttccgtgaagatagacagatagaccttacaatatatcactgatattgcaaccgtcccagacgtggggccaaaacgatgatcctacttttgtgatggttcattttcctcttcaatccatatcttattttagacaagtattatatatcagttggggcagcg

SEQ ID NO: 47370 - DNA, 550 bp, Oryza sativa
taacacgttatagcttgtaaaatgcataaagaattcattataaatccaaaaattgtgaaaccaaatgtgttagtcttagaaaacacatctacacacccctgttaagtctaatctaataaaaatcactttacaaaagtattttgtagcactacctaagactatactactataaaccgacataacttataaaaattcataactcccaaatggaataagataaaatagaaattctttcacctaaattcattttagaccagtaccaacccactgtgcacaaatcatgcattttagagcattttggatttttagttctttcggtgtttaattgcataacatgtatttatctagataattgcataatcggtgaaggagtggattagttgctaacatttctctgatcaaggcaagttttctcctcccatcctttgaacacattgaatccccatgatttgaggaatggaaatgtttgattgcaaagttgcatgtgaacttagactatatcggtatttaaaattgggttaaggtaggtatgacctatttgctgcattcc

SEQ ID NO: 47371 - DNA, 802 bp, Oryza sativa
agttctcttctttctcggggataatttgatcacctggcagtctcagaagcaaaaggtcgtcgctctgttgtccagtgaagcggagtacattgcggcgacgactgctgcgtgccacagtgtgtgtggctggcgcgtctccttgttgagctcaggggagaagaagggagcgccgtcacattgaaggttgacaaccagtctgcaattctgcttagtgttaacgaccaaatttggtaatccaaggatcagagaagaagaagaaactgagatggaattcgagatggaaatcgtcccgcaaacagagtgaagatcggctgaagtccgaatcggctgtggctagatcggcagggttcgagtcggactaggttagccgattgagccgaatccgacaatatgacatagcatatgttgtcggtttaggttgatgtgcttcatgatgattgccacgcatggatagagtcctgagaaggaaattgtatctattaattatgatattttatgtaattttcttagagatatgtttgggcaaaagtctgccgcaaagacttatggtatcttagagtttgttagagataagagtcgtgtccgatatggtcatattttgtaattctagggtataaatagaccccgagccccatgtaatcaaactaacagacgttcaatacaatctcggcgcatcgccaccttttcactttcattttgtttcgacgagtttttgcttttgggttgagctgcatcggttttgatcttcaacaagagataaaacttgttatggcggcttgcgttctcagtattagtgattcca

SEQ ID NO: 47372 - DNA, 664 bp, Oryza sativa
ttcgtttcgatggatgatgatagtactagatacgaaatgggatgccggccggccaatctcaacgctggcatgcaccgcgcgcggcgaggcattgtcgaagatgaggctgatgggcgcgctggcggcgtacgtgaacaccaccggcgaccccttcacgatatgcaggccgtcgttgacgaggcagagcccgtcgttgccggcggcgtggatcttgctccggtcgacgccagccggcacgctgcacttgtgctctctccgtattttaatatatgacgccgttgactttttgacaaacatttgatctttcgtcttattcaaaaaattatgtaattataatttattttattgtgacttgatttatcatcaaatattctttaagcatgatataagtatttttatatttgcataaaaattttgaataagacgagtggtcaaacgttgattaaaaagtcaacggcgttatacattaaaatatggagggagtagtttattagtgccacttctgactactgatcaagcggaccatgttatctgtacccgataaaattaactaaatagtatgcatgcataaattagattttgcctaagcacttaccatgatcaaagttagcttttttcatttactggaggaattctataacgatattgtactgtgattgaggga

SEQ ID NO: 47373 - DNA, 724 bp, Oryza sativa
caaactgggtacatcacatatgtaatttcagatgatgtctcatctagttataaaatactatattgtgggttggaggtaactagaatactatattgtgggttgaagggagtagattaattactccatccgtcccaaaataagcgcagccatgagttttcgtgtccagctttaattgtttatcttatttatttttttaaaaaaataaaaacataagtcaagcataaaacactattcatattttataatctaatatcaatacaaattccaatctatttttttaaataagacgaacgattaaagttgaacaggaaacccagtttcctcatatatgcgtttattttgggacgaagggagtactaaaagtgtcactagtttcaatggcacctaaatcatattggactgttaaatcaatttgacactatcgaatcaattattttaatgattttattttttacatacaacttcatattcgccttgtcccctaaactttctttgctcacgtaagataaagtaggcaagggcaatgacaccactattgaattatagcctccacccagatccccagtgctcggtagggtcaacactttgggagatggggtgcatcacagcgcgaaaaaagtagaagcaaagccatctaatttgacatttatgttttctaggatcttgttattggctgcaagctttttgcttagcgcatcagtggatttagtctatgtaaaaacta

SEQ ID NO: 47374 - DNA, 586 bp, Oryza sativa
aatgtattgacccaccgggcatacataaagatcatatcgactgaatctctagtgtatacaagtatgaacccctttgcctcatgatttcgattaagctcaaggctagatatgtgccatcctctaatagctcaatcattcactcgaacctgtgatagattatataacttgtgattgactcctcaatcacctttggcatggccatgcacttccataatctataacatcgaggggcccagagatatctctccataggaaggacaaatcccatcttgattattcatatcccactacatgtttcatagcatacctgaaaactacttttataactacccaattacggagtagtgtttagcagtccctaagtaagttactacatatgttgggaaccatgacaatctcaggtctaacgattcaacaccaacactaaatgagatcactgatgacataacacatatggctcttgcagtgtcttatgttgggtctatccaacaacatgttccctaacatgtgttcacattattaatttggtatctctataccatgattcatgagacatgatcatcaattaatacatgtgctgatcatt

SEQ ID NO: 47375 - DNA, 1046 bp, Oryza sativa
cttgatagccacccccttttattattgccgaattttagttttgacaactatattagtacgacaacgaacttttgttgctattttatccaaaccttatattaatatctaaaatgaagtttacataattttattaatatttttcatcaccttcatcgtagcataagtcgttgccttcttgccatctccgctacagcattacccttatccttcactcattttccattagtgcataagttttatagcatgtgtaaatttactattttccaattttattatgtatatttatattagaatcgtacaaacctaatgatttataaagaacaatctgacatttaactacctatttgttatagtattattttttcgctgatataccaaagttagtattctgccatgtgattttcccttcttttatttgctctgtatgtcccatgtgtgagcaagccaagggaggttctggtgtggtattggtatgctggaagcctggaaagctcgagagaacgctctgtcaggttgttttactgatatgatcctacggctctctttaatttttttttttcatcatcggatggtcctgtttttttggcttacatggacctatcaggtgatgctttgggatttaaccttcacttatagagaaacggattaatggctaagcggcttctagatttgggggcctcccccccctgttttaggggtgggggtgaaatctcatcgtgatgtggatggtttggagtgagttatgcgaaggatcttatcataatcactcgcatggcaacgtgttaggcatggcacggtgatatgatggggcattgtgttctatgggtatagttgtacacctctggtcagtgtaaaactatttgaatagccatgtatgtagttacgggcgatcgaggaggttagtcgtaattagtctcactattaattaacttaacataataaattggtgtagtttagatggtttggttggacctgttcaatatggtgtagcgttattcaacggagattaatgttaacataattaattaattgttttactgtattca

SEQ ID NO: 47376 - DNA, 601 bp, Oryza sativa
ttagtttgatttagctaggaaacgtatacggtataccatcctaaatgttcaagtcttaattcaacttgaatgcaatgtcaaaacattggagagacaaatccgagatataagcaatacaagtattattcacatccaaattgattatgaaatagaaatttgatgatatatgtcactacgtacactctatgctcttcattttttttctttacaatttttcttgacacgtattgcatttgagggaaaatttaactttttgcaactcaagtggccactctccaaatgccattcttaaatttgtccctgtaatttgccacaagagagataaggctctttaactttgttcaacatacgtatatatggcatgatacgtagacgcaccaatgtggaacacgtacggaaatgaagggcatgttcactttattgccacgttcaatcctaccaattttttgtgttaccaaatttcgttaaggtaacaaattaaccatgatctttaccaatggaattctaccaaaatttgatagtttcagaacactagtgtcttgacagatttacttgacataggtacattggaattccggtgtcatgtatgaacttcacagca

SEQ ID NO: 47377 - DNA, 663 bp, Oryza sativa
  unsure (1)..(663): unsure at all n locations
cttgtacatagaaattgtttctgtggtagtggctgttgatgttcctattgtcgcgaacgtccaccaccgagcagaggtggtacatgatcaaactgcttatctttggctcatattgatttgcatattagaccgtccaccaagcatagctggtacatcaatattcattagttcagattgatttgtagtcaaaacagatatacggatatacctagaacagtcaagacgacattggtttgcacgcttctaagtctcttccttgaagtgcaaattactgaaactttggtttcaagttttctcaggatttttcctgaagtatattagtggaacacttcaacaatatctagaacagccaagatgtttttgcatctgacaggcgctgccagcaatatgaagagaaaaaaatgaatttaaatttcaattgtggtgtttggaattgtggatttgaatatggttgaattttatgtattattaatatttatgtttgaattattctcctgtgaatcaagaaataaatatgtagtatatatcaaaatagaagagaaaaagaaatagaggctaacaaatggnggttactgttgcagcttgagccataattttgggatctcgaaaaataggtgtagccccatttaacttttggggactctaaaatcaggcctattgctg

SEQ ID NO: 47378 - DNA, 1979 bp, Oryza sativa
ctgaaagagtaaattacacctacggtgcatcaacttagcagatgggtgtaatttggtgcaagaatttgagaaatgagcgttttaacgtaacaacttggcagataggtgtaatttagtaccagaactttataagtgatcacataaatgcaacaacttgcaagatatgtacgatttcgatacaataagttaacaagttatgcggcaacttaattatttggagcacttttttatacatatttaatttttaagtacttattttgacaatatactagcgtggatttgtatattttaagtacctagcatatgcttagctaagtttatgtatcaaatactaaattgtcaagttcttatactaaaacgcacctacttatcaagttgttgcactcgaacgttcaattctcgagttattgcactgtatcgcacccacccccgccaaattgttgtaccatgtgaaacaaggaaacatctttgggattgagctattcccattatcggaacgaaaccattgtgattgaggttgcgccaggccatatatagcttagctctaaatatttgcaccagccagagacatgtttacatttgtttaagccagcatattacaatactcaagcacatttaatttgtcaaagaaaggaagtacatctatatggtactgatatcaaccatcaaatattctatcagataaatccaatagcaggaaagctcgttgcaacaacagaacagctcttacgctcgttagagagagaatagcttttacatctaccgattctcctagggagctcagcgaccccattagtgtcttgatagatttagacataggtacattgcaattactgcgtcatgtacaaatttcacaacccctgtatgaaaatttcatggcatagtgttgtggccaagattcgtgggctagaagaacataacactgattacaatgttccaacaacctgtgaccctaaatatcgacatgtccagagtcaatacattgttgataagctaatctaaaactgaaaaattgatgctgatgcagccacctgagattatttagtttttattaactagagaggttgccccctcccgtttctattaaagaaacatatatttttacagcagaacacctgagattatttagttggaagtggaaagtgatgtggcaacttcctagtgcatgcagtgcagagatggtttttttctgtacaatttcatttgcgtcaaaatttttgtttgaaatcagttttgtttagttgctaggagatggtatattggtagatatctccacaatatggatggagacaactgaaaatcagttcttgaaatttgatccccttttgtttggtgtccaagactcatgataatctaatacgtacctgcttggacgagctgtcctacatgcacattgctagtcattgagtaggcatagaaaagtgattttataaaatgaaaatgctttcatatgtgtatggatttagctctttgccaccataccatttcatcaacctatttcgatctaaactggaaactatccgtatcagcatttgtatatttaccagatttctacaggccccaccatatcctcatttcgaacagattgggagtggagcggataggacacaatatctgatctatttaaacctatatgaaaaattgtctggtttgaaccaaagacatactatgaagtactcctaggcgaaaatctatagtatgtgatactgttacatactgcatggacggaagtacaacttttgatctctagagaacttgaggtacttccctcgttcctctaaatacatagaaacaatatatacaatttttataacatttagtttgatttagctaggaaacgtatacggtataccatcctaaatgttcaagtcttaattcaacttgaatgcaatgtcaaaacattggagagacaaatccgagatataagcaatacaagtattattcacatccaaattgattatgaaatagaaatttgatga

SEQ ID NO: 47379 - DNA, 1371 bp, Oryza sativa
  unsure (1)..(1371): unsure at all n locations
cgtagaactcattgagatccatgaacgggctaggcccacccgccggtgaaacgagttcgttctcccccccccccacgatgaagggcataagctccgccctcaaaatctaaagggacaaaccgggggagggcggtgagggtgtttttagagtttgaactgtcgggggcgcgtttccctttcctnnnnnnnnnnnnnnnnnnnnntgcgcctaaaaagatcaatcttcgcaggcgacgcttatatggcccgcctgcaaagatgcccctatatagtcttcttcctccccgagccctgttcattctccccgacgtttctctctcctaaagtgacttaaatatagggggggaggttttgaacttcaaatcttcgggggatttttctacggtacttagatctactcatttccacactaggtatgcatttttaagcttttagaccttaatttgtgatggatttatgcatccaaaattttgaaggaagagctccatgttttttaattttatttcttgtcatatgtttatgttagatgtatgcgtaatacttgatgcctttttgtgtagtggtttaatgtggtaacataaattctcgttttttaattttttgctatcatatccaccacctagttctagatctagatctagatcttgtcatgtatagagagagaaaaaaattttaaatgtctattcttcggtggaatcacaaaaatagtaagagtattttgtaaaacccccatgaatttgattgtgtaagattttcctaatgtactaatttggcatgtctgtgtaaaaaaattgaaataaactatgattttttattactttacacttaacttttagttaattagtttttaatagcgataagtttttcaataaaccctacaaatttggtattaattgtgcaaatattttatgtgtattttttagagatatagaaagtcgggaatggatgtatcattggccgaggtttttatctccatatagaaacgaagtggctaaatttattggtattgccaaggttcacgctgagaagaacaatatgaggaagataatttgtccgtgtgctgactgtaagaatgaaatagcctgggactttgacgatgcttttaaagtgaaggagcacttagtaactcgcggatttatggacaagtacgaaatatggacacgtcatggcgaagaacatgtggacgagcctgaaaatgtagttccgaaacaagttgaagacatggtgcatgacgatggttctgttgaggacaaaatcgacctagaggaaatgttacgtcatgcagaacccgaggtgctgatggggtcggcaagagggctaaataactttgaagcttaacaaaaggcagcaaaggaagttttgtacgatgag

SEQ ID NO: 47380 - DNA, 1419 bp, Oryza sativa
gttattctaagggggaggtgtagaatatatatatatatatatatatatatatatatatatatatatatatatatatatatatatatatagaaagtaatgaaagggccacgtaatctgaaaaacaatggccatcggatgaatgtttggataaaagatgaccatccgatcatagatatccatgcagcaaaagaaaatacttttagcgtcttctagcgtctcccctttgacacatgaataaaagaggcacttccctccggtttcttctagcgtctcccctttgacacatggcaaggaaaaaagagtccacaacatgaaaaatacactataggatattgatttgcatggaaaatgactacactactgtttgatctcgtgctgattaattaaatttgagaagtgaaataagtaaaacaaacatacatgaattggtgttgtgtaaaaaaaataaagatattgctgtagtagtatgtaatttatgggctacttcgcagtagtaacatttaggggcaagacagcaagaccactataattgtaaaaaaaaaatttaagatctttaacaaagatgcatctcatggtcgcacaaatgcacaactttgagtggctaatatgtaatggaaacctataaaaatactgtaggatgtaaaaatagacgtataaattaaatttgtacatgtcataccaagtaaaacttttactcctaaattaaaccataagtaaaagtttcagttaggatgacgtagataaatctcaaacatccatttttcatcctacaatagataaacaaagtcaagaatgatgtcccatgcatttacacaacaattttttatctaagggtttgtgtttaagaggaggagaacagagaagatcgaaaaaaaatacacaaaacgagttgtactattacgcatgattaattgagtattttttaaaaaagatttaaaaatgaattaatacaattttttaataaaattttctatagaacttcttttgaaaaaaaatacatcatttagcagttcgaaaaacgtgcgcacgaataacaatgaagattttctcccaaatcactattgccgaacacagccatgtttttattcaaatagaagttactgaaggattttcaatttgaaattcttgtggaaaaaacttctaaattattatatttttcaatccaaattgcaattaatcttatgatgtattaattagttaatcctaaattgcatttgatatgttctttctggtttattgagaccaacattgagctgggctgcaaaggaaattaatatggaattatgaatgtgccttttttcgctatttcaataatatgatttatagtagaacgatgttaaaagaaaactagtatatatatatatatatatatgtatatgtatatgtatatgtatatgtatatatatgtatatatatatg

SEQ ID NO: 47381 - DNA, 919 bp, Oryza sativa
atctttttccagcgctgcgctgcgtaccgcttcgtctctattttgagtgctgccctgctgccgcttcgtagctgttcatcttcttccccacaagaactctgccatggctttccctgaagattgagctatctattaattttttttttgcaaaaatcagagggtaggctagagcctgatggagcctaccccttaaaatcgccactgtcaattaccgattttctgctgttctgtcggtgattttgtttccaacatgagatgcactacgatagtgcagtgatactgagtacgtggttttggtctcatgtttaatcctcaaatcgctcatgattttttttcaaagaaatatttagagaaatgtatttcccttgatcaaatcttctttttttttcaaacgtgcacggcgcgtgagacgagagaatattaggtactaccaaatagtgctatgctaccggtgctgtcaacccttaaaatacatttaaaagtcacaaaaaatatgaaaaatttctgagacgtgcaacaccataacttatagtatcacacaagaaatcaactcaaaattcgctgtaatcgtgaagaaacaaaaaagataaactcgttccgtaaatagtgctcaaacagttcacatcactattcacaacagatttgtcttttttcttcttcacgattacaacgaattttgagtttattttttatgtgatactacaagtcatggtgttgcacatctcagaattttttttcatattttttgtgacttttaaatgtatttttaaaagttggtaacaccggtagcatggtactgtttggtagcacctgatattctctccgcgtgagacagagagaaggggaagaaaaggaggactccgtgcttttaaggtaggaatatcacaaaatatatatttttagcatgcccatttaacaa

SEQ ID NO: 47382 - DNA, 540 bp, Oryza sativa
actttaaaaaaaatctgaaaccgcgccatgtgttacgtcttaaaaattagaaaaaaaaatagaaattctgagagaagtattggattattgtttttcacttaaatcatttagaaaagaaataaaccaccactacacttcaccctcccccgcacatgcacacaacacaatactaccggtccccttttctctcagcttgagctctcccttgaatgttctttatagcgagaaataataaaaaaattaaaatatacatactgctttctaatctagctatttttgtattcataattgaaccaacaatttgaagatccataatacctatatttcgaaatgatataaaataaacaagaaaaataaaatgtcaataaattgaactatttggttccaaccagaaggactaacttgatggtgcaattaggacatatttattaccaataatagttatttaggattagttgaaaaagccactaaactttcaattaaacaagacaaaacaccttacttttaatttacacttaatttgttagacacgtttttcca

SEQ ID NO: 47383 - DNA, 805 bp, Oryza sativa
tgccaaaatatatatattacaatattgttttacattgtcactttaaataacgtcatctagttacattatggcatagtagtgttccactcctgaagatccttgaattcgtcacttgccgctagggcaccctctgggtcgaagaaatctcttttgacatgacagcactcatggtggatgaagtggcacagatcacgctgcacatttgtgatacctgtatcgtcaaagcttgttcgacattctaatcttggcaactgcatgtattgaaattaatcaatatattagtatcaaaaatatcaagagctgtctagtacatagtatagagacttacatcctccgcgttagtcctgtaccgtccattaaccttaaggaattcgcacgcataatacccgcaaaggaccgttcctcgcggttgcttgtgacactgaagaacatatcatagaaaaaagtagttataatttgcaattagtgaaactattggaatatataaagtgagtggagtattaccggccaataggtacgtactagcagcttctcccgtgttcgggtctgttctccacccttgaacttgtagtattggtatgaactgtatggatgtcataccgtttcagagtaaggaggatatttatttgtaatacatccatatacaaatgcaagagtcataataacttactactgtaagatggttagaaattctttgtattgcttgtgattgtaatcgagaggatccaagactaccacggttccgtctttagggtggatgagtaaacagatataatgatcgctacatattaacaacattattatt

SEQ ID NO: 47384 - DNA, 555 bp, Oryza sativa
aaaaatatttgaatttaaatttaaatttgaatcgggtatataaaactttctacttataaactttgggtctataaactttaggtgtataaactttaggtgtatagaaatgctatatataaaaaaattgaatttaaattcaaattcaaatttgaatcgggtatataaacttttgacttataaactttgggtctataaactttaggtgtatagaaatactatatataaaaaattgaattcaaattcaaattaatatttgaattcaaattcaaatttgaatcgggtatatataaacttttgacttgtaaactttgggtctataaactttaggtgtataaactttagatgtatagaaatactatatataaaaaaatatttgaattcaaatttaaatttgaatcggatatataaacttttgacttataaactttgggcctgtaatctttaagtgtataaactttagatgtgtaaacttgaggtgtataaactttaggtgcataaattttctaaaataggaaagtaatgcggtgccaataaataaaagtggagggagagggg

SEQ ID NO: 47385 - DNA, 513 bp, Oryza sativa
cttatttttctaacccgtttgcatcatggcgttcgtaaaataatgtccttaacgaaactagaaccatcataactatttttaacgtcgttactgcggaaagtagtcgtgttactatacattagccgtcgcgttactacgccattctagtgagacgaggattaaaaagaggtaaatcccaatctttagagaacaatatctctcacatcatatcttgtttttttaatttgtttgcaccatgacgttcgtaaaaaaaagtcttaacgaaactagatccatcatgactactttttgacgttggtattgcgagaaagttgtcctgttactgcacgatgaccgtcctattactgcggaatttcttgtgagacgagaagaacaaagtgatgggcgggggagggggtggtgggcaggttttgattcgggtttgacctgcgggagggggctttgaccagcctttgactgaggtgggaggggggatttgtgccctaggaagagtgggggaggtgggattgaccc

SEQ ID NO: 47386 - DNA, 655 bp, Oryza sativa
cagtaaatggaagatcaattccaatgtccttgtttgtactatatatattagtaaatagcagagatcctttgacagcatcagcaaatagaactacaagagaagcatttagtggagcataatcttctgcttcagtagaaatgattaaactcatatcactaagcaataaaatgtcaaaggccctcttctttgctaaataaagtaaggactaaggagcactgctgcagaataacaacaaaagcatcattatgcatcctatcaagtatagagaaagttagtgacaatttaattttcaacattgatgagctgttccataattgtcaacatgtttgcaatatgcagtatccagtgattcagacgatcacacccaaactttaatttcagaagcatgtacatatcaaatataaagaactaaagagtacatttttgttttgatattgacataaactctaaaagaaactatagcaaatacttcgattatttatgacaacttaatgcaatcatgttagggtccaaaaaccaattgtaatctcattatcatctcagagaaagcactattctcaaaccaacaacaggggccagccagatgttgagtagtatcttccttcattaatctaacatatgcacaaaaagagatagaaaatgtacagctcatgtg

SEQ ID NO: 47387 - DNA, 533 bp, Oryza sativa
  unsure (1)..(533): unsure at all n locations
tccctcccctcctccccctccaccttgccgccacccgagcggccgccgcccgagaggccgccggcanagccggccggccgcaaggacggcggcggcggggcttctcgcatcctctcttccgggcgggcagggggccgccctaggcagagcggcggtgaccgctagatccggcccgctccggctggatctggtgggacggcggctggcggcggcgagggtggcggtggctgaagacggcggggatggcgacgtcgatgctaagggcgcgcgacgctgggctgcggtggctgaaggcggcggggagggcgacggcgatgctaagggcgcgcgacgctgggcggcggtggctgaaggcggcggggatggcgatggcgtcggggacagagttggccgatggcgcgaaggcggcggtggtgctcccgtggcggcgacagcgcgaaacctggcggcgacggcggcggtgccccccagatccgcccctctcagccagatctggagggtggaggcagttggcaacggcggcgacagtgtgg

SEQ ID NO: 47388 - DNA, 873 bp, Oryza sativa
aggatacggcggatcacgagtggacttacctcccctcgtcgtgatcgctttaacattttcaatggaggagtctggttgccccggaatcctcctagtttcatttgcagggactaaggatgccaactgagctaactaagtttccatcatcttattaaagctcagccggttctgaaatgcggaagcaaagccatctagtttgacatttatgttctctaagatctaatcattggcagcaagctttttgcttaccgcatcagtggttttagcttgcgcaaaaacaagatccttcaaggagggttggttacagaagttaccgttattatttcctccttgataatatggtcgtgtttggttccacccctgacctccttgtagacgatacccgttgctgttgttgcccatgtgcatcgcctcctcacaggtttccgggcagtcgttcccagaatgacccatgccgccgcagacttcatacatgacatgtgagtccaaggccttggcggtgccttgtggccgtttcttgtggtcgtccaagcatttcatgaggaggtccagcttggtagcaagtagttctgtctccttgatggtgtgcatgcctcgctgacgggtctagagtcgttcctcgctccaacccatatggagaccatcttctctatgagttcaacggctccttgaaccgttttagagaagaacgctcctccagctgttgtgtctaggtgatcgcgggacatcgaggtgagcccattgtaaaagttctgcaggatcaaccagtcgtccatcccataatgaggacaggtggccacgtactcctgcagtcgttcccatgcttccggaatggactcgtcccttgtctgctggaaactggaaattcgtcca

SEQ ID NO: 47389 - DNA, 1195 bp, Oryza sativa
tttgaattgatgcccgggcatgtacatagtattaggatgtgtcacatcttatcctaaatttattttttattggacatggaagtatgtgaataggctttaccattctactatggccttgtttagttcccacgtaaaaacatttcactatgtcacatcgaatgtttggacacatgtatgaagtattaaatatagacaaaaataaaaactaattatacagattgcgtgtaaattgcgagacgaatcttctaaacctaattgctccatgatttgacaatgtggtgctacagcaaacattttctaatgacatattaattaggcttaataaattcgtctcgcagtttacagcaaatttgtaatttgttttgttattagtatacgtttaatacttcaaacgtgtgtccgtatatccgatgtgacacactaaaacttttcacccctggatctaaacatagcctatgtatgtagacagatctgtccatatatgtagtactccctccgtccctaaatataagggattttggtttcatatgacataagtctatttagattcgttgtattagtatatgtcacatctcaccaaaatcttttatatttaggaacagagggagtattagattatatcgagttgacatgtgacagagagagtacaatagtggcattttaatgtttactctatctgtcatatatatgatacattctaataatatgaatctatatatatctctggctgtgtttagttcagcgcaaagtttgaattttggttgaaattggagatgatgtgactgaaaaattgtgtgtgtatgacaggttgatgtgatggaaaaggactgaaaatttgttatactagaatgtatcatatccgatccaaggtttttttttaatggagggagtagttcagtaattgaggccatctaaaccagagggtagggtggattgaaatcctctgccttcaaagacacaatgtctttgtcactgacagatagccccatagtttattgggcccacatgccagtgacaaaggtagtgtttagattcagggactaaaaactaattacatgaatgagagctaattcacgtgacaatttttaagcctaattaatccataattaatacatgtttactgtagcatcatatatgctaatcatggattaattaatcccaatagattcgtctcgtaaattagttcagagttatg

SEQ ID NO: 47390 - DNA, 725 bp, Oryza sativa
tagtatcagcttgtttgcgaggacccaagcgaggtcaaacggaggggggaggccgccattgaagaggctcgctctgcatcgttgccaggtacgtacgggcgcgacgaatgcttgatcttcttggttgcctaaccatcgatttttttctttgttgatttgttttggttggattgatctgtcgcttatattgcgccccccgtgtgcttgattgagctgctcgtttccatttctgctgaaatggagatgaaactgtaggaaaaaaaaaaaagcccctttctctgtgtgccgcggcgcagcgtcggcctcgccagcggcggcggcggcggcgccggccgtggcctcgcccatgctactgccctcccgcatggccgcgcctgcctacgggtcttggaacggccggcgggggcaaccaccacgcagatgccggtagcggggtagccggattcaggcccctacgtgcttgctgggctcgcacgcgtcctgctcgacgaattgccgagctgagcacagaaggaaaaaataagggagggaattttgcttgttctctagtctttctttgcgacaccgcgtttgctaaagtctgctctgattgtattacgtcctggggcagatctaacttctgtcacctctgttttttgagagctgcttctctttgatattcctgagacttatgataaggatatagcttgctgtggtatgaccggtctctttgtgcatccaaaggg

SEQ ID NO: 47391 - DNA, 674 bp, Oryza sativa
tccaaatggagtataaataatttggtacgtattaattcagattttgaattatgaaatcatcaaaaaataaagtaaagactctaaagccaattacaactaaatagcatttatttatttgaattcagtaattgttgtgtggtgaatattttggccatagaatataaggatgcatatgattttatttatattaatgtgagaattgcttacttcttctcttaatgaaggaaatgctaggtaatttctcgtctactcattcattatgtgacaaaaccaatgaacatgcaaccaataagtactaaaatgacttcttgagtttcgataaaaaaaattaatatagcacatagtgcctacaaataggacttagacttttggaaaaccaaagaatgaaataggacttagacttttggaaggagggagtaaaaaaaatgtatggagtaggataataataatgtggacacttctatatgagagcttcaaattagtatgaagaaagatttctgatacaataacaagattattaatttctatggtattatggaacgttgagagtggccttgtatatgcaagaactataaatcctcaagaagatcctagagtcttagaccaatcgtaagtcaaatgcgagatttaattttgcagaaatcttgaagagttgtttggatcccaagagaagt

SEQ ID NO: 47392 - DNA, 527 bp, Oryza sativa
aatcggatataattcaaattcaaatttgaatcgggtatgtaaactttttgacttataaactttgggtctataaactttgggtctataaactttaggtgtataaactttagatgcatagaaatactatatatagaaaatatttaaattcaaattcaaatttgaatcggatataattcaaattcaaatttgaaacaggtaaatttgaatcggatataattcaaatataaatttgtaacatgtatctaaactttagatgtgtaaacttgaggtgtataaactttaggtctataaactaactttaggtgtataaactttagatgtatagaaatactatatataaaaaatatttgaattcaaattcaaatttgaatcggatatataaacttttgacttataaactttgggtctctaaactttagatgtgtgaacttgaggtgtataaactttatgtgtataaatttactaaaataggaaagtaatacggtgccaaaaaaggaaattaggtggagggagggaggggggagagg

SEQ ID NO: 47393 - DNA, 631 bp, Oryza sativa
gatcctatctcaggtgttggtctctctattgcagcatatttcacgatggaccagcagtctatcactgctagaaaaaatatttttcaaggcggacaaaatcagtcttcctaggcggatggccggtccatctgtacaaagaggtttgcgaaaatgaagttttttcgcaggcgtgccgcctggtcacatagccacttgcgaaaatgggacaaatctgcctggaaaaatatacgcgccaaaatataacttttttctgccaattttttaatattaacttttaattaataatgttgcaattagttaagtaatacataaatacatttaaccattaacaaacatttaattcggatataatgcatatattgcttaagttaaaagtgccgtcaatacatacagtaatatttacaactaatattgtcatttcgaaatgcacgaatataatttttattatttcatcgtgttggtataatcccgaggagacttgtattaattattcactcattgctatgctgacttcacttgcggtgtatgaagtgacagagatcccgctgtatatttttaatgcttgtgtcatcaaagctagttcgacgtttgtgtcatataatattctaggtgaaaccccacgcattgctac

SEQ ID NO: 47394 - DNA, 4983 bp, Oryza sativa
gggtctaggtcatcgtagcttaaatatattgcatggtttatctcttcaggcattccatccactaaccatgaaggacttcttagtacctttccccactcaatttcatttatctctttgtggttcaaaagccctgcaatcgctttgatagctagcggtaaaccaccacatctttctaaaattctaaagccagtactctttagcttctcaatcgcatactcatctttcaaagttgaagcaatctgcaagcggttgaagcccatgatgttaatacatataggctagatttgcgattgatcgagaagggtaatttgtgcatttgccaaacatagaattcttagctattatttaagttagcatttctattacttcccggtctaaatttaattagagtaaccttacagttggttgtttacttcatactccctccatttcaaaatgtcactgactctaagttgtcccatttgagatgatagtgcttcatctttagccaaatgttgacaaaatgagcgaccgacatcatgcatgctccattcactattgggcattgcctgtataaggttccttataattaactcattgtaatactcctttcctagctcttccggttcatttgattttccattaacaaaaccttcacttatccaaatttcaacaatcaaatggttattgaggcattgcttcaaatgaggggctagctaggtcatcatagcttaaatatattgcatggtttatcttttcgggcattccatctactgaccatgaaggacttggtactttccccactcaattttatttatctctttatggttcaaaagccctgcaatcgctttgatagctacaagtaaaccaccgcatctttctaaaattccaaagccagtactctttagcttctcaatcgcatactcatatttcaaagttgagacaacctgcaagcggttgaatcccataacgttaatagatataggatgcatttgcttacctacttttttttttactttctttagtaacgaagatgatcattctctttgttttttgatctagaagggtaatttgtgcatttgacacacacagaattcttagctattatttaatttagcatttctattacttcctggtctaaatatatttagagtaaccttacagttggtttgtttacttcataatctgcaaaaactctccaaccctttgcgtactttccaatatgtctgcttcactacagtataacacatcatatatatcttgcaatctctatttacattcattaaacctataaacctatataattcatcccctcttagtgtacttaatagctatttcctgatattccgtgcttccacatcatcaagaaatgcattgcccgttcgatcgaatctggatacccctaataaatactttgtctctctattcacaagcttactattgtaattggacccatctcaatccatattttcctctccttctccacacccagcatgagccaccggcctcatactctgccatgacgagcgcaaatggcatctcctactctcccacatgacctcccgatcgcttcacactccccttaccctccaactccctcccccacttctaaggcccagcgctccaccacaatgtgtttttatacaggcacggccttatcactattggcttctataggacaattttatatgtatgctttgtgtgatttgataattttgttgtgtttatttaattttaggagcaagtggcttatagtatgctcaagcttttccctaagcaggtatttatttggctggatcacgttgaggggtggataaaaatctgacacaatcaatgcgtgctgtatggattctcaaatccttccctgtttatgtgttatgatgctaggcatactcctgttaatgcttccatataatgactgcaagagtataatgtttccttcaaatataagatagcatattgataggttggtattccgttctccttatcttaagctttgtatactcctacaaatttatttgcagaagcatggcatttttgtgcctcgtatgtttatgtgccattatgttcacataactaggcctcactatattgttgtccatgtctactcttatatctccatcttacccttttcacttagaattagtcactttttttaactagctgacctaagttggttctgtagaatacgtcaaacttgctcagagttttgccattcactaactgatgatatgcttattttctcttttgctccaatcagataaaaaaaagtaattatcacccagctcctatattttcttgatttgcacaaatgattctgaacattcccctagagtttccctataaaataccttggattgccactacttcttggaaggatgcgcaagacggatattcaaccaatcttcgataagatcgcagcacgggtcaccggctggaggggaaaaacatgggaccagtagggagatcaactctggtcaagtcaatgatgacagcgcagcccatctacctactcaccaccctcaaggtcaccaaagaagccgtaggcctcctcgaagtgaagagaaagaggttcctatggaaatgcaaaataaactagaaaaagatgtgcctcccaaccttgaaccgggaaaaaccggaaccagctcctcagccggttcgatttgctgcaaggactggacatgcaatcgaaccggtcacaaccagatgaaccgggcagtttttggtgaaaaccggtgaatccgacgcctctgaaccggcggttctggcgagcacgtggagcaggctacaaaggcccactaggcccaagtcatgcatgtgtcatttttactgaataaatgaaaaaagggtgggaagatgggattcaaaccctggttgcctcattacaaactcaataactaaaccaactagaccacttatgcatgttgttcaagggagaatatacatataatatgaatgctccggttctgcagtcgaaccggacgacccagcggtcagacctgtgagccggtgaacaagaagcttgaccggttcgatggccggtccggctttttgcactatgctcccaaccgtgcaaagaggactgggagttcttaacatggagaagttcacgagggccctgcgcctgagatggctctggcacgaatggaaagaccccaccaagccgtgggtgggcctcaagacaccatgtgatgaaacatataaattgctcttcaccacgaccactacaataacgattggggataataaaacgattcgcttctgggactcatcctggctagatgggcaaaggcattatgccactaccctatgcagtctccaaaaataaaaagagaaaaaaatactacgtgaaggaataaaaaacgacgtttggattgatgatctggacttaaatggcagcacccatttcacagtggatctgatcaacaaactcgtgtccctgtgagacacaacccagagcatccttctagatcaaaacaagcctgaccatactgcctagaagctttcaagccatggagaatacttgggagcgtcggctgatagagcgatgcatgggaaccataggtaccaattttaacggcttaatatggaaatcatgggctcctacaaagtgcaaatttatgcatggcttgtgatccaaaatagagtttggacttctgatcaactcgtagccagaggttggccaaatagcgggacatgccccctctaacgtacgtcaactgaaacagcaagccacctggttgcccaatgtagatacaccaaaagaatttggagcctaactaccgcatgggtagcatatcaacaactagacccgagtcactaggacccatgccaaagcgttaacgactggtgggaaatgttagccaactcaaaggaagtacccaagaaaggcatgcggaccctaatcctactcgtcgtctgggaaagctcgaaagaaagaaattagcgggttttcgagcacaaggagatggcaaaattaaaggaggcaagaacttgggctatgggaggagcaaggcagcttcgggattttgtttcgaaccaaccataggtgccatgtagctctgtacattttttttccttacccctagccctaggggttgtattttttacctctatatttaatgaaatagcacaatctcgtgctgattccttcaaaaaaaaatgaaactagttaaatagcacccattccacatggttttattattaggtggtggtgattgtgcatgcataactgacataacatttgatccacaagattagagacaaaaaatggttggcatacctagtatatctattactccttaaaaaacatctagtggaggtgacagtgaatctgccaccccactattgctttggctgttttcagaaattacctacagatattttctaatattgtggaatcatcgaaaatttggtttaaacaagtgaatagcatataatcaaataaacaaacaagtgatactaagatatctattatatattaaaagtcccatgaaacttcctacaaatgctcctaagccaccatgtgtcgctcctacaaacgcttataaaccgccaagtggcactacaaaatctaatcgttcatttttctttaaattagtgggtccaatattttcaaccattagatctaataaaaaacaaaactcccctatctccatgtatccccatctcccctcctcctgttggtacgtacatacttcactcctctcctcatctctttttaatttcttaatctctaatttaagccacatatcttatttttattgttaattaaataaataatttaatatctatgctgttctatgcgccatatgctttctatggcaaccaaatataacaaggaaaaaaaatttcactataaaaaagttaataacatattttatgttactttaaataattctacaaacatgtgtcgctaaattgtatcgacgatatccaatctatctattatatagtgaaagcccatcaaatttcccataaatgctcctaaacgccatgtgacgg

SEQ ID NO: 47395 - DNA, 587 bp, Oryza sativa
tcaaaagattaccatagggtgagcctaatcacggtatatctggttgaccgcatatacccgcgggcacgactacccgaatagttttactctgataaaaggtgtacacctgtacccacaagacacagccccacgacacgtttccgtgcgccgacatgccaccacgacataccggaaagagcccgtaacaggacccttcgcataaccccctctaaccaagcacaccacacctcaggtttcacccccactcctcgcaaggcagcggccagtcccctctcgtgcctacgtgaatccggaagccgcataggccgtcgcagggcccatccaaactccatcacgcccacccttgcctggatgcgtcggctagaggaaagctacactacaagcccagccgttgcccacgctggcttgtggtaagtacgataagttcttccagggcatcccgcgaaccggtccttaactgccatgggtgcgaccagcaaaaccatgcacccacagcccaccatgtgatttattttaattaaccaacaccaaagcggtggcactaatccaacagtaccattagaaccaacagtctaaacattaatagg

SEQ ID NO: 47396 - DNA, 777 bp, Oryza sativa
  unsure (1)..(777): unsure at all n locations
aagattagctccttcatgctcttatacggcgataaggctatgatgccaagtgagctaggggctaattcgccaagggtaatcttctctgggggtgaagatgggcgtgaagtctcacgcgaactcctagaaggggtgtgagtcaaagcacttgaacacatggcgaaatacggcaatgacactttggcatcctataacaagaaggttcgaccgacnnnnnnnnnnnnnnnnnnnnttgtgctaagaaagaaggcgaaccagatggtcgttggaaaactgaagtcaaagtggaaaggagcatatcttgtcaagcacagatctagaacgggttcttttcagctggcgacattggagggcgaagagctaagccactcctggaatgccgcttcgctcaggcggttctatgtgtaaaacataggtggcacccattcaccagttgtaaatatgtaaatatggtgttgtaagccttcagcacgaaaatacaaaaaaaaggaaaataaaaaaagaaaaaaaaactagatgaagggttattatccattctggaggcccgaaccagtataaaaatccctgtgtgtttcgtctcttgtgtgaatgatgtcttggaaaaaaaaaacctctaaggcaaacacctgcttaacgaaaatgacaggggtgcgaagtgaatcggtcaaagcatcgctcactgaacactaaaattacaacagctcgttttcgatcatgcatcgatcatcgcattaatcggcttacaaaaagcacttagcatttttaaacgtttgctaa

SEQ ID NO: 47397 - DNA, 872 bp, Oryza sativa
tgtccctcctccccctcccaatcccctcctcccaatctctctccatttttttcgcttttttctactcccgcgctctcctcctcttgatttttttctttttcttcgtttttctctccctcccatctctcattttttcctcctatccttttccttttttttagaaaaattaaaaataaattggtgaaatcaagacttgaactcatgatctcatggttcatggcaagctctctaaccaattcaccatgtgatgttatgtgaatagaaaatattgtttgcatgctttatatgtttgttcaaattgttattatgattcggcagcaacattatcacaaaagtgtagtaacaagatacgttactactacactgttggtagtaacaacatggtgaaatttgcagtaacagagaacatacatagtaacagtgacactatggtagtactgtttttgtagagctaaagtattttaaatctcaatctttagatagcaataacgtacacatcatgtcttatttttctaacccgtttgcatcatggcgttcgtaaaataatgtccttaacgaaactagaaccatcataactatttttaacgtcgttactgcggaaagtagtcgtgttactatacattagccgtcgcgttactacgccattctagtgagacgaggattaaaaagaggtaaatcccaatctttagagaacaatatctctcacatcatatcttgtttttttaatttgtttgcaccatgacgttcgtaaaaaaaagtcttaacgaaactagatccatcatgactactttttgacgttggtattgcgagaaagttgtcctgttactgcacgatgaccgtcctattactgcggaatttcctgtgagacgaga

SEQ ID NO: 47398 - DNA, 600 bp, Oryza sativa
ggacaactgcgcacgtcgaaggacgtggttactcaacagtgttggaaacagtagatgtattaatttaagatttttcttaggatcccccctttacatgtccgtagggggctatttataatcctattacaggttccccattagggtttaggttttacaggggaatttacatggttgcccttatgaaagggacatttacatgggtacacagtgtaatttggatatatgggcctctaatgggctaatgggcgaatgttggcctaatggcaaatgggcctgatggttcgactggccccttaggcctctttgaagttggacttgttgtgacgaagtctccttccttcggcatacacccttcgccatttactcttcgcccaaaatgcctttggtttcgtgggataccagcgcgactcttcggctttcgccgtctttgcttcatagtcttcgctatgggggcttcgcccaaatggacttgatgccttgagcttgaatcctcgctaggtacatggtttcggcaggcctggttggggggtctcacgacataccaccaacaatatatacatatatagcaaatctattctacacgcctcccttagaataact

SEQ ID NO: 47399 - DNA, 678 bp, Oryza sativa
ttccgttgataaccatttcacggtatacgggcttgcacgaatacctaatctttggtaagcccttaattgtgacaatttactcgtttgcgctttgccagtctttgaaaggaggctgaacgcattctttacgcagtggaacctgcgaagaatgtggaaatacatagcaaatcgccttaagaacaaagtcattcggaaaatttgcaagtttaaggcaagattctggcgaagatttccattccattcacataaacataaatgccatttcggctacataaaagcaaatcgccagcagcaaacaaaagctgaaccaagaaaaatttacatcaaaagaaaagaaggcctcacacctcacgatggtcttgcatatcttcgtctcttagtagttgcagtagtcggtcagggccgcggcctccttcttcgtcttttccaatttggcctttaagaccttattctctaccttcgcctatttaaaggcgtcggcgacaacctcattgtagggatacgcgcaggctatgataacataaatcaaaattttctagcacataaaccaggaaccatataagtattagatcatagatcggtaccactcgacatactgtgtccacattattaatttggtatctttataccatgatccatgagacatgatcatcaatttatacatgtgctgatcattaa

SEQ ID NO: 47400 - DNA, 587 bp, Oryza sativa
atgcagaatgtgcattaaaatccccgtccaggaccggccggggtacacaaacgacaatgttgacattcagatccacgtcttacaaacatcataaaagtcttacataaatgcagcggaaaaaggaagacaacaggagctaagccttgactagaactgcagcgggaacaccactccacaagcaccctcgatggcacggacgaagcctactcctcggagaaacctccatctgacacatactcgaactctggggttgggaaaaaaaatagagcaagactgagtactacccactgtactcagcaagtcataccggaataggggtatgatgcagggaattatcaaaggagagctagagtggttcatttgcataaagcgagcatttataaacagaagttgaaagatttaaacagttgtaataattaattattattaactatccactgtccaacgctatcccacgttacgacaggcccaaccatccacctaaactatccaaattcaaaagattacactagggtgagactaatcacggtgaatctggttgaccgcctataaccacgggaacggctactcgaatagttttactctga

SEQ ID NO: 47401 - DNA, 618 bp, Oryza sativa
caatttccttttctacgtacgctaactcgtgattagtttggtaaatgttttacaacagtagctcgtgaatcggtctttaatttttatgagctagatcatcgaaaccgtcaaaaccgtgtgctcataacccaataattaagcatagatgaagcattaattatctttatgtgaatctagtgtttttaagcatgactaattaagtaaagttaaaataatctagccaaaacattataaagttctaagctagtccaattataataccggttagaaagaataggtgatcaacaatcaaaggggtacgtcacacgcgtgaacttagatatcgtgagtattggtagaagatatcgttagttccaaactaaatcttgtaaactttatgtacacactgttgtctggaacttcaggattgttaacaatggaaaagaattgcacttttgtcaccattattattaggagaggacacacgagaaagagacagggatcgctcccattaccatctactactaggcatcaaacacaactaatacacacagaaatattgaacgattgttaattagagctagccatggacaacgctcgagagagtgaggatgagcattgcctgtacgcgcaggagct

SEQ ID NO: 47402 - DNA, 781 bp, Oryza sativa
  unsure (1)..(781): unsure at all n locations
tgttcaaggtagcacggccgaagatggcgttgtaattatatgggatgtctgttggtatttcttaacgacattactagaaatataattctcagcaatggcacaaaaatacttctggtatattatggtcatagagttcatccgcaagagcacgatgtactattgtagcatttcacccgagagtattccaagggtatcgtatttgtttaatcccataggaagattataatagagagaaccaagctaatatttatatgttacttgtaataattatgtctaagcaggggttaagataagcatagggtagagtgacacacaaggataagactactcactctcatattaaattatctgagctaagtggaaagaaaatagaaaagaatctattcctatacttctagtatacatattatacatacatcctagctataagattaactagctaatgccctctttccgatgccctcctggtacttcgagaagccacccctgactaccaagttctttacgatagtccgtcatgaccatacaactggggctaaataaagtacaagtcttacgaaagaagaaatgagagctactagaaccatacccaaactcttccgaagacttccgaactcagacttctattctatttctactccactagcttgagaatactaaactaagcttgagagagtatgagagagcttgcttgggtgtgttttgaaatgagagagtgagggggttatatangtttgtaatgacngnttgaaaaggtcagtatacccacccaccgtcattg

SEQ ID NO: 47403 - DNA, 634 bp, Oryza sativa
  unsure (1)..(634): unsure at all n locations
cactaaatttgattagtagtatgttggcttgggaatctggatgacgacttttttgtgatgacatctcagaatgatgaatggaaaatttgagagtcataaaaaaagttaattggattcataccattacaaatatacgaaatttaaaaaataccactaatattcataatgttagctaagtgccactgaaatttagaaaaattaaaaccgtatcactccgtcctattttccatccacttttctgtcatctccgtcaatttctatccttgcaccagcccggcctgctgcctccgcacgaactcctcgtcgtcatcaccggcgccgtcgtggtcgtcctcctccagcttcatccgcagcgtggcgatcttggacgccgtgtgccgcaggccctccacgctccagtcgtcccccggcgacgcgccggcggcgagcacgcggagccgctgctcgtccacgcggtccgtgtcgtcctcccgcgacctgggtcttggactgcggtagcgccttgatattgctcggcagctcggtggccgcagcgtgccgtcccgccaccgncgncggacgcgcgtgctttaagaagagcacctgcaccaccatacggagcaggaggagctcgttctgcgccgcgtgcatgcac

SEQ ID NO: 47404 - DNA, 661 bp, Oryza sativa
agcgcaactgttcggctttcgccgtctttgcttcatagtcttcgccatgagggcttcgcccaaatggacttgacgccttgagcttgaatcctcgctggttacatggtttcggcaggcctggtcggggggtctcacgacataccgccaacaagccccacacaggcaagggtgagataggagcttcggccgagatcgtgcaaaccatgtggtatggtaggaggcgccccccctttcgaccgacgctcctgccgaaacctatattggagtcctgcagaaaatgcgtataccttgtgcgtatgtatttttacggttagtgattattcttagttttcgccttttgcaaacggcgaagccatccttatttcttcctgtgggccgcaatgaacagcgacgggcttcccttcgtgggcctagcactgtgcggctcaatgaatgggaatttaccatttcgcctacccttgtgacacgtggcagcttacgatttggtgggaaggcgaatcgacgcctgggtgggttatatattcccccccccccccgttttcaccgccgcacccccgtcattttcaccgggagctttctcttttttccgcttttactttacagggctttttgagtaatagaccattccaatgttccctttttcggcaccggccacactttt

SEQ ID NO: 47405 - DNA, 2610 bp, Oryza sativa
caaggagaatttaacaaaaattctccgggtcacatttgaatttttcttgtacgtattttaaggtttgccaatttcttttcgaattttaattaattctattattccttttagaagatgatttttattttgggatgaatttatcaggacgtgacaaatccaccccccttacaagaatctcgtccccgagattcgaggaggctagcaagaagataggttgggcggtcttctcttcttgtctgacttcttccgttgcgtcttgacgaacttccagcaaaactttaccactcggaactgcttggcttgacctcctgttgcggatggaatcttctcttcacctgacttggaccaggatgcaccttttggctgactcagactaggttgcggtagtttaatgatgctttcgttccagaacttctcatgattcatatctttggagtcaacctcattgaagttaccaacttcatgtcatgcgtccacactagcttgtcattactaggataccatgtttgtcatcatgagaataccatgcttgtcatttacttctaacttgccaccaactgcctcatattagctttcctggtctccgggtgctaactccttctgctattcgatgcaagggtcaaccactctaactacaagttatgcttcccaagagaaccaatttatcccacttgacatgctttgacgtcttcccgaatgactttgctgctggacttgttattgtctgatcgtgatcctgccagacctgaagcttcgttgctagaggtgattttaatctgacctctgtagactatcttcgaacatatcacttggttcataactgggaatagctcccacgaacaagcagctcggattcactttctttacattccatttacttcccattattatcttcaggttgtcctcagttagcattcaacgtattcctttacacctttaaccttgatgtgttctttcccattgggtcatctcccaacacatggcattccctggtaaccggtgcttgcactttttactccgtgtagcatctgatactgagttgaggatttcactccttgccttcatagaaacacttttacctaggtcatcttgcttacttaatgacaaggtgactgttgcggggcaattactatcaggggtcttccttgagcgatgcagagcatgtttctgtttatcaatcacctttcggcctactttttttcatgctggagaacatctttgccaatctcttttatcgatcatctttcggcttatctctaacaggtggtattctttaatgtggattgcggacgcttctggggacgatgaggtccttcggcttgctgcctttcagtgaaaccttgatgtggttcgtcaaaaagctgcactgactaccttcagggaaatacattgcctgctatctgtatctatgccactagggtttaattgccgatggtcatctttagtgcttcctcgagatggggagcatccaaattgttcttctgccatatcacctttgacctttttctgataccaggtaaactaattaccaaccatcgactattatgttctcaaatattgatgtctcctggatctccttatctgttggcaggtatatccgatcttatcaacgtagaggcatgacgagtacccttcggggtttcctccaacaatccttatcttgatctgtaaaaggcgtatccgaactcctatcctcaactactgtctcgttggctttttaacccaacacagtttaattggttttcttttccatcaacaggttggttattaactcgaggttggaacacagttcctctgacatgagaccctaggtctcctatgtcagtaaacaattatacacatgatcacatatccgcatcttccaaaagaatcctcttagaacttgtctgtattactcatttctcccttattacgcgcatacaaggcactgccgtaaacaaaaagggaaggtgcttatcatcggtacattgtatcctcaacatgaatcatccataaacatagtaagctcactgtttacagacatgaatatatttattgattacatgattgctgcaaactttcgactgcacaatgataagtagcgaactgaaaaccacaagcgtggctgctcattttgattctggagcgatatagctggcgttgttctggtgactgcatcatccttgattggttctgtgatgatgtaataggactgcctattgctatcattcacaggagaagcttccttctgattgctggttgaagcgaataacggtcttctgcttggtatcgccctcctgaggttgattgcccttcgctcggcctggagtaggtcgagaaacaacttcttccatcgacgacaattctttgctgaggctgtcggtgcagagaatggttggtgctgaaggtattagtgctatgatttgttgcagagttaggtggggcaggaggagcattggtgctgtggatgatatcgtcaatgttgctgttggagctgactagctggtgagacaatcgtagggttgttcgttggatttctgcggtcttggtcaacaacacactgagttggcaatccgtgggcacatggtttgcttcttcgcacagaaaacatgtcaccttgcgagtgggaca

SEQ ID NO: 47406 - DNA, 892 bp, Oryza sativa
atatctttccggactcggcatttccttttctcattttgattcctctgtcctggcactggagttaggctgaaactgtaatcttggcgaggatttgtgttgccttgatgcttctttccgttgaaactggcgggttggttggccatcttcttcgtcagcagaaaactgaattgaaaatcttttggtacatgatcagttccttcacaaaagaaacaattgatcctgctcgttggacaccggtcgggtggatggtcttcctcacaatgaacgcatgtagtggcacacgagctggcaacatgaccgatttctccacaacgagagcatgccttacgttccatttcatcttcatcatctgaggagacttgatctgaatcttcactatcagacactctacctccattagctaaaagatgctctgtcaactgtggtgcacctcggaaggtatttcttctctgacgttttgtcattcctggtggaggccattctgtgctggtaatgatcatcttacggacttcatcttcggttcgcattggtgtttttcttttctgctgaggacactcccttgcatagtgcccttgctcatcacacataaaacaaatgatacttgcttcttttgagtcaacatgtggcacgtcaccatgggtccttcgggatgctggcggcatgctgacttgtggtgtgagtgcttggactgcctccaactgcacttgaggttgtatctgactcaggttcagaattggcgtctgatgctgctgtagtatctctataagcaatcggttctggttaatcaggtgttggaccagtgtcacacaactggtgtctggtgcttcaatcactcgggagcttgaggtaccaatgtcctgacttctgaccttattgcctttctcattgtcag

SEQ ID NO: 47407 - DNA, 646 bp, Oryza sativa
tcgtgacggtttggatccgaatcgaactcgttttgttttatctctaaaaaccgagttcgttttcttcccgattcgattcctcccgtttgcggcttgatctcttcaatccgagctcatataaagcttcctcgtgtcctcctcttccgtttgccccctttcccgtgctctcccgtgccccgtagcgtcgccgccgcgtgcacgaagtccgccgccgccgccggccatcttcggcatcgtcgcgccgccgtctccgccgtcgcctttggtcgccgccaccaccgttaggtgcgccgtggtgtggagaagttcggccgcccctccgttttcgccgccgaccaccggagcgccgtcgtcgccactaacccgagccgccgccgccttcttcttcgtcgccggccgccgtcgtgcatcctttgactacgtggtgagtaccaacgggttcgcctcgttgccctctacgcgttgatgccctccaatcccgccgccgatgtccctagcgccggcgagctcgtcgacccgagccggccatcgtgctgacgtcatgccgacggtaaccctagggctgacgtcatctttgccagggctgacgtcatctctctctctttttcctttttcccgattttctaatagattaaaacttcggaaa

SEQ ID NO: 47408 - DNA, 652 bp, Oryza sativa
atccgagggagagagagaggggaaagagggggaaacgggggaggggaacgcggggagtgattcccccctctttattgcgcgcggggccggcgggatgcggcggaattcgcggcggcggcggcgctagggcacgggcgggcggcgggcgcggcgggaggagggagatgacaggtgggtcccacccgtcagcgagagtggcgggcgggcccgcctgtcagcggcgcgcgcgcgcgcggggagccgatgggccgcgggggagaggagagagagggagggaaagttgggccgagccggcccaagaaggaaaggggggggaaagaagaacttcttttagggtttttctttttataaaccatttcaactttgtttatttcttttcaattattatttgtgctctgaaaattccactaaaatttatttacacattttaggcttttaggaaatatacaaaaatcctccaagcctcatttgacttttatctttgcacattttaattgttggaggctttcacattgaattttaattattctttgcacaatttcgaggatgaattttagagtcgttttgggacgcgacaaacctaccccccttaaacggaatctcgaccccgagattcggaagaactgccgaaaagatcgggatgggctgcctt

SEQ ID NO: 47409 - DNA, 668 bp, Oryza sativa
cccgcgggtaacgtgaaaaccatgtttaccgatgcagttacaacactcttccctttggccaaactttttgcttcattggctacaacctcatcggctgttgcaacctggcttttaacatgccactcttgcctgggctttgctttttccagccgatggttgatttcttgctccacctcttgaaaacgttctctgttcctcaatctctgaacccttctcgtcttattcctcgtgaaaataccagaaggacaccattgagtctttctatcctcattatcttcttgatcacggtcttggttcaccgggcccaatctctgatgaacaggaactcttgtctgcctcagccgattgcttctattgtaggatcagcttgagctctctgcggcatcactgcatccagggcaatcttcaatagatggcagcctcataccttcgttccagcagaatctaaaaaactcacagtcccaatgaggatcaaaaccatcatcatcttcttcataatgcctctcctgttgcttgtcgtattttctctagtacttgttgataattctagccgaattcatctgaaagttgtcgcgaccgggaaaattgccttttcccgaacgcgagtgtattaatcccagtcccaggaaaagccggggtacaccacacaaacatgatataaaagacac

SEQ ID NO: 47410 - DNA, 1239 bp, Oryza sativa
tgttgttgtattacatggggttcgggatctatttataccccgagattacataacaaaatatgtccatatcggacacgactcttatctctaacaaactctaaaataccataagtctttacggctgacttttgcccaaacttatccttaaggaaattacatgaaatatcctaattaatagatacaattgacttttcaggacttaatctggttgaattgttgtttaacaatttcatctccaatacttgaattaccaaatttggttgttaacaaattgttgttctatctttcaaccgataaaggcaaggagaagtagtgtctcgtgggaattaggggtaagggtaagcccccgtgctaaagattatttaaactaagagagaatacatataccttgcacctgtacctttgagatatatagtataatagcaactcttgatcaacaaccaagtttttgttcctttcgtccttcactcgggacgagcaaaagtttacccttgggggttttgttgacggtcattagcgatcactttcgaccgttaatattacgaaaatagggggaactagttatgcttgcaatacatatatatgttagaataatatattccactagtattaggttcactaaccttttgcagagaataaacataaaagtggagcagaatcgacatcaactcagacgataaatcaatcggacgatgtcgaaaatcatacttatgcatgaatgggccaagaactcagaattgacacgatgaattgggccaaaattcacaagtctgcataaaggagcaacagaggaggccacctgtcgagtttgggccaggtgggcccagcccatggttcagccaaaacccgccgaacttcccgtggcgcctatgaatgcagtgtttggatggacggctgggactgttccccaatgacggttggagggtattaccgaccattccaaccatcacaaccgtcattacctacgtataaaaggagctcctcttctcacttcactcgtacacctcaagcaaagctctctcatattctctcaagtttagtttagtgttcttaacctaatggaataggaatagagtagaaatcggagtccggtagccttcggaagagttcgggtatggctctagaagctattctcttctcttttgtaagcttgaactttatttaaaacactcttctttatacatttatggtattgaaatacttcctgagtatatgaatcccaactttacattatgttaa

SEQ ID NO: 47411 - DNA, 900 bp, Oryza sativa
ctgggacggggattaatacactagcgttcgggaaaaggcaatttttccggtcgcgacaagctggtatcagagccatctcgactggaggataagccaagtggataaaacctaaggacatattttataaatgaaactatttgcgaaagttcctttttcctcctttcccctatgctatttgcaaaatgtttactctttctttctttttcaaatttcaactagtactagatggtcagctttgcggagaagaagatgtcgtcaattgtctgccgaagctccagaaggctgtaggatccgctagtggagtggaggaagctgtgaagcacgagtgaagatcttggagaacccgtcgcagaacctaagccaccctctagggtttcgtttgtcgtgtgtttccttgcttgtgtgtgtagcgcgtggtttgcatcagtgggttgtgatgtaaccatgctaggttgtttgcttaatcaacttgcagaataagcctaacatacatcataacagcaaaagacttagatctgttaaggtcctatccttagtttctaatctgtctctcccctttgttttccctctctccctctccaaacctttgcaacagatggctgacaatgagaaaggcaataaggtcagaagtcaggacattggtacctcaagctcccgagtgaatgaagcaccagacaccagttgtgtgacagtggtccaacacctgattaaccagaaccgattgcttatagagatactacagcagcatcagacgccaattttgaacccgagtcagatgcaacctcaggtgcagttggaggcagtccaagcactcacaccaccagtcagcatgccgccagcatcccgaaggacccatggtgacgtgccacatgttgactcaaaagaagcaagtatcatttg

SEQ ID NO: 47412 - DNA, 1380 bp, Oryza sativa
tcacgtggttcacacgaccccgaatgacgtccttgcaaccgttgttggggcggggaggcgcttggccttgctgacgccttggcttcggggcattatccgcaaagtgcccgggctccaagcagttgaagcacagacgctgctgaccttgagtgtcacatcctgattttcgtttcaggatttataaattatttaataaattattaatagaatttatattaaatgttctttaatttacaagtgaagtaaaaatgtgggaaataaaatttcttaaatattaagcatggatggatttaattttgtattaaattctccatggttaattatactctctggaattttctcggatttttcggagctcaattattaattttaatcatacaaagagaagttcagcaattatttaaatattaaattaatcatataatgacctaattataattgttaagtgattttcttgtttaaaatccttaaattataaattgttgtttaaaaggaattaatagaaatgattttaaaaaaaagtttaaaagagaagatctttcttttaatttgctaaatctcaacataaaaatgagctagataaaattttgttaaatactttgcttgctcctctattttctagatttttctgggaattatttgagcaagggaagtatttttaataaatgaaacaacattttacaaattattttattcaaaaaagttcaaaagtttccccttcttggtccttgggccgttttcggcccatctctccctttctctctctttcccgcgcgcggcccacgccggcccaagccgccgccgctcgcgcccgcgcccctctctctctggaggctgacaggtggggcccacctgtcaggtccatcccctacctccggccgccgccgagccgaaccctagcgccgttttgcgccatcgattccgcccaaatccgagcccgattccttcgattgattgaggggttttgttcctctcggtctcctctttcttttcccccaagaatcaaagaaattcgtgacggtttggatccgaatcgaactcgttttgttttatctctaaaaaccgagttcgttttcttcccgattcgattcctcccgtttgcggcttgatctcttcaatccgagctcatataaagcttcctcgtgtcctcctcttccgtttgccccctttcccgtgctctcccgtgccccgtagcgtcgccgccgcgtgcacgaagtccgccgccggcgccggccatcttcgggatcgtcgcgccagcgtcttcgccgtcggctttggtcgccgccaccaccgttaggtgcgccgtggtgtggagaagatccgccgccccttcgttttcggcggcgaccaccggagcgccgtcgtcgccactaacccgag

SEQ ID NO: 47413 - DNA, 692 bp, Oryza sativa
tgcacttgcatatttgctgtgtggcttgttgagtatgtcatatgctcattcttgcaataatcaatcaacctcagtcgaagaaaaaggatccagaaggagaagacgtttggcttataccccagttgagctgcctgtgggagtggagtcggagcttcgctagattttatttttccgctgcagttttcttggcgaggactaagtgcctcttaagtaagtatttattcgctttagttatggtggatttgtatattaaattgtcagtttgtgtacctcggctgattcctggacgaggattttatgcacaaataagttcggaaattactagtgaatttctgggcgtgacattgagcgtccctgcggccttggccaggctgcacagttggcgtaggaggacggggcgcacgagtcccttgttgattctgctgctgctgcggctgtgggacgtgcaccacgaattgaggtcgaggcgcggagcgagattgctgcggctggtgttgctgctgcgaggaggatccccctgggtagggattggtgtagcggaccctttggttagcaccctgttgattgcggaagttcgccaagcggcgcttgtgcgactccagcttccttgtgcttggcttccaagcggatgttcttgtccaccagacgttggaagttccggtagtccccagagactagacgaatggacagct

SEQ ID NO: 47414 - DNA, 1602 bp, Oryza sativa
ctccggccattatgcaagaagaagacaagtcactcgccttgtggtcactggagcaaacgccatacctgtgagggctcgtgttaatcataacccatagtagaaacaatggaccgatgttaagcatcttccctttttgtttaaggtagtgccttgtattcatgtaataagggagacatgtgtgataaaaacaagttctatgaggattattttggaaggtgctgatatgggatcatgcgtataaattgttactggcaaaggagacctagggtctcattccagaggaactatgttctaacctcgagttaataaccaacctgatgatgggaaagaaaatcaagcgattaaccaaagagacatttgttggaattaagagtttcagatgtgtctttttcggatcaaagacaaagacagtcagttcagcttttggcaaaacacttcaaggttttcactgaaaggcagcagaccaaaggaccacatcgtcaccaaaagcatccacaactctcggagtaaagattacttggttggcaaagttcaaaaggttattgatagaagataccagcaaaggtgtttattatcaggcaaagaagtaggtcgaaaggtgattgataaagaaatctgaaaagaatacgtcagggttgaatgtgtaaaggaatactttgaatgctaaatgatgacaacatgaagagaatagtgggaagtaaaccgaatgaaaagaaggtgaatccgagttgtctgttcgtgggagctattcccagttatgaaccaagtgatatgttcgaagatagtctatagaggtcagattaaaatcacatctaataacgaagcttcagatttggcaggataacgatcaaacaataagaagtccagcagtaaagccatttgggaagacgtcaaagcatgtcaagtgggataagttggttcggttgagaaacataattcaaaggcaaaattatcgaccctcgcatcgaatagcagaagtagctagcacccggagaccaggaaagctaatatgaggcagtttgtggcaagttagaagtaaatgacaagcatgatatccttatgatgacaagcatggtatcctagtaatgtcgagctgatctcaacgcatgacatgaagtgggtaagttgtatgagggtgactccaaagatatgaactatgcgaagttctggaactgaagcaccatcttcaagtgccgcaacccagacgaagtcagctaaaggttcaaccagggaaaagtcaggtgaagaggagattccatctgcaacaggagatcgagacaagcagaccagagtggagaagttttgctaggcaagttcgttatagaagacgcgacggaagaagtcagacaagaagagaagaccgcccaacctatcttcttgctagcctcctcgaatctcggggacgagattcttgtaaggggggtggatttgtcacgtcctgataaattcatcccgaaataaaaatcattttctaaaaggaataatagaattaattaaaattcgaaaagaaattggcaaacactaaaatacgtacaagaaaaattcgaatgtggcccggagaatttttgttaaattctccttggtctaaaaggagccctcaaa

SEQ ID NO: 47415 - DNA, 1350 bp, Oryza sativa
ggtgggttgtgagcatatgttttgatggttgtgctcatgacattaaggaccggttcgggagctactgttgggaaacatttatcgtgccaaccacaagccagcgtgggcaacggctttatcttttgtatagcatggttcattatagtgcgccagactgagaagtggcgagaagtccatgggggtcgctggggagtccatgccttgtttataagggggtgattatgatccaggtacggtgcactgtggtgaattgtgttatgcgaggggtattgtcacgactcctttccgaggtatcgtggtggtactgaggcacatggtaacatgatgtggggttgtgtcttgtgggtacagtggtacacctctgatcagagtttaatctattcgaatagccgtacccgcggttatgggtgagttgagcaatgtttttcgtgattagtctcacacttctcattaatggtaataatgtggtaattaatttatttcctggtttggaatggttaattcctggtatggagggttaatttgttcaactggggttggttgatcaaatgtggttgggcctatgcaacacgggtgtgttgtatggtgtttatttaatattgattaattattcaactgttttacttctctcttaaatatttgttaaatgctgttttctgcaaatgagctatattatgccatcctttgctatcctgtgcacttgcatatttgctgtgtggcttgttgagtatgtcatatgctcattcttgcaatattcattcatcagaggaggagtacttcagtgaaggtgatgatctggaggaataggcttgttctggttaagttgcctgtggagtggagttgccgtcgctgttccgtagtttgttttagttttgttttccgctgcgtagaatgttgtttttgtttgagaggaactatctacctctgtaataattttattttgcgaatatttaataattatttgtactctattatcaatattgtcattgtgtgcctcggttgattcctggacgagggtttaacacacatgtaagcgtttggaattttggatagaaattccgggcgtgacagtcggcgctttggcgcggcgaccggggcggctggaggcggtgcagtggcggcaattgtcgcgaccgagaaaatttgcattttcccgaacgctagtgtattaatccctgtcccaggaaaagccggggtacaccacacaaacatgatacaaacggcacatctttattatatcgataatatttacatgattacaaaggcacttcaagcctgacaatcaaaaataaacagcagcggactagcgggcctacggctccatcttcacaggcgctcaactggggtata

SEQ ID NO: 47416 - DNA, 818 bp, Oryza sativa
taagctttacccactagacatgtggaagtacggtattgctttgcaacaaaaggcccgaagaccggtccttatatggccgaggtgctaccatcaaaaccatgcaccccgagcccagcctaaaaccattttggggaattttgaatagaaggagcggtgtgaagccaattccccaattaaccaacaattccagagtgtccaggtgatatgagagtttcccaagtctaaagttataaaaccacctaatgttacctaattaacttgcgaagcatctacctaaaattaaactagtggtgccatgagtggagtgtccactagttgaggttttgtttgtctagggtgaacaaggtaataataacaataacaataataataaggtcataacaaaggtaaataggcatggctaaataaaacagtgataacgcgggaatttaaataaagcgataatgcaataatttaaatcaacataattttataaactgggattcaatatgatcaagatgatgtgtcttgccttgctcgtcttcccaaacgtcggcttcgacttcgacgaagagcggatcttccgaagctgcagcgtctacacgaccaacagaaaagaaaaggcttaaacactaaataactccacataacagcagaaacaaagcacaaaaatgggttcttgacttcttaagaaaaaattagagacttgaacggtccaattccgagttcaaatggccaagatatggccatttgaagtttatatgctctttaaatggatatttgcgaatttcttcatttaaattttaattaaaaattccatttattgcgtcagccgaggg

SEQ ID NO: 47417 - DNA, 545 bp, Oryza sativa
tttgtttgtagatggccggcagcgtcacccgtcgtggtttggacatgactgacgtcgtcttggagttgcggggcatgtgcgttgtcctggggtatccacatggagtggactaccagggcaggccgctcccggagtaggagggtgacgatgcaaagcccctcgctgcttgggaggtcactgcagtgatcctcgccggctctcccgagcggacttcgctggcagtcaccacgggtggagattccttccccgccgcttgccagaacgccgctctcctcgccatcggcactcttcgccagcgctacccggacgagttgcagcactcgccctaccgctaccaccctcgtctcggaggagcccgcgactacgccaccttccgggatgctagctcggagaatgacgctaccatcgtgcacctggcgcgcatggtggaggcgtacgacgcggctcgtatcgacttccaccagatggtgcaccgtgggatggtcgagaacaacatgaagataaatgaaactacgtcaagagaacctgcagctcaagaaggacct

SEQ ID NO: 47418 - DNA, 811 bp, Oryza sativa
taaccagactgagccacaaactaagccttacccactagacatgtggaagtacggtagtgctttgcaacagaggcccgaagaccggtccttatatggccgaggtgctactatcaaaaccatgcaccccgagcccagcctaaaaccattttggggattttgaatagaaggagcggtgtgaatccaattccacaatatccagaccattccaaggtgtccaggtgatatgaatatttcccaaagtctatagttgaaaaaccacctaatgttacctaattaaattgcgaagcatctacctaagataaaactagtggtgccatgagtagggtgtccactagttgaggttttgtttattctagggtgaacaaggtaataataacaataacaataataaggtcataacaaaggtaaataggcatggctaaataaaacagtggtaacgcgggaatttaaataaagcgataatgcaataatttaaatcaacataattttacaaactgggattcaatatgttcaaagatgatgtgacttgccttgctcgctttcccaaacgtcggcttcaacttccacgaagagcgggtcttccgaagctgcagcgtctacacgaccaacggaaaagaaaaggcttttactctaataaactccatataacagcagaaacaaagcacaaaaatgggttcttgacttcttaagaaaaaattagagacttgaacggtccaattccgagttcaaatggccaagttatggccatttgaagtttatatgctctttagatggatatttgcgaatttcttcatttaaattttaattaaaa

SEQ ID NO: 47419 - DNA, 900 bp, Oryza sativa
gggaggactttgggccagacttggcccaaaggaggaaggagggttatttttaggtttttctttttattaaactttgataattgtttttgttgcttaataattatttccggtgctctgaaaattcaagtaaaatttgagggctcattttagaccaaggagaatttaacaaaaattctccgggccacattcgaatttttcttgtacgtattttagtgtttgccaatttcttttcgaattttaattaattctattattccttttagagaatgatttttaatttcgggatgaatttatcaggacgtgacaaagttccgattcgtccctccatcggctgtccttccagatgcatgcaccatattaatagggaaatgattaccatctaccttcatcggcttctttgaatcatcgaatttgatatttcccccttcaatggccacctggatctgctgtctgaaaactttgcagtcattagtagaatgagattcagaattatgccatttgcagtacctccttttgccaagttccttagccgatggaattatatgaccagcaggaagttgaatttgtttctcccgaagcaataaattgaaaattttgtcaaccttggtgatatcaaagtcgaatctttcttcttttccagaactcctcacccacggtgtcacgaccggaaatcacccaacaggcgttcctgacgtgcgtgtattattccttgtcccaggaggcaaggtacaccaaaagttgatacaattcagagtttacaagcggaagcgaaaatataaacactacacgggcagcgaaagcccagcacacaaagacaacgaaaaacagcggaagactagggcgacgaccacaggcgcttgacgggaggcacgagcttaacaccaagcccttaattttcaa

SEQ ID NO: 47420 - DNA, 508 bp, Oryza sativa
acggagggaggtgggccgagccggcccaagagggggaggggggaaaaaagactggggagggtttttatttttataaaagccttttaactttgtttatttctccttaattattatttgcgctctgaaaattccactaaaatttatttacacattttaggcttttaggaaatatacaaaaatcctccaagccttatttgacttttaactttgcacattttaattgttggatgctttcacaaggattttacttattctttgcataatttcgaggatgtattttagagtcgttttgggacgcgacaataatctattcctatacttctaatatacataggatacatacattctagttaaccgatatactagctaataccctctatctggatgccctcatggtacttcgagaagccacccgtgactgccgagttccttacgacaggccgtcatgaccatacaaccggggctaaataccgaagaataccctccccagggaattaacttaggatta

SEQ ID NO: 47421 - DNA, 543 bp, Oryza sativa
ttcttcatggtaaggactaagtgcctcttaagtaagtatttatcgttttagttaatttgatgatctgtatattaaattgtcagtttgtgtacctcggctgattcctgaacgaggattttatgcacaaataagttcggaaattactagtgaatttccgggcgtgacaaccatgcacccacaacccaccatttaatacattttaattaaccaacaccacagcggtggcactaatccaacatcaaactataatctgaagtctatgtattagtgtgtttcccccattgtgttgtcgcgtcccaaaacgactctaaaatacatcctcaaaattatgccgagaataattaaaatccatgtgaaagcctccaacaattaaaatgtgcaaatttaaaagtcaaataaggcttggaggatttttgtatatttcctaaaagcctaaaatgcgtaaataaattttagtggaattttcagagcacaaataataattgagaagaaataaacaaagttaaaaggttttataaaaaaaagaaaaaccctaaaagtctt

SEQ ID NO: 47422 - DNA, 892 bp, Oryza sativa
gtatagttctagattcgtgtttaccaaatagctttgagcaactaaatatctttaaatgctgtttactgcaaccctaaccctttatattatagctcctttgtactcccttgcatttattctgcacttgtgggtgtgtcttgttgagtacggtggttgtactcagtcttgctcaatttttcccaaacccagaagaggagttcctagaagatgaaggctttggtgtctagctcatgcctgccgtcgagtgcctgtggtcgtcgccctagtcttccgctgtttctcgtttgtctttgtgtgtgctgggccttcgctgcccatgtaataagttatctatttacgcttccgcttgttaaactctgaattgtatcaacttttggtgtaccttgcctcctgggacaaggattaatgcacgcacgtaaggaacgcccgttgggttatttccggtcgtgacaagttggtatcagagcccccttgaccctaggacgagccgtagatcccaagccttagcaagtattttcgaaataaaaatcctttgttacttgtgaaaaccctctagtctctctctgtcctgctgcttcatttatcgtcaaaatctgatcttttaaatgttgcttttctttttgtttttgtttgtagatggccggcagtgtcacccgtcgtggtttggacatgactggtttcgtcttggagttgcggggcatgtgcgttgtcctggggtatccacatggagtggactaccagggcaggccgctcccggagtaggagggtgacgatgcagagcccctcgctgcttgggaggttactgcagtgatcctcgctggctctcccgagcggacttcgctggcagtcaccacgggtggagattccttccccgccgcttgccagagcgccg

SEQ ID NO: 47423 - DNA, 793 bp, Oryza sativa
gaccgccgccaaccgcgtgcgcacggtccaccgtgtaccgtggggctaaagcgtgggccccactccccgtggacccggtccgcgcgtcccctccctcggctaacgcaataatcagttttttttaattataatttaaatgaagaaattcgcaaatatccatttaaagagcatataaacttcaaatggccatatcttggccatttgaactcggaattggaccgttcaagtctctaatttttccttaagaagtaaagaacccatttttgtgctttgttcctgcttgttgtttggagtttattagagtaaaagtctttttctttttccgttggtcgtgtagacgccgcagcttcggaagatccgctcttcgtggaagttgaagccgtcgtttgggaaagcgagcaaggcaagacacatcatcttgatcatattgaatcccattttataaaattatgttgatttaaattattgcattatcgctttatttaaattcccgcgttgtcactgttttatttagccatgcctatttatctttgttacgaccatattattattggtattggtattggtattaccttggtcaccctagattaaacaaaacctcaactagtggacactctactcatggttccactagtatgaacttaggtagatgcttcgctggttaattaggcaacattaggtggtttttacaactttagacttgggaaattctcatatcatttggacactgtggaattgttggattatgatggaatggacatacacctcttttcttttttaaaaccctaaaacc

SEQ ID NO: 47424 - DNA, 544 bp, Oryza sativa
atgtcgacaatcagacttatgtataatgggccaagaactcaaaattgacacgatgaattgggccaaaattcacaagtccgcgtatgagagcaaaagaggaggctgtctgccgaaattgggccaggtcgccccatcccatggttcggccgaacctcccgcagctccgtttgatccagggttctcctggacggctgagatggctccctaatgatggttggagggtattactgaccatttcaaccgtcacaaccgtcattgggaggctataaaagcagctctcatcctcacttcactcacacacctcaagcaagagctctctcattactctcaagtttagtttagtagtatctagctggtggaataggaatagagtagaaatcagaagtccggaagccttcgaaagagttcgggtatggctctagtagctttcctttcctcttttgtaagcgttgaacttttattagaacattcttcttcatacatttatggtattgaaatactttccaagtatatgagtacctactttacattatgttcatgttat

SEQ ID NO: 47425 - DNA, 968 bp, Oryza sativa
gtttttaccacgaacgcacccaatacactccaatatgtccaaaattcatgttttggtgccttaatgaactttttcattctggtcaaaaacatcgcacccgtggggctcaatatatgccaatattgtcattaatggcaaaaagtacccgcgcgaatcacgaagtgagtttttgccacgaacgcacccaatacactccaatatgaccaaaattcatgtttggatgatttttgaccttattccatctggtcaaaaatatcgcacccgtggggtctcaacatatggcaatattggtattaattgacaaaagtacccgcgcgaatcacgaagtgagtttttgccacgaacgcacccaatacactccaatttgtccagaaattttgttttggtgctttttgaactttttcattccggtcaaaaacatcgcacccgtggggtctcaacatatgccaatattggtattaattgacaaaagtacccgcgcgaatcacgaagtgagtttttgccacgaacgcacccaatacactctaatatgtctaaaattcatgttttggcgctttttgacctttttcattccggtcaaaaacatcgcacccgtggggctcaatacatgccaatattggcatcaattgacaaaagtacccgcgtgaatcacgaagtgagtttttgccacgaacgcacccaatagactccaatatgtccaaaattcatgtttggatgttttttgaacttattcagtccggtcaaaaacaccgcacccgtggggtctcaacatatgtcaatattggtattaattgacaaaagtacccgcgcgaatcacgaagtgagtttttgccacaaacgcacccaatacacttcaatatgttcaaaattcatgtttggtgctttttgagcttttttgttctggtcaaaaacatcgcacccgtggaggctcatatacgccaatattggcattattgacaaaattcgtc

SEQ ID NO: 47426 - DNA, 1421 bp, Oryza sativa
ccgtggggtcttcaacatatgccaatatcggtattaattgccaaaagtacccgccccgattcacaaagtaagtttttgcccgaaacgcaccccaatacactccaaatatgtccaaaatccaagttttggcgctttttaacttttttcattcgggtcaaaaacatcgcacccgtggggctcaataatatgccaatattggcattaatggcaaaaggtccccgcgcgattcacgaagtgagtttttgccacgaacgcacccaatacactccaatatgtccaaaattcatgttttggtgctttttgaactttttcattccggtcaaaaacatcgcacccgtggaggctcaatatatgccaatattggtattaattgacaaaagtacccgcgcgaatcacgaagtgagtttttgccacgaacgcacccaatacactccaatatgtccagaaatcttgttttggtgctatttgaactttttcattccggtcaaaaatatcgcacccgtggggtctcaacatatgccaatattggtattaattgacaagagtacccgcgcgaatcacgaagtgagtttttgccacgaacgcacccgatacacgccaataagtccaaaattcatgttttggcgctttttgaactttttcattccggtcaaaaacatcgcacccgtggggctcaatatatgccaatattggcattaattgacaaaagtacccgcgcgaatcacgaagtgagtttttgccacgaacgcacccaatacactccaatatgtccaaaattcatgtttggatgctttttgaacttattcaatccggtcaaaaacatcgcacccgtggggctcaacatatgccaatattggcattaattgacaaaagtacccgcgcgaatcacgaagtgagtttttgccacgaacgcacccaatacactccaatatgtccaaaattcatgtttggatgctttttgaacttattcaatccggtcaaaaatatcgcacccgtggggtctcaacatatgccaatatcggtattaattgacaaaagtacccgcgcgaatcacgaagtgagtttttgccacgaacgcacccaatacactccaatatgtccaaaattcaagttttggcgctttttgaactttttcattccggtcaaaaacatcgcacccgtggggctcaatatatgccaatattggcattaattgacaaaagtacccgcgcgaatcacgaagtgagtttttgccacgaacgcacccaatacacttcaatatgtccaaaattcatgttttgatgctttttgaacttattcaatccggtcaaaaacaatcgcacccgtggggtctcaatatatgccaatattggcattaattgacaaaagtcccgcgcgaatacggagtgagtttttggccgaacgcacccatacactccaat

SEQ ID NO: 47427 - DNA, 978 bp, Oryza sativa
atgtccaaaattcatgtttggatgcttttgaacatatccaatccggtcaaaaatatcgcacccgtggggtctcaatatatgccaatattggtattaattgacaaaagtacccgcgcaaatcacgaagtgagtttttgccacgaacgaacccaatacactccaatatgtccagaaaccttgttttggtgctttttgaactttttcattccggtcaaaaatatcgcacccgtggggtctcaacatatgccaatattggtattaattgacaaaagtacccgcgcgattcacgaagtgagtttttgccacgaacgcacccaatacactccaatatgtccaaaattcatgtttggatgctttttgaacttattcaatgcggtcaaaaacaccgcacccgtggggtctcaacatatgccaatattggtattaattgacaaaagtacccgcgcgaatcacgaagtgagtttttgccacgaacgcacccaatacactccaatatgtccagaaatcttgttttggtgctttttgaacttttccattccggtcaaaaatatcgcacccgtggggtctcaacatatgccaatattggtattaattgacaagagtacccgcgcgattcacgaagtgagtttttgccacgaacgcacccaatacactccaatatgtccaaaattcatgtttggatgctttttgaacttattcaatgcggtcaaaaacaccgcacccgtggggtctcaacatatgccaatattggtattaattgacaaaagtacccgcgcgaatcacgaagtgagtttttgccacgaacgcacccaatacactccaatatgtccagaaatcttgttttggtgctttttgaacttttccattccggtcaaaaatatcgcacccgtggggtctcaacatatgccaatattggtattaattgacaagagtacccgcgcgattcacgaagtgagtttttgccacgaacgcacccaa

SEQ ID NO: 47428 - DNA, 813 bp, Oryza sativa
gaggatcccctctcaacatatgccaatattggtattaattgacaagagtacccgcgtgaagcacgaagtgagtttttgccacgaacgcacccaatacactccaatatgtccaaaattcatgttttggcgctttttgaactttttcattccggtcaaaaacatcgcacccgtggggctcaatatatgccaatattggcattaattgacaaaagtacccgcgcgaagcacgaagtgagtttttgccacgaacgcacccagtacactccaatatgtccaaaattcatgttttggcgctttttgaactttttcattccggtcaaaaacatcgcacccgtggggctcaatatatgccaatattggcattaatggacaaaagtacccgcgcgaatcacgaagtgagtttttgccacgaacgcacccaatacactccaatatgtccaaaattcatgttttggtgctttttgaactttttcattccggtcaaaaacatcgcacccgtggaggctcaatatatgccaatattggtattaattgacaaaagtacccgcgcgaatcacgaagtgagtttttgccacgaacgcacccaatacactccaatatgtccagaaatcttgttttggtgctatttgaactttttcattccggtcaaaaatatcgcacccgtggggtctcaacatatgccaatattggtattaattgacaagagtacccgcgcgaatcacgaagtgagtttttgccacgaacgcacccgatacaggggatcctctaaggtcacaaatcatgttttggcgcttttgaacctttttattccgg

SEQ ID NO: 47429 - DNA, 846 bp, Oryza sativa
agtgtattgggtgcgttcgtggcaaaaactcacttcgtgattcgcgcgacgaacttttgtcaataagtgccaatagttagtatatataggccaacacgggtgcgatgtttttgaccggaatgaaaaagttcaaaaagcaccaaaatatgatttctgggcatacctgcgtgtattgggtgtgttcgtggcaaaaactcacttcgtgattcgcgcgggtacttttgtcaattaataccaatattggcatatgttgggaccccacgggtgcgatatttttgaccggattgtataagttcaaaaagcatccaaacatgaattttggacatattggagtgtattgggtgcgttcgtggcaaaaactcacttcgtgattcgcgcgggtacttttgtcaattaataccaatattggcatatattgagagcccacgggtgcgatatttttgaccggattgaataagttcaaaaagcaacaaaacaagatttctggacatattggagtgtattgggtgcgttcgtggcaaaaactcacttcgtgatttgcgcgacgaacttttgtcaattaatgccaatatttgtatgcgttcgtggcaaaaactcacttcgtgattcgcgcgggtacttttgtcagttaagaccaatattggcatatattgagaccccacgggtgcgatatttttgaccggattgaataagttcaaaaagcatccaaacatgaattttggacatgttggagtctattgggtgcgtccgtgcaaaaactcacttcgtgattcgcgcaagtacttttttcaattaataccaatattggcatatattgagacccccacgggtgcgatatttttgacc

SEQ ID NO: 47430 - DNA, 1403 bp, Oryza sativa
atcaagtctactttcaaatggatccagccacatgtccatatctgttctggagcggccgcaattgtcattttactcccgactattttctgtccatggtgctgcgtcacctcttttggcccaatgggctgtgtatccatgttgggcccattaggggcgcgtcctagggttggagcacgaccctatggtcgttcttcccctctttttatacctctagtcgccgccaagaacaggcgggttttgatgatagagttagcttcttgctaccggctcgcagcgcgcgtgttggttaaaccgcccgtctgcctgtaatcggaaccccccatattgtgtttgatagtgaaactttcatctttatctagcaatttcagtgcttgtccaacttgttcttgcttgttcttcgattgcttgcagaacgagtgccctcgtggccgggttgacgcgcaccacaagttcgcggcgaccattggagacggtgtatcggttgctaaggcgcagcgtctttggacagttgtagtcgggccgtgaacgtcgacttcatctaatcgagttatcccttacctctcatcgaaagatcgggccaccaaccccagcgggttcgcatcacacttttgtcaataaatgccaatattggcatatattgagccccacgggtgcgatgtttttgaccggaatgaaaaagttcaaaaagcgccaaaacatgaattttggacatattggagtgtattgggtgcgttcgtggcaaaaactcacttcgtgattcgcgcgggtacttttgtcaattaataccaatattggcatatgttgagaccccacgggtgcgatatttttgaccggattgaataagttcaaaaagcatccaaacatgaattttggacatattggagtgtattgggtgcgttcgtagcaaaaactcaattcgtgattcgcgcgggtacttttgtcaattaataccaatattggcatatgttgagaccccacgggagcgatgtttttgaccggactgaatgagatcaaaaagcatccaaacataaattttggacacattggagtgtattgggtgcgttcgtggaaaaaactcaattcgtgattcacgcgccgaactttttgtaataagtgccaatatttagcatatataggcccacacgggtgcgatgtttttgacccgaatgaaaatgttgaaaagcaccaaaacatgatttgtggacatattggagtctattgggtgcgttcgtggcaaaaactcacttcgtgattcgcgcggggaacttttgtcaataaatgccatatttgcatatattgagccctcaccggtgcgatgtttttgactggatttcaaaaagtcaaaaagcaccaaacaagatttcttgacatattggagtgtattgggtgcgttcgtggcaaaa

SEQ ID NO: 47431 - DNA, 631 bp, Oryza sativa
ccccacgggtgcgatatttttgaccggattgtataagttctaaaagcattcaaacatgaattttggacatatcggagtgtattgggtgcgttcgtggcaaaaactcacttcgtgattcgcgcgggtacttttgtccattaattccaatattggcatatattgagccacacgggtacgatgtttttgactggaatgaaaaagttcaaaaagcgccaaaacatgaattttggacatattggagtgtttgggtgcgttcgtggcaaaaacccacttcgtgattcgcgcgggtacttatgtcaattaataccaatattggcatatgttgagaccccacgggtgcgatatttttgaccggattgaataagttcgaaaagcatccaaacatgaattttagacatattggagtgtattgggtgcgttcgtggcaaaaactcacttcgtgattcgcgcgggtacttttgtcaattaatgccaatattggcatatgttgagagcccacgggtgcgatgtttttaaccggattgaataagttcaaaaagcaacaaaacaagatttctggacatattggagtgtattggatgcgttcgggcaaaaactcacttcgtgattcgcgcgacgaacttttgtcaat

SEQ ID NO: 47432 - DNA, 788 bp, Oryza sativa
caatatgggcatatgtcgagaccccccgggtgcggtgtttttgaccgcattgaataagttcaaaagcatccaaacataaattttaaacatattggagtgtattgggtgcgttcgtggcaaaaactcacttcgtgaatcgcgcgggtacttttgtcaattaataccgatattggcatatgttgagaccccacgggtgcgatatttttgaccggattgaaaaagttcaaaaagcatccaaacatgaattttggacatattggagtgtattgggtgcgttcgtggcaaaaactcacttcgtgattcgcgcgggtacttttgtcaattaataccaatattggcatatgttgagaccccacgggtgcgatgtttttgaccggattgaataagttcaaaaagcatccaaacatgaattttggacatattggagtgtattgggtgcgttcgtggcaaaaactcacttcgtgattcgcgcgggtacttttgtccattaatgccaatattggcatatattgagccccacgggtgcgatgtttttgaccggaatgaaaaagttctaaaagcaccaaaacatgaattttggacatattggagtgtattgggtgcgttcgtggcaaaaactcacttcgtgattcacgcgggtacttttgtcaattaatgccaacattggcatatattgagccccacgggtgcgatgtttttggccggaatgaaaaagttcaaaaagcgccaaaacatggattttggacatattggagtgtattgggtgcgttcgtggcaaaaactcactt

SEQ ID NO: 47433 - DNA, 606 bp, Oryza sativa
tgaatatgtccaaaaagcatccaaccatgatttttgacatattgaagtgtattgggtgcgttcgtggcaaaaactcacttcgtaaatcgcgcgggtacttttgtcaattaataccaatattggcatatattgagaccccacgggtgcgatgtttttgaccggaatgaaaaagttcaaaaagcaccaaaacatgaattttggacatattggagtgtattgggtgcgttcgtggcaaaaactcacttcgtgattcgcgcgggtacttttgtcaattaatgccaatattggcatatgttgagaccccacgggtgcggtgtttttgaccgcattgaataagttcaaaaagcatcaaaacatgaattttggacatattggagtgtattgggtgcgttcgtggcaaaaactcacttcgtgattcgcgcgggtacttttgtcaattaataccaatattggcatatgttgagaccccacgggtgcgatatttttgaccggaatgaaaaagttcaaaaagcaccaaaacaagatttctggacatattggagtgtattgggtgcgttcgtggcaaaaactcacttcgtgattcgcgcgggtacttttgtcaattaa

SEQ ID NO: 47434 - DNA, 679 bp, Oryza sativa
aaaacatccaaacatgaattttggacatattggagtgtattgggtgcgttcgtggcaaaaactcacttcgtgattcgcgcgggtacttttgtcaattaatgccaatattggcatatgttgagaccccacgggtgcgatatttttgaccggattgaaaaagttcaaaaagcaccaaaacatgaattttggacatattggagtgtattgggtgcgttcgtggcaaaaactcacttcgtgattcgcgcgggtacttttgtcaattaataccgatattggcatatgttgagaccccacgggtgcgatgtttttgaccggattgaataagttcaaaaagcatccaaacatgaattttggacatattagagtgtattgggtgcgttcgtggcaaaaactcacttcgtgattcgcgcgggtacttttgtccatcaatgccaacattggcatatattgagccccacgggtgcgatgtttttgaccggaatgaaaaagttctaaaagcaccaaaacatgaattttggacatattggagtgtattgggtgcgttcgtggcaaaaactcacttcgtgcttcgcgcgggtacttttgtcaattaatgccaatattggcatatattgagccccacgggtgcgatgtttttgaccggaatgaaaaagttcaaaaagcgccaaaacatgaattt

SEQ ID NO: 47435 - DNA, 701 bp, Oryza sativa
aagtgagtttttgccacaaacgcacccaatacactccaatatgtcaaaatttcatgtttggatgctttttgaacttattcaatcggtccaaaaatatcgcacccgtggggtctcaacatatgccaaatattggtattaattgacaaaagtacccgcgcaaatcacgaagtgagtttttgccacgaacgcacccaatacactccaatatgtccagaaatcttgttttggtgctatttgaactttttcattccggtcaaaaatatcgcacccgtggggtctcaacatatgccaatattggtattaattgacaagagtacccgcgcgaatcacaaagtgagtttttgccacgaacgcacccgatacactccaataagtccaaaattcatgttttggcgctttttgaactttttcattccggtcaaaaacatcgcacccgtggggctcaatatatgccaatattggcattaattgacaaaagtacccgcgcgaagcacgaagtgagtttttgccacgaacgcacccagtacactccaatatgtccaaaattcatgttttggtgatttttgaactttttcattccggtcaaaaacatcgcacccgtggggctcaatatatgccaatattggcattaatggacaaaagtacccgcgcgaagcacgaagtgagtttttgccacgaacgcacccaatacactccaatat

SEQ ID NO: 47436 - DNA, 676 bp, Oryza sativa
tctcaacatatgccaatattggtattaattgacaaaagtacatgcgcgaatcacgaagtgagtttttgccacgaacgcacccaatacactccaatatgtccaaaattcatgttttggtgcttttagaactttttcattccggtcaaaaacatcgcacccgtggggctcaatatatgccaatattggcattaatggacaaaagtacccgcgcgaatcacgaagtgagtttttgccacgaacgcacccaatagactccaacatgtccaaaattcatgtttggatgctttttgaacatattcaatccggtcaaaaatatcgcacccgtggggtctcaatatatgccaatattggtattaattgacaaaagtacatgcgcgaatcacgaagtgagtttttgccacgaacgcacccaatacactccaataagtccaaaatttatgttttggcgatttttgaactttttcattccggtcaaaaacaacgcacccgtggggctaaataaaagccaatattggtattaattgagaaaagtacccgcgcgaatcacgaagtgagtttttgccacgaacgcacccaatacactccaatatgtctaaaattcatgttttggcgctttttgaactttttcattccggtcaaaaacatcgcacccgtggggctcaatacatgccaatat

SEQ ID NO: 47437 - DNA, 1255 bp, Oryza sativa
cactccgatatgccaaaattcatgtttgggccttttgaactttttcaatccggtcaaaaatatcgcacccgtggtgtctcaacatatgccaatattggtattaattgacaaaagtacccgcgcgaatcacgaagtgagtttttgccacgaacgcacccaatacactccaatatgtccaaaattcatgtttgggtgctttttgaactttttcattccggtcaaaaacatcgcacccgtggggtctcaacatatgccaatattggtattaattgacaaaagtacccgcgcgaatcacgaagtgagtttttgccacgaacgcacccaatacactccaatatgtctaaaattcatgttttggcgctttttgaactttttcattccggtcaaaaacatcgcacccgtggggctcaatacatgccaatattggcattaattgacaaaagtacccgcgcgaatcacgaagtgagtttttgccacgaacgcacccaatacactccaatatgaccaaaattcatgtttggatgctttttgaacttattcaatccggtcaaaaatatcgcacccgtggggtctcaacatatgccaatattggtattaattgacaaaagtacccgcgcgaatcacgaagtgagtttttgccacgaacgcacccaatacactccaatatgtccaaaattcatgtttggatgctttttgaacttattcaatccggtcaaaaatatcgcacccgtggggtctcaacatatgccaatattggtattaattgacaaaagtacccgcgcgaatcacgaagtgagtttttgccacgaacgcacccaatacactccaatatgtccagaaatcttgttttggtgctatttgaactttttcattccggtcaaaaatatcgcacccgtggggtctcaacatatgccaatattggtattaattgacaagagtacccgcgcgaatcacgaagtgagtttttgccacgaacgcacccgatacactccaataagtccaaaattcatgttttggcgctttttgaactttttcattccggtcaaaaacatcgcacccgtggggctcaatatatgccaatattggcattaattgacaaaagtacccgcgcgaagcacgaagtgagtttttgccacgaacgcacccagtacactccaatatgtgcaaaattcatgttttgatgctttttggactttttcattccggtcaaaaacatcgcacccgtggaaggttaatatatgccatatttggatta

SEQ ID NO: 47438 - DNA, 1120 bp, Oryza sativa
attaattgcaaatgtaccgcgcgaatcccgaagtgagttttttccacgaacgcacccaatagactccaacatgtccaaaattcatgttgggatgctttttgaacttatcaatccggtcaaaaatatcgcacccatggggtctcaatatatgccaaatttggtattattgacaaaagtacccgcgcgaatcacgaagtgagtttttgccacgaacgcatacaaatattggcattaattgacaaaagttcgtcgcgcaaatcacgaagtgagtttttgccacgaacgcacccaatacactccaatatgtccaaaattcatgtttggatgctttttgaacttattcaatccggtcaaaaacatcgcacccgtgggctctcaacatatgccaacattggcattaattgacaaaagtacccgcgcgaatcacgaagtgagtttttgccacgaacgcacccaatacactccaatatgtccaaaattcatgtttggatgctttttgaacttattcaatccggtcaaaaatatcgcacccgtggggtctcaacatatgccaatatttgtattaatggacaaaaatacccgcgcgaatcacgaagtgagtttttgccacgaacgcacccaatacactccaatatgtccaaaattcatgtttggatgctttttgaacttattcaatccggtcaaaaatatcgcatccgtggggtctcaacatatgccaatattggtattaattgacaaaagtacccgcgcgaatcacgaagtgagtttttgccacgaacgcacccaatacactccaatatgtccagaaatcttgttttggtgctatttgaactttttcattccggtcaaaaatatcgcacccgtggggtctcaacatatgccaatattggtattaattgacaagagtacccgcgcgaatcacgaagtgagtttttgccacgaacgcacccgatacactccaataagtccaaaattcatgttttggcgctttttgaactttttcaatccggtcaaaaacatcgcacccgtggggctcaacatatgccaatattggcattaattgacaaaagtacccgcgcgaagcacgaagtgagtttttgccacgaacgcacccaataca

SEQ ID NO: 47439 - DNA, 687 bp, Oryza sativa
aataccaatattggcatatgttgggaccccacgggtgcgatgtttttgaccggaatgaaaaagttcaaaaagcaccaaaacaaaatttctggacaaattggagtgtattgggtgcgttcgtggcaaaaactcacttcgtgattcgcgcgggtacttttgtcaattaataccaatattggcatatgttgagaccccacgggtgcggtgtttttgaccgcattgaataagttcaaaaagcatccaaacatgaattttggacatattggagtgtattgggtgtgttcgtggaaaaaactcacttcgtgattcgcgcaggtacttttgtcaattaataccaatattggcatatattgagaccccacgggtgcgatatttttgaccggattgaataagttcaaaaagcatccaaacatgaattttagacatattggagtgtattgggtgcgttcgtggcaaaaactcacttcgtgattcgcgcgggtacttttgtccattaattccaatattggcatatattgagccctcacgggtgcgatatttttgaccggaatgaaaaagtttaaaaagcaccaaaccaagatttttgacatattggagtgtattgggtgcgttcgtggcaaaaactcacttcgtgattcgcgcgacgaacttttggtaataagtgccaatagttagcatatataggcc

SEQ ID NO: 47440 - DNA, 620 bp, Oryza sativa
ccaaaattcatgttttggtgctttttgaactttttcattccggtcaaaaacatcgcacccgtggggctcaatatatgccaatattggcattaatggacaaaagtacccgcgcgaatcacgaagtgagtttttgccacgaacgcacccactacactccaatatgtccaaaattcatgtttggatgctttttgaacttattcaatccggtcaaaaatatcgcacccgtggggtctcaacatatgccaatatcggtattaattgacaaaagtacccgcgcgattcacgaagtgagtttttgccacgaacgcacccaatacactccaatatgtccaaaattcatgttttgatgctttttgaactttttcaatccggtcaaaaacatcgcacccgtggggctcaatatatgccaatattggcattaatggacaaaagtacccgcgcgaatcacgaagtgagtttttgccacgaacgcacccaatacacttcaatatgttcaaaattcatgttttggtgctttttgactttttattccggtcaaaaacatcgcacccgtggggctaatatatgccaatattgtattaattgacaaaagtacccgcgccgaatcacgaagtgagttt

SEQ ID NO: 47441 - DNA, 1413 bp, Oryza sativa
tatatgccaatattggcattaatggacaaaagtacccgcgcgaatcacgaagtgagtttttgccacgaacgcacccaatacactccaatatgtccaaaattcatgtttggatgctttttgaacttattcaatgcggtcaaaaacaccgcacccgtggggtctcaacatatgccaatattggtattaattgacaaaagtacccgcgcgaatcacgaagtgagtttttgccacgaacgcacccaatacactccaatatgtccagaaatcttgttttggtgctttttgaacttttccattccggtcaaaaatatcgcacccgtggggtctcaacatatgccaatattggtattaattgacaagagtacccgcgcgattcacgaagtgagtttttgccacgaacgcacccaatacactccaatatgtccaaaattcatgtttggatgctttttgaacttattcaatgcggtcaaaaacaccgcacccgtggggtctcaacatatgccaatattggtattaattgacaaaagtacccgcgcgaatcacgaagtgagtttttgccacgaacgcacccaatacactccaatatgtccagaaatcttgttttggtgctttttgaactttttcattccggtcaaaaacatcgcacccgtggggtctcaacatatgccaatattggtattaattgacaaaagtacccgcgcgaatcacgaagtgagtttttgccacgaacgcacccaatacactccaatatgtccaaaattcatgttttggtgctttttgaactttttcattccggtcaaaaatatcgcacccgtggggtctcaacatatgccaatattggtattaattgacaagagtacccgcgcgattcacgaagtgagtttttgccacgaacgcacccaatacactccaatatgtccaaaattcatgtttggatgctttttgaacttattcaatgcggtcaaaaacaccgcacccgtggggtctcaacatatgccaatattggtattaattgacaaaagtacccgcgcgaatcacgaagtgagtttttgccacgaacgcacccaatacactccaatatgtccagaaatcttgttttggtgctttttgaactttttcattccggtcaaaaatatcgcacccgtggggtctcaacatatgccaatattggtattaattgacaaaagtacccgcgcgaatcacgaagtgagtttttgccacgaacgcacccaatacactccaatatgtccaaaattcatgtttggatgctttttgaacttattcaatccggtcaaaaatatcgcacccgtggggtctcaacatatgccaatattggtattaattgacaaaagtacccgcgcgaatcacgaagtgagtttttgccacgaacgcacccaatacactccaatatgt

SEQ ID NO: 47442 - DNA, 1134 bp, Oryza sativa
gcgcgaatcacgaagtgagtttttgccacgaacgcatccaaatattggtattaattgacaaaagttaccgcgcaaatcacgaagtgagtttttgccacgaacgcacccaatacactccaatatgtccaaaaatcatgtttggatgctttttgaacttattcaatccggtcaaaaacatcgcacccgtggggtctcaacatatgccaatattggtattaattgacaaaagtacccgcgcgaatcacgaagtgagtttttgccacgaacgcacccaatacactccaatatgtccaaaaatcatgttttggtgctttttgaacttattcaatccggtcaaaaacatcgcacccgtggggtctcaacatatgccaatattggtattaattgacaaaagtacccgcgcgaatcacgaagtgagtttttgccacgaacgcacccaatacactccaatatgtccaaaaatcatgttttggtgctttttgaactttttcattccggtcaaaaacatcgcacccgtggggtctcaacatatgccaatattggtattaattgacaaaagtacccgcgcgaatcacgaagtgagtttttgccacgaacgcacccaatacactccaataagtccaaaattcatgttttggcgctttttgaactttttcattccggtcaaaaacatcgcacccgtggggctcaatatatgccaatattggcattaattgacaaaagtacccgcgcgaagcacgaagtgagtttttgccacgaacgcacccaatacactccaatatgtccaaaattcatgttttggtgctttttgaactttttcattccggtcaaaaacatcgcacccgtggggctcaatatatgccaatattggaattaatggacaaaagtacccgcgcgaatcacgaagtgagtttttgccacgaacgcacccaatacactccaatatgtccaaaattcatgtttggatgctttttgaactttttcaatccggtcaaaaacatcgcacccgtggggtctcaatatatgccaatattggtattaattgacaaaagtacccgcgcgaatcacgaagtgagtttttgtcacgaacgcacccaatagacttcaacatgttcaatattcatgtttggatgc

SEQ ID NO: 47443 - DNA, 798 bp, Oryza sativa
attgggtgcgttcgtggcaaaactcactttatgatccgcgcgggaacttttgtcaattaatgccaatattggcatatattgagaccccacgggtgcgatatttttgaccggaatgaaaaagttcaaaaagcaccaaaacatgaattttggacatattggagtgtattgggtgcgttcgtggcaaaaactcacttcgtgattcgcgcgggtacttttgtcaattaataccaatattggcatatattgagaccccacgggtgcgatatttttgaccggaatgaaaaagttcaaaaagcaccaaaacatgaattttggacatattggagtgtattgggtgcgttcgtggcaaaaactcacttcgtgattcgcgcgggtacttttgtcaattaataccaatattggcatatgttgagccccacgggtgcgatgtttttgaccggaatgaaaaagttcaaaaagcaccaaaacatgaattttggacatattggagtgtattgggtgcgttcgtggcaaaaactcacttcgtgattcgcgcgggtacttttgtcaattaatgccaatattggcatatattgagcccccacgggtgcgatgtttttgaccggaatgaaaaagttcaaaaagcaccaaaacatgaattttggacatattggagtgtattgggtgcgttcgtggaaaaaactcacttcgtgattcgcgcgggtactttggtcaattagtgccgacctgcaggcatatattgagcccaacggtgcgatgtttttgaccggatgaaaaaattcataaagcgccaaaaca

SEQ ID NO: 47444 - DNA, 705 bp, Oryza sativa
ttcattccggtcaaaaacatcgcacccgtggggtctcaacatatgccaatattggcattaattgacaaaagtacccgcgcgaatcacgaagtgagtttttgccacgaacgcacccaatacactccaatatgtccaaaattcatgttttggtgctttttgaactttttcattccggtcaaaaacatcgcacccgtggggctcaatatatgccaatattggcattaattgacaaaagtacccgcgcgaatcacgaagtgagtttttgccacgaacgcacccactacactccaatatgtccaaaattcatgtttggatgctttttgaacttattcaatccggtcaaaaatatcgcacccgtggggtctcaacatatgccaatattggtattaattgacaaaagtacccgcgcgattcacgaagtgagtttttgccacgaacgcacccaatacactccaatatgtccaaaattcatgttttggtgctttttgaactttttcattccggtcaaaaacatcgcacccgtggggctcaatatatgccaatattggcattaatggacaaaagtacccgcgcgaatcacgaagtgagttttgcaacaaacgcacccatacactccaatatgtccaaaaattcatgtttggtgctttttgactttttcattccggtaaaaacatcgcaccctgggaggctcatatatgccaatat

SEQ ID NO: 47445 - DNA, 1270 bp, Oryza sativa
atccaaacatgaattttggacatatcggagtgtattgggtgcgttcgtggcaaaaactcacttcgtgattcgcgcaggtacttttgtcaattaataccaatattggcatatattgagaccccacgggtgcgatatttttgaccggattgaataagttcaaaaagcaacaaaacaagatttctggacatattggagtgtattgggtgcgttcgtggcaaaaactcacttcgtgatttgcgcgacgaacttttgtcaattaatgccaatatttgtatgcgttcgtggcaaaaactcacttcgtgattcgcgcgggtacttttgtcagttaataccaatattggcatatgttgagaccccacgggtgcgatatttttgaccggattgaataagttcgaaaagcatccaaacatgaattttagacatattggagtgtattgggtgcgttcgtggcaaaaactcacttcgtgattcgcgcgggtacttttgtcaataagtgctaatatttagcatatataggcccacatgggtgcgatgtttttgaccggaatgaaaaagttaaaaaagtaccaaaacacaatttctggacaaattggagtgtattggacgcgttcgtggcaaaaactcacttcgtgattcgcgcggcgaacttttatcaattaatgccaatattggcatatatagcccccatgggtgcgatgtttttgactggattcaaaaagttcaaaaagcatccaaacatgatttttgagcatattggagtgtattgggtgcgttcgtggcaaacactcacttcgtgattcgcacgacaaacttttgtcaataagtgccaatatttagcatatataggcccacacgggtgcgatgtttttgaccggaatgaaaatgttgaaaaagcaccaaaacatgatttttggacatattggagtctattggctgcattcgtggcaaaaactcatttcgtgattcgcgcggcgaacttttgtcaattaatgccaatattggcatatattgagccttcacgggtgcgatgtttttgaccggaatgaaaaagttcaaaaagcaccaaaacatgaattttggacatattggagtgtattgggtgcgttcgtggcaaaaactcacttcgtgattcgcgcgggtacttttgtcaattaataccaatattggcatatgttgagagcccacgggtgcgatgtttttgaccggattgaataagttcaaaaaggcatccaaacatgaattttggacatattggagtgtattgggtgcg

SEQ ID NO: 47446 - DNA, 661 bp, Oryza sativa
tttgtcaattaataccaatattggcatatattgagaccccacgggtgcgatatttttgaccggattgaatatgttcaaaaagcatccaaacatgaattttggacatgttggagtctattgggtgcgttcgtggtaaaaactcacttcgtgattcgcgcgggtacttttgtccattaatgccaatattggcatatattgagccccacgggtgcgatgtttttgaccggaatgaaaaagttctaaaagcaccaaaacatgaattttggacatattggagtgtattgggtgcgttcgtggcaaaaactcacttcgtgattcgcgcatgtacttttgtcaattaataccaatattggcatatgttgagaccccacgggtgcgatatttttgaccggattgaataagttcaaaaagaaccaaaacaagatttctggacatattggagtgtattgggtgcgttcgtggcaaaaactcacttcgtgaatcgcgcgggtacttttgtccattaataccgatattggcatatgttgagaccccacgggtgcgatgtttttgaccggattgaataagttcaaaaagcatccaaacatgaattttggacatattagagtgtattgggtgcgttcgtggaaaaaactcacttcgagattcgcgccggtacttt

SEQ ID NO: 47447 - DNA, 1606 bp, Oryza sativa
aaaagcatccaaccatgaattttgaacatattgaagtgtattgggtgcgttcgtagcaaaaactcacttcgtgaatcgcgcgggtactcttgtcaattaataccaatattggcatatgttgagaccccacgggtgcgatatttttgaccggaatggaaaagttcaaaaagcaccaaaacaagatttctggacatattggagtgtattgggtgcgttcgtggcaaaaactcacttcgtgattcgcgcgggtacttttgtcaattaataccaatattggcatatgttgagaccccacgggtgcggtgtttttgaccgcattgaataagttcaaaaagcatccaaacatgaattttggacatattggagtgtattgggtgcgttcgtggcaaaaactcacttcgtgaatcgcgcgggtacttttgtcaattaataccaatattggcatatgttgagaccccacgggtgcgatatttttgaccggaatgaaaaagttcaaaaagcaccaaaacaagatttctggacatattggagtgtattgggtgcgttcgtggcaaaaactcacttcgtgatttgcgcggttacttttgtcaattaataccaatatttggatgcgttcgtggcaaaaactcacttcgtgattcgcgcgggtacttttgtcaattaataccaatattggcatatattgagaccccacgggtgcgatatttttgaccggattgaatatgttcaaaaagcatccaaacatgaattttggacatgttggagtctattgggtgcgttcgtggcaaaaactcacttcgtgattcgcgcgggtacttttgtccattaatgccaatattggcatatattgagccccacgggtgcgatgtttttgaccggaatgaaaaagttctaaaagcaccaaaacatgaattttggacatattggagtgtattgggtgcgttcgtggcaaaaactcacttcgtgattcgcgcatgtacttttgtcaattaataccaatattggcatatgttgagaccccacgggtgcgatatttttgaccggattgaataagttcaaaaagcaccaaaacaagatttctggacatattggagtgtattgggtgcgttcgtggcaaaaactcacttcgtgaatcgcgcgggtacttttgtcaattaataccgatattggcatatgttgagaccccacgggtgcgatgtttttgaccggattgaataagttcaaaaagcatccaaacatgaattttcgacatattggagtgtattgggtgcgttcgtggcaaaaactcacttcgtgaatcgcgcgggtacttttgtcaattaataccgatattggcatatgttgagaccccacgggtgcgatgtttttgaccggattgaataagttcaaaaagcatccaaacatgaattttggacatattggagtgtatggggtgcgttcgtggcaaaaactcacttcgtgattcgcgcgggtacttttgtcaattaatgccaatattggcatatattgagccccacgggtgcgattgttttgaccggattgaaaaagttcaaaaagcgccgaaacatggaatttggacttattggagggttttggtgcgttcgtg

SEQ ID NO: 47448 - DNA, 1114 bp, Oryza sativa
gatttttgaacatattgagtgtatagggtgcgttcgtgcaaaaaactcacttcgtgattcgcgcgggtacttttgtcaattaataccaataatggcatatgttaagaccccacgggtgcgatgtttttgaccggattgaataagttcatagagcatccaaccatgaattttggacatattggagtgtattgggtgcgttcgtggcaaaaactcacttcgtgattcgcgcgggtacttttgtcaattaatgccaatattggcatatattgagaccccacgggtgcgatgtttttgaccggattgaaaaagttcaaaaagcgccaaaacatgaattttggacatattggagtgtattgggtgcgttcgtggcaaaaactcacttcgtgaatcgcgcgggtacttttgtcaattaataccaatattggcatatattgagaccccacgggtgcgatatttttgaccggattgaataagttcaaaaagcatcaaaacatgaattttggacatattggagtgtattgggtgcgttcgtggcaaaaactcacttcgtgattcgcgcgggtacttttgtcaattaataccaatattggcatatattgagccccacgggtgcgatgtttttgaccggaatgaaaaagttcaaaaagcaccaaaacatgaattttggacatattggagtgtattgggtgcgttcgtggcaaaaactcacttcgtgattcgcgcgggtacttttgtcaattaataccaatattggcatatattgagccccacgggtgcgatgtttttgaccggaatgaaaaagttcaaaaagcaccaaaacatgaattttggacatattggagtgtatagggtgcgttcgtggcaaaaactcacttcgtgaatcgcgcgggtacttttgtcaattaataccaatattggcatatgttgagaccccacgggtgcgatgtttttgaccggattgaataagttcaaaaagcatccaaacatgaattttggtcatattggagtgtattgggtgcgttcgtggcaaaaactcacttcgtgattcgcgcgggtacttttgtccattaatgccaatattggcaggggatcctctagagtcgacctcaggcat

SEQ ID NO: 47449 - DNA, 645 bp, Oryza sativa
tgaactttttcattccggtcaaaaacatcgcacccgtggggctcaatacatgccaatattggcattaattgacaaaagtacccgcgtgaatcacgaagtgagtttttgccacgaacgcacccaatagactccaatatgtccaaaattcatgtttggatattttttgaacttattcaatccggtcaaaaacatcgcaaccgtggggtctcaacatatgccaatattggtattaattgacaaaagtacccgcgcgaatcacgaagtgagtttttgccacaaacgcacccaatacactccaatatgtccaaaattcatgttttggtgctttttgagctttttcgttctggtcaaaaacatcgcacccgtggaggctcaatatacgccaatattggcattaattgacaaaagttcgtcgcgcgaatcacgaagtgagtttttgccacgaacgcacccaatacacttcaatatgtccagaaatcttgttttgttgctttttgaacttattcaatccgggtaaaaacatcgcacccgtgggctcttaacatatgccaatattggcattaattgacaaaagtacccgcgcgattacgaagtgagtttttgccacgaacgcacccaatacactccatatgtctaaaattcatg

SEQ ID NO: 47450 - DNA, 2383 bp, Oryza sativa
tgctttttgaacttattcaatccggtcaaaaacaccgcacccgtggggtctcaacatatgccaatattggtattaattgacaaaagtacccgcgcgaatcacgaagtgagtttttgccacgaacgcacccaatacactccaatatgtccagaaatcttgttttggtgctatttgaactttttcattccggtcaaaaatatcgcacccgtggggtctcaacatatgccaatattggtattaattgacaagagtacccgcgcgaatcacgaagtgagtttttgccacgaacgcacccgatacactccaataagtccaaaattcatgttttggcgcttttcgaactttttcattccggtcaaaaacatcgcacccgtggggctcaatatatgccaatattggcattaattgacaaaagtacccgcgcgaagcacgaagtgagtttttgccacgaacgcacccagtacactccaatatgtccaaaattcatgttttggtgctttttgaactttttcattccggtcaaaaacatcgcacccgtggaggctcaatatatgccaatattggaattaatggacaaaagtacccgcgcgaatcacgaagtgagtttttgccacgaacgtacccaatacactccaatatgtccaaaattcatgtttggatgctttttgaactttttcattccggtcaaaaacatcgcacccgtggatgctcaatatatgccaatattggaattaatggacaaaagtacccgcgcgaatcacgaagtgagtttttgccacgaacgcacccaatacactccaatatgtccaaaattcatgtttggatgctttttgaacttattcaatccggtcaaaaatatcgcacccgtggggtctcaatatatgccaatattggtattaattgacaaaagtacctgcgcgaatcacgaagtgagtttttgccacgaacgctcccaatagactccaacatgtccaaaattcatgtttggatgctttttgaacttattcaatccggtcaaaaatatcgcacccgtggggtctcaatatatgccaaaattggtattaattgacaaaagtacccgcgcgaatcacgaagtgagtttttgccacgaacgcatacaaatattggcattaactgacaaaagttcgtcgcgcaaatcacgaagtgagtttttgccacgaacgcacccaatacactccaatatgtccagaaatcttgttttgttgctttttgaacttattcaatccggtcaaaaacatcgcacccgtggggtctcaacatatgccaatatttgtattaattgacaaaagtacccgcgcgaatcacgaagtgagttttttccacgaacgcacccaatagactccaacatgtccaaaattcatgtttggatgctttttgaacttattcaatccggtcaaaaatatcgcacccatggggtctcaatatatgccaaaattggtattaattgacaaaagtacccgcgcgaatcacgaagtgagtttttgccacgaacgcatacaaatattggcattaattgacaaaagttcgtcgcgcaaatcacgaagtgagtttttgccacgaacgcacccaatacactccaatatgtccaaaattcatgtttggatgctttttgaacttattcaatccggtcaaaaacatcgcacccgtgggctctcaacatatgccaacattggcattaattgacaaaagtacccgcgcgaatcacgaagtgagtttttgccacgaacgcacccaatacactccaatatgtccaaaattcatgtttggatgctttttgaacttattcaatccggtcaaaaatatcgcacccgtggggtctcaacatatgccaatattggtattaattgacaaaagtacccgcgcgaatcacgaagtgagtttttgccacgaacgcacccaatacactccaatatgtccaaaattcatgtttggatgctttttgaacttattcaatccggtcaaaaatatcgcacccgtggggtctcaacatatgccaatattggtattaattgacaaaagtacccgcgcgaatcacgaagtgagtttttgccacgaacgcacccaatacactccaatatgtccaaaattcatgtttggatgctttttgaacttattcaatccggtcaaaaatatcgcacccgtggggtctcaacatatgccaatattggtattaattgacaaaagtacccgcgcgaatcacgaagtgagtttttgccacgaacgcacccaatacactccaatatgtccaaaaatcatgttttggcgctttttgaactttttcattcccgtcaaaaacatcgcacccgtgggggctcaatatatgccaatattggtattattggacaagagttcccgcgcgaat

SEQ ID NO: 47451 - DNA, 832 bp, Oryza sativa
caaaaacaccgcaccaatggggttcaacatatgccaacattggcattaattgacaaaagtacccgcgcgaatcacgaagtgagtttttgccacgaacgcacccaatacactccaatatgtccaaaattcatgttttggtgctttttgaacttttccattccggtcaaaaatatcgcacccgtggggtctcaacatatgccaatattggtattaattgacaaaagtacccgcgcgaatcacgaagtgagtttttgccacgaacgcacccaatacactccaatatgtccaaaattcatgtttggatgctttttgaacttattcaatccggtcaaaaacatcgcacccgtggggtctcaacatatgccaatattggtattaattgacaaaagtacccgcgcgaatcacgaagtgagtttttgccacgaacgcacccaatacactccaatatgtccagaaatcttgttttggtgctttttgaactttttcattccggtcaaaaacatcgcacccgtggggtctcaacatatgccaatattggtattaattgacaaaagtacccgcgcgaatcacgaagtgagtttttgccacgaacgcacccaatacactccaatatgtccaaaattcatgttttggcgctttttgaactttttcattccggtcaaaaacatcgcacccgtggggctcaatatatgccaatattggcattaattgacaaaagtacccgcgcgaatcacgaagtgagtttttgccacgaacgcacccaatacactccaatatgtccagaaatcttgtttaaaaactttttgaacttattcaatccggttaaaaacat

SEQ ID NO: 47452 - DNA, 983 bp, Oryza sativa
caatccggtcaaaatatgcaccgtgggtctcaacatatgccaatatcggtataattgccaaaagtaccgcgcgattcacaaagtgagtttttgccacgaacgcacccaatacactccaatatgtccaaaattcaagttttggcgctttttgaactttttcattccggtcaaaaacatcgcacccgtggggctcaatatatgccaatattggcattaatggacaaaagtacccgcgcgaatcacgaagtgagtttttgccacgaacgcacccaatacactccaatatgtccaaaattcatgtttggatgcttttcgaacttactcaatccggtcaaaaatatcgcacccgtggggtctcaacatatgccaatattggtactaattgacaagagtacccgcgcgattcacgaagtgagtttttgccacgaacgcacccaatacactccaatatgtccaaaattcatgtttggatgctttttgaacttattcaatccggtcaaaaatatcgcacccgtggggtctcaacatatgccaatattggtattaattgacaaaagtacccgcgcgagtcacgaagtgagtttttgccacgaacgcacccaatacactccaatatgtccaaaattcatgtttggatgctttttgaacttattcaatccggtcaaaaacatcgcacccgtggggtctcaacatatgccaatattggtattaattgacaaaagtacccgcgcgattcacgaagtgagtttttgccacgaacgcaccctatacactccaatatgtccaaaattcatgttttggtgctttttgaactttttcattccggtcaaaaacatcgcacccgtgggggctcaacatatgccaatattggtattaattgacaaaagtacccgcgcgaatcacgtagtgagtttttgccacgaacgcacccaatacactccaatatgtctaaaaagcttgttttggtgctttttgaacttttt

SEQ ID NO: 47453 - DNA, 1105 bp, Oryza sativa
  unsure (1)..(1105): unsure at all n locations
tccccgcaatgaataagttccaagagcatccaaacatganttttggacatattgaagtgtattgcgtgcgttcgaacaaaaactcacttggtgatcgcgcgggtactctgtcaaataataccaaatattggcatatgttgagaccccacgggtgcgatatttttgaccgaaatgaaaagttcaaaaagcaccaaaacaagatttctgaacatattgaagtgtatggggtgggcgttcggacaaaaactcacttcgtgattcgcgcgggtacttttgtcaattaatacaaatattggcatatgttagcacccccggggtccggtgtttttgaccatttgaataagttcaaaaagcatccaaacataaattttgcacatattggagtgtattgggtgcgttcgtgacaaaaactcatttcgtgaatcgcgcgggtacttttgtcaattaataccaatattggcatatgttgagaccccacgggtgcgatatttttgaccggaatgaaaaagtttaaaaagcaccaaaacaagatttctggacatattggagtgtattgggtgcgttcgtggcaaaaactcacttcgtgatttgcgcggttacttttgtcaattaataccaatatttggatgcgttcgtggcaaaaactcacttcgtgattcgcgcgggtacttttgtcaattaataccaatattggcatatattgagaccccacgggtgcgatatttttgaccggattgaatatgctcaaaaagcatccaaacatgaattttggacatattggagtgtattgggtgcgttcgtggcaaaaactcacttcgtgattcgcgcgggtacttttgtcaattaatgccaatattggcatatattgagccccacgggtgcgatgtttttggccggaatgaaaaagttcaaaaagcgccaaaacttgaattttggacatattggagtgtattgggtgcgttcgtggcaaaaactcacttcgtgaatcgcgcgggtacttttgtcaattaataccgatattggcatatgttgagaccccacgggtgcaatatttttgaccggattgaataagttcaaaaagcatccaaacatgaattttggacat

SEQ ID NO: 47454 - DNA, 725 bp, Oryza sativa
aaaagcatccaaacatgaattttagacatattggagtgtattgggtgcgttcgtggcaaaaactcacttcgtgattcgcgcgggtacttttgtcaataagtgctaatatttagcatatataggcccacatgggtgcgatgtttttgaccggaatgaaaaagttaaaaaagtaccaaaacacaatttctggacaaattggagtgtattggacgcgttcgtggcaaaaactcacttcgtgattcgcgcggcgaacttttatcaattaatgccaatattggcatatatagcccccatgggtgcgatgtttttgactggattcaaaaagttcaaaaagcatccaaacatgatttttgagcatattggagtgtattgggtgcgttcgtggcaaacactcactttgtgattcgcacgacaaacttttgtcaataagtgccaatatttagcatatataggcccacacgggtgcgatgtttttgaccggaatgaaaatgttgtaaaagcaccaaaacatgatttttggacatattggagtctattggctgcattcggggcaaaaactcattttgtgattcgcgcggcgaacttttgtcaattaatgccaatattggcatatattgagccttcacgggtgcgatgtttttgaccggaatgaaaaagttcaaaaagcaccaaaacatgaattttggacatattggagtggatttgggtgcgttcgtggaaaaact

SEQ ID NO: 47455 - DNA, 665 bp, Oryza sativa
ctttttgaacttattcaatgcggtcaaaaacaccgcacccgtggggtctcaacatatgccaatattggtattaattgacaaaagtacccgcgcgaatcacgaagtgagtttttgccacgaacgcacccaatacactccaataagtccaaaatttatgttttggcgatttttgaactttttcattccggtcaaaaacatcgcacccgtggggctcaatatatgccaatattggcattaattgacaaaagtacccgcgcgaagcacgaagtgagtttttgccacgaacgcacccaatacactccaatatgtccaaaattcatgttttggtgcttttagaactttttcattccggtcaaaaacatcgcacccgtggggctcaatatatgccaatattggcattaatggacaaaagtacccgcgcgaatcacgaagtgagtttttgccacgaacgcacccaatacactccaatatgtccaaaattcatgtttggatgctttttgaacttattcaatccggtcaaaaatatcgcacccgtggggtctcaacatatgccaatatcggtattaattgacaaaagtacccgcgcgattcacgaagtgagtttttgccacgaacgcacccaatacactccaatatgtccaaaattcaagttttggcgctttttg

SEQ ID NO: 47456 - DNA, 750 bp, Oryza sativa
tgtcaattaataccaatattggcatatgttgagaccccacgggtgcgatatttttgaccggaatgaaaaagttcaaaaagcaccaaaacatgaattttggacatattggagtgtattgggtgcgttcgtggcaaaaactcacttcgtgattcgcgcgggtacttttgtcaattaataccaatattggcatatgttgagaccccacgggtgcgatgtttttgaccggattgaataagttcaaaaagcatccaaacatgaattttggacatattggagtgtattgggtgcgttcgtggcaaaaactcacttcgtgattcgcgcgggtacttttgtcaattaataccaatattggcatatgttgagaccccacgggtgcgatatttttgaccggattgaataagttcaaaaagcatccaaacatgaattttggacatattggagtgtattgggtgcgttcgtagcaaaaactcacttcgtgattcgcgcgggtacttttgtcaattaataccaatattggcatatgttgagaccccaccggtgcgatatttttgaccggatggaaaagtcaaaaagcacccaaacatgaattttggacatattagtattgggtgcgttcgtggcaaaaactcacttcttgaattgcgcgggtacttttgtcattaataccaatatggcatatgttgagaccccacgggtgcgatgtttttgaccgccttgaataatttcaaaaggcatcgaacaagaattttg

SEQ ID NO: 47457 - DNA, 1130 bp, Oryza sativa
tccagaaatcatgttttggtgctttttgaaatttttcattccggtcaaaaacatcgcacccgtgggggcacaatatttgccaatattgacattaattgacaaaagttcccgcgcgaatcacgaaatgagtttttgccacgaacgcacccaatagactccaatatgtccaaaaatcatgttttggtgctttttcaacattttcattgcggtcaaaaacatcgcacccgtgtgggcccatatatgctaaatattggcacttattgacaaaagttcgtcgcgcgaatcacgaagtgagtttttgccacgaacacacccaatacactccaatatgtccaaaattcatgtttggatgctttttgaacttattcaatccggtcaaaaatatcgcacccgtggggtctcaatatatgccaatattggtattaattgacaaaagtacccgcgcgaatcacgaagtgagtttttgccacgaacgcacccaatacactccaatatggccaaaattcatgttttggtgctttttgaactttttcattccggtcaaaaacatcgcacccgtgggggctcaatatatgccaatattggcattaattgacaaaagttcccgcgcgaatcacgaagtgagttttttccacgaacgcacccaatacactccaatatgtccagaaatcatgttttggtgctttttgaactttttcattccggtcaaaaacatcgcacccgtggaggctcaatatatgccaatattggcattaattgacaaaagtacccgcgcgaatcacgaagtgagtttttgccacgaacgcacccaatacactccaatatgtccaaaattcatgtttggatgctttttgaacttattcaatccggtcaaaaatatcgcacccgtggggtctcaatatatgccaatattggtattaattgacaaaagtacctgcgcgaatcacgaagtgagtttttgccacgaacgcacccaatacactccgacatgtccaaaattcatgtttggatgctttttgacttattcaatccggtcaaaaatatcgcacccagtgggggtccaacatatgccaatattggtattaaatgtgacaataggtacccgcgggacatcacgaagtgagtttttg

SEQ ID NO: 47458 - DNA, 1213 bp, Oryza sativa
caaaaacatcgcacccgtggaggctcaatatatgccaatattggcattaattgacaaaagtacccgcgcgaatcacgaagtgaatttttgccacgaacacacccaatacactccaatatgtccagaaatcatgttttggtgctttttgaactttttcattccggtcaaaaacatcgcacccgtggaggctcaatatatgccaatattggaattaatggacaaaagtacccgcgcgaatcacgaagtgagtttttgccacgaacgcacccaatacactccgatatgtccaaaattcatgtttggatgctttttgaacttattcaatccggtcaaaaatatcgcacccgtggggtcccaacatatgccaatattggtattaattgacaatagtacccgcgcgaatcacgaagtgagtttttgccacgaacgcacccaacagactccaatatgtccaaaattcatgtttggatgctttttgaacatattcaatccggtcaaaaacatcgcacccatggggtctcaacatatgccaatattggtattaattgacaaatgtacccgcgcgaatcataaagtgagtttttgccacgaacgcacccaatacactccaatatgtccaaaattcatgatttggtgctttttgaactttttcattccggtcaaaaacatcgcacccgtgggggctcaatatatgccaatattgacattaattgacgaaagttcccgcgcgaaacacgaagtgagtttttgccacgaacgcacccaatacactccaatatgtccagaaatcatgttttggtgctttttcaacattttcattccggtcaaaaacatcgcacccgtgtgggcctatatgtgctaaatattggcacttattgacaaaagttcgtcgtgcgaatcacgaagtgagtttttgccacgaacgcacccaatacactctaatatgtccaaaaatcatgtttggatgctttttgaactttttgaatccagtcaaaaacatcgcacccgtggggctcaatatatgccaatattggcattaattgataaaagttcgccgcgcgaatcacgaagtgagtttttgccacaaacgcacccaatagactccaatatgtccaaaattcatgtttggatgctttttgaacttattcaatccggtcaaaaacatcgcacccgtgggttctaacatatgccaatattgtattaatgacaaaag

SEQ ID NO: 47459 - DNA, 1695 bp, Oryza sativa
cgcgaatcacgaagtgagtttttgccaggaactttcccaatacactccaatatgtccaaaattcatgtttggatgctttttgaacttattcaatccggtcaaaaatatcgcacccgtggggtctcaacatatgccaatattggtattaattgacataagtacccgcgcgaatcacgaagtgggtttttgccacgaacgcacccaatacactccaatatgtccaaaattcatgttttggcgctttttgaactttttcattccagtcaaaaacatcgtacccgtgtggctcaatatatgccaatattggaattaatggacaaaagtacccgcgcgaatcacgaagtgagtttttgccacgaacgcacccaatacactccgatatgtccaaaattcatgtttggatgctttttgaacttatacaatccggtcaaaaatatcgcacccgtggggtcccaacatatgccaatattggtattaattgacaaaagtacccgcgcgaatcacgaagtgaatttttgccacgaacacacccaatacacaccaatatgtccagaaatcatattttggtgctttttgaactttttcattccggtcaaaaacatcgcacccgtgttggcctatatatgctaactattggcacttattgacaaaagttcgtcgcgcgaatcacgaagtgagtttttgccacgaacgcacccaatacactccaatatgtccagaaatcttgttttggtgctttttgaactttttcattccggtcaaaaatatcgcacccgtggaggctcaatatatgccaatattggaattaatggacaaaagtacccgcgcgaatcacgaagtgagtttttgccacgaacgcacccaatacactccaatatgtctaaaattcatgtttggatgctttttgaacttattcaatccggtcaaaaatatcgcacccgtggggtctcaatatatgccaatattggtattaattgacaaaagtacctgcgcgaatcacgaagtgagttttttccacgaacacacccaatacactccaatatgtccaaaattcatgtttggatgctttttgaacttattcaatgcggtcaaaaacactgcacccgtggggtctcaacatatgccaatattggtattaattgacaaaagtacccgcgcgaatcacgaagtgagtttttgccacgaacgcacccaatacactccaatttgtccagaaattttgttttggtgctttttgaactttttcattccggtcaaaaacatcgcacccgtggggtcccaacatatgccaatattggtattaattgacaaaagtacccgcgcgaatcacgaagtgagtttttgccacgaacgcacccaatacactctaatatgtcaaaattatggtttggcgctttttgaacttttttattccggtcaaaaacatcgacccgtgggctcaatatatgccaatattggcattaatggacaaaagacccgcgcgaatcacgaagtgagttttgccacaacgcacccaatacactccaatatgtccaaaaatcatgttttgggctctagaactttttattcagcaaaaacatcgcacccgggggctaatatatgccaatatggctttatggacaaaagtccccggcgaatcacaaatgagtttttgcaaaacgcccccaataacttcgatatgtccaaaattatgtt

SEQ ID NO: 47460 - DNA, 1707 bp, Oryza sativa
tagcagaaatcttgttttggtgctttttgaacttttccattccggtcaaaaatatcgcacccgtggggtctcaacatatgccaatattggtattaattgacaagagtacccgcgcgattcacgaagtgagttttttccacgaacacacccaatacactccaatatgtccaaaattcatgtttggatgctttttgaacttattcaatgcggtcaaaaacaccgcacccgtggggtctcaacatatgccaatattggtattaattgacaaaagtacccgcgcgaatcacgaagtgagtttttgccacgaacgcacccaatacactccaatttgtccagaaattttgttttggtgctttttgaactttttcattccggtcaaaaacatcgcacccgtggggtcccaacatatgccaatattggtattaattgacaaaagtacccgcgcgaatcacgaagtgagtttttgccacgaacgcacccaatacactctaatatgtctaaaattcatgttttggcgctttttgaactttttcattccggtcaaaaacatcgcacccgtggggctcaatacatgccaatattggcattaattgacaaaagtacccgcgtgaatcacgaagtgagtttttgccacgaacgcacccaatagactccaatatgtccaaaattcatgtttggatattttttgaacttattcaatccggtcaaaaacatcgcaaccgtggggtctcaacatatgccaatattggtattaattgacaaaagtacccgcgcgaatcacgaagtgagtttttgccacaaacgcacccaatacactccaatatgtccaaaattcatgttttggtgctttttgagctttttcgttctggtcaaaaacatcgcacccgtggaggctcaatatacgccaatattggcattaattgacaaaagttcgtcgcgcgaatcacgaagtgagtttttgccacgaacgcacccaatacactccaatatgtccagaaatcttgttttgttgctttttgaacttattcaatccggttaaaaacatcgcacccgtgggctctcaacatatgccaatattggcattaattgacaaaagtacccgcgcgaatcacgaagtgagtttttgccacgaacgcacccaatacactccaatatgtccaaaattcatgtttggatgctttttgaacttattcaatccggtcaaaaacatcgcacccgtggggtctcgacatatgccaatatcggtattaattgacaaaagtacccgcgcgattcacgaagtgagtttttgccacgaacgcacccaatacactccaatatgtccaaaattcaagttttggcgctttttgaactttttcattccggtcaaaaacattgtacccgtgggctctcaacatatgccaatattggcattaattgacaaaagtacccgcgcgaatcacgaagtgagtttttgccacgaacgcacccaatacactccaatatgtccaaaatttttgttttggtgctttttgaactttttcaatccggtcaaaaatatcgcacccgtggggtctcaacatatgccaatattggtattaattgacaaaagtacccgcgcgaatcacgaagtgagtttttgccacgaacgcacccaatacactctaatatgtctaaaattcatgttttggcgctttttgaactttttcattccagtcaaaaacatcg

SEQ ID NO: 47461 - DNA, 2745 bp, Oryza sativa
tcgcacccgtggaggctcaatatatgccaatattggtattaattgacaaaagtacccgcgcgaatcacgaagtgagtttttgccacgaacgcacccaatacactccaatatgtccaaaattcatgtttggatgctttttgaacttattcaatccggtcaaaaatatcgcacccgtggggtctcaacatatgccaatatcggtattaattgacaaaagtacccgcgcgattcacgaagtgagtttttgccacgaacgcacccaatacactccaatatgtccaaaattcatgttttggcgctttttgaactttttcattccggtcaaaaacatcgcacccgtggggctcaatatatgccaatattggcattaatggacaaaagtacccgcgcgaatcacgaagtgagtttttgccacgaacgcacccaatacactccaatatgtccaaaattcatgttttggcgctttttgaactttttcattccggtcaaaaacatcgcacccgtggggctcaatatatgccaatattggcattaattgacaaaagtacccgcgcgaatcacgaagtgagtttttgccacgaacgcacccaatacactccaatatgtccaaaattcatgtttggatgctttttgaacttattcaatccggtcaaaaacatcgcacccgtggggctcaacatatgccaatattggcattaattgacaaaagtacccgcgcgaatcacgaagtgagtttttgccacgaacgcacccaatacactccaatatgtccaaaattcatgtttggatgctttttgaacttattcaatccggtcaaaaatatcgcacccgtggggtctcaacatatgccaatatcggtattaattgacaaaagtacccgcgcgaatcacgaagtgagtttttgccacgaacgcacccaatacactccaataagtccaaaattcatgttttggcgctttttgaactttttcattccggtcaaaaacatcgcacccgtggggctaaatatatgccaatattggcattaattgacaaaagtacccgcgtgaagcacgaagtgagtttttgccacgaacgcacccaatacactccaatatgtccaaaattcatgttttggtgctttttgaactttttcattccggtcaaaaacatcgcacccgtggggctcaatatatgccaatattggcattaattgacaaaagtacccgcgcgaatcacgaagtgagtttttgccacgaacgcacccagtacactccaatatgtccaaaattcatgttttggtgctttttgaactttttcattccggtcaaaaacatcgcacccgtggggctcaatatatgccaatattggcattaatggacaaaagtacccgcgcgaatcacgaagtgagtttttgccacgaacgcacccaatacactccaatatgtccaaaattcatgtttggatgctttttgaacttattcaatccggtcaaaaatatcgcacccgtggggtctcaacatatgccaatattggtattaattgacaaaagtacccgcgcgaatcacgaagtgagtttttgccacgaacgcacccaatacactccaatatgtccaaaattcatgttttggtgctttttgaactttttcattccggtcaaaaacatcgcacccgtggggctcaatatacgccaatattggcattaatggacaaaagtacccgcgcgaatcacgaagtgagtttttaccacgaacgcacccaatagactccaacatgtccaaaattcatgtttggatgctttttgaacatattcaatccggtcaaaaatatcgcacccgtggggtctcaatatatgccaatattggtattaattgacaaaagtaaccgcgcaaatcacgaagtgagtttttgccacgaacgaacccaatacactccaatatgtccagaaatcttgttttggtgctttttgaactttttcattccggtcaaaaatatcgcacccgtggggtctcaacatatgccaatattggtattaattgacaaaagtacccgcgcgattcacgaagtgagtttttgccacgaacgcacccaatacactccaatatgtccaaaattcatgtttggatgctttttgaacttattcaatgcggtcaaaaacaccgcacccatggggtctcaacatatgccaatattggtattaattgacaaaagtacccgcgcgaatcacgaagtgagtttttgccacgaacgcacccaatacactccaatatgtccagaaatcttgttttggtgctttttgaactttttcattccggtcaaaaacatcgcacccgtggggtctcaacatatgccaatattggtattaattgacaaaagtacccgcgcgaatcacgaagtgagtttttgccacgaacgcacccaatacactccaatatgtctaaaattcatgttttggcgctttttgaactttttcattccggtcaaaaacatcgcacccgtggggctcaatacatgccaatattggcattaatggacaaaagtacccgcgcgaatcacgaagtgagtttttgccacgaacgcacccaatacactccaatatgaccaaaattcatgtttggatgatttttgaacttattccatccggtcaaaaatatcgcacccgtggggtctcaacatatgccaatattggtattaattgacaaaagtacccgcgcgaatcacgaagtgagtttttgccaaaaacgcacccaatacactccaatatgt

SEQ ID NO: 47462 - DNA, 1343 bp, Oryza sativa
cattccggtcaaaaacatcgcacccgtggaggctcaatatatgccaatattggcattaattgacaaaagtacccgtgcgattcacgaagtgagttattgccacgaacgcacccaatacactccaatatgtccaaaattcaagttttggcgctttttgaactttttcattccggtcaaaaacatcgcacccgtggggtctcaacatatgccaatattggtattaattgacaaaagtacccgcgcgaatcacgaagtgagtttttgccacgaacgcacccaatacactccaatatgtccaaaattcatgttttggtgctttttgagctttttcattccggtcaaaaacatcgcacccgtggaggctcaatatacgccaatattggcattaattgacaaaagttcgtcgcgcgaatacactccaatatgtccagaaatcttgttttggtgctttttgaacttattcaatccggtcaaaaatatcgcacccgtgggctctcaacatatgccaatattggcattaattgacaaaagtacccgcgcgaatcacgaagtgagtttttaccacgaacgcacccaatacactccaatatgtccaaaattcatgtttggatgctttttgaacttattcaatccggtcaaaaacatcgcacccgtgggctctcaacatatgccaatattggtattaattgacaaaagtacccgcgcgaatcacgatgtgagtttttgccacgaacgcacccaatacactccaatatgtccaaaattcatgtttcggcgctttttgaactttttcattccggtcaaaaacatcgcacccgtggggtctcaacatatgccaatattggcattaattgacaaaagtacccgcgcgaatcacgaagtgagtttttgccacgaacgcacccaatacactccaatatgtccaaaattcatgtttgggtgctttttgaactttttcattccggtcaaaaacatcgcacccgtgggggctcaatatatgccaatattggtattaattgacaaaagtacccgcgcgaatcacgaagtgagtttttgccacgaacgcacccaatacactccaatatgtccaaaattcatgtttggatgctttttgaactttttcattccggtcaaaaatatcgcacccgtggagtctcaacatatgccaatagggatcctctagagtcaaaagtacccgcgcgattcacgaagtgagtttttgccacgaacggcacccaatccactccaatatgtcgaaaattcatgtttggatgctttttgaatttattcaatccggtcaaaaacatcgcaggggatcttctagagtcgacctgcaggcatgc

SEQ ID NO: 47463 - DNA, 1453 bp, Oryza sativa
acactccaatatgtacaaaattcatgtttgggtgcttttagaactttttcattccggtcaaaaaacatcgcaccggtggggctcaatatatgccaatattggcattaatggacaaaagtacccgcgcgaatcacgaagtgtgtttttgccacgaacgcacccaatagactccaacatgtccaaaattcatgtttggatgctttttgaacatattcaatccggtcaaaaatatcgcacccgtggggtctcaatatatgccaatattggtattaattgacaaaagtacccgcgcgaatcacgaagtgagtttttgccacgaacgcatccaaatattggtattaattgacaaaagtacccgcgcaaatcacgaagtgagtttttgccacgaacgcacccaatacactccaatatgtccagaaatcttgttttggtgctttttgaactttttcattccggtcaaaaatatcgcacccgtggggtctcaacatatgccaatattggtattaattgacaaaagtacccgcgcgattcacgaagtgagtttttgccacgaacgcacccaatacactccaatatgtccaaaattcatgtttggatgctttttgaacttattcaatgcggtcaaaaacaccgcacccgtggggtctcaacatatgccaatattggtattaattgacaaaagtacccgcgcgaatcacgaagtgagtttttgccacgaacgcacccaatacactctaatatgtccaaaatccatgtttggatgcttttttaacttattcaatccggtcaaaaacatcgcacccatggggtctcaaaatatgccaatatcggtattaatggacaaaagtacccgcgcgaatcacgaagtgagtttttgccacgaacgcatccaatgcactccaatatgtccaaaattcatgtttggatgctttttgaacttattcaatccggtcaaaaatttcgcacacgtggggtctcaacatatgccaatattggtattaattgacaaaagtacccgcgcgaatcacgaagtgagtttttgccacgtacgcacccaatacactccaatatgtccaaaattcatgttttggtgctttttgaactttttcattccggtcaaaaatatcgcacccctggggtctcaacatatgccaatattggtattaattgacaaaagtacccgcgcgaatcacgaagtgagtttttgccacgaacgcacccaatacactccaataagtccaaaatttatgttttggcgatttttgcactttttcattccggtcaaaaacatcgcacccgtggggctcaatatatgccaatattggcattaattgacaaaagtacccgcgcgaagcacgaagtgagtttttgccacgaacgcacccaatacactccaatatgtccaaaattcatgtttggatgctttttgaacttattcaatgcggtcaaaaac

SEQ ID NO: 47464 - DNA, 594 bp, Oryza sativa
atatgccataattggtattaattgacaaaaagtacccgcgcgaatcacaaagtgagtttttgccacgaacgcacccaatacactccaatatgtccaaaattcatgtttgaatgctttttgaacttattcaatccggtcaaaaatatcgcacccgtggggtctcaacatatgccaatatcggtattaattgacaaaagtacccgcgcgattcacgaagtgagtttttgccacgaacgcacccaatacactccaatatgtccaaaattcatgttttggcgctttttgaactttttcattccggtcaaaaacatcgcacccgtggggctcaatatatgccaatattggcattaattgacaaaagtacccgcgcgaatcacgaagtgagtttttgccacgaacgcacccaatacactccaatatgtccaaaattcatgttttggtgctttttgaactttttcattccggtcaaaaacatcgcacccgtggggctcaatatatgccaatattggtattaattgacaaaagtacccgcgcgaatcacgaagtgagtttttgccacgaacgcacccaatacactccaatatgtccagaaat

SEQ ID NO: 47465 - DNA, 547 bp, Oryza sativa
gggtacttttgtcaattaataccaatattggcatatgttgagccccacgggtgcgatatttttgaccggattgaataagttcaaaagcaccaaacatgaattttgaacatattggagtgtagtgggtgcgttcgtgacaaaaactcacttcgtgattcgcgcgggtacttttgtcaattaataccaatattggcatatattgagaccccacgggtgcgatgtttttgaccggaatgaaaaagttcaaaaagcaccaaaacatgaattttggacatattggagtgtattgggtgcgttcgtggcaaaaactcacttcgtgattcgcgcgggtacttttgtcaattaatgccaatattggcatatattgagccccacgggtgcgatgtttttgaccggaatgaaaaagttcaaaaagcgccaaaacatgaattttggacatattggagtgtattgggtgcgttcgtggcaaaaactcacttcgtgattcgcgcgggtacttttgtcaattaaaaccgatattggcatatgttgagaccccacgggtgcg

SEQ ID NO: 47466 - DNA, 560 bp, Oryza sativa
tccggtcaaaaacatcgcacccgtggggctcaatatatgccaatattggcattaattgacaaaagtacccgcgcgaatcacgaagtgagtttttgccacgaacgcacccaatacactccaatatgtccaaaattcatgtttggatgctttttgaacttattcaatccggtcaaaaatatcgcacccgtggggtctcaacatatgccaatatcggtattaattgacaaaagtacccgcgcgattcacgaagtgagtttttgccacgaacgcacccaatacactccaatatgtccaaaattcatgttttggtgctttttgaactttttcattccggtcaaaaacatcgcacccgtggggctcaatatatgccaatattggcattaattgacaaaagtacccgcgcgaatcacgaagtgagtttttgccacgaacgcacccaatacacttcaatatgtccaaaattcatgttttgatgcttttagaactttttcattccggtcaaaaatatctcaccccccgggggcttaatatatgccaatattggattaattgacaaaagt

SEQ ID NO: 47467 - DNA, 733 bp, Oryza sativa
ctcaacatatgcaatattggtataattgacaaaagtacccgcgcgaatcacgaagtaggttttgccacgaacgcacccaatacactccaatatgtccaaaatcttgttttggtgctttttgaactttttcattccggtcaaaaacatcgcacccgtggggtctcaacatatgccaatattggtattaattgacaaaagtacccgcgcgaatcacaaagtgagtttttgccacgaacgcacccaatacactccgatatgtccaaaattcatgtttggatgctttttgaacttattcaatccggtcaaaaatattgcacccgtggggtctcaacatatgccaatatcggtattaattgacaaaagtacccgcgcgattcacgaagtgagtttttgccacgaacgcacccaatacactccaatatgtccaaaattcaagttttggcgctttttgaactttttcattccggccaaaaacatcgcacccgtggggctcaatatatgccaatattggcattaattgacaaaagtacccgcgcgaatcacgaagtgagtttttgccacgaacgcacccaatacactccaatatgtccaaaattcatgtttggatgctttttgaacatattcaatccggtcaaaaatatcgcacccgtggggtctcaatatatgccaatattggtattaattgacaaaagtacccgcgcgaatcacgaagtgagtttttgccacgaacgca

SEQ ID NO: 47468 - DNA, 678 bp, Oryza sativa
cccgtggggtctcaacatatgccaatattggtattaattgacaaaagtacccgcgcgattcacgaagtgagtttttgccacgaacgcacccaatacactccaatatgtccaaaattcatgtttggatgctttttgaacttattcaatgcggtcaaaaacaccgcacccgtggggtctcaacatatgccaatattggtattaattgacaaaagtacccgcgcgaatcacgaagtgagtttttgccacgaacgcacccaatacactccaatatgtccaaaaatcttgttttggtgctttttgaactttttcattccggtcaaaaatatcgcacccgtggggtctcaacatatgccaatattggtattaattgacaagagtacccgcgcgattcacgaagtgagtttttgccacgaacgcacccaatacactccaatatgtccaaaattcatgtttggatgctttttgaacttattcaatgcggtcaaaaacaccgcacccgtggggtctcaacatatgccaatattggtattaattgacaaaagtacccgcgcgaatacgaagtgagtttttgccacgaacgcacccaatacactcaatatgtcagaaatctttgttttgtgctttttgaactttttcatttcgggcaaaaacatcgcacccgtgaggtctcaacatatg

SEQ ID NO: 47469 - DNA, 1384 bp, Oryza sativa
attgacaaaaatttcccgcgcgaatacgaagtgagtttttgccacgaacgcacccaatacactccaatatgtccaaaaatcttattttggtgctatttgaactttttcattccggttaaaaacattgcaccctcgtatgccaatattggcattaattgacaaaagttcgtcgcgcgaatcacgaagtgagttttttgccaacactaattgacaaaagttcgccgcacgaatcacgaagtgagtttttgccacgaacgcacccaatacactccaatatgtctaaaaatcacgtttggatgctttttgaagtttttcaatccggtcaaaaacatcgcacccgtggggactcaaaatatgccaatattgacattaattgacaaaagttcgccgcgcgaatcgcgaagtgagtttttgccacgaacgcacccaatacactccaacatgtccaaaaatcatgttttggtgctttttgaactttttcattccggtcaaaaaacatcgcacccgtgggggctcaggatatgctaaaattggcattaattgacaaaagttcgtcgtgcgaatcacgaagtgagtttttgccacgaacacacccaatacactccaatatgtccaaaattcatgtttggatgctttttgaacttattcaacttattcaatccggtcaaaaacatcgcacccgtggggctcaatatatgccaatattggcattaattgacaaaagtacccgcgcgaatcacgaagtgagtttttgccacgaacgcacccaattaactccaatatgtccaaaattcatgtttggatgctttttgaacttattcaatccggtcaaaaatatcgcacccgtggggtctcaacatatgccaatattggaattaatggacaaaagtacccgcgcgaatcacgaagtgagtttttgccacgaacgcacccaatacactccaatatgtccagaaatcttgttttggtgctttttgaactttttgaatccagtcaaaaacatcgcacccgtggaggctcaatatatgccaatattggcattaattgacaaaagttcaccgcgcgaatcacgaagtgagtttttgccacgaacgcacccaatagactccaatatgtccacaaatcatgttttggtgctttttcaacattttcattccggtcaaaaacatcgcacccgtgtgggcctatatatgctaaatattggcacttattgacaaaagttcggcgcgtgaatcacgaattgagttttttccacgaacgcacccaatacactccaatgtgtccaaaatttatgtttggatgctttttgatctcattcagtccggtcaaaaacatcgctcccgtggggtctcaacatatgccaatattggtattaattgacaaa

SEQ ID NO: 47470 - DNA, 851 bp, Oryza sativa
attaattgacaaaagtacccgcgcgaatcaacaaagtgggttttttgcccgaacgcacccaatacactccaatatgtccaaaattcatgttttggcgctttttgaactttttcattccggtcaaaaacatcgcacccgtggggctcaatatatgccaatattggcacttattgacaaaagttcgccgcgcgaatcacgaagtgagtttttgccacgaacgcacccaatagactccaatatgtccaaaattcatgtttggatgctttttgaacatattcaatccggtcaaaaacatcgcacccatggggtctcaacatatgccaatattggtattaattgacaaaagtacccgcgcgaatcataaagtgagtttttgccacgaacgcacccaatacactccaatatgtccaaaattcatgatttggtgctttttgaactttttcattccggtcaaaaacatcgcacccgtgggggctcaatatatgccaatattgacattaattgacaaaagttcccgcgcgaatcacgaaatgagtttttgccacgaacgcacccaatagactccaatatgtccaaaaatcatgttttggtgctttttcaacattttcattgcggtcaaaaacatcgcacccgtgtgggcccatatatgctaaatattggcacttattgacaaaagttcgtcgcgcgaatcacgaagtgagtttttgccacgaacacacccaatacactccaatatgtccaaaagtcatgtttggatcggctttttgaacttattcaatccggtcaaaaatatcgcacccgtggggtctcaatatatgccaatatggtattaattgacaaaagtacccgcg

SEQ ID NO: 47471 - DNA, 693 bp, Oryza sativa
aactttttcatccggtcaaaaaacatggcaccggtggggctctcaacataatgcaaaaattgcatttaatgacaaaagtaccggcgcgaatcacgaagtaagtttttgccacgaacgcacccaatacactccaatatgtccaaaattcatgtttggatgctttttgaactattcaatcctggtcaaaaatatcgcacccgtggggtctcaacaaatgccaatattggtattaattgacaaaagtacccgtgcgaatcacgaagtgagtttttgccacgaacgcacccaatacactccaatatgtccaaaattcatgtttgaatgctttttgaacttattcaatccggtcaaaaatatcgtacccgtggggtctcaacatatgccaatatttgtattaattgacaaaagtacccgcgcgaatcatgaagtgagttttttccacaaacgcacccaatagactccaacatgtccaaaattcatgtttggatgctttttgaacttattcaatccggtcaaaaatatcgcacccgtggggtctcaatatatgccaaaattggtattaattgacaaaagtacccgcgcgaatcacgaagtgagtttttgccacgaacgcatacaaatattggcattaattgacaaaagttcgtcgcgcaaatcatgaagtgagtttttgccacgaacgcacccaataca

SEQ ID NO: 47472 - DNA, 710 bp, Oryza sativa
aatattggcattaatgacaaaaggacccgcgcgaatcacaaaatgagtttttgccacgaacgcacccaatacactccaatatgtccaaaattttgtttggatgctttttaaacttatccaatccggtcaaaaacatcgcacccgtggggtctcaacatatgccaatatcggtattaatggacaaaagtacccgcgcgaatcacgaagtgagtttttgccacgagcgcacccaatacactccaatatgtccaaaattcatgtttggatgctttttgaactttttcaatccggtcaaaaatatcgcacccgtggggtctcaacatatgccaatatcggtattaattgacaaaagtacccgcgcgattcacgaagtgagtttttgccacgaacgcacccaatacactccaatatgtccaaaattcatgtttggatgctttttgaacttattcaatgcggtcaaaaacaccgcacccatggggtctcaacatatgccaatattggtattaattgacaaaagtacccgcgcgaatcacgaagtgagtttttgccacgaacgcacccaatacactccaatatgtccagaaatcttgttttggtgctttttgaacttttccattccggtcaaaaatatcgcacccgtggggtctcaacatatgccaatattggtattaattgacaagagtacccgcgcgattcacgaagtgagtttt

SEQ ID NO: 47473 - DNA, 2282 bp, Oryza sativa
tgcgcaataaatcgagtttaattatagaaattcatttaaatggctcaaaccttctaaaattcatatctaattcattcggactccgaattgagccattcaacttgcaaaattcatctaaaattgagctctacatgtttgtttagtttttatgtactgtttccttggtttttattagagtttttcctcgttttgcgtgccagcgtgtagtttccgtcgtttcggaagtccgcggtcgcgaggaaaagagttcggaagatcaaagtgaagaagcaaggcaagtcacacattctccttgagcatgttgatcccaatttataaatgttttaccgtttacaaataaatatgcatgttttgctaattacacggggtcagggtttacctatctgctcgcttgtgccatgtttacttgatatctgttctttgtcaaccttgggtaataaattgactagctcgtgttacttatgtgacctagctagaactatatgcttagccatgcttaattaccactagctcagtcgatgggataattgcagttttagacattctagtatcttgttgagccgcgtgctcgagacatctggccatgttttatggtcgtaattatccaactaaaatgcgactgaatggtgggctgtgggtgcatggttttgcgagtcgcacccatagcaattaaggaccggttcacgggaaaccctagaagacttacagcgcttgccacaagcgggagtgggtaactgcttgatctgaagtatagctcgaccctttcctaggcaccggtggcgagggtgggcgtgatggagttgggtcggccggggtgtccggttgtccagctgccggattcaccgcggcgcaagaggggaccgcccactgcctttttaggggtgggggtgaaaccttagcgtggtgtggatggttaggggagggttatgcgaagggtctcgtcacaatcactcgacgtggtgacgtgtgcatcatgggcacatgatgacgcggtgacatgtcggtgggttgtgtcttgtgggtacagttgtgcacctctggccagagtaaaactattcgaatagccgtgcccgcggttatgggcgctcgaccagattcaccgtgattagtctcacacttaataaatcgacccaatgcactgtagtacaggtgggttggttgggcctgttcaacgtggtgtagcgttgatcagtggagattttaatgttactttaattactcaacagttttactgttttgctcaataaaatgttttacaaccgcctttatgcaaatagccacaaaccgtccttgtgttccccttgcacgtctgcatcgttggtgtggcttgctgagtacggtggttgtactcagccttgctattattcccccttttcagaagtgtagtgcttctgagctgaagatggagttagaggaccaaggctcagaccccagttgagttttgcctgtggagtggagctgaagccccgctaggatcgccttttttcgctgctgctgcttttgtttcggtgtgaggactaagtgcctcttctgtaagtattttacgctttatttacgtttggaactgtttattacttgtcgttttgtgtaccctggctggtcctggacagggatttaatacacaaaatagtctggaaatttgggctaaatttctgggcgtgacaattggtcctgaacatataaacgcatacattatgaggtagtgtcatattcttgattagattaaattggcacttgttatgaaacgagaccacctgtgggtatttgacatgatcaatggttgtatccgtcgtaggcgtggtcacatcatcggcagactttgtcaattaataccaatacttgcacacatgggtgcgatgttttcaaccggaacgaaaaagttcaaaaagcagcaaaacatgagttttggacatcatggatcggattgggtgcgtccgtgttgaaaaattactccgttactcgcgcggccaatttttgtcaattaatgctgatattgacacacgtgggtgcgatgtttttaaccggaatgaaatgttcaaagagctagcaaatattggcctatgttggcacacgtgggtccgttgtttttgccaattaatgtaggtattggcctacgttggcacgcgtgggtgcaatggttttaacctgaacaagaaaaaacagttaaaaaaccagaaaaacatgagattttgacttattggaatggattgggtgcgtccttgttaaaaattcactccgtgactcgcgtgacaaactttgtcaattcatgccaatattggcaa

SEQ ID NO: 47474 - DNA, 1097 bp, Oryza sativa
gcattgaaaaagttcaaaaagcatcaaaacatgaattttggacatattggagtgtattgggtgcgttcgtggcaaaaactcacttcgtgattcgcgcatgtacttttgtcaattaataccaatattggcatatgttgagaccccacaggtgcgatatttttgacctgattgaataagttcaaaaagcaccaaaacaagatttctggacatattggagtgtattgggtgcgttcgtggcaaaaactcacttcgtgaatcgcgcgggtacttttgtcaattaataccgatattggcatatgttgagaccccacggctgcgatgtttttgaccggattgaataagttcaaaaagcatccaaacaagaattttggacatattggagtgtattgggtgcgttcgtggcaaaaactcacttcgtgattcgcgcgggtacttttgtccattaatgccaatattggcatatattgagccccacgggtgcgatgtttttgaccagaatgaaaaagttctaaaagcaccaaaacatgaattttggacatattggagtgtattgggtgcgttcgtggtaaaaactcacttcgtgcttcacgcgggtacttttgtcaattaatgccaatattggcatatatttagccccacgggtgcgatgtttttgaccggaatgaaaaagttcaaaaagcgccaaaacatgaattttggacttattggagtgtattgggtgcgttcgtggcaaaaactcacttcgtgattcgcgcgggtacttttgtcaattaataccgatattggcatatgttgagaccccacgggtgcgatatttttgaccggaatgaataagttcaaaaagcatccaaacatgaattttggacatattggagtgtattgggtgcgttcgtggcaaaaactcacttcgtgattcgcgcgggtacttttgtcaattaataccaatattggcatatgttgagccccacgggtgcgatgtttttgacccgaatgaaaaagttcaaaagcatccaaacaagaattttggacatattggagtgtattgggtgcgttcgtggcaaaaactcacttagtgattcgcgcgggtacttttgtca

SEQ ID NO: 47475 - DNA, 910 bp, Oryza sativa
tatgccaatatcggtattaattgacaaaagtacccgcgcgaatcacggagtgagtttttgccacgaacgcacccaatacactccaatatgtcgaaaattcatgtttggatgctttttgaacttattcaatccggtcaaaaacatcgcacccgtggggtctcaacatatgccaatatcggtattaattgacaaaagtacccgcgcgattcacgaagtgagtttttgccacgaacgcacccaatacactccaatatgtccagaaatcttgttttggtgctttttgaacttattcaatccggtcaaaaatatcgcacccgtggggtctcaacatatgccaatattggtattaattgacaaaagtacatgcgcgaatcacgaagtgagtttttgccacgaacgcacctaatacactccaatatgtccaaaattcatgttttggtgcttttagaactttttcattccggtcaaaaacatcgcacccgtggggctcaatatatgccaatattggcattaatggacaaaagtacccgcgcgaatcacgaagtgagtttttgccacgaacgcacccaatagactccaacatgtccaaaattcatgtttggatgctttttgaacatattcaatccggtcaaaaatatcgcacccgtggggtctcaatatatgccaatattggtattaattgacaaaagtacccgcgcgaatcacgaagtgagtttttgccacgaacgcatccaaatattggtattaattgacaaaagtaaccgcgcaaatcacgaagtgagtttttgccacgaacgcacccaatacactccaatatgtccaaaattcttgtttggatgctttttgaactttttcaattccggccaaaaacatcgcacccgtggggtctcaacatatgccaatatcggtt

SEQ ID NO: 47476 - DNA, 706 bp, Oryza sativa
cccgtggggtctcaacatatgccaatatcggtattaattgacaaaagtacccgcgcgaatcacgaagtgagtttttggcacgaacgcacccaatactcaatatgtccaaaattcatgttttgatgctttttgaacttattcgatccggtcaaaaatatcgcacccgtggggtctcaacatatgccaatattggtattaattgacaaaagtacccgcgcgaatcacgaagtgagtttttgccacgaacgcacccaatacactccaatatgtccaaaattcatgtttggatgctttttgaacttattcaatccggtcaaaaatatcgcacccgtggggtctcaacatatgccaatattggtattaattgacaaaagtacccgcgcgaatcacgaagtgagtttttgccacgaacgcacccaatacactccaatatgtccaaaattcatgttttggtgctttttgaactttttcattccggtcaaaaacatcgcacccgtgggggctcaatatatgccaatattggcattaattgacaaaagtacccgcgcgaatcacgaagtgagtttttgccacgaacgcacccaatacactccaatatgtccaaaattcatgttttggcgctttttgaactttttcattccggtcaaaaacatcgcacccgtgggggctcaatatatgccaatattggtattaattgacaaaagta

SEQ ID NO: 47477 - DNA, 1515 bp, Oryza sativa
  unsure (1)..(1515): unsure at all n locations
aaattcatgtttggcgnctttttgaacttttccatccgagcaaaaacatcgcacccgtgggctaagtatatgcaataatggcattaattgccaaagtacccgcgtaagcaacaagtgagttttacccacgaacgcacccaatacactccaatatgtcaaaattcatgtttggtgctttaaaactttttcattccggccaaaaccatcgcacccgtggggatcaatatatgccaatattggcattaattgacaaaagtacccgcgcgaatcacgaagtgagtttttgccacgaacgcacccaatacactccaatatgtccaaaattcatgttttgggtgctttttgaactttttcattccggtcaaaaacatcgcacccgtggaggctcaatatatgccaatattggcattaattgacaaaagttcgtcgcgcgaatcacgaagtgagtttttgccacgaacgcacccaatacactccaatatgtccagaaatcatgttttggtgctttttgaactttttcattccggtcaaaaacatcgcacccgtggaggctcaatatatgccaatattggcattaattgacaaaagttcgccgcgcgaatcacgaagtgagtttttgccacgaacgcacccaatagactccaatatgtccacaaatcatgttttggtgctttttcaacattttcattccggtcaaaaacatcgcacccgtgtgggcctatatatgctaaatattggcacttattgacaaaagttcggcgcgcgaatcacgaattgagtttttgccacgaacgcacccaatacactccaatatgtccaaaatttatgtttggatgctttttgatctcattcagtccagtcaaaaacatcgctcccgtggggtctcaacatatgccaatattggtattaattgacaaaagtacccgcgcgaatcacgaagtgagtttttgccacgaacgcacccaatacactccaatatgtccaaaattcatgttttgatgctttttgaactttttcaatccggtcaaaaatatcgcacccgtggggctcaatatatgccaatattggaattaattgacaaaagtacccgcgcgaatcacgaagtgagtttttgtcacgaacgcacccaatacactccaatatgtcgaaaattcatgttttgatgctttttgaactttttcattccggtcaaaaacatcgcacccgtggggctcaatatatgccaatattggtattaattgacaaaagtacccgcgcgaatcacgaagtgagtttttgcacgaacgcacccaatacactccaatatgtcaaaaatcatgtttggatgctttttgaacttattcaatccggtcaaaaatatcgcacccgtggggtctcaacatatgccaatattggcattaattgacaaaagtacccgcgcgaatcacgaagtgagtttttgccacgaacgcacccaatacactccaatatgtccaaaattcatgttttggtgctttttgaactttttcattccgg

SEQ ID NO: 47478 - DNA, 684 bp, Oryza sativa
cgaattgagtttttccacgaacgcacccaatacactccaatatgtccaaatttcatgtttgaatgctttttgatctcattcagtccagtcaaaaacatcgctcccgtggggtctcaacatatgccaatattggtattaattgacaaaagtacccgcgcgaatcacgaagtgagtttttgccacgaacgcacccaatacactccaatatgtccaaaattcatgttttggcgctttttgaactttttcaatccggtcaaaaacatcgcacccgtggggctcaatatatgccaatattggaattaatggacaaaagtacccgcgcgaatcacgaagtgagtttttgtcacgaacgcacccaatacactccaatatgtccaaaattcatgttttggtgctttttgaactttttcattccggtcaaaaacatcgcacccgtggggtctcaatatatgccaatattggtattaattgacaaaagtacccgcgcgaatcacgaagtgagtttttgccacgaacgcacccaatacactccaatatgtccaaaattcatgtttggatgctttttgaacttattcaatccggtcaaaaatatcgcacccgtggggtctcaacatatgccaatattggtattaattgacaaaagtacccgcgcgaatcacgaagtgagtttttgccacgaacgca

SEQ ID NO: 47479 - DNA, 681 bp, Oryza sativa
agaccccacgggtgcgatatttttgaccggaatggaaaagttcaaaaagcaccaaaacaagatttctggacaaattggagtgtattgggtgcgttcgtggcaaaaactcacttcgtgattcgcgcgggtacttttgtcaattaataccaatattggcatatgttgagacaccacgggtgcggtgtttttgaccgcattgaataagttcaaaaagcatccaaacatgaattttggacatattggagtgtattgggtgcgttcgtggcaaaaactcacttcgtgcttcgcgcgggtacttttgtcaattaatgccaatattggcatatattgagccccacgggtgcgatgtttttgaccggaatgaaaaagtgcaaaaatcgccaaaacataaattttggacttattggagtgtattgggtgcgttcgtggcaaaaactcacttcgtgattcgcgcgggtacttttgtcaattaataccaatattggcatatgttgagaccccaggggtgcgatatttttgaccggaatgaaaaagttcaaaaagcaccaaaacatgaattttggacatattggagtgtattgggtgcgtacgtggaaaaactcacttggggattcgcgcgggtacttttgtcattaataccaatatggcatatgttgagaccccacgtgtgcgaaatttttg

SEQ ID NO: 47480 - DNA, 730 bp, Oryza sativa
gagtgtattgggtgcgttcgtggcaaaaactcacttcgtgattcgcgcgggtacttttgtcaattaataccaattttggcatatattgagaccccacgggtgcgatatttttgaccggattgaataagttcaaaaagcatccaaacatgaattttggacatgttggagtctattgggtgcgttcgtggaaaaaactcacttcgtgattcgcgcgggtacttttgtcaattaatacaaatattggcatatgttgagccccacgggtgcgatatttttgaccggattgaataagttcaaaaagcatccaaacatgaattttggacatattggagtgtattgggtgcgttcgtggcaaaaactcacttcgtgattcgcgcgggtacttttgtcaattaataccaatattggcatttgttgagaccccacgggtgcgatatttttgaccggattgaataagttcaaaaagcatccaaacatgaattttggacatattggagtgtattgggtgcgttcgtggcaaaaactcacttcgtgattcgcgcgggtacttttgtcagttaataccaatattggcatatgttgagaccccacgggtgcgatatttttgaccggattgaataagttcaaaaagcattcaaacatgaattttggacatattggagtgtattgggtgcgttcgtggcaaaaactcacttcgtgattcgcgcgggtacttttgtcaataatacca

SEQ ID NO: 47481 - DNA, 1051 bp, Oryza sativa
cacgggtgcgatgtttttgaccggaatgaaaaagttcaaaaagcatccaaacatgaattttggacatattggagtgtagtgggtacgttcgtggcaaaaactcacttcgtgattcgcgcgggtacttttgtccattaatgccaatattggcatatattgagcccccacgggtgcgatgtttttgaccggaatgaaaaagttcaaaaagcaccaaaacatgaattttggacatattggagtgtactgggtgcgttcgtggcaaaaactcacttcgtgcttcgcgcgggtacttttgtcaattaatgccaatattggcatatattgagccccacgggtgcgatgtttttgaccggaatgaaaaagttcaaaaagcgccaaaacatgaattttggacttattggagtgtatcgggtgcgttcgtggcaaaaactcacttcgtgattcgcgcgggtactcttgtcaattaataccaatattggcatatgttgagaccccacgggtgcgatatttttgaccggaatgaaaaagttcaaatagcaccaaaacaagatttctggacatattggagtgtattgggtgcgttcgtggcaaaaactcacttcgtgattcgcgcgggtacttttgtcaattaataccaatattggcatatgttgagaccccacgggtgcgatatttttgaccggattgaataagttcaaaaagcatccaaacatgaattttggacatattggagtgtatggggtgcgttcgtggcaaaaactcacttcgtgattcgcgcgggtacttttgtcaattaatgccaatattggcatatgttgagagcccacgggtacaatgtttttgaccggaatgaaaaagttcaaaaagcgccaaaacatgaattttggacatattggagtgtattgggtgcgttcgtggcaaaaactcacttcgtgaatcgcgcgggtacttttgtcaattaataccgatattggcatatgttgagaccccacgggtgcgatgtttttgaccagattgaataagttcaaaaagcatcaaaacatgaattttg

SEQ ID NO: 47482 - DNA, 1086 bp, Oryza sativa
tcacttcgtgactcgcccgggtactcttgtcaattaataccaatattggcatatgttaagaccccacgggtgcgatatttttgaccggaatgaaaaagttcaaatggcatccaaccaagatttttgaacatattgaagtgtattgggtgcgttcgtggcaaaacctcacttcgtgattcgcgcgggtactcttgtcaattagtaccaatattggcatatgttgagaccccacgggtgcgatgtttttgaccggattgagtaagttcgaaaagcatccaaacatgaattttggacatattggagtgtattgggtgcgttcgtggcaaaaactcacttcgtgattcgcgcgggtacttttgtccattaatgccaatattggcatatattgagccccacgggtgcgatgtttttgaccggaatgaaaaagttcaaaaagcgccaaaacttgaattttggacatattggagtgtattgggtgcgttcgtggcaaaaactcacttcgtgaatcgcgcgggtacttttgtcaattaataccgatattggcatatgttgagaccccacgggtgcgatatttttgaccggattgaataagttcaaaaagcatccaaacatgaattttggacatatcggagtgtattgggtgcgttcgtggcaaaaactcacttcgtgattcgcgcgggtacttttgtcaattaataccaatattggcatatgttgagaccccacgggtgcgatatttttgaccagatggaataagttcaaaaatcatccaaacatgaattttggtcatattggagtgtattgggtgcgttcgtggcaaaaactcacttcgtgattcgcgcgggtacttttgtccattaatgccaatattggcatgtattgagccccacgggtgcgatgtttttgaccggaatgaaaaagttcaaaaagcgccaaaacatgaattttagacatattggagtgtattgggtgcgttcgtggcaaaaactcacttcgtgattcgcgcgggtacttttgtcaattaataccaataatggatatgttgagacctcacgggtgcgatgtttttgaccggaatgaaaaagt

SEQ ID NO: 47483 - DNA, 1101 bp, Oryza sativa
tattgggtgcgttcgtggcaaaaactcactttgtgattcgcgcgggtacttttgtcaattaatgccaatgttggcatatgttgagagcccacgggtgcgatgtttttgaccggattgaataagttcaaaaagcaacaaaacaagatttctggacatattggagtgtattgggtgcgttcgtggcaaaaactcacttcgtgattcgcgcgggtacttttgtcaattaataccaattttggcatatattgagaccccacgggtgcgatatttttgaccggattgaataagttcaaaaagcatccaaacatgaattttggacatgttggagtctattgggtgcgttcgtggaaaaaactcacttcgtgattcgcgcgggtacttttgtcaattaatacaaatattggcatatgttgagccccacgggtgcgatatttttgaccggattgaataagttcaaaaagcatccaaacatgaattttggacatattggagtgtattgggtgcgttcgtggcaaaaactcacttcgtgattcgcgcgggtacttttgtcaattaataccaatattggcatatgttgagaccccacgggtgcgatgtttttgaccggattgaataagttcaaaaagcatcaaaacatgatttctggacatattggagtgtattgggtgcgttcgtggcaaaaactcacttcgtgatttgcgcgacgaacttttgtcagttaatgccaatatttgtatgcgttcgtggcaaaaactcacttcgtgattcgcgcgggtacttttgtcaattaataccaattttggcatatattgagaccccacgggtgcgatatttttgaccggattgaataagttcaaaaagcatccaaacatgaattttagacatgttggagtgtattgggtgcgttcgtggcaaaaactcacttcgtgattcgcgcaggtacttttgtcaattaataccaatattggcatatattgagaccccacgggtgcgatatttttaaccggattgaataagttcaaaaagcaacaaaacaagatttctggacatattggagtgtattgggtgcgttcgtggggggatcctctagagtcgacctgc

SEQ ID NO: 47484 - DNA, 750 bp, Oryza sativa
gtgcgttcgtggcaaaaactcacttcgtgattcgcacgggtacttttgtcaattaatgccaatgttggcatatgttgagagcccacgggtgcgatgtttttgaccggattgaatagtttaaaaagcaacaaaacaagatttctggacatattggagtgtattgggtgcgttcgtggcaaaaactcacttcgtgatttgcgcgacgaacttttgtcaattaatgccaatatttgtatgcgttcgtggcaaaaactcacttcgtgattcgcgcgggtacttttgtcagttaataccaatattggcatatgttgagaccccacgggtgcgatatttttgaccggattgaataagttcgaaaagcatccaaacatgaattttagacatattggagtgtattgggtgcgttcgtggcaaaaactcacttcgtgattcgcgcgggtacttttgtcaattaatgccaatattggcatatgttgagagcccacgggtgcgatgtttttaaccggattgaataagttcaaaaagcaacaaaacaagatttctggacatattggagtgtattgggtgcgttcgtggcaaaaactcacttcgtgattcgcgcgacgaacttttgtcaattaatgccaatattggcgtatattgagcctccacgggtgcgatgtttttgaccagaacgaaaaagctcaaaaagcaccaaaacatgaattttggacatattggagtgtattgggtgcgtttgtggcaaaaact

SEQ ID NO: 47485 - DNA, 702 bp, Oryza sativa
cccgcgcgattcacgaagtgagtttttgccacgaacgctacccaatacactccaatatgtccaaaattcatgtttggatgctttttgaacttattcaatgcggtcaaaaacaccgcacccgtggggtctcaacatatgccaatattggtattaattgacaaaagtacccgcgcgaatcacgaagtgagtttttgccacgaacgcacccaatacactctaatatgtccaaaatccatgtttggatgcttttttaacttattcaatccggtcaaaaacatcgcacccatggggtctcaaaatatgccaatatcggtattaatggacaaaagtacccgcgcgaatcacgaagtgagtttttgccacgaacgcatccaatgcactccaatatgtccaaaattcatgtttggatgctttttgaacttattcaatccggtcaaaaatttcgcacacgtggggtctcaacatatgccaatattggtattaattgacaaaagtacccgcgcgaatcacgaagtgaggttttgccacgtacgcacccaatacactccaatatgtccaaaattcatgttttggtgctttttgaactttttcattcctgtcaaaaatatcgcacccctggggtctcaacatatgccaatattgtattaattgacaaaagtacccgcgcgaatcaccaagtgagtttttgcacgaacgccccca

SEQ ID NO: 47486 - DNA, 1068 bp, Oryza sativa
aaaattttgttttggggctttttgaaatttttcatccgggcaaaaacatcgcacccgtggggtctcaacatatgccaatattggtattaattgacaaaagtacccgcgcgaatcacaaagtgagtttttgcccgaacggcacccaatacactctaatatgtctaaaattcatgttttggcgctttttgacctttttcattccggtcaaaaacaccgcacccgtggggctcaatacatgccaatattggcattaattgacaaaagtacccgcgtgaatcacgaagtgagtttttgccacgaacgcacccaatacactccaatatgtccaaaattcatgttttggtgctttttgagctttttcgttctggtcaaaaacatcgcacccgtggaggctcaatatacgccaatattggcattaattgacaaaagttcgtcgcgcgaatcacgaagtgagtttttgccacgaacgcacccaatacactccaatatgtccagaaatcttgttttgttgctttttgaacttattcaatccggttaaaaacatcgcacccgtgggctctcaacttatgccaatattggcattaattgacaaaagtacccgcgcgaatcacgaagtgagtttttgccacgaacgcacccaatacactccaatatgtccaaaattcatgtttcgatgctttttgaacttattcaatccggtcaaaaacatcgcacccgtggggtctcgacatatgccaatatcggtattaattgacaaaagtacccgcgcgattcacgaagtgagtttttgccacgaacgcacccaatacactccaatatgtccaaaattcaagttttggcgctttttgaactttttcattccggtcaaaaacattgtacccgtgggctctcaacatatgccaatattggcattaattgacaaaagtacccgcgcgaatcacgaagtgagtttttgccacgaacgcacccaatacactccaaattggccagaaattttggtttggtgctttttgaacttttttattccgggcaaaaacatcctcacccgtggggtctcaacatatgcca

SEQ ID NO: 47487 - DNA, 566 bp, Oryza sativa
attggcatatattgagcgccacgggtgcgatgtttttgaccggaatgaaaaagttcaaaaagcgccaaaacatgaattttggacttattggagtgtatcgggtgcgttcgtggtaaaaactcactttgtgattcgcgcgggtactcttgtcaattaataccaatattggcatatgtcgagaccccacgggtgcgatatttttgaccggaatgaaaaagttcaaatagcaccaaaacaagatttctggacatattggagtgtattgggtgcgttcgtggcaaaaactcacttcgtgattcgcgcgggtacatttgtcaattaataccaatattggcatatgttgagaccccacgggtgcgatatttttgaccggattgaataagttcaaaaagcatccaaacatgaattttggacataatggaaagtgtattgggtgcgttcgggcaaaaactcacttcgtgattcgcgcgggtacttttgtcagttaataccaatattggcatatgttgagaccccacgggtgcgatatttttgaccggattgaataagttcaaaaagcatacaaa

SEQ ID NO: 47488 - DNA, 787 bp, Oryza sativa
catattggagtgtattgggtgcgttcgtggcaaaaactcacttcgtgattcgcgcgacgaacttttgtcaattaatgccaatattggcgtatattgagcctccacgggtgcgatgtttttgaccagaacgaaaaagctcaaaaagcaccaaaacatgaattttggacatattggagtgtattgggtgcgtttgtggcaaaaactcacttcgtgattcgcgcgggtacttttgtcaattaataccaatattgacatatgttgagaccccacgggtgcggtgtttttgaccggactgaataagttcaaaaaacatccaaacatgaattttggacatattggagtctattgggtgcgttcgtggcaaaaactcacttcgtgattcacgcgggtacttttgtcaattaatgccaatattggcatgtattgagccccacgggtgcgatgtttttgaccggaatgaaaaagttcaaaaagcgccaaaacatgaattttagacatattggagtgtattgggtgcgttcgtggcaaaaactcacttcgtgattcgcgcgggtacttttgtcaattaataccaatattggcatatgttgagaccccacgggtgcgatgtttttgaccggaatgaaaaagttcaaaaagcaccaaaacaagatttctggacatattggagtgtattgggtgcgttcgtggcaaaaactcacttcgtgattcgcgcgggtacttttgtcaattaatgccaatattggcatatgttgagccccacgggtgcggtgtttttgaccgcatt

SEQ ID NO: 47489 - DNA, 1628 bp, Oryza sativa
  unsure (1)..(1628): unsure at all n locations
aaatgataacantgttacagnacnccatcacactgaagactcaatttagtactttaggtttcattttgtccatacaggtcatctaagtatttgttttggcttaaaatcatccttggacccacttgatttgccatatggctatttttagtcaacaattctattagaaagtgtcccttttgcctttaatttgtatacaactgtgcactagaaaaaagaaaacaaaaataaataaacaacattacatatgtatttcccattatttcaacatgtgcacatgaaacttgagcctaatggctatcgtatacacttgtaagtatataatttatttttgttttacataaattgctatgcattgtctataaaaagaattcattgtatgcaattgttttctcttacacacgcacgcgccgccaagcccgccgctcccgccagccgcgcgcatgctgctaaggccgccgccgagccgcgcgatgccgacggccgtgcccacaccggcttcgtccaggaaaatcttctgtactagtccaggaaaatcatttctctaatagtgaaaccgcgggtagctaacgtatattcacagtcaaatttgtttttttttcgttgagagatgtgaatgttgaatttgaacttgaatgtttgaggagtgatatatcacatattaatacatattctcaaattggtttaaatttttttcataaccatttgagagacatgcaaataacgaggggatattccctcaaggaataagttcactttaggtccctctatttgtcgactagtctgattttcgtccctgcaccataaaaccgggtacgacccatccccaacttacgaaaaccgggcaaacaaggtccctcggcggttttgatagcggttttgactaacgtggcgcctacgtggctaatttgactcggactttatctgacgtggcgcttacgtggcaattcgatcctgaaaaataagaaaacccgtaggacccacatgtcagtttcacacacaaaataataataaaaaagtgggacccatgtgggccccacatgtgatcctcgctcctccctccactctatatcctctccctcccctcttctctctatcccttctctctttccggtcgatggagcggggcgagcggcggccggcaaaagcgggcgacgggaggggcggggcagcgagcgagacaccgacggcgagagctcgaggtcaacccgaagaccagtctccagccacgcgcgcgccgcgcaacggggtccgacgccagtagcgccgccgccgccgacgcgatgggagtgctccgggcggcggtgcccctacagccggaggccgacctcgtcctggctaccggcggcggcgaacgggggcaggtggggctcgtcctcgtcgatggctccaacgggttctgcaccgtcggcaccgggaacctcgtgagctacctcccccacgcctctccctcttttctcctagtcctccttcgcccgtgccttaccgcgcgcgacgaggattgatggctggcgttggaacgcatggtggttgggctgctcgtgagccactccagagctgcaaatggtagagatcaaattttgtcaggcaccaaaagaggaccattctcatgtcagcgtgggcaaaaccat

SEQ ID NO: 47490 - DNA, 721 bp, Oryza sativa
  unsure (1)..(721): unsure at all n locations
aggtgaccactattggacagnacntcatatgcttcgccgccttcttgaattcttcgacgatggtgtgctccatctcggcgaagctgttcaccaagaatccatccgctcgccggtatcgccgtacctcttcgaggatctaccaaaacacggggttggacctatcgaggtatccgtccggcatgtcggcgacgcggatcgtcatgtccccagcgagacggagggggtccggcaggtctagcttcgtcgcgggcgctgtcttcgacgccgcactcgccttcttcgtcgcaaagaggggataggccggtggcggtagagagggaagaggtggccggcgagctcggtcgagctccgccgcctcgagggcctctcgacgggaggagggagagggggagacggaaggcggtcgacaaatgatgaccccaaggtaaatcttttacttcttctggggttaaggcaacccatccagtttctccaccaacccaacgttttggttggttcggagttttagaagagtccacccagattaaaccaacagccggatttgttggtgctggtggggagtaaacccaagcaccttctttaccgtttatagctgtttcgaagtcttctggggcttttatccacggttggggattgttaccctttacttaccttggagaagacatatagtaagccaagttagggtctttccccccaggcttcccaccaataattactgatg

SEQ ID NO: 47491 - DNA, 1925 bp, Oryza sativa
  unsure (1)..(1925): unsure at all n locations
aataccaaaaagaancgttttttctataatatttgtcgccaatttttctcccaaaaatttgacagatgtaattacagtataatcgtagtataattacactgtaacttgcatgtaattacactgtaactatagtgtaacttgtatgtaactttcaaanatctctctgtaatatgtcttatttcggtaaaatagaggttgtgggaacaaatccttacacatatgtgtgtgctgtgattttttttcttcctcaccaaaacaaatcttgtaatagatttaacgattcaaaattacgtgaaacttatatacaagttacactgtagttacatgcaagttacagtgtaattacatataagttacagtgtaattacactacgattgtactataattacatctgtcaaatttttaggagaaaatttgtcgccaaatgtataggtggtcctaaaagaaaagtctatttacgtccctccaatcttgccctcgatccaatcacattcatcaaccacgaggtataagtttccctaacttcaaaaaccggtgcaaatacagtctctaaggtagtattgagcccggttatggcttaagtgacgtccactcggcatattggctagatcttcatctcgcataacatctttgtggcacttcaagtcagaaaaatgaagtgagacccacctggaaaacacatgtcaaagactatatcttcttcttccaacctcctctcttctccatctttccacctctcctctttcttcctcatgatctctatgctagcagctaactggagaggggcagcgtcaggcaggtgaggagtaaggcagcaacgacttatcctctttatcaagcggcccagacggcagcaaccatatttggagtagctctcagctgctctcgtgaccttgaactcaagatccacatccattgtagcatcgtcgagcttggtgacgctgctgccgctgctcgggagagaggagatgacacattgctccatgcagcccatgcacccgtctgtgccacctcaagctcgccgaccactaggttgttgcggccaccgcttgagagaggggagactgtggacgagggacccatagctcccctgccgcttaccatcgaggattgaggtggagtgcagtggcgcacatgagcagcaaggttaaggcagctagctcacgcgcacgttgaaggcgtcgatggcaggatctggcgtcatttccatctccttgagcgtaaacgggggccacccacccgatctagtaggtgaggcggggggccacggcgcgagcgggagctcgatgaggccatagtggcgcgagaggacatgtaatcttggggaggctgcggggacaacattctggctcgtccgcatcctctgcgacgaggggctcgacgaggtcgaccgggcctcggtcccgtcctcctgcgcatctgccgccaacgagctcatcatcgtggttctcgtattcttgatgcgtcgatggactcacggataggggagctcaacccttgggaggctcgtcaccttgagtttgtccgcttgactgactggatttgccttctgggctcagccccgacctccggctccttccccgtcgaccactgggtttacacaggcacgcttgagatggacaacatccacacactgctttgccaatgctgggcgcgcccctagtggcatttgcgtcctccggcctatcttgcctctacgattgcccgaggagagagaaagagatgggagaagaagaaaaggaatgtaacatggtcactagatatgttttgccacatttcacttacaatttggggttatgccctgactcaacgagtctgactgtagtcaatctaccacatcataaaaaaaaatcactaccctaactaccgaagaagttgatgaacgnctgtncctagtggtagagtcattctaannnngcccacg

SEQ ID NO: 47492 - DNA, 725 bp, Oryza sativa
gcagcaaattgaagcgtgaacgacctgggcggtaagcggaggtggatgtccgccggcgagaaggaaatggtatacttgcggattcggagccgacgcctggcggcgccgcagcagcagcgccgccagatccgcgctccccttcttccggggtcgcgttgccgccaccgatgcatgcccaggacatgcgcccgcgccgtcgaccgccccgggaaggcgcctcgtcgcgcgctgagccgccggcgacggccattgtctcatcgtcgcccgtggcctgccgactcaccctccccccacccagcgctcctgccgccgtcgtcgagtcgccggccgtcgctgcggcagaatcgccgactgccaaagatgccaggagagagaaggaagaagaggaagcctcctcccacgcagcgctctcgctacgccgcccgcctctcgccgcccgtagtcgctccgcccaccgcctgctgccgagccgcttccacccgccgcccctatggtccgccccccgcccgttgccgctcgccttctcctcgccgtgtagatgagacagagagagggggatagatagagaagggaggctgacatgtgggaccacatgggtccccccttttttccattattttttgtgcagctgacatgtggttcccacggttttttattattaaacagggatccaattgcacgtaagcgccacgtcaatgccacatgggacgagcacctagtcaaag

SEQ ID NO: 47493 - DNA, 1790 bp, Oryza sativa
  unsure (1)..(1790): unsure at all n locations
tttttggcaccgccgggagccttgatggccattcttttcatcataggtctccttcgtcaagtcgtcgaaatctgttcgcaatcatctacgagcacggcattcttgagtgtcaacgcgaaaaatcaaggtgtgtaccgatccacgccgacgccgcgaagttttctttttcatttacttttctttttttttttgctatttccgacgtcgttcaaatatgagtacagcttgcggggtgtggtggtcgtttatagtaagggaagaagaccttttccgtgtctgtgtctagagttttgattggtattttagacgaatttaatttggcggcatgtttggcccattaactttgtaaaatttggtcatcatcagtgttttttttttggtagaaaggtttgtttggattggaacaaaacgaatttggagttaaatttgtcaatttaagttagggcttgtttagatctcctggtaaaattttatacctatcacatcgaatgtatagacacatgtatgaagtatttaaatataaaaaatagctaattacccaaattgcgtataaattgtaaaacaaatttttaaacctaattgtgccatattttttaagccttagcttgtttgcttggtaccaaaatttcttgcctagggccgagtttagttccaaacttttttttcaaacttctaacttttccatcacatcaaaactttcctacacacaaacttctaacttttccatcacattgtttcaatttcaaccaaacttctaattttggtgtgaactaaacacaccctagattggcaccgttagtgctaaactaagccaagccaaaatatgaaaataatagtaataattgtttaagatatcattgtagtatccaatatacatgtttgtctttcttgttattttcaaataaaaattattgaatatagctacatgtacatgagagtagttttcactacaacacccatggcataaatgctggtcgcagaaccttgggtgtgacaagttgcggcaaccaaaccagatactcttggtttcatgtgggttcatgatgccagcatccacttcatgaatcaaattcaatgtgaatagtagtagtttataacaattgctcatcagtacgagcaaacgtgtaattctatgtacatatgaaagattgtgtcaaatactcaaatatgatatatgatatgatgattagagagtgaaaataattttattttgctttttgggttttcttataatctcgtgtatatacctaatattatgaaaataatctagtgtacttccttcaaaattaggatggaaaccacttgtccactacaacaactaacactaaagcaacggtaagtttaactttagggcttaattagattgatgccatttcaaaccatatcattttttggtagagttaacaaacatgtgcatctatttaattttttgccaaactgtactaaatacataagaaatcctgccaaaattttggcaatatgacatattttggtattgtcaaaatttagtaaagtttattttagttataatctgaacagccctcaacatccagttgaactcagaatttgtaactgattaagcgcacacaaaacgtaccaccaaaattctactagtacatttcacacctaacgggcaataatgcaaccagtgcctcctcgttgccaacccaaatctccctgacagaacacgccttgaactcacctaatgatgccttctaaagtcaaatttacaactcaatggaatccacagctgatgngtnntgcagtaggagaactcaccaaaggccacg

SEQ ID NO: 47494 - DNA, 997 bp, Oryza sativa
  unsure (1)..(997): unsure at all n locations
gcgtgcggtagacgnctctgtcggagcncaccatgcagctggctacagatctgtagcccactgctcttctctctcatcttttatctcattaaaatatgtttacagctagctaatagcctgctattggacctgctcttaggcttccttcgttcccaggtgatctgggagattgagagagaaaacatcttgttttccgcgcgcacgctttccaaactactaaacggtgtgctttttgcaaaaaaattctataggaaagttgctttaaaaaatcatattaatccatttttaaaatttaaaatagttaatactcaactaatcatacgctaatggctcacctcgttttgcgtatcttcccaatctcctcaatccccttcttctcaaacacacccttaggctgcgttcgttcacaggagacaggggagattgcgactccttttccatgcgcacgcttttaaaactactaaacggtgcatttttttttgcaaaaatcttctatagaaaagttgctttaaaaaatcatattaatctatttttgaagtttaaaatagttaatacttaattaatcatatgctaatggctcacctcgttttacgtatcttcccaatcttctcaatcctctcttcctcaaacacagcctatctttaaaaatgtttatgttttgaaatgaggtagtagaaaggtcagcagcagtgcacccggaagaggaagcttccatggcggatgtagtatagtgtgaaaaaacgtaagcatggccacgtgatgggtaagtagaaacgcggcatgcggcagctggtcaatgcattccacgtctttcagggtcaaattcaaataatccatttttttaaaaattaccccctttcgaacatgaacgatcaactccaaattagatccaaattaattaacacataaacgtacgccatcaggtagaagaattaatctcgctccaaattataagcatccgtacgcagttattttccatatctcctgctcatgaaaa

SEQ ID NO: 47495 - DNA, 3588 bp, Oryza sativa
  unsure (1)..(3588): unsure at all n locations
aagacgaaatttccactgccaaacacatggtttgtttatggcaaaaccgtgtctttaatctccgcgactcaaatttattagggattggagtcaaacatttttttaaggctcaccgtattaactactccctccgtactggtaaaggaagtcgttttggacagcgatatggtctccaaaacataactttgacttcttgtttctataaataaatatttaaaaatgatatatgtatacttatgaaagtatttttcaagagaaatctattcatataatttttacattttcaaactcaacaacttgaaagttattcatgatttatattctcaaggattgacttaaatattatcctaaacgactttttttacgagtacggagggagtatattaccgtacattctttttttctacggtgccatacattcttttttagaaaaaagatacaaatgttcataaagacgcgcacactcacttctacgaatccacacatgtacaccttacccatatgaacacctctggaagattagatcagtatatcttgtgatcagggtttttaattttgaaatttgttttttttgccgcaggagggggggcggaccaaaatttcgaaaactttgaaattttgaatgaatttgaataaaatttgatcaaattgacaaaaaactgtaaaaacccaaaaatttcggacgagatatgagcttgccgaaggggacgaaattaccaaaaattcgaaaatttcgaaacaaaatttcaaaccctgcttgtgattgacaaagtcaccacgagtatctccctatcgatggatatatcacctatcaccgaaagcgtaattagtcgtaaatacaaacatcaattctatgacttaaatctgattggactggttttaacccaaggaacctaagtaacaaattaagctaccctcacttcgcattgtcatacggatttaatcctacgcgccatcttatttgtgaccatagacacgtactgcaatgctctaaaacttgggctacatgggccattttttgggccactctcacacacgaaaggaaattattgcacagaaaagtccacttgaaatccctcaacaattggtcgagtttaattgcgtccgtcaaacagaaattaaaaccggatataaaaggtccccaacttttaattactagtatatgggtacgttgactaggtccatcgatctgtattgacgtagagcgctcacatgtcacatggcagctcccctgaacctgaagagatatgtgggacccaggtgtcagcatcctcaccaccttttcctaatttcttcacaccggcgtgcgacgagctcgatctagagctcacccggccggcggtggcggtggcgatggtggacggacgtcgagccccagcagcaagttgtcggtgagagcagctggaagctaggcgagttgaagccagtgacggacgcagcagcgcggagaggagcacgccggccgctcgatccgtgcgtacgtacgtgcgatgccgtcgagtcgtctaagaccatggcgacgccgctgtgcaggtttggcaggggcgatcttctgttctatcgggattagggaagacgtacgcgcgcccgtccgtcgccatgccatgccatcaatttcagtccgaaatttctcccagagggaaagctgtcgtgaccgacgtcctgcatgctcatcctggggggtgcgccgccgccgacggtctgcatgcctctccgtgaccgacacaacaactgccttcttcttcgtccccgttgtcatacgcacgttggtgaaggtcgttgggaacgaccagctcctccaatgccatcaccacgcatcttccgatgtcgttcctgcttttgcactctgggattacatcggttaaggatcaggagagagatacggggagaaaacagggtagacatgtttttttttatagtgatatgttgtcacgtactccctccgtccaaaaaaaacaaaccctgggtttccgtatctaacgtttgaccgttcgtcttatttaaaaaaaattaaaaagacaagtcacgcataaagcattaatcatgttttatcatctaacaacaatgaaaatactaattatacaaaaatttcatataagatggacaatcaaacgttggacacggaaacctagctagggtttgtctttttttttttggacggaggaagtaggtgcatagagcctaagtcaacatatcatattggacgaaaccactgagagatccgatttactctggtttaatagatgggggatactctctatccggttttgtggttgggaggctctgcactcagataaaagccgatcgatagtttttgaagacaaaataattgaacttcgtccaaaactcatgttcctcatctgcatgcatggatcacgttgacacgtaaatctgagcttttttggaattttttttcatttttaaatttttattttttaatatttacagaaatattataccggcgaaaagttgtacagaagtagatcctgccgccctacctgagggcggtagggtgacgcgaggaacggacaagatgaaaataaaaactagaaaaatacattttttggcagggtaaaaattgcatttgcccacttgcaacctttgcagagggcagcaaaggacctcaatgcaaaatacgcataccttgtcaccctccacttgggtggcaggggccatttctgtaaatattttggatgatataatatttctgtaaatattaaaaaatacaaattttaaaatgaaaaaaaatcagcattttcatcgatcgcgctgggccaaaaaggatttaagcccatccggcgaggtgaattattgagaaacgggtaattaacctgttggactgggctgatatattctcgaatgcgcctttattttgtgaaataagtccattttacctccctcatctcttgcgcttgtgtgaataacatctctcaaccggaaaaccgggtataacgcctcctccatctccgaaaaccagaacaaatcacctccctcggttgttttgctggtggtttcgtctgacgtggcgttgttgacccggctgacaagctgactcagcgtggtgggacccacatgtcagtgtgtagctatctctctctcccctggcctttctcttcaccccggtgcggctcgtcgacgtgagtcgggcgcaaggcggccgggcggtgtgttgcgacgcagagaggtagccgtgtggcggcggtgatgcgggagagcgcacggcggcgagcggcgcgtacggtgtgctggtcggctacgggcggcggggcacgcggcgacctggcacgggtaaggcagatggcagcagatggcgaggccgggcacggcacgtggcgacctggcacggcctgatgacggcggcacgacgcggttggccggcggggctcagcaacgggcggcgggggaggggtgcagccggcgacgggcgaagatgttaaatgacatgataagggttcggttgattcagctgaagataggccttgcgccacatgtgatattgatccggtagttagaatagatagggtttgttttgattgttatcacatgcaggntggtttctagatttgaaggatctgttttcttgtagcg

SEQ ID NO: 47496 - DNA, 5905 bp, Oryza sativa
  unsure (1)..(5905): unsure at all n locations
cctgggtttganttncgagtggattcccgtccttctgcaagnagntcatcacatggatgtttcctagctttgagggatctgtttccttgaagcgatatatgtaaaagccacgatgggggctattcccatctgatcaacacgcatccagcgcacaggactcgtgctgctgtttctcccagaaactttccacaggatagaaccagaggtgggcaacccccggcggtggccctcgttggcggcagcggcgctcgctagcgacaaacggggaagtagactggcggagaggagctgggcattggcggcggggagacgggaagggggtggcggccggcggggagaggcgccagcgacgaatgccgcgtcagcggcagcgaccgctttcacgccgatatcgtatatcctcgctgcgctcgacgcggacatccacgatggcgtacgcgtcctctccatcttctccggccacgacgccggaaaccacctcgccagaatccaagcattaaaccgtcgccacgcaattctaccaagccacctacatgctgctcgtgatgacagccaccacattggaagccatcattgcggcggaaccatgcgcactcgccggtgacgaatacacgcagcttctccaagccgccttcgcctgggccctgccgatggacggccggagccacggccggccgcccgcccgccgctgccacatgacctcatgataccatcttcgtccgccaccacacgacatcctcggcgcgtcgacctcatgatacgttgccaaagaaggggcctgtgtgacaagcagcgccggcgacaaactgcagcagcacacatgcatctacatatacaagactcagcatgcaacaggagcaacaagaaacaaagaagagaagaagtgaaaaaaagaaaagggggatgatccggccagccgtcacacctccctagccacatcgccgtccacgccgcgcccgcatcgccggccgttggccttgccggcggccgccgcgcaccacgccgcaaaggcctccgtgacctgcgtcgcgtccgcgaaatggctgtgccaggccaccatcgaccacgcctcgccgccgcacggccgagccccgccggccaaccgcgtcgtgccaccgccgtgcgctctcccgcatcactgccgccgcacggctacctctctccgtcgcaacgcgccgcccggccaccttgcgcctgacccacgtcgacgagccgcactgtgtgaagagaaaggccggggaagagagagataagggagagagagcgcgctacacactgacatgtgagtcccaccacgctgagtcagcttgtcagccaggtcaacaatgccacgtcggacgaaaccgccagcaaaaccaccgagggaggtgatttgctctggttttcagagatgaaggaggcgttatacacggttttccggttgagggatgttattcacacaagcgcaagagatgagggaggcaaaatggacttattccttaattcgctcttcttttaaattgggccttccagttccaggcatgggcttatacaatctatgtataaatcagcctccctgaatttggttgcttcactgcacgagtgagttttatgaacaaagccacttttcattttctttatattgtactgtagacacatacacacatcgctacacacgtagcactacactttacatacattcgccaatgcgcctctaacacatattttaagaaacagatcactagcgacatattatatccccaatctcactaaaatcctgttaaaacctagctcacttgcatgtgcgtacgtaatggtggatagagtcatacacccaaaactccaccaccacacctgtttttccaacacctttttatttctgaccatcttacccacatatatgtgccataattattcatattttcgatctattttatactcacgtccacacatcgtttcaatacatgttttattttaggatggagcgagcatatcttaacaacgcgtgttatgccatcaagccacgtgcatattggatgcgtaggtagtactaggtacatatgtacagttgcttttgttgaattattaggtagaattaatcaatcaatcaagtattgcagtgtggccacacgaacgagtttttgacaaatcaccaatggatttccttttcctcacgagagtgcatatgtaggtcttgtctcatgtgtatatataacgacacgctagcttggagtctccattgatttctccatatatggatatatgcgtcagtcaaattatacatgcggccgtacgtgcagatgtcgtcgttttccataggtttcttatactttgactttaattaatttctctcgtttgaaacgtggaaaattgtatcaatgtctatatgcaattatattaaacgtggaggctacactcatatacgggattgtaatgtgtacactaattcacagtttgcatactcatttaaataaagaaaattaattagcttttatatatgattcttttaagatggaaagacgaagggtatatagcacatacatgcaagctaggataatgggtgctaattaaatttagttaagccaattacgaacggagaataaggttgacatggttcccgatgtttttttttagagctgggccatccctagttacataacatttgtgaattttgatgtgtgattacgtcgataatattttgataaataattttatacccattttaaatgaaataatttaatttttttaaacgctatgtaatttaacatacagattttaaatttaccgtggatctaacttctagatgcgttgtgtgctaacaaacgaatttgcctccctttttgactggtcgtaagtgggatatatatacaacagcgtgtgtaacaaaaatagaccacttaatttggctaatcttggtagtaagtaccaaatgatttgatccaacacgcatgtgcattcatgtgtagtttcttaattggtgcatctctgagtcagacatagaaactaactaactaataatgcattataatcagaaacttcccagctactcgcatgatgatcggactttaattagctggtccacacatgatgcaaataacaaatgggttagtgaaataatggtggaaatgatagccttgtcacaatcaaggctaagcatagagagatagaggggggaatgtggttacagtaacgtagaaaattgcagaatgtgccatgaagcatattgataagcaatatatattatcaatttgtttctactccctctatctctaaatgtttgacgccgttgatttttttaaatatgtttgaccgtttgtcttattaaaaaaaagttattattattttttttcctatcatttgatttattatatatatacttttatgtatacatatagttttacatatttcacaaaagtttttgaataagacgaacggtcaaacatatttagaaaagtcaacggcatcaaacatttagggaaggagagagtataattgattgcccgtgtgttcacttgtgatgtaaaaaacagcaaacgatgaatccatcagacctttctatgaggaatctgatgccgaataattaagagatagtagcatgttgaaggttgaacacacgaaatcttggggtccatggtttattaatttatttttaatgaaaacgaggttccaggaattaaaactttgtagtagtacaattcttttggttaatgtggaattattaatatatattgtcgagtataagaaagtttcactataagagtgatgcaatgttccaaagtatgcaagtgcataagataaaaagacaagctaatagagtagctcatactcttgttaaagtggctatgaattcgagatcttgtgaggagtggatgttgtgtgctccagcaagtatatatcctagatttgctaaatcaggaatgtaatctctattttccttggttaataaagctctctctttaacttaaaaaaataattaatgatgaccgatcattattttggcaaaagagcgtgtatttgaacagataattaatataccaagctaggctgggtcctagcttaagctagcagctatatctatggtttgtacgaacagatgaacacacggctaatggtgttcagccttactgatggaaaggctcatccactatatagatagcactatctgaactataatggcagcagcaatgagttctttcacgctatccatctcgatgatggagaggaggccggccggcctgccggcgccggtgcatgtcagccgctgcagcagacatgaaattgagtgcgggaaactattctaaactcttgaggggatatttcctcgttgtttgcatgtcacttaaatggttataatttttttaaaaaaaatcaagaagatgtattaatatgtgctatatcactctacaaattaacatacaagttaaaattcaatttctacatatcgcaatgaaaaaaaaacaaatttaactacagttagttattcaaagtcaaatttatttttttttcgttgtgacatgtagaagctaaattttaactgacatgtttaaaaaaaaatttttaaaaaaattatttataactatttgagtgacatgcaaataacgagcagatatccactctcattgagtgctcatcctcgttccttccagccttctgttgggtgggcatttttttttatggtggactgtgagacatgcactgatcaagctagaggcgcacgttcttgcactgataggtacgtacacccattaatttgatttctctttcacttgtctcatgtgtatgagtagcttgtacaatcacatgtagcttgtacaatgtactatagttattgttgaatgttgacgattatatttatacggaattttaggaactgcgtaccatatcaagaatagtgcgggtgtgcagtggcagaatggcaggagcattagctggcacgtgtctttaaaatatagatgggacggagctgctcgtatgataagataaaatataactgaatacaatacataccgcatttatattataatagtataaaagcatagtacaactaatatattaaagtataaaagaacttcaataattgtacgaccttttattttaaaatgaagcaattaataagctttgcatcatatagttcacagcaaaatgataaaatgcatggcagaagaaggcgaccgatcgacattgaggctagatgggcgtcatcatactgtgtgaacttttgaaaacgaactgtccaactccatcaatggcacgcatcgaaatttggaagatgagatgtcgatcggatattcattgtgactagcattgacaataggtttgttgctgttttctctcatactttccttcttaattattcccaatgtctcaaattataaaggcatgcacacattttaaaattcaaacttcattaatctcgaataacaataattagtcaaaacatatttataggtttagtgatataaataggtattgttagatttatatttggatttcatataatgttgatttcaattcagataatgctcatatataatatatactctgaccaagctccttatggtcgtctatgggtgggaatatatagctccctccattgaaaagcctcctaaatatttcttttaattataaccgagaccatggaatcttaactctgatataaccgagacagctagctctagccgatcgtatatacatttcgctatccttaattagcttatactagtaagttgtaacagtactttctccattctagaattaatgtattaaaaaaagtaggtgaaaagattaaagaagttataagaaacgaggtgaataaattaaatgaaaaataattatgtttgatttagaataagggaacgtggagaaatagctttattttaaaataagttaccgttagaaatgactacattttgaaatgatgtaatat

SEQ ID NO: 47497 - DNA, 3797 bp, Oryza sativa
aacgagagaagagagaaacaacattaaatacacttagtgaggatgaactatataaatatataggatactcctacatttactatggctaattatgatgttgttgccactactagaaaaatcatttattgccacgaaagaaatcgtggcatcaatactaaaattgtggtaatagatacatgttgccacaattgtaaaatcgttgctagccgtggtaataaacaacgtggtaataggttattgcaacgatttttattttgtggtaataaatttagatgttgccacggaatggatgtggcaaaaagtcatattgcaacacttcacagcgttgtaataaaaattattgccaccactccatatgtggcattagttttacgtaccaaattaaaagtttaaatattaatctatcatcctatctatttgtatacttatttttttgattttgtgtcttggctaagattcaaacccaaacctatccttcacgcgtgctctcctttaccaactcatctacgtatcaattttgttggaaaatgcatatcgttccatttgagcctagctaaatgagatttgaatcatagatttgaatatctaaaagatttcaaatgaaaaagttatcacctataaaattgtagatctcgtcgagagctataatttccatataaaatttgtctcaatccgtgtccatatgaaaaaattaagttaaattatgagacgacaatctttttattgcaacgaatttgttgatcgtggcaacaaaaaatagtgaaaagtaccatgtactatataaattgccacaaaaattaaaattgtggcgatagaacatgttttttttgcaacagtacgattttttgtggcgatatcttattttctattgcaacaaaagtacgaaataaaacaacgattatagatcgttgcaataaaaaataattatttgccacagaaaaattatcattgcaatagtataatatattgctacgaattatttttttgttgcaataatttggtggcaatagctcaattatcttgtagtgtgcttcgtacgcatttgatccctaacagaaacaacgaaattatatgaagtactctatcagttctaaaataaataaaatatgatatattctctgtctatattcataatactataatgtgtcactttcataataaatttgtttattttaaaatgaaaaggttagtatatatagtacttaatatgcagccagccgtaggtagtgatggtatgtaagcctatcctgaaagatgtatatataaaagctaaaacaaaaccgcagctgaaaattcaacgctcactttagctacacacgctgggggagtaggctgtcaaattgcagcattatcattatcttttgggatctatcgatctatctatccatatatctatatatattttttgatctcctatatattaattactatggcaagcaaaaactcctccactacttctaacagcgacagatgctacacatatactccctccgttaatataagggattttgagtttttacttgtaacatttaaccactcgtcttattaaaaaattttgaaattattatttattattttattatctacagtactttaagcacaaattttcattttttatatttgcaaaaaaaatttgaataagacgagtaaaaaaatttaaataagacgagtggtcaaacgttgcaagcaaatactcaaaatctcttatattgtgggacggggggagtataaaactccacttcctttacatgcagatataaacatgtacgcatgcatatttagttcaagaaagaaaataaaatctatactatccagacacacaggatcaattggttagattccttgtgataaaaccatcctatccgaaataaagttataaacttaacacgggtggtcgcacacacacgtttacaactaattatttttttaagtggtagttaagtgacatatctgttgctaccgaagtatccgtttatgatgactttatcaatcttaaaatataccggtacagtattttggaggtgctcataaaacataaaaaacctatagctaagccaaaagaaaaaaaaagaagcaaatatatgtatacagttgatcgatcgtgttgcacggaaagttcgaaacttaattaaagacgcacccactaaattcggcagtatacatatacaaatcgtccacaatgtacatgcgtgtacactgggcctacctatacgacctgcactttgttagtattatatattgaagaaagttgtacgactagtgtacgtatgcgacaacgcagcggccaccacacagctggagtatatatacgaaatgtaggaattaacgtacgcctacgtcagcatccaattaaattcatccgagacgaagaagcggatgccggcgccggtggatcccgaaccgccacggcgccagctgtccacggcgggggcggcgggtggtctggtcagtgcggtgctttccgcgtgtcgtccccgccggcatttggagctgccggtgtggtcgcgcgttgcaccagtggtgccaggagagggaaatcattgattacatctgtttgttggttctggtaggtaactgaaacaaatgctatttgcaaggtctgtgaaggtcaagtataggctaacgacatggtgtgagatttaggtttagtgtagtgcaaaaaataaagttttgtgacgtgagcatttatattgatagttgttatagaggctaaaagctaatcacaacatatatgcagattgtggacagtcctaaatagcaaaatgtgtcacatgtttgatggcaggatagacaggacatagtagttttatagtggtagcattgaaacagttctgctagatgagcacataggagtataggactataaaactatattacacatggctaaattctactaatatggtttggatgccttcaccgaattcacacaggggcccttttgttgatgtgcaaatggaagtgcaatattttttgctatgatgaattgcttcccccgtgtacatagctgcctgagaagtgatgcaaaaatacaattttttttatcaatactggcagtcaataatcttatggcattgaactactcaacaatattagaacaattaagcatccttgtttcctagtaatgttctttttctgaatgtgaaaaaagcaagttaacatagttgttttttggtatatattcagattgtaagaatcaaagaagcaattgccgatgtcaagtaatctgtgaatgaattaactgaaggaccaccagcaggtacaaatttagcccaatgtgaggaaattaattaaacatctcaaatagcagggggggcacaaaaaggtaccaaccaaaagcaaagtaatgatttatccatactaaaaaaacaaacaggtaaacaatccaaactgttttcagtaattttctaataatcaggtatgtgaaccaaataatgcacacagcagcatatttattcagcaaagaaagttggaatggacggtattgtaggattgtaaaggtcaatatgtcaagttaacctattggtttctggttgtacatcttttacatagattataaaaggtatgtgattttaatacctaaatcatagcaagcacaataattttatgagcagatactatcagtatgtttaaaggaagagggtgaaagtgcaagttagtcaaataatacataacttagttaaaatgggattttaacctacagggcagcgctcatcgtcataaactgaagttttatcatcctaccccagtagttatatcatcaagagtcctgaaaagccacttctatggcaagagcaaat

SEQ ID NO: 47498 - DNA, 2728 bp, Oryza sativa
  unsure (1)..(2728): unsure at all n locations
agaaaagtgacccattcttcagctattacctgccaacagaattcttgttcacaaacaaccaaattatagaactaatatatgcctatttggtaaacagataatcaactaaattttcacttccgtaaagaacatgtcaaatataatttaaacggtgaactcaaggtaggcaacgaacaacgatcagccaaactggttgccagtggtgccatttctcctcgtggaggatggcaccaatgcaggcatcctttgttctgatctactatgttgtgtgcacctggagtcttggcgtgttaaggcaggcatcagcctatcatagcctagttttactactgaaaccattgcaccagctaaagcctacaagaataagagaagtggacagctatgccagtcctttgatcttgcaccaatccatcatgttttctttggttcttctaatattattcgcaaagcaataatgtaatccattgtaatgcagcagctgattggcgttgggaagattagatagcttagaatagaattgaagctatagatggattgtgcaacaaattgagataaattgattttctattgttaggcgccggccctaagtggcatagcgcgtagctgtgctcgacgggagggcgaggacgcacgcctcacctccccggagccgtggtggaaactaacaggaactgggattaacttctttcttgattaatcacttaaaccgaatggcctatataggcttacaatggaaaaccaaacagctactaaccaggaactaacaacttaatcttcctaacaaacttaatcactgaaactaatcctaacaacttgatccaacatcacggcgcctgctctggctgttggcgtcggttccggcgctgatactgaatgccccacataacatctatagtgcaaaaagagcagacacatagcgagctttagtaatcacatccaaaaataatacagagaaaattacagttcattaatttatttttggtgcaacagtaatatacagttctgatccagacctatataacctttatcaaatgcacttgtatatttttggtacaacagtaatatatagcagcagtagtagtgattagtgtgattagtgtatacgtttagtctcagattctgcatgtaaaagatcatctaatgtcaagttacaaacatgctcgttataaattaattttatagaagtcactaccttcaaggggcataattagtaatgaacaaactaaaaatgcaaagccacaatctattttgatgaagatgcatgactacatttggatggagcattatcaaattattatccacaaaaaatattgtacattgctatattttgctggaacaaatcagcatactcatacttcaacaaaagatatatcaatttcttatacttggaaacaaagaatcttatgcattaactcatttgtaatttaaagtcatcagcatgctacaatggatcgtagatgaaccccttaaagaaatgcacagccaaattgacagcaacactaccaaagcaaagctcgccgccatcaaagtggggtcatattcggtggagatgcaacctggttgtggtggcagatgaccttagatgctgtgccagaggaccagtagggcagcacggccgtgacgcaaggggatggaggtggcagcatcctctaggaaccccgcgccgatgcccttctctgctttgcgtaagctcaacaaagcttcactacaagctgcattcacacgctcacattcatagtgttacactgatttaaacttgcaaagaaaaattcaatacacatatcttcatcggtccaaattaatcacagtatcacactaagaccaccaacttgacaaagatataacatgcagtatgaaattccagaggaaacttttctctcctcacctccttccaaaaaggcagaagaagaggtaggatggagctgacgaggagccctccatgcggcagatccagcagcacccgccgtactggagaccgccgctgtccgaaacgggacaccaatgccacagatcatgcagctccctctccaaatcggttcaccgacctcctggatccagtgattccccgtctcctcgacgtcccacacgcacgtccgtggccgcctaatcgcaggcatccgctgatccggaaatgaacaggatggagagggagagggagagggagagaggggcagtgccgggcatagaggtagaagagtagaaggcggctcctagcttcccctcgctttagggctgccggatctgccggcgaggaggccggagtcaccggatccgacagtcccggcctcctcgttggcggatgcggcgcgggagcgagaggatggtgatggcaggacgacggcgcggcgacagcaacagctcgcagtagggagtgcgcgggggaggtcgccaactgcgggaagaagaggatgaggggacggcacgcggcggcggccgtcgcttgggcaggagagagagcggagcgagaggagaggaggcagaggaatggtggcggctagggtttggggaaaggggtgagggttgcaaaaacaacccctaaacttctagttttcagagcgcggttcaattttccgttttttcgcttcttcatatagaatattgttttcttaagaggtcctctaagtaagagcgcacaacgttagaactaaggaccagggatctataacaaattatcaagtaaatgtnntgggcgnctgtgtcnaagtcccttcaggtantcaagggccca

SEQ ID NO: 47499 - DNA, 5787 bp, Oryza sativa
  unsure (1)..(5787): unsure at all n locations
ggggtgnnattgtgacagtggtacagnacnncatcatgagcctaattaatccatgattagcctatgtgatgctacaataaatatgtgctaattatggattaattaggcttaaaaaatatgtctcgtgaactagctctcatttatgcaataagttttattattagtctacgtttagtgcttctaattagtgtacaaacatccgatgtgatatggactaaaatttagtccatagatgcaaacaccacataagtcccgcagcactttgcatccgagattcacgcatgtacacacaggttatggtattgaagcacctaaacattagtttcatatttatctaaaataagaacaaaatgattcatcaaaatattatgaatcgggagctgtgtggcctacgcacgttacacaagttatggtattagaaaatttaagggccattttgaattgcaggaatgaaaaaaatagagaaatataaaaaatgtaggattttgataggaatgcaagtacaaagcagaagattatagaacacaggaaaaacacgtttgattagaccatagaaaaaacacgcgaaatggatgagagataggggcagcatgggtggcacccagctccctaacctctaccaccgtcgtttctccatccctcttcctactccgctatccaaagcagcctgttggaagaccaacgagcatcagacttcccatcggcttagcaccctctccctttgaggagctctgcccctctttctatagggagctccattggtatagtgaaggcaacaatcaattattaagggaaggcttgggctgccgagatgatatcacccaattccaggctctccttggtcagatccatcaagtagcctcgtgggcggtgaggcagaggaggcttgagacagtgcccggggtgcaaatggtagtctagtcgtacacagaactggaagtctgctgacgaagaggtgttggtccggtgtggtaggccatgcactaccaatgttttgttggtgtggtacctaagatgatgggcaacggatcgcggcaactgggttgcaagggttccaggacaaagcctagcataacaattcactaggctgatagcggctacgctttcgagcacgtcaacccacccggggacattgtcaagataactctttcctccctctctaggcgagaatatctaggtgaaaatcatgtccattttcttggacgggcggcaatagtgtccttggcgttgcaacctccgtggatgtatcgttttttaagactccgctttgtggtgctgctgtagatcgggtgttgatataggcaacgcatagtgcagcggctaggtgttaggttcccctccccttggcatgtgtatgtgtggttggtgcatgtgcgtggttccttgatgtacaatctagtgtataaccacctaaactgttttttatggatcatagtgttttgtttgtgtaatattgttccctcaattctaataacatggatgctcagagagcacgatcatagaccaaatctatggtcagctagctattgctctaattatcggtatgcatatattaattcataaagtcatagtttacatatatttgcatgctgatcggtcatggtgctacctagctagaagtgcagccgttcatatatatgttgcatgcaaattaaataaaagcagccgccaatgcaagcactgattacatcggaaagatgtcgcactactatgccatcgattcagatattaacaataatgcaagatatgaattacgcatggtttagtgagcctgcacgatctatgaacacgcgcgcacataaattattactcatcactctgcaatcgatcgtatctgtagatagttacagtagttaattggcacaatgcaacaggatgaacagatagatagcaacgttgtccgtggatcgacacgagaggccaagtttctgatatttttctggtccggattggatcaaagtactctgtcgatcgatatatcaacaaaagccacttctactcgcaactctggaaattgtgagccatttctttatgtttctaaaaagaagtgttcatattactacctctatattttaatatatgatactgttgactttttatccaacgtttgaccatttgtcatatttaaaaaatttatgtaattatcatttattttattgtgacttgattcatcatcatatgttctttaagcatgacataaatattttcatatttgcataaaatttttgaataaaacgaatggtcaaatgttggccaaaaagtcaacggcgtcatacattaaaatacggagggagtagtatatatactttcatattatttgatgtgaattgatgaatatctttaattttatctggacagaatatgagaggcattcacaaacttgcagtggtacactgctacttgatcaatcccttttgtgtcactgatcaacaaaactgatagagatcatgatccaataaaagattcgattgatcagtagtcgctccagatcgacctagctagctagcatacataaattacggtgaggaaaaaagaagaggaaaaggattaaagttaattattccatgggctactttgataacaggagagggactgggcagtgaaagtgagatattatttcaggttgtcaagtaatgcagggtggccacgcatgcagtacgtggatttatctgagatcaaacggttaattggtggcttagcaagcttggtgcttgcccggtcggcatcacaattcatttctccgtttgtttaattttgtcttttgcaagagtccaaatcaataagaatgttgtaacaaatcagactcaataatctacccaaaaatcaaactcaacctcacgtataggcttgtcggaacagattagacgttctcattaacatgcatgataaatccaattgtgtacgcctctatctatcgacaaatcaaattcaacctagtgtatgataaagcatgtcggaacagatgtggcgtctcaacaaaacacatgctaataaatccaattatgtacggctctatgtatttatccatgcattgcagatatgacaattgacatgtaagatgtaaccaaaagcaatgaggtcgagctttatgtgtacaacattgaatgatttatctgatgcacactttggttttgtgactctgattagttagctggctaactccgattgcatgtgtggttacaacctcggtacagtctcattgtcaatctattggagaaagaacaattaatgtgctttaatttctgacaaaatgatactccctccgtattttaatgtatgacgcagttgactttttaaccaacgtttgaccatttgtcttattcaattttttatgcaaatataaaaatgcttatgtcatgcttaaagaacatttgatgataaatcaaatcacaataaaataaataataattacataatttttttgaataagacgaaaggtcaaacgtttattaaaaaatcaacggtgtctcatacattaaaatacggagggagtatatgagaagattcggggatatgtgcagttaagcatttgtggacaggaaattctagggaacttgcactgttacccctatgccatcgatcacttgccgtacgtgcttaatcttcagacatgctaactaaaaaatactagaaaattatggcagataaattttaatttatatatgtgtgtgctgggatgactcagccagctgccagtacaaatcattgtcttcaatttccatggttaacttttcttgccaaagcttggccggcttgtggatcagtactgatcgatttatgagaagtgtttgtctccgatcgaacctttcttaattatgaaacaaaatcacccatatttcaaacaaaaccactaaaaaaggtaccaatgagttttttcttcaggttcaaaagtgagggtggttttgtatgttatggtaaaaaataaactaaaattcgaaggctaaaaaggtagtaaatgcatagtaagaagaggttatacatcgcactagagatttaaccactaaaaacgactgaaatatactaatataaaatgtaaatattttactgtcgcaagattatcaaggtattttttttaacctgaaaacagtgcggcatcccacggtatattaaaaatatatacatataattatgtacagaaagaaaagttacataatatcaatccatatcaatccatgatatcgattgaggaaaagtatcaaggagttatatcaaatgtgtatgctaaaaattgtcctctttttatgtgtgataaacatcatcgtgggcctattattttacgcatgcacgcacacttttgtgacaagttcaaagcaacaaaagctagcttattactagctagcccaagtatatatacctaaaccactgtatctatatgtcaatgaagtgatagaaatgtcgtacgaatgaaattggcatccatcgattccaaattattaaagccactgggcgatatatgtatgaattatctagggctatatattgatcatgagagtttggtcgcaatatgtctcagtctagaagcagaatgttgtgcgcgtgcagatcaataacattatacttttatgctccgtatatatttcaaaaatgatgaggttaggcttgtatatataggctcaattactagctagcttttcagtaaattggttaatatgtcaaaatcatgtgcatcaaacatatagtagtaaccttggattaaacattttacacaaagcgagaataaatgcgtaagccagatgttatacctacatggatgagccttacattattggaacggattaatgtcgttttggaggcataaacacttaaaaaaccattttcccatacaccccctctattttcatagggcgataaaaagaagagtcacctgtgaaaggtcgaggctcgcacttgaacattggtttttatagaatgccattttttataggagatcctattttgagttcgtctgtgaaaatccttattttttaatttttaagtgggtagtaagaggctcacccgtaaaaatatggctattttacaagcggagctctcaacactactgcttgaaaagtagagaacgatacaaaaacgaggataatgtgcgagctgtctcataattctcactgctggactcctcatctctctcacttcctactcttgtctctccctcgatctcccactcccagcctacctccacacttctccggatggcgacgggaggctcaggcggtagcacagcgcgcttcgagagtggcagcagccatgccaacagaggaaagcccagcggcgtggccgcgcaggagtcttctggagtgacggtggccatgacagcgacaaccatgagccaggcagatctacccatgagcagtgacgggagcggcagatctgtcacctatggcctcaagagtgatggatccgccgatagatgccttgggagggatggtgcggcgataggagacttccaacggtggagagcggcggatccggcggtggtggagcctaggcggatccaagacaaatcgtggatcttgccgcggctttgcaatgtgggctactacaacgaccacgacttgcgggctactagctatgacaacggcggcataatgtagtggcagcttcttcaagacattgggatagcgtttctttatttttttttatttttcagaaaaaagtttgttgtcgggcattttaatatgcccacttgaaaaatcgctttccgcaggtggcttccatggaggccacttgtaaaagttttttcgcgtgttgatgaactnctgtaccaacgagagagcaattcaattgngccac

SEQ ID NO: 47500 - DNA, 1827 bp, Oryza sativa
  unsure (1)..(1827): unsure at all n locations
cgcagatgattctgtggcacacacctcatcagngtacagtgcttactggatttgtgagcatctttgctttatcccagcatgcatgcatgatgaaaatgaactgtacacatcacatatgtttaattttgccggccccaggaatatgtaagcagtgcagttttggaaataggaattttttccatctttctatgtatgatgcaccacaaaatttggttgcaagggataataagatgccagttgataatatattgaagtgacttggtaaaatcatgctaaatcttcattcatgcatgtatatatgcatatatgccatattcttcatctccttaattattgtaacgatcctagctactccctccgtcccataaaaactcaatctagaattatgatgatacataatctagtataacgaatctagacagactgcttacatctatatttgatgggctagattatgttacatctcaattctatgttggtttcttttttagacggaggggagtatatatactttaacaaggatccttctattcatgcagtgtaacagaacttcttttaaaaaacaaccaaatttttagatggcagcaaattaaaggcgcttaagctaacttgtctagatttctctaatttttattaaataaataagaaaatattagtttggattcgtttttcttgaaaaagagaatagacaaatagctgttcatattcaattaagaagaattagtagcatatatataaatggcttagccaattagcttaacaaaaagtgaaagcctccgtaacaattgaattttggcatattttcatatgagccaattaacttgattcctgcagacaaagcggctactcaaagacagaaagaccaaagatcactactatgaaacaagtttttgtaggatgccaaaacaagtttctgtaggatgccaaaacaagtttctgtaagtgactagacgactcacctatgaccaaaagcatgtgaaaatcgatgatcttcacatggcaggcttcacccgcctgagaaaacaggtaggttaagttgaccatccacagtgatttattttagctagaaaaaataaaaatacaattgaaaaaaaaacatatgcagttccataacaaacagagagaatacatcacaatttcatcatggatttctaaatcatcgatcatatcacaaattcacaatgtcttgacagcagagagaatacatcatagagaagtggaggttgtacatgcgtgggcctgctagaaccaatgctgtaggtaggggcgagagacgatgaccagcccatcaagccccatatattggtggtggcatgcaccgacccggccttcccgccggtggatttaggtcacaccactaacaacagccatcgtgttagcattgagctatatgaccttcggcagatctggtgcccgccaccaagctatagccctcgccaccctcttagacgccccgaagcggttgccatctccttcccgagctccagctggatgagattgcctctcccctttgactcgaccgccgctcctcccctttgcactcgccgcagttgttgagccctctccaccgaatctagtggccttgatcgggccagcgcggtcgtcagggtcctcgtcatggctgccccattctccccttacccagtttccaacaccgccaccttggacctgatcgtcgagagagggattgagccacacccctttgccgctattgttgccccttcatgccctttggagtcaccggatttgacactcacgaatgtcgtgttaccgccacactagatccggcttcttaaacaaaaaccctttccttccttttaccacccc

SEQ ID NO: 47501 - DNA, 2010 bp, Oryza sativa
  unsure (1)..(2010): unsure at all n locations
tttctgtgcagtcggaatcggtttttacatgcggatcttccacccgtctggaatgaggtgtctacgaaaatcgcgattttcgcatgtgggtgacgcacccgcgcgcaaaaatcgcgattttcacgtgcaggcactttagtcgtctgcatgggaaaataaaaaatcaaaacaaaaaaaaaaatcaaaaacgccgtcaccgccatcgtcgccgtcaccactatcgttgccatcaccaccgtcgtcatcgccgccttgcccgaggcccgccgtcgtcgtcccggtggttgccagtgacggatccggcctccctgcggtggccagcgacggatctagcctccccgcggtcgccggcgacggatccgctccgccgcccccaccatggctgatgccgcactcgcctccgccgctgcctccgctgctccaacccgatgccgccacctccgccgccctagccgaggccgccaccgctgccgttgccgggagatgggaggaggagggtgaaagggagagggaggaggtgggtgtggcacgtagaaggatatgggaggagtgggtgtgggacgaagagggcgatgggatctgagaggaagatggaaggagtgggtgtgggccggcgacgccgggattaaaaggtgggtggctatttttgtgtgcaagtcacttgatatgtccacacgcgaaaataagcctatttttgcgtgtagacctgttaagtggcccgcctgcgaaaattgatttttccgtgcggtcattttaaacagccgcaagcgaaaatagaacacgatttttacagacgcgaccacttacggttcatctgcaatctaaaatgactcctgtacgaaaaatcattcctgtagtagtgagcgcctataaaaatatagttatttttgcagacaactctcctagcctaaccacctataaagatcgacttctacatgtgtgtatttttttatgccgtctgcaaaaataaaaaggggtgttgtgaaaattggttttttttaagtggtggatacatttttgcaaatgctacacaataaatgaaattaatataaataaagtaacaagttgccaacaagaagaagtaatgccaattttcaattttcacaattgctgttgccagaccttcactcatgagagctgaacacatccaaaatggtgttccccgatctacagcttgctgcaataaaccactttgcataaataagaaaaaggaatccatgcaagatccaaataaaccagaagtgtagaaacaaaattaattaattaagtttctctttctagcctttctgtttagaggtaactacatctttcaccattacgactatcttgtgcgctgctttaaattaattaacttgcatttaattatccacgtcaccaagcgcacgagctcgaccccactgtgaaaacatatttctatggtgccttcgtcgtggtagttatattaattaagtgcaatactgtaggtaaagtgcgagcagtcaatctcagatgaacagttaattaattagatatagcatgtcatcagcctatgacaatgtgtgtggtcaagccatcaaggacacaaaaagattaacaaatgggcgagagagaggtgaaagtgatatgtcgtcaaactctgcaactaatattatgtgcagctggtggttatatacatgataacctatatcttcctagctactatatcatatatgcccaaattatagctttgacatctccaatgggacaaaggcttggtggtaaaattaataattactactccacttaattcctggttatttgattaaactaatcacccattggttgtggtcaagcacacaggagattcaagggcataatctctggaaaatactaaagagaaaaagagcatgactttgcctttaattgagcttttgtcccccatatatatattgaatattatttgttgtgtatgtgataacaaaatcgattttgatccccaccatggaatcttgatganctncttgcagtaggacgcgaatcaccaagtaccgg

SEQ ID NO: 47502 - DNA, 3626 bp, Oryza sativa
  unsure (1)..(3626): unsure at all n locations
ggggtnnnaattcggtcgactggcacagnagnncatcatattgatttggtatatcctaattttcacaatggagagaaagagagagtgagaggaagagggtcctccaccatgggaattaatctactctttttactaaagttttgcatgattttagctttttctttcacaccttttctctgcttgtgatatgatgccgaaacgtcaggcccggtcccagcacgattgaaatatataaatgtacaccgtcactagttgtgcatatattttatatgcttgtgtaaacaagtaactataaatttaaacgactccgtttggagtgtacggattttttttctctgattaatagaagaactatttcagtaaaagcaagccccttatctatcaatcttttttgcaaccattatgtaggtcatcgatatctaactaaatccaaggcatgctatatgtcacttgttttctttcgggagtgaaacaaatgatgtgttcacaactttgacattttaaaaattgtatttaattttgtgttgatccttgtcaatatataaaatatagtaattcgatttttttcgtcaacatctacataactacataagggtgcacaacaaagttgaagtaaatctgtactcgtctactggatcgagttaattttactcattgtgtagctttaatatagagaaacacacaggttttccagctagctccataattaaggtgatgggctaaccggcctgacttcgaagcctcaccccttctatttatttgatattaggtcattcactattattcgtgttttttagctttaatttaataaaaattaatttaaaaaaagcaaaaatcgccttaactattaatcaacatatacgctaacagtccaaggattattatactaactccgtttttaactatatgacattatcgacttttgtacatgagtttttactattcatcttcttgaaaaataaatagttaactattgtttagtttgttataacttgctatatcattaaacatagggcctgtttggtacagctccaactcctaaatataactccaggagttgagtctggagtggagttatggagctgccaaaacccagttccacaactctaatatattttgtgagagagctccacccaacttcactcctagttttgatgagctgaaactgtttggctgagctccagctccaagaggggtggagctagagctggagctgtgccaaacaggctcataatgtttgaaagtaaataacgtcacacgtatttataaacgggggctgtatataactttaatttatacatatgcattttccgcgcaacaatcagacggtgagaatgaacatggagatcgatagtccactaggctggaaacgtgcacgcatcctgaccgtctatggatgctttgatcggttcttcccaccgagaattgtccggcaactaggtggggcagggcttcgccggccggccttccacgtgcaaagctacggccacagaaaagttggcaccaaggatcggaggccaggtgcagcgacgcaagctagtatgccgctgaaaagcagcagaaaaaaaaaggcagatttttttttttgctggattgttgctggttggctacctgcatcgatcatgcgtgcagcatgttatggagcacctgatctatgatcgatccggtgttggcttccaacatctagcattctagctagctagcagatgcaagatatttccttcttttttttccaaaagaagagaaaatgtggcctgataattatgtttcgatcggttgattattattcggtgcttgatttatgtttagataatattatttcaataatataataattatactgaagtagtactcaatactgccaatataagggagttgtcggcaatttgattctgacatgcctatatggggcagctagtgcacgggcaacgcaaccgacctatccgtatttcatttgtgacgggtttcttgtggcaaatggtttgcaaacatgtgtcttctctcattggcgaaatcggacacaatctttgcaattttttttattaaattagtactatttgaaaaaaaaatctcagttaattctatattactgagaatttggagtatgaccgtttgctttttgtcaactttgcaattttgagcacaaaccttattagtgaaaagtacatacactttaacttatgagaaatatgtagacatctgacctccaatattttggcagccaacctgttgtccatccaaattaagatcgatcatcactgactacaatatcttgcagctatgctagcatgtgcatagtgcagaaattaagacagatagagatgaaagggaggagagggaaaaaaaagctgctttttggaggatggctacatgtcattcaccttcaaaagaaagacaaactcaacaaacttgagagtgatcaacgcatgcatatatgtgcatgtaacgtgtaagctagctagccaggtagcatctacacattagaaacacatataaatatttgcattgcatcgaccaatgattaagaccaacgaacgcttggtagagagagcacttagcgtctaagcgtgacaagctctcgatcgattcctgatatgaagagtatatatataattcttgacacatactatatgctgtgctcagatatgatatatatgtgattgattgatcagtactacaacacctgcagagagagagaccctagctaggcatatactctgattaatttgtttcttaattatcatatgcactgatcgatgcattgcatgatatatgtgagataatattctctctcttcctgtttagttttcgtcagcatgagataagagttagcacagtactgtatgcggtttgttttattcttgttctactggtggcgatcgatcgatcgatcatgtcctgaattatattctctggattgagtccaattccatctcaacatctgtgtcatgcatgctaggtgccatctagctattggataacgtttgcagaatgatgctgtcgatgcatgactgatctcttgtgcattatatattactatgtgagtataattgcaactggaggttgtcattaattgttaccgtgtgggagcaacatataagcagatatgctacatacatatacaatgggaacaaatatgttgtgtagtattaatttttcatgtttcccttattttgtttatcatttcatatatagtattgtacaacatctaagttggcttttcatgagcgttcattgtcataagttcttataagtgaaattaatttatttttacaaaggtccgagatcgatgcgaaatataattaatactttctagtagttaaatccataagtaaaaagactgaagtaaatttactactttgtgaaattctaattaacgtacgtatggttgaatgtctgtgttagatacattacttctacatctaattaaagtacaaaatattttcttctccatgcaagaaaagtgggagtgagaagaatatttcttatagtatagttctgtcttttttgtttttctggaaaagccaaatatacggcatgcaataatgcacattttggaaagatccctttacagctagagcagctggactggatttttcacaatttgggccttttaaaaaacttat

SEQ ID NO: 47503 - DNA, 5018 bp, Oryza sativa
  unsure (1)..(5018): unsure at all n locations
acatctctatcctatgcactagttcggagagaggagaggaaacgaaaaattctacatgtcacatattacgtccatttgagttcaatttttctatggttggttcttgtgtgtccctaagcgtgaaaaaaatatcaaacaaataaaacaaaaataaaaaatttccgagggggggcgccaaccactctggcgcactccccctagccacctcagcatcgccccgccacgtcggcagggggacggcgccaaagaggctggcgccgtactgttgaacgacggcgccaggcactctggcgccccaaaaaggaccatttttgggataagtttttctaggggtctacttacaaaataagtttttcaaaaggaccaaaatgtgaaaaatccaggcagctggatgggaattttatttccctcttcgactgcaaaagataaatatcccctaccaacacatcgacctttattctacattatctatgaaatactgagtacagaattatccgggccttttcttgtgccattgaaattgtggcacttgtaatttagctagcaactattttggacggtccaaatgtgcaaatgcctttggcctaaccttactctaatgattccatgatctagcctgaattgaagaggaagactacaacacttttgacacaactactcattgtggatcaagtgattggctcgtgcaagtcttgacaagtagatgcataatgcatgcatttagctagcttaagaatgtcgtagagtatcttaagtgtgttgaatgatctggtgaagaccatcgattgtgaccaatcatattgtggtccctgttccgcaattattgaatgatcttggttaaatttaattaattactagcatgtaaaggactatgtttgttctagaatctcaagatgatacctaattagaatgcagcttcactatcaaatggtctacgtaactgagataattcacataactttacagctagctaccgcattgaccttagctagcatttttccaaattaattaattattctctccttttcataaataattattgtctagaacaagatttatttaaccttttcaaatatagcaatcaatgtatagtagaatatataagtttatgaaatctaataaatttatgatatcctgacaatatttttaaaggcaaatctaaataccattttctttaaagtaactgataagtatttgagaatattgattgtcatgactttaaaattttgactatacatatcttgtgctaaacattaaatatttttaaccaaaggaagtatatacgtactgctgaatataaaactgcgatttgaataatgttgactaattaataaattcccgatgcgtagtagtgttggtgcttcttttgattcaacaattaaataaatcttccttgacactaactggactagctagctagctatagttaagttatgcgtacctttcattaattttagtggcttgcatctgagattgacacatgtgtaccattccctagctcatatcatgctgtagaaaacatatataaataaataaatacataagagcactgacaagtgtctcttagatccacttagaaattaaacgccaatagcaatgtgtatgctagctatagctagttgtatttaaccacgctaagatttacgcgtatctaaatcaaatttatgtcgtgttgcattgcatgcatttaattaatatccgttccaaaatgtaaacacttttgaacttcgatacatacggtcctcgagatgctattttaacaatgatatctataaaagtatgatgttttcaataaaagagttgcatattgtgatagtttgtttaatgataaatccagtaacattaaatttataagattaatcctttttatttttttattaatagtcaaagttacaaatatttaacttgacactatattaaaaatatttatatcttgagacggagggagtatcaacttttgcagtaatcatcagctgataacagcggctcccattttatttttctccgttcttttcaactattttttgctactcgcactacgtgcaacgtgaaaagataagttgcaggctccttgtttgggccagcagactacctagaaacggttgatacggtcaataacatgtttacatttgcatgtgctttgcatagtgtccggtttggccaaccgtgtgtacccggtttcaacttacacacatgccacgcgcagcctggttattttgaaaaaaaaaaactcctcatgcatatatagaattttaaacagacccttccactacctgacagcctgtggtgttttatctggaatggccctcgtttttttttacaaaatataatgcaaggaagacaaaattctgtttctagggatgacgttgtaaacatgataagtataagggtgcttatgcaaaatagccttatctaaccctcatctctctagccagtttctggtagaaataaggggcattcggttgactaggattgatatggggaacaagctaattaaaattgaggtttggctcggtttgttgacatgcttgatcgagccagctcgcgacccttggacggtagcgacgcagatggcatagggagggaagcctagagttttaatctgtgtcaccgaagagtggccgggaggaggactagagccaaggaggagagcaatgaaccggtgacttgagttgagactgatgaggtgccaaattaaccgccgggcactgcccacacgacgcgtagtggctctttagagtccgagtaagaaatagggtggctcggggagtttatggaggtgggatgagccacgaatcggtgtcgtcggcgaccggtgtccccgtcccacgtcaagtgcgtgaaagcagctgggaattgaagggatgagggggaccaagtgggagggatcagggagggagggaaggacgatatggtttagggagttaaatagggttttctttaaactggttgactactcggtgaagtactgtttattgtactacctcatattatgtatatatatatatatggacctttatttaacactgattagtaaaatccttagcttataccaaccaagtttcacctcatattctactaggcatatattcatatatatatgccagcagaaaattaaagattcggccagagatacgatcctttgagctgtcgccacagctttggtacgtctttagctttacctaaagaaagaaacagcgatgcaaaaagaaatggatgggacttgtgctagctatctagctgctgctccctgctttagcgaaaaaccaaaaaaaaaaaattcaaagtcaattatatatactgcaaaatggtggtacaatctatgcgaaatgtttggatgtattcaaagtcaattatatatgctgcaaaatgggtacaatctatgcaatccataggccctgtttagataccctgacaaaaatttttacccggtgactttcaaatatttggatacatgtatggagtattaaatataaacgaaaaaataactaattacacagattgtgtgtaaattgcaaaacagatctttaattttaagcctaattgctccatgatctgataatgtggtgttatagtaaatatttactaatgacggattaattaggcttaataaattcgtctcgcggtttacagacggattctgtaatttattttgttattagtctacgtttaatattttaaatatgtgtccgtatatccgaagtgacacatcaaaactttacacccctaactctaaacacagtcatatactgttatgtttgacttgtgtctttggaacttgtttcataggatatctagcatctacagtagagtacactacagttctgcagagagctggctagctagatcttgctgattgcaataatgttccaattagcctttggaactcgggatagtgtaaaccgtaagataagggctagctgtgctgtattaattaattaattaaggaaatatcaagatcatgttcatggtgttcactgtgtcctttttcaccttaagacgatcttgtaaaactaaacatttacttattagctgattgcataatccgtgacattttgattccgccccaatgtttggaaagaaaaacatggataagcatcgctcatactaaataatatttttgctgagggaattcttcttgattcctaaaataattaaactaatcccacaaaattcctgcaataatggaacactggcttagagctccttaattctttctgagggtaaacctgaatttggagcataaaaaatgtaaatatataattttcccaagaaataaatacacaaacatctaaaagatctagcaggaaaccttcgagtgcaagttagttatgaacaaaagttagaccatatgcatatcttagttctagaaaatgttgggacatgttggtctacttacacggtagtactacctgtttgaaggaaatgaataacaagattttagttgcttgaaatattcttatctgggaccaacttaatttggcacgtgtaccttaacatgtgggctccattatcagcctctatcatcgttccgattggttcatatctcgaatatgcaagttttcttttttgtcgataatagaattcaatcaaaatatatacgcgagcgtctggatgtgtgcttgtcttacttaggcttaatagcaacgatctttctctgtataagctaagtcatcgtttttgtgtttctttgtaattcgcatgcattgtcatgttttgtccattttatcgggcatttggatctttggctgatgtgtaaaagtgtccaattaccaatctttcacgcagaaaattctacaataggctaaactaccccttcgtttatcgtaatcacgtttcccaaactaaacagtatgatttttatataaaagtgttcttaaaaatcaaacaaacttattttttaaatttgaaatgattaatactcaattaataatgtgctaatgactggtctccttttacgtgtcattgtaatgatgaactncttgcagtaaanngagangacactcaatgggcgcgcg

SEQ ID NO: 47504 - DNA, 1846 bp, Oryza sativa
  unsure (1)..(1846): unsure at all n locations
ccattgtgggtgccttaacgtactgggcataccaacatatatgtactccctccatactcataaaaaaaagtcgtttaggatagcgacacgatctccaaaacacaactttgacttcttgtttctataaaaatatttattaaaaattgatatatgtatacttttatgaaagtatttttcaagacaaatctattcatataatttttacattttcaaactcaacaacatgagagttatttatgatttatattcccaaggtttgatttaaacattgtcctaaacgactttctttatgagtacggagggagtatatcccaagatatttgggatatggaggaattcttgggacaaagagtttctagacaaactaattttgtacgatttcaccaataggaattttatttttggctcaatttggaatacatatatatagaattggagctttcaaaatcttatgtatgaatttctcttataggatgactcaatgcatagagcttttggatgaaaaaattactccctccattttaaattacttgtcattctagcaaatctcatacaaatcaaggagatgtgacaattacaatgttaacattattaagtacatgccattgttttttttcaaagaagccattaactcttattagtttagaacttgagatgggctgataagagtggtgactgcattgatgaaatgtagagagtgaaggtcacctctaaaactgatttggaatatgagaaggacaagtagtttaataaaaaaaattgaatgctacaccgaaaagtaatatgaaatagagggagctgagtagcataaggtccggtcacttaaaaatttcctttaaatttgtatattttatccaaatcctatgttttattgtagccgacataaatatatattcctaagtttttgttttattaaatttgtattttgtatatgcactccaacaaaaatcttgtgttttccatgttcggggttttcattttgctagtgctaagttctaaagaagcctcaaaataattccactattaatatggataatgtttcgtatttcaaaacgaaacttatgtttaaaataataagttgatttgtggactttaaaatatatcccaaaataagatgattaatttatatccccttacctgccatcgatcccatgaattctttcgcttcactacctcttacatacttatccatctagccatagtatttccttattaattaggacaagtttgaccatcttttatcattattaaattcttataggattttaggatcacatttattgtgggatagatcgattgagtattattattttttcagtcaaacatgtgaattacatgaaaacgttttacaggctcttccacggtgtcaatgtcctagacgaaagttactctaaaagtaggtgaatccttaaaaaagtttgcaacgtatgcgtgcatatccggaataatctatcgatcgatcgactctgaaagattgtgcaagaacacacgcgtttcattcccaacaacaacaactactgtgctgccgctgctgcacatacgcatcgaaacgtcgtcgacgaaagaggtcagaaaccggccagcacctgtcaagctacgcaagctctagcttagctgaatatgggcctgtttggagaactttgagattctgagaagcagctgtttggtagccagtttctgagaatctggaaaagctctgaaacccagcttctttagcttctggcttcttagttcattttttagaatctgtaactacacattctcagaagctgtggactatttagggcagcttctagcagaagcagtttttagagtgntnggtcatgtgnactgcaagtcagcacct

SEQ ID NO: 47505 - DNA, 2677 bp, Oryza sativa
  unsure (1)..(2677): unsure at all n locations
cgtgtccttgaagtgcgatcttcttnctaccgcaagnagnncatcatacagncgnccgtaaaaaaaaagggcagaaaaaatgtcacgcaaaaaataaaacgccatcgaaaaaaaggcaaaatttggatcggtttctcggtgacgtactttttggttttttcacacacgcgtcgacgtacttcccgagtcctgcgggagtcctccgtgcgttactaaatcagtttgggtcaggtttttctgcacgtatatatcctattcacgatcacaatttgattcgataagtttcaagatttttttttccgttggtagagatagcatccatccagaaatcgaccgcgtcggtgctgatcaaatgcgatgctaacaacccacaaaactttccttgagctgagtctgccaaataaaaacatgaagcaaaagcctcattgtgacctaaactcctctcgtcacctagcttgttgctcccaccaagcggccaaagccaatcaatgtaagcccatgacgtgctctcgactatcgtccatacgatacttacaatacttgaggcgaggtgggagtgggcggcagcggcgacgacggccaggaggaggagtgacgagacgcggaggaggacagagagggtggcggccttgtcccgcgaaacggcggcggtgcaaggaagaggcagccgcagatcactggcgacagcctccgcattgccgcggggagatctttgccgtcgccatcgccgcgggataggacgaacgcgatggccgaggcgaatagcagagacaggacgcacatggcggcgcagggcagcgccaccacggagcttccctttgccttctcgccgccgctgggcggcggcctccatgttagccacctcgaccataggcttttgatgatgatgtgtacacgtaaggcccacttatctttttcgtcgcttattatcgcgtacagttttgctataaatctactaacgaattccttccttttttaggagaaaatttttccacaaatatatagatagtccctgtcgcgtacatagatcacttttccagcattcctgcccggcattacccaaatgggtcaggcctcatggaccccaatagaacccttgagcttagtgattaaaaaataatttgtgagtaatttttgtatgtgtgtctttaacggctaaaaagttattgctgaaaaagaaactacgttgaaaaaacatcaaaattaagttaatcgtattatgagtaaactaaaaaccgaccccattaagggctcaccacgacaaaggcattggaaaagattgatgggttaatcctcttcgatttcccttccatccctttaagagagaattaacaaaataaggcctaaatcgaaaaaccgagtgctcacccctgtgtgcacatgaagtagttcaagatcaatcccacacaacacaacaccaaatgcatttcgccgccccccggcccggtgccacccaaaaacctttcatgcatagtacacaagctgaccaacatatcaggtgagaaaaagaaacatcaacatattgggacaagaaaataaatatcaggaagttgaataatgatggtgaacttctcaatagttgggaaaacgccggggatcgggcgcccaacgtgcataaagaaaaatcgccccccccccttaacacacatgcgcgtgcgccttcggctggcttccacgcattcccaccactggcgttccattgaacaaataccccacatattacggaaatgccctattaaaggaaaccgtttcattttttttccaccaacaatgtttcagctagcactactacagaaacctggattggtgccagctgggaacccccgttaggtgtcggtttttccaaccggcaccccacaggcgggactgatgactagtgccggttgtagaaccgacacctatatcatatataggtgccggttggaaaccccacaactggcacctaagaggttccactagccaaaaaaaatggctcgatgcatcggctcgagcagctccacatcaccaaaattcagctccccatcacccaaatccaagaacacattcatcaagaacacatttctcacaatatcaccatccacccaacaacacaaagaggcggtagtgaatcaacaataacaacaacaacaacaacaacaacaacaacaacacatttttgttgctcgccgcatccaacaacacattcaacaacagcacaaaattaaaaaccaacagcaacacattcaccacgctgaccgtggggaggctgcccgtcgcgccgtgtgaggaggcaacccaccacgcccggcctcctccaccaccaaagtccaccacgcccggtctcctccaccaccaccatcgaatctggtcggaggaggaggggctccgacctcctccccgagctccggtggggaggggctgtgccggatctggccgtccctgagtgccggtggggtggggggcatgccggatctggccatccccgagtgccggtggggtggggccgtgccggagttggcctccctgagcgccgacgggaagggggtgggacggagaggaggagcggcggcaccggatctggctgcccccgagcagcagttgccggtggccttcccataccgccgcccccggtggaggatgaggtgaggggaaaggggaggagtgatgagctacatgcagagnacgcattcaaaccgcg

SEQ ID NO: 47506 - DNA, 1058 bp, Oryza sativa
  unsure (1)..(1058): unsure at all n locations
gtggtggnaatgacattgcattgccacaggacntcatcacaggttagtagatagttttgctctctctcttcatttaatctcttccaaataggaaaatatgctgacatggatatcttgtagataacctatagataaccattgcgggtgccctaatacattgtgacagctagatctaaatttggtgaatatttgcacaaaaacctttaatgaagctaggtttgactacccaaaacagtgaattgaatttatcatctacctaccacatactatacatctggaggtaagagaacgtcacacattgcagaggcaaaaagaaagagctaagctctctgcatgcgtgactccatgaatgcagttagcatatctatagctagagccatccagctcataaatgatcagaagttgaggtagcaagcagagagagagagatcagcccttgttttgttgttggcgcgcgtttccttcctcgaagaccatacccctccaggaaaccagcaggattctttgcttcgatgctacctcttgatcttcttgcaaattgcatgctacgtgtacacctctcttgcgtgcatgcaaacaaagtgcacgttactgattaactctcgatccctatgcaaagcatctttttgctccatgcatcgttactgcataaacgatttttttttatgagagccccgtataggttacgggcggtctaaaaaatcgaccaatattttcgtatgcaaaaaccaacttttagaaacgtacgtgcaccacctacatagaaaaatagtgccttttacatacacctggtgcagaaaggccgaaggtcctcatgtgaaaaatctgttttgaccatctggaaaaattatttctgtattagtgcatctagatgtgtactatgtatatactttatatactactagctggtaccatgcatgctatatatgtactccatttttttttaaaagaatcaatttctatgctgattatgaattcgactatgtgcttgtatatatagattcatatagccgattagtatatgatgctagcaaggtacgtaacacacgtgtgcatat

SEQ ID NO: 47507 - DNA, 736 bp, Oryza sativa
  unsure (1)..(736): unsure at all n locations
tgtggtcccntttgaccattgaaatgcacctncnccttggnacagnacnncatcaaaagaatgtttcaattcactgcaacatttgatccatacatagtggcacattatgagtacactaggggaaacattttctgtgaaacaaaaaataaaatggattcgtttaatacaggattttcataatatgtatgtgaattgttgcaaaagaatattttaattcactgcgacatttgatctatatatagggaaacattctgagtgcactacactactacaaaaaggcaaataggagctcgccactataggtgccggcacaccaaaaaccgggacctataatgcctttccctcccatgcgcccacccccatgcgccacatattcaaaaaccggcacctttatgtccaaataggtgccagcttttaaatgaaactcacacctaaaacctgtgtcaaagaatctagacccaaatcccgcacatttaattttctccctctcacactagccgttggccggccccacacataggtgccgggtttgggtctagaaccggcacattaatagagccagaccaagcccatcggagggagccagaacgacttcaccttatcgtcggcatagtgtcattcgctactatcacacaacgccttcccccagcggtcattcagtctctgacgctcctactgttatctcatacgtctaatccctattccgctacctcattcatgaccggagggcggcggt

SEQ ID NO: 47508 - DNA, 707 bp, Oryza sativa
  unsure (1)..(707): unsure at all n locations
ttgggtannaaggtgaacgatctcagacctcataaattagtatttatatagtggtagagtgcattatgtttaacatgctgatcaaagagttttactaaaggagttatggtctaattttagtgaaggtgcaaagtagactaagtggtatgctagatattttcagacttagctaggtggtagttcgagtttaaattttttttgtggttggttgtatcgtgatcctgagtgtgaaaaaacatctaaaaaaataaaataaaaatgacaccgttgcaactccatacagagaaacaggaatggaggcggcggcgccagccatgctggctcccttctccctggggcggggccagcatggctggagccctccccctgccacttcggttcgcgtgccccatggtggcatgaggactacccccagaaagcctcgccccttcccctttggatgatggggatcaggcactctcttgtccttaattggtactgtttgggataaaatttttgtcgacgtctatttccagaataatttcctttatgcgaccgaaatttggaaaaaccaaaacaatttgctctaacagtaatatggatattgccagaatgtgtattatgtgctgcattatttttttgttattggcatcaatatctaatccgacgggaccttttcctctttgtaaatttccattccgaatatccacttttctctgccagaaact

SEQ ID NO: 47509 - DNA, 843 bp, Oryza sativa
  unsure (1)..(843): unsure at all n locations
gtcgcaacggtgaggaatgtgtaggaaggtagtgaangcatttcaacgactcgatacggaattaggcttcgtatgcatatacggaatcgtcttgaacctcnntaccnccccccccccccagtgggnnttttgattgaccatcgcatagtgacacngcnacggagnngnngnnacganagaaagggcgnccgcggncancancccagaaaaccagaccggagaacctttttatttcttcaacatgttaaccccaccggcttgttgaacagagaaagtgaaactatctttcaactgttctaattccgtattagttacatatggggagaagtcaattcctgcaataccctcttttagcaaacgttcatactcagcttgcatagcatctaagtcatcgtaagaagcaagggtgtttaagtcttctgtgttagcctttttgtcaaagatacctgtaaagtcctcagaacccaatacagtattaatgattgaatcagaagaaatcttttgttctgcttgtgctacccagtcagcaaggctagaaccatcttcaccccaagggaaatcttttacttcttctggggttaaggcaacccattcagtttctccaccaacccaacgttttggttggttcggagttttagaagagtccacccagattaaaccaacagccggatttgttggtgctgttggggagtaaacccaagcaccccctttaccggtaatagctgtttcgatgtcttttggggctttcatccacgtttggtggtttgttacccctctactagcattggagaagacatatagaaagcagagcttgggtttttccccaccagtcttacgaccaat

SEQ ID NO: 47510 - DNA, 1119 bp, Oryza sativa
  unsure (1)..(1119): unsure at all n locations
ggtttccggcctttaaggccttatccccaggtggggttcaacaggaattgttaaaggtaccaatcntcccttcgcctttgaaaccaattataatattagggggtggcttggccaggtcattaaatgcattcatttagggccgtgcagtttgacaattgtttctttaataatgcaagaaattgccattctctaggggacctttcatccaggaattttttaatccccttaaataataagtttattcaagacaagcttggggctgccgggccaaatttgaaaaagcccaagcaatacaagcctgcctttcagtttaagctcggcgtgntcataggcggtgccnctcatntcannnnnnnnctccttctaagctccnnnnnnnnnnnnnnnnntnnnggggtatgatccaaatattttcttccattcacagtatgcttattttggaatgcaacccaacgaatacttcgaaaaaacccccnctcttttgggggggggttaaaaatccttttggggggggggccttaattttaaaattcaccccttaaagtgaaaacatccagcgcttgtctaccgggcatgaagctttgcatgaggatgttcgtggcttgcgcaccgatgttggagacttgaatgcttccgtggggagattgcacacttgtcacgcccgaaaattcattagtaatttccgaatttatttgtgcataaaatcatcgggggggaatcagccgaggtncncnnnnnnncnnnnnnaanaccacggacattcnnnnnnnnnnncgnnacatacttacaaagaaaagaaaacagcagcggatttaacggtctagcgatggcttcagctccactcccacaggcacgttttatacccaaaaaaaaactccttttgggggggngggnnggtttaaattaaaaaggcccccaaaaaaaaccggttttcctttcctcccttcttggatcccttcatcttcaactgaggtttgatgattattgcaagaatgagcatatgacatactcaccaagccacacagcaaatatagaaaagtgcacaaggataccaaaggatggcataatataggcttgatganctnctgtncctagtagtagttactcaaangggcacaa

SEQ ID NO: 47511 - DNA, 1136 bp, Oryza sativa
gacttatccctaggaacccaatcggtaataccaagttttccctcttttaaagatcgaacccaatcaagttcaacccgaaaccaaaacttcgtcgaaccaaaattaaacaaaaaagggtgccaatgcgccgaaattatattgaacgtgtgttgttaaaaattacatagggctcagggtctatttatacccgagaattacaatatatgcccataccggacacgactattatctctaccaaactctaagataccataagtctttgcggcagacttttgcccatatttatctataaggaatctacacaaaatatcctaattaatagatacaattgccttcccaggactttatccgtgcgtggcaatcatcttgaagtacatcaacttgaacccaatatcgcgtacaagtcgtattgtcggaatcggctgtatcggcttacttagcccgactcaaacccagccgatcctagccgtagccgatctggacctccagccgattcctgctctgtttccgaactcgatctccgcctccgacttcgctttgatccaatcctctttcctgacacagatgttaccaaatttggttgttaacacgagccaagtggacaagtcctttcaggcgaaagaggaaggaatgaagaggtatcttcgcattcgataggaaaagtgttacaccgggataacggtcgaacacctacctcgggatcagaacaaagaagctgacaccttgccgagatctgctgcttgtggtggactgcatgcgataggaatctttttcaaagtcctgtacgcaccaagtgtgcccgctgagagcctggatgtcatggcaatcgaccaagttgaactatgtcgacgtttgatgtcgcgattccggtatttgcatagtatagggatcggtggtactagggtatatgcgagattgaggtaaaagagatggagacagggagttttatacaggttcaggcccctgaattatcaggtaatagccctacatcctgttggccgaagcccgtattgctcttattcatcataatcacaccagtacaatatttggggtagcctatctaactgttgtcgacatggcggtctgaagttctgactcgtagtcgacaacagggtagtcttccttctcgaatccgg

SEQ ID NO: 47512 - DNA, 1490 bp, Oryza sativa
  unsure (1)..(1490): unsure at all n locations
ttagtaattaaattgccacttaaaccctgataatggtgggttgtgagcacatggttttgatggtcgtgctcatgacaattaaggaccggttcacgattttcagttgtgaaacattaaccgtgccaaccacaagccagcgtgggcaacgactttactttccgtatagtatggttcattgtagagcaccagactatgaagtggcggagataagcccacgggggtcgctggggagtccatgcgttgtttacaagggggtgattatgatccgggaacggtgcattgctttgaattatgttatgcagagggtattgtcacaatctctattcgggtacttgttaactatcgcgacgcatggttgacatgatgttgaggttgtgtcttgtgtgtacagtggtacacctctggccagagttaaactattcgaatagccgtgccagcggttatgggcgggtctaacaatatctttcgtgattagtttcacagttctcaccatattaaatgatgttgttagtaacctgttagctcctggtttggaatggtatattcctggtttggagatagaactgtgcagccgggattggttgttcagaatggttgggcctatgcaacagggtatgttgtatagcgttggattaatactgtttaattaatactctactgttttattaaattctgaaatatttattaaatgctatttatgcaaatgagactatactatgccatcctttgttatcctatgcacttgcatatttgctgcgtggcttgctgagaatgtcatatactcaccttacaatcattcattagaggagttctacagtgatgctgatggtgtggaagattaggcgtagccctggtcaagttgcctgtggagtggagtcgtctgcgctgcttaccttattttttccgctgcttagaactttattgtttgagaggaactatctacctctgtaatgacattttattcgcttattaattagagtaataattgtactctattatcaaattgttattgtgtgcctcggctgattcctggacgagggtttacacacatgtaagcgtttggaattttggatagaaattccgggcgtgacaaatatggagcacaaaaagttagccgatctcccgaagtctattgaagaacagaaagcaagactcaaatcggctatcaagcacgttgctgatctgaccaagtctctgaaagttatccctgtaaccgacgctcaagatgctcaagccatagaaaaagtaaaacagattaggcagaaggctatatcggccatccagcgatacttatctcaataatctttgtgtaataggacttagaaattttgtaattggctaagacattctgatactttactgtcttaacaatccttcgtgctgattaatatgactttgaaatttgctcaaaaaattttgcactacattttgatatatatgtgccccctagtttttgatgnnctnctacggtaaagcactcacggggccaa

SEQ ID NO: 47513 - DNA, 1523 bp, Oryza sativa
  unsure (1)..(1523): unsure at all n locations
cccgaacagacatgttgacaagattatccatatnaannnctcaaaaaaannnnnnngtgatggttaaaannnnnnnnttgtaancaacgcatggactccccagggaccncngtgggcttatctccgccacttcacagtctggtgctctacagtgaaccatactatacagaagggggggtttttaaaaaaaaaaaaaaaaggggccccccgggggtttttggcccacacgctgagcttgtgagttggcacggtaaatgtttcacaaccgaaaatcgtgaacccgtccttaattgtcatgagcacgaccatcaaaaccatgtgctcacaacccaccattatcaggttttagttggcaatttaattaattaaccaatcacgattgaccatcgtgagctatcattaagccatcattaaataatagtgaatcataaactatcccatttatatgagctagtgcctctaagcatggctaagcatcctattcactttaactaaaaccatataatgttctagctaatcaaattattaaccaagtgacaaagaatagggaatcaatagcaaaagggctataacaaggcaataggttatttccacccaatgacattcaaaaataaatgcaatagttgaatagaaacaatagctttaaacgggatcaacatgctcaaagggttgttttgggatctgtgcgacttgccttgctggccttggaactcttcaaaatcttctcctgcgaaatcggactctccgggaacgtcagaatctaaggaaaaaagagcaaaaacaccaaaacagcacataaacaagcatgaacagtacatatgtatatttttaacatgtagatctcaattttagaaaaatttagagacttgaaccaactaaatccaagctaagatgaattagttatgaattttcaaagattaaatcggatgaaatcatttatatagattttaattgaattatgacgcaataatgaattatttttgaaaaggaaaagaggattattgcgtcagcgggctcgggttcacggtggaccgggtgcacagcggcggtctacggaacggacggccgagatctactcgatccaaaacgaacggccgaggtcgacttgatctaccgccggtctatgggaaacggcgacgatgacgtcagcggtgatgtcaccaccggcggcggcttgggcacgcatgctcgccggttgcttttgttaaggactggttgctcgcaaccgaggaggtcgtggagcacgagggagagccacacacagaggaggcgtacgaagcctacctacgctggtaccaagccacgccaaccccggttaacccttttaaaggggaaaggggttttttccccaaaaaccctttgttcctttgacaacagccacgtgggagcactaaaacctttaccccaggcaccgcgaccaggacttcgctcggcttgtgagtaccctgcattgcaccatttctttaactttaatcctttctcttcggcaaatgtggggaattttacccacacattaccatgcg

SEQ ID NO: 47514 - DNA, 888 bp, Oryza sativa
ttcgcgagcgaggcaacggaacgtttcgcgtcccccgcccgaccggcgtgcgtgtttgcacggtgtatttgggaatgggagaaagctggtggttagccctagggttccttacaagggcatagggttatatgcttccctttattggctttcggtgggtttctctgttattaaaaaagggggggggaaaaaagggtttttaaaacctctaaatttccctcaaaaaataaatctattttggtttccttatcttttgaatcgtctctctctataaaggtgacggagcatatgtctaaaaaatttggtagctcaaacttagtgtgattaggggtgaaaatggagcgggtatttcccgaccgcccgcccgacccgaggctcgcgggaggaatatgggagaaaaaatgggataccgagttcgaatccgaattcgttagaaaaatatgggttacgaaacgggaagacatgtatccgtccgtatgtcccgtattataaaatatgtatgtaaatttattataaatctacctagaaacatgataaaagatcggttaatcattattttaatgttcacatgtaatattgtataattttttttcttgatgtatgtattttaatactttaatgaccttatgatatttaatatctatgaattaggagataccacaatatgaattaattttccccccgggggttttttttcccccccccccccccaaaaaaaactacgatttgaggaaataatatgggaaggatacgggatgagtgatatattatccgggattatccgtatccggttccgaaattaaaaagaaaatatgggttatcgatatgggaatgccataatctgaccgtacccgcccgtttgggccctaagtatcaccgccagtaatctta

SEQ ID NO: 47515 - DNA, 1063 bp, Oryza sativa
  unsure (1)..(1063): unsure at all n locations
acaataaatatacggatgttttataatacccctttagttttttcaaacccataaattgaatatattttcaaaaaaaatttttcttgagttaaaaatgttactagttttttctccaactatagtaaaactaaaagcagttttactttgcacaaaaatcaaaacgttttataacctacagaccccccgcggggaaaaaaaaaagggggggcaaaaaaaattttttattccaaatttaaagctgggttaaattaaattattattcctccccggtgatgctacatttggctctcttccatggtgcgttaaaagtttgatacgtgtatatatgtgtgtgcaattatatatattttatatatataataaaagcttcaaggttggagtaagtcaacgggattagttagatttgtgatggtaattagaagtagcaacaagtggggagatggttgtggttaatgatgtattagtagctgtgcttttgtcagcttgtgccagtatcagtgtgttgtatgacatgtgtgatcatgtctttgtgtgtggactgtttaactgttatcttctttaatttaataaaataatcgatgtgatatcactgatatatggaggccctgctttctcagttttcatgtgctatttggcatcttttctgtaatgcaagccttggtttcatgcacggttatggtgattagctatgatgttgaacttgaattttgcagtaaccaaaacttatggaagtagtggactgcttcattgccttggctaattcacaatttacatggttaaaccgttaaaacacaagagggcgcattcagagcaagtttaatggtatagccaactactagctccaaatcatctatagtcaatgtaatagccaattcatacaatagttgcttattacttcctccgtttcacaatgtaagttattctagtatttttcacattcatattgatgttaataattcatacaatagttgcttactactacctctgtttcacaatataagttattctagcatttcccacattgatgaactnctgtaccagtgatagtcatcaatnggcccac

SEQ ID NO: 47516 - DNA, 1210 bp, Oryza sativa
  unsure (1)..(1210): unsure at all n locations
tcaattttcagaaaatgtntaataaaaaaataccatcttagaacaacccgaaatacttgtatttaagaacccccatatttcgattgttcccacgtttcatcattnnnncaagtgttgtgaagctgtttcccttttggttaactttgtttcttgcttgttcttcgattgcttgtaggttcaagtttgttcttcgggaccccacaaaaccgcgggggggggggccccaaaaaaaaagggaaatacccaaaacaaacaaaccgtggaagtcttgtgtaccggttgctaaggcgcagcacccctgtggtagttgtagtcggaccgccaatgtcgtgtcctcccccaaatcaaagtttattgtagggtcccgaaactaatgattcggtaactgatgtatcaagccctggatcagtaaattgatacagattcaacaatctggatcttcattgcatacatttggacaagatttcaaaggaaatttctttacataaaataatagggtatttataaaattgtggctaactattacaacagaagctatagaatgacctaacaaaacctagcttctaaatcctcataagctagataacaatcaagtgcttctcaaaatcttaggccatgtttggggagctgttaacgaccaaatttggtaaattaagcatcggagatggagttaaaaccgaagcggaatcaaaaggattgacggtttcggaaacagagtgcgcatcggcagagttcgaatcggataaggtggccagaacagccgatgaagccgattccgacaagaaaaagatcaaagtcattatcagattgggttgatatgcttaatgagtattgccacacatggattgagtccgaagaaggcaattgtatctattaattaggatattttatgcaatttccttatattttgagttggtaagagttcacctaagggacttgttcgtatctagaattgtaatagagatagggagtcgtgttcttgacaaaggaacaattaaatttttttaaaatttgggggttttaaaacacccccttttttttttggtaaaaagcaaccaaacccatgaatcagatacaattagttcaacaacactttcggggcattgccacccttttacttttcgtttgtttcgacgagttcttgctttcgagtttggctgcattagtctagatcttcgacgggaggtaaaacttgccatgacgggttgcg

SEQ ID NO: 47517 - DNA, 1207 bp, Oryza sativa
  unsure (1)..(1207): unsure at all n locations
cgcgccccttgattgaccttgctgacngccannccccattttaatataaaaaaacacttgttgaacattatgcaatggtaaaagggaaatagaagcgactaacatatttatgctgttaaaatgacagaaacacgagggtttatttggtaacattgaaatttatacgcttgtaaaaactttatacctgtttcttttttcaccccataaacccaaagcaaaacagagaatttaaagtccccctttatttattttacacacacgtatacctaactgctgttgaattaatgttgtaatttgggtaaattaactatgaagaacaatcctttgaacaatagctctcaacatcttgtactgaaatcattgggcgtgcataatctaaaacaacaaaactaactagctagtcaagccgtccaaccaccttattaagcacggtcatcaacctcaaaattcttaagtgcactaggctttcattcaattctgttcaaggattggcccttttggttttttttcccttttccccaaaaaaaaagtttttttttttaaattactgctatatataatcaccagtgctagtcagtgcggtttcaaattaagtaatattctctcctttccatatggatatctgctccagaatttggagtctccaactgtcataccctatacgataccaaaatttcgtgcaaacataaaagaatataaaatatttttatacaatctttaatgataaatcaagtcacagcaaaataataataataattaaataaaacggatagaaaatatattaaaaaattataggtgtcatatattaaaacccgaacggagtacatttcattaggttttttttatgggcattgtattgggaattaatatgcaagcactgacgagagcgtggtaattcttttcttttttttcttatattttgaagaccatgaccaatatggtgtacatatcgcaggagttagctgcacacaagacaataggagttatttttccgcccggggtttcccaaaaaaaaaaattttaaaatttttgggggaaaaaaccccaaagtaattagaaccatattgaaggcacgcataataagatcatcttagcggtggaaactaagactagnggggttacctgctattaccagtgncgctagatagctaggaccgaaccagcgccattgttaaatngggcaataattgagactgaggagnatata

SEQ ID NO: 47518 - DNA, 683 bp, Oryza sativa
  unsure (1)..(683): unsure at all n locations
gctgtnnccaaggtagaactacttgttgcccacgaattcagaaccccagagtccgcacatcctcaaatacaaagcacttccctagttagatgtaggttagacttcccgttcgagaaactctaccttctacctgccctcaatttatgcacgattaatgaatgccacctgggtggaagcgagaggtggaaatggaaggtcttagttcggaggtgggatctctacctgatagttgcattgccattcatgatgatcccctggcattcgtccattcagccattcaccattcacccattcaactggaattttggttgaatgccggaattgtgtccacaaattgtggatggatagttggttggctggctggatggctggctggatggctggctggatggatggtgaatggctggcggcggttcggttgctttgaagcatttgttgctatctaaattccatttaaggtcgtaccttattgccaacataatttattcttatttggatcccctcatctttaaattcagatgtagccttgatgttccctccccatgaagagaagagcgcacatgaaacttaagtacaaaagtcccgacccccaacccataccaattaattcgccaattcttcgggaaattgatccattcaccacttcttcattgatttacaagaaactattggtttaatttaac

SEQ ID NO: 47519 - DNA, 784 bp, Oryza sativa
  unsure (1)..(784): unsure at all n locations
ttggtcttatggccgtcgcactcccccagttggagaactatccgtaaccgccatggcgtcgtacgtcgatcgtcgcaagaacaagaaagcaagtgcaatgtggtgtggtggtagtagttcaagttagcaggtgtatatgtgtgtgtataaatatgcagagaaagtggatgcagacacggagagcgcgacaaggttcaaaaacgatgaaagaaaggataatacatttatctccacaaagattcgtgatggagagaccaagtaaagcgaaggaaactatgcactagtaagtttcaacctcatctacaactctaaaaaaacaaataaaatcatggtctctgctcaggttggtagattctaagtattaggcttaacgtgtgtgctcatatattttttaaaaaaaaccttaataaataatatatctccctgctatgtgtggctcgcggctatatcagtatcggtaaaaaaaaacaatatagtgcaagaaaaaaagtgttttaagcacttgtaaaaaccttgaaactaattaaattaatgattatatacaacatataactcttaaagtcgttcacttcatcctctgaacttgactaaatccttaattgtcatgagcacgaccatcaaaaccatgtgctcataacccaccattatcaagttttagttggcaatttaattaattaaccaatcacgattgaccatcgtgagcttccattaaatatccataagtgatagtgaagcatgatttatcccattaatgtgatgaactgctgtncgactgtcatcatca

SEQ ID NO: 47520 - DNA, 747 bp, Oryza sativa
aagtgcacaagtcaatatagccaaaggtccctataagctattgtgtcctttaacacaagcacaaattaaagcacacaaagagagacattagctgttaatccctaacctcactagctaatttctaaaaaaaaaaacacccggcccgtattgtgagcactaaagatttaaatttattgatatatatatatatattgaaaattatatgctactaccgggagtagctactccctctctatgtgccctcaattcgatcgctactaatgccaatgactgttaccgggtctaatgaatcgaatactcccacccgttattggattatgggttattccactaacccgatccagtaagcggagagagtaactactcccggtagtagcaaataggtgttatatatatatatatatatatatatatatatatatatatatatataggacactcatatggggcaccatggtgcccgggcaccatggtatctaatgcacgaaattactcaaattttttaaaattttcaaattatgagtatatacctagttataataatttgattcatacctatacttatcaataaaacaactcaaatttaactttatttcacaatccatgattacatacctaactaattatatgtatggatgctatatacctagaatcaaaatctaacaaaaacaagttcaaattcagttcaaacttgctttaaactagttagtaaagtagttaatgttaatacctaagtaattgaaaaag

SEQ ID NO: 47521 - DNA, 1612 bp, Oryza sativa
  unsure (1)..(1612): unsure at all n locations
agggaagcccccaataataagaaggtgcttcggggtggcccacacgaattaataaaattggtgatcccctcaaggcatgccactccgattatagtaaaatgttattaaaaaaaagttaggtcataaagccttttccctttcattttttgttaacacgtttcccacacggttaaacagtgtgttaaccaaaaaaaaagcccaagcctctctggtaaaagtttacaagtttccccctcacncanctaannccnaannccnngnatcnnnngnncnnnncnnnncntctttcattttagtatctacatgtgtatatatatatctacgtacgtacgtacctgcatatactatacatacatgcgtgtgtatactccaacctagctagtatgagtgtgaagggagtatactatattatattatttgtgtgaataatgaagctctgcaggcatgctgagcatggctttgctggagctagctagcatatgtaaacatgtacctaaacggattgaaatcctctaacttattttcatctgcacttatgctcaaagtcagatagaaataaattagaggttcctcttccgtacctagacgcgatcatgcacatgtctctccctgcctgcaggctgcagcagatcgataggcaaattaaagtggtcagcgtaaacaaatattgtaaatttgtttggtgctccatggtgcccgggcaccattgttgaaattgagtatatacccaattcaaatgagtatgaaactttttcaattacttaggtattaacattaactactttactaactagtttaaagcaagtttgaactgaatttgaacttgtttttgttagattttgattctaggtatatagcatccatacatataattagttaggtatgtaatcatggattgtgaaataaagttaaatttgagttgttttattgataagtataggtatgaatcaaattattataactaggtatatactcataatttgaaaattttaaaaaatttgagtaatttcgtgcattagataccatggtgcccgggcaccatggtgccccatatgagtgtcctatatatatatatatatatatatataacccctatttgctactaccgggagtagttactctctccgcttactggatcgggttagtggaataacccataatccaataacgggtgggagtattcgattcattagacccggtaacagtcattggcattagtagcgatcgaattgagggcacatagagagggagtagctactcccggtagtagcatataattttcaatatatatatatatatcaataaatttaaatctttagtgctcccaatacgggccgggtgtttttttttttagaaattagctagtgaggttagggattaccagctaatgtctctcattgtgtgctttaatttgtgcttgtgttaaagggacacactagcttataggtacttctgcctatattgttgatggctgcttgcatcgangtcacaaagnccacggggggggggggggnaaggaggcggaaatcatcctaatacaccaaaatacgaggaagattatcttaatgaccgattcaacaactcgcggtagtagccttgagaaattaagggt

SEQ ID NO: 47522 - DNA, 756 bp, Oryza sativa
cccccccccccttgagtgcatacactactcgtaagggcgcattacgacataataccgcatgatgcgccataggccattctggctgctgcactgtgtgggaacggcaaacggtgcatttctcttcgatagaacaccacttagcgcaaggggtgtttgcctttatgcgagacagtcggatcacacctgtgttattccttttgcgaagatgcaaaagtactggtttagagcttttatttcttaattgagaaactttatagtctttaagagttaccgggagggaaagatttttggtgcaaaaattttgtactcataaatactagtacgtgagatacaaaaaggtattaaattttaaagtaaaaagtgtggtaccttccggtagccttcttaagaaccataaaattaattttcttagtttggtgaagtggcattggtgaacattcattatactattggaagcaggagatgaaggagaacaattcaatgattcattggtctgtcataatctcatcgatcactaccactttatatatatggggatatgatctatcacaatgttagataggcccactctcaagaaagattagcattaaatacacggttctagtttttccagagctaagttctggatttaaatgatgggcttagatcatatgatatatagatcaatggacacaaatgctttacagagagagagagagagagagagagagagagatagagagagagagagagagagaggaccattgttattgaact

SEQ ID NO: 47523 - DNA, 737 bp, Oryza sativa
  unsure (1)..(737): unsure at all n locations
ttttgtggatgcgcctacnagatggtacagnagttcatcaatgtgcagctatgcccctgctttgattctgatagttttctgaacaaatccaaagggaagggaaaaataaggaaaataaaaccaaaagtcctgaccatttgtactatatccccactaagttgagactttaatcttggctgttctgcaaccttctattgcatcagtgtgtggtagctaatagtaactgatgagcatttaaatcatacttgatcatattttttatttttttaagataatagaataattacatcctggcatccaaagatgcacaaagctataacactttctacatgaccgtatcattttgttccacatataacaagagaaaggacaccagactgaaaaacaaatattgaagagttgatgggagatagaccactccagtggcttgttgctccatatataatagttaggcctaagaggcatcgggagctttcctgttacaaactagcctcctgctactaagttttttgctcagcatttctcaagatagttgacatgactaactagataggtgacatgctgaattccataaaagagtagataaaatgaagtagcagcaacatgtttttttagcttgatgttaagagagatgaaacaagaatatttcatggagttcagccagcccaatggttggcttgctattgtatggtaggcttggaagacgtcaggagctctcatacatcttattggtaagc

SEQ ID NO: 47524 - DNA, 660 bp, Oryza sativa
gtacgtacgtacagaacacgggacgtttatccctagctcccgcgaactgggtacgtgtccggtgtcaccttccactgttccctttctgtcccccggctttcgcgtatcagtgcgtctgctttgtgaaaaaaaggcttgaattgcgtggcgccgcacttttcacaaaggttggcatttgaatccacacacacacggatgaattatcgcggtaatgctatgtttctaaagcgattttttgcaatcttttgccgctgttttgttctcaatcactgcttgctcaattgctattgttctcaggtagtaatcaattttatatctattcttactgatctgtataactaggattacaatgtttgcttaacattggaaattcaaatcccttaaaaaactgtaactatgttccgttgcatgcaagctggtttatgaacttatgatcctctaatcatacctgacagtttatgtgcaataacgccaaacatgcaataacccacaaacctgctaaaataatatcaagctgatccttcaacactactatgccccttgggaagttttcttctattaagctttaaatccattgaacactaggagcacatgcattgtattaaccatttgctgtcttgtgatgactaaaaataagcccaatattgttgcatggggatc

SEQ ID NO: 47525 - DNA, 727 bp, Oryza sativa
tttcgtcgacaaccgagtacataacatctaactcatctgcacaaggagctttatagcaaagatcatatgcaatagcaggttgttaaattagcaaactgctaaaacttttgcgtagatttagcatggctagtcgcacatgtcccacaaaaccacgtgagtttccgtcagcatgggctgcaagtgggttacgatctcttttttccggtgctaccacctagcgataaatcaactgctcgtatttctctctcttcttctctcaatcttctacctagaattgaggtaatgtggatcaatttatcacccgctgactcatctttattgtatctgctattaaacttctcgaatgaaattggataaaattctggatactcgtggcacgtttttaaaccgctaaacggtgcgtttcgtgaaaaaaaaattcctatatgaaagtggttctaaaacgtcaaattaatttgtttttcaagtttgtaataattaaaacttaattaatcatacattaataccaccttattttacgtaaaacacttaatctttatcttcaggagaaaataacaccacccgagggcatgcctttacattttcagcagcacttaaaacaaaatataccatcgatgcaaccattatatatttaaaaataaatctatttgattttatatggtttgaggagaaatagttgattcggtaagcctattgcctaattgcacaaacgacgacgagcagcagc

SEQ ID NO: 47526 - DNA, 962 bp, Oryza sativa
tttttatctgaactacttctgttttcaactggttttcatgaaaattgaaaacaactccagagcagttttcgatcagctaatgattttgtgaactccacatcaaaccgatactattagttcatatatctaaagaagttcaaagtattgctgccaatattaagtaatttttctattgcaataagaaataaaaagtttatcaacatgtgcaagtagattttgaatagatagatcttcatgaaacgtcagtatatgtcaccaatagggcgatcggcatgaaaccaacgagtattactcacaacggtttataactaataaaacgatcaaagagtcccattggttgtcctaataaactaaaaccaaagcaaaattttaaattttcaaacttaattttgaagtttattttaagatattttcaacgtggtatctttttcagcgttggtttttaagtcgttaaaaacacatatataaaatttttacctacaaattaataattattctctaataagctgttttgacttattattactactattataaaaactgaagatgtttttggcggtatttgagtatgtcatccgtgtatgagtcaagttcgtaagattaaaataaacttcacttgttacaaccgcatgaatattttttttagttaagtaatatatgggcaaccgatgaggagccaaatatatctcttaagatattaaggtgaaaaactagtactccttaccaaacatgcaaggtgcaggtgcaagcaaaggtgattttaccaaccttctggttggaccgatcgttggctgttcgcgcttcccttgctgatgaggccgaacagtttttccccccgcgaggtcgcggactcgcgacagcccgtcgtcccggcccgccccggcgcaggtgattgacaaatgggtcccacacggacatcctaccccacctggcaccatctaacggacgaatcccccctccca

SEQ ID NO: 47527 - DNA, 1252 bp, Oryza sativa
ctgcccttcatccaaactgtatcaagataatccttctatggctcaaactacatgggttctcttcccctattgaacctggggttaattggatccatgccattgcaaatttgcctattcagaaaaaaaccattacaattcgtctatttatagccgtgccattgaaattttacaaaattagaaccgtgacactgccgtcatgttttccatccatctcctttcttttccgtcttcttccttctttctcccgtcttcttctctatgagcaggagcagattttttcgcaaacaggaggagatgctttctgtgaaaacaaattacattcgcaagctgaattacagaggaacggacttgtttgttctgctgatcaggcagccttgggcagccggatagttgtggccgccgacggcagtgacggcctggccgccggcggggacagggatgggcacgacgccatgcgtgagcatggactggtagatctctacgagcaccttctcgccgtactccttgagctgccgcggccgcacgaaggaatactggcccgcggtgcagtagggcgtgccggcgacgacgccagccacagcatggccgagacgtaggcgtcgtggaggagcacgagccactgcagcgacgacagcacggggagcaccctcctccctagggctgtgctgcacgtgccacccatggctccgcgtgtggcgagggccctcctgctgctactgcgtcggcgcgacgctgtgacgcactcctccgagctccgcaatggggagcgtcgctggcggcggcggcgtcgaggcggtagtagccggcgatctgggttccttggtttgctctcttcgccggcgatctagagaggagagagaagactggataaagaagatgaaaaatcaaggagatggatggaaaacatgacggtagtggcacgattctaattttgtaaaatttcagtggcacggctacgaatagacgaattgtaatggcatttttctgactagacaaatatgcaatggcatgccatggatccaattaacccttgaatctgtgccttacctgaatctcgagttggcaaggttggcatctcccttcacctttttttttttcaatgggattctaaggttatataagcattttgcatgtgttttattgtattgtttatccaatttctcgttccattctactcataagatagattcttgcagtatttcatcataaaaactaatgtcttgatgtgcaaagctggatctacatgaattca

SEQ ID NO: 47528 - DNA, 936 bp, Oryza sativa
ccaaaataatgaaattgaagcagttttgagcattaaaagattcttagaaataagcaaagctccaggaagtagggaccgcaggcaaccaaccaaattacaatttcaagaacctgaagcaacctgcaacttgtctgtaattgaaaggattccagccaccaagaaatcaagaatccacagcctgctcctccaattattggtgcccaaagagggcaaatgtaggagccgggagcactctcagttctgcagagaaatgcacaataatcagcttaacacgccaaattggacatggatttgtgaatggaactctaatccactggaactagaccaaaagtttatcgaatcctaaaatcctaaaagcaaaactaagcacatttaatatcttcgcgcacataaccgaacagcaaatatttctactttcccaagaaacctgaacgagcctgaccaagagggggaaaagaaaactcaccttggataactcaagatggagatcccggagcggcttgagctcagttcagtctctctgtctcccagccattctccagtcaagcctcgcccctcccccctgatatactgctacttcccgagcgacctcacctcccactcgcaccacgtacttccgcaccgcgtgattcgaggagatcgaagtgggaagaagggaaagcaaacgcgagtcgtggaacggtggagccgacgaactgaaaagtgggggagtggggaggaggtgtggggggcaaaccaacaaaatttaaaggaaatgaaaatttactactccagcgaggaacaaaatggaaaaaggctactgcagtatcacgagagagtgagagaaacagtgataataacttgaggtctttttcaacgtgggagttttctctctctcttttttcttccataggaattggtttttgtttgatacgggacacatttttatcacgtgct

SEQ ID NO: 47529 - DNA, 760 bp, Oryza sativa
tcccaattttatttaggttctatgtcttgcccttgctaatttaacaaggtttaaatgcagtaaattttgtagctcggattgacttaagtttgtaaaatagtgagcctattagatgaaagtaaattaaacatgttcaccatagtttcatgcgtgctaaatatatagttataaagaaattctaaaaatcagacttcatagacgattgtgatgttaatatcactatataaacttgcaagatcaaattaaaatcacaaaaaatattacacacagtgacatgttttaattatttgaccttttttcacgtagatcgagttaacctctctatgtttatagagggacatataacataataatttattctatctatatttttaaaaatatttaaaactttttgaaccacgtgttaaaagaaagtgtacattaaaatcctttttcccaacttttgtgacattcatctgtgtaacttatcacagaggtacatacggtgcatgcagtgagagatgactagctaggagtatattctactccccatctcggtcaaaactcaaaaggggtcgtgttgggcagttataactgtataaaggatagctagatgtatagggcgagaagcgagataagcatggttgcgttaactgaaccacagaaatgacattcctaaatttctcctaccacgtggagagagactcaatctgcactctttttacacgtagatgcatgtttctgtttttttcctgatctcaccaagggagaaagtcgatcg

SEQ ID NO: 47530 - DNA, 671 bp, Oryza sativa
aattgtctagttaaacccgacagtgcgtttataatttgggtatagttaaacccgacattgcatttataatttgggatgaactcgaactctcatagatggcataagccgctagagtccagaacaagtacaaaaaggatttaccactagagtccagaaccggtgaaaggagggtttgattacaagtaacagagcaaaggcgaattccaattcaaatagataagaaacggcaagaacctcagccaatctcttctctatctatccctatctcttcttctactattataaaaattactagcaaaatgcccgttgcaataatgtccgtgcgttgcaatgggtgaaaataatctatctattatatgataaagatagcttagcaatgatactgtgtttgctttggtcgcctaaaaattttacattgattaatgaaaaaaataatagttgtatttgtatatacataatacaataattatatttagtacaaatgtcacaaaactataattatttggtcaaatcctatcatgtttttaaaatatgttacaaatatattgtgacattatacctcactggaaccgcgggtaccacgataaccgtcttaccgtggggtcttaccatggggtggcggtaaccccatccaaaacaggttggtgaacctgagcacatctagcttttaa

SEQ ID NO: 47531 - DNA, 674 bp, Oryza sativa
aaaacatccatcttaattatggaacatatgctgtatgactccagcctccaatgctgtagtgcaaatacaaagacacatatgattgtgcattgactgggataacaaagttatctactatatttgaatttgtgtttcacatatggaaagcaaaataattatttgcaacaatccccttaatgaatcataactttgtaactgttgctcacaggtagggacatattctacaagcgcaacacaccttggtgatcttgttgcaatgaatgatttggaaagagtgcaaagttaggatattcaatggttgtttgaattggacaatagaggatattgtttgggtgatccgtgaggaattatgggtgtgcaaggcagccgagagtctgttgtaaccgcgtagaggggcatgctccctcttgcagtcttacaagtagcctctgagcaaggagatcccaaaaaacatggaagatgaggtaaaattcttttcttttttcattatgatcaccaaaattgcaaaacaaaaaagatggcaccaatgagaggtgtccattgggcacattcccatcgtatcacactttgtaagtggaacaagtattgctattagataagatgccataatggtcttactgaagtatatatagaaaagtggcagtacaattgctcaccaaacaccattcaaaaaa

SEQ ID NO: 47532 - DNA, 1296 bp, Oryza sativa
gaaggcaaatattggttagttggaatatgcacaatatattagatcatctaaatatccaatggttagaaataatggtctaccgaattaagtaaaaatcaaaagtcagatttttttttcataacttccactattttctctaatttgtatccctatactttacacatattcataatttcctatgaggaattatccatcaaatagtaaagtcaatttttctacataaatcggtagagtcattaattatatatggttctatatgtaatgtcttttctaacttaagttttctctcttttcctatggaacttcaagagttatgtgtcttaggtaccatttagataccataagttaccaaccccaatttccagtacgttattttataaataacaattaaatttgtcatggaatggtaatgaagaaaattcattaaaaaatcacaattttgaatcgttgcaggtattggtccgctagtataccacccttataagtttctcaaatatatcctacgtatggtacatgcccgtgcgaatgtacgggctaccttcctagttcgctctaatgatgcttctcaagaatttataacgtattaccaagtgagaataatcaaccacctactattataaaagcaagagctttttttttacagctatgtgtaaacgttttgtgcggaaaatgttttttccgtctacatttaaattaaatgaaaggagtagtatttgataattttcaatccaacatcctctcaaactaaaaagcacatgaccaaccgaatataaacaccccgttattgagagtaattaaatttctttacaacttcagtgtctaacgatgaagaaattactgatctgaaccatttgatcatcgataagttaatggattcaccttttctttgggtgtgtgtaggggtgcacaggaagctcgtggctcgttagctcgctcggttcgtgacaagctcggctcgacttgtttgattttcctaacgagccgagctagaagtttagctcgctagagataacaagccagctcgagctggctcgcgagccctaacgagctaggctgccaggccacaaagcccataggcccatttatttagaaggcccaacagaccaaaaaccaaaaccctagcttcccttcccccttccctggtggtggcggctgagatccccgtctcccccacatgccagcgccacgtgacacggcccacgcccaacgccgctgctctgcgcctccaccctagcgaccgacgccggcacctaaccccagcgcccgacgccgccggcccaccgatctcagcctctc

SEQ ID NO: 47533 - DNA, 4053 bp, Oryza sativa
cttaaaaagggggaaagaattgctattcccacgcacatttttttttctgttttcttcatttttttcgtttcttttcagttttttctttccttttttcgtttttttatttcttattaatactatgtatgtatacaaactaatatatatgtatacaaactttatatacatttatatttttttatacattcatatataaactttgtatacatctctatcactactcccgtccctacttaaaaaattcacataaaaaaagtctattcgattccctaagaaagtggaaaaaaaaggttcgtaaaaaataaaaaatgaacgagaaaaaaaaaataaaaagggcggaaaaaagcgtggcaaaatgttcgatttctattcgtttatgtagtccgtatatatatctcttcactatctctaatataatttaactatttaaaaatagatgttttcatcgtactactaaaaagagaagttttcattgtacaactgaaaagaaaaaaatgcgtgagaaattaaaaatggttaaaaaacgtgtgagcaaaaatggccagagaaaagtgctaaaaaaggtttccgtcgtccgtaaaaaataaaaaatgtgcgggaaataatatttccatcatctgtaaaaatttttgaaaaaacatgcaaggaaaaaactcttagaaaaacacgccatttttcgcaagaaaaaacacagttaaaaaaacaagttgctctgaaaaaactgtcagaaaaaatgctaaattgatggacgcttgggtgagataggatccatcatttttttctatctcctacacgacttttgtttcgtcatctattctcctgtattggagaccctgcatgtctttatatgcaagtatagctattattattgataacatatgatatggatataatattaaaataaacatatttttaattattatttagagaagagtgtacagtgactctattttgtgtaggcttgaccatgcgaggcaatgtaggatttgattgatcttattattggttgcaagaatgagattcaaagagtattttagattatatgcatgttgtcacatgaataatccaattattttaggtaaagcaagcatcgatgatattgtcatcgtcgaggctgaaccatttcattgaggatgttccaattttttgattgtcttagctataaacgatccatacaaatattgtcattggcattgttatgtatgaaaaatgtatataagtttttcacccgttgcagcgcacgggtatttttgctagtaaatataataaaaattaaaagtagagtttagagtccgtataaaaatacaatttacaaataactaaaattcaatattaagaaaaacatgggaagaagagtttaaagtcaatataggaatgcaatttagaagtaactgaaattcgaaattaaaaattaaagtatattaatagatgagtttagagtccacatagaaatacaattaaaaataataaaaattcagaaataaaaataaataatattggaagaagagcatagagtctataaagaaatacaatttacagaaaattcggaattaaaaaaaatatattaaaagacgagtctagagtgcatataggaatatatataatttacaaataattaaaaattgatattaaaaataattaataactaacacgtatataaaatacaatatgaatattacccattagtagtttcgtaaagttattgcaaaatttaaattatgttgtcattttaatatatttgaataatatattgagaaaacatatatgctattatatgagaaaatataatgatgctagccgcacaagctgcgcgggccaccatgctagttttgaatgattctaatatcttaaatccctttgttggcctacgaaactttcctgttctacaaagtctaggaaagtgtatgtattggaaaaagggaaaattacataagattttaccttagagtaaaatttgtcagtgataaccgatggctacccaacaagaacaacatggggcagagctaggctgccatctatctccttgtgttccatcagcgttgacatcgttccatttgggtttgagaagattccatagtctagtcaatattcatatatgcgcgtttctttagtctatcaaggaaataagttttcataagattctatcatatgggattctagaaaaactctccgttccacttctcagaccgaagaggttctcttgtcttaataattagaaaatatagtacatgtttaggtcgtgtgtgcttaattttttttaagtatacggacacatatttgaagtattaaacgtagactaataataaaacaaattatagattccgcttgtaaactgcaagataaatttattaagcctaattaatccgttattagcaaatgtttactgtaacatcacattgtcaaaacatggcgtaattaggctcaaaagattcgtctcgcaatttacatgcaaattatgcaattggtttttttcatctacatttaatgttccatgcatatgttcaaatatttgatttgaagtgatggaatttttgaaggtttgaagggaactaaaccctaccattgaagactagaccattatatttgacctccaaaacttacacatcacttactgtaccctgtgaaatttcaaccatcgccgtccctaccaatccactattattgtcccaatggtatgcttgagggtacccttccgctttggcaaccagctagttgagccacctagctatgccatctggtgctggcactactgcagaaatgcataaaaatgatagtactatagatcctgaaaatgctaaaatcaacacctataatagttttcccaaccgaagcgtgtgcctgcggagcaccatcggctagaaccgatacctttgtggagaaataggtaccggttctagagaaaaaccaacacaaatattatagatgctgttttttttaaaaaaatagatacctttaattaattataggtaccaattaattaaaaaccggtacgtataatatattataggtggtttaaaacatcggcaccagtaaaaaccgagctgggccactctctccactcatgagcagataaagagagggaggggcggggtgggcgtccttattccctccacttgcctcccttctctcttgagagcggcggcggcgccatccctacccgcaagcggtggtgaagtcctccccactcttgagacccgacggtgcattcctcaccagtgagcaacgctcacggcggtgataacctcccacccgcgagcagcggtgccctccccactcacgagcggcagcggcagcaccgacgctacattcgataggcccgagctcgggggccgctggatatggcctccgtgcctgtcctcgagcaatctccggcttctctgtccctttacatagacaacggtcggcaacatctgttcttgtgttatagtgtgcttgttgtgcttgttgtaggatgtttgattctgtgataaacttgttcatttgtgttgttgaaatgttaattctatgaatgtgttcttggatgttagattgatcttaggggtgatggaatctgagagatgaaggtgaactgctcgatgcatcggcttgaatcaagtcttttttttttcattcttggaaccaagaaccggcacatttgagtcctcgtcaaaggtgccacttgctgggtgttggttacgaaatccggtacctatggctggttgccacctagcaccaatcaacttttctgtagtagtgtggtgagctcaaacagattcgatgccacttgcaaatgagcctcacttgacaatcgatgacttatatatacactaataagtgtgactagactataattcaccgagtttttgaatataccatgtgtagctaaacaagggacaattggatcccaacaaatcaagcaatcaattgaaatatagctcaaaacctctttatatttatgatagacagtgaatgacaggtgggtcctctcatcagtgaaagagagaccgtatacctagcaacatttttggcctgcagataagcagagagtgaaggaatctttgatgctgcaaacgc

SEQ ID NO: 47534 - DNA, 863 bp, Oryza sativa
acgtgtctcatgtgttgggacgaggctcatgtgttgggcagtcacggagtgcgggtaaagtgtacatccactgcagtgtgagtaaaccaaatctattcgaatagccgtgctcgcgttattgagcaccgggacatgtattacacttggctagactctaaattcttaacttgtgggggatgggatattgcatgatgaattttatgctgatggagccacattctgagaggagggaaggtggacatcctcagaaaaccatgacgattcaatggcgggaagctatccttgggatcacaatggatggtggacagaaccgtcgttgtttaaagtgaacactggtgctaaaatttgatcagtctatgctaggttttaggcttgtgaaaagaattgtaaaattagctttatgcaaaagaacctgaagccattccttgaaataccctctatcatatgcattgttgttgtggtggcttgctgagtacggttggtactcacccttgataattatatatcttttaggagagtgttgaagagaagcccttgtcggtacgcttgcgtatccaacaagatgatcggagtgcggtcttgttctaggtctcgttccccagtcgactgcttgtggcatgttaaccgggcccttatattatttggtcttctggtgttgttctctgatagttattggcctacctggccctaatgtaagtatttaactcttttagcctgaattcattcgtgatatgttgtgattcaactatgtatgtgtgtatcaactactgatccagggattggtacggataaacacagatgatttccgatttccaaaatcgggggtccacagcagcgggtgagatccgagttttcgagacaaa

SEQ ID NO: 47535 - DNA, 733 bp, Oryza sativa
tttgttcttccatttaaatgttcattcagaaatgtcttgtaaaaaaaggagcgctccataatcgtttccaaatgattgacgccaatcactattcattttcgaacatggaaacttagacatagattgatagtaactataccataaccttcgcaagatccaatctgcacaatcaggatgagcaagacgttgcgcccaaaactatcttcattaaagccaaaaaaccctctctaaggtgaggacacatgttcctttccagttttaaataaatccctttttaaatctagaaattatttttaaattaaaaaattcataatttcctattcgtaactctgatctactccgttcaagtctttattttttttctaaattgagatctacctaatggactagtagttattaataatactattttcattttagtagtttgcttggtttttctcttttgcgaatagttgactacaacagaatttattttggatgaggatttttaaagattttaaagatgaggacagatgtaagttaccatttgatcatattgcttctactttccaaaatgtcttactgcaagattgcattgctagtgtgcatgttaacttgactggcctcggttcgtgtgacgaaccgacagatctacccaataattgcattactcatgtaggatgttgatgacgcttcaccccgtggttccacggaagccatgctctcgggcttagtaccaatgatcccactcaca

SEQ ID NO: 47536 - DNA, 783 bp, Oryza sativa
atgggctagagggtggccaccacccttccctgcgtgggccatgccattcgatgtacaacaagaagaccctacccagagtttcaattctctggtgaggcgacatatatatcaactgctaacttatcaaggtacatatgaatatatagcttcctctaccttggtattattctttaattaacttaattccgtgtttgtatcacactactacaaaaatcgtttttctgtacgagggggtcggtaggttccatgcggcccgcttgtggcagcgcctgcaaaaaccgcccccctggggcgggttgattagccgcatgcgaaaataggcccattatcgcatgcggctgtcctaagcagccgcatgcgataatggatcttcgcatgcggctggcttaagggaccgcatgcgatgatcggccatatatgctcctccaggcccgagcttgaccatttgaaaacgaagctttctctctcctaaagcaagcaccaattagggggggaggttttcaacccgaaatttttacttgaactctatacgaaaggtgaagaactctctatcctgcttcatttggctccatttttgttatatttcgttggtggaaagtggagtttttttaatattttgacaaggtttggtctaactattttttgcaaaatctagcttcaaaatatatgttttgatgggcaaattttgcatgtaatcaattgtacataccaggtacatggaatggtggaattttttttgggaagccaaagccatttaaccttttgtatgaaatacctgcggtc

SEQ ID NO: 47537 - DNA, 731 bp, Oryza sativa
attatgttgtatgagatatgctaaaaaaaatgttgtatgagatgtgaaggttgtaatgtgtttttagaatatttatgtgctgctgatgatgagagaatgtaaattgatgataggtaattgattttgctaaaattatggatgaaatatttgtattttgctaaatttagcatcagccgaattttagttgggctgaaatattgcagtagcccaatttgaactgggctgaatgataactaaaaggccataaaaacaccacaaaaaaacaaattggcccaaaacaaaaaaaatccagttggtcataaatgggccgaaagctctaggaacccgaattggaccaaaaacacatgggctaaatcctaggtggcatcgatgacacatcattgtccaccttggcaaacatgtggcacatacgtggtgattcgaatccgtgatcctacatggcagataatctgtgacggaaaaacatcctatgtggcagctatccgtgacggttatttttcgtcacaggaaatgcgcttggctggactaactaggcctcgggctctatcgtgacggtttaaaaccgtcaccgattctgttaatctgtgatggttttcgacaaaccgtcacgcaagtcaatccatgacgctcaatccgtgatgatttctgaaaccatcatagatgttgtttggtgacggtttttcagtgatccgtgatggaaattttccatcatggattaacaggattcttgt

SEQ ID NO: 47538 - DNA, 610 bp, Oryza sativa
tccactacaagaatcctgttaatccatgatggaaattttcatcacggatcactgaaaaaccgtcaccaaacaacatctatgatgtttcagaaatcatcacggattgagcgtcatggattgacctgcgtgacggtttgtcgaaacccatcacagattaacagaatcgtgacggttttaaaccgtcacgatagagccggaggcctagttagtccacccaagcgcatttcctgtgacgaaaaataaccgtcacggatagctgccacataggatgtttttccgtcacagattatctgccatgtaggatcacggattcgaatcaccacgtatgtgccacatgtttgccaaggtggacaatgatgtgtcatcgatgccacctaggatttagcccatgtgtttttggtccaattcgggtcctagagctttcggcccatttatgaccaactggattttttttgttttgggccaatttgtttttttgtggtgtttttatggccttttagttatcattcatcccagttcaaattgggctactgcaatatttcagcccaactaaaattcggctgatgctaaatttagcaaaatacaaatatttcatccataattttagcaa

SEQ ID NO: 47539 - DNA, 745 bp, Oryza sativa
tgaatatatagcttcctctaccttggtattattctttaattaacttaattccatgtttgtatcacactactacaaaaatcgtttttctgtacgagggggtcggtaggttccatgcggcccgcttgtggcagcgcctgcaaaaaccgcccccctggggcgggttgattagccgcatgcgaaaataggcccattatcgcatgcggctgtcctaagcagccgcatgcgataatggatcttcgcatgcggctggcttaagggaccgcatgcgatgatcggccatatatgctcctccaggcccgagcttgaccatttgaaaacgaagctttctctctcctaaagcaagcaccaattagggggggaggttttcaacccgaaatttttacttgaactctatacgaaaggtgaagaactctctatcctgcttcatttggctccatttttgttatatttcgttggtggaaagtggagtttttttaatattttgacaaggtttggtctaactattttttgcaaaatctagcttcaaaatatatgttttgatgggcaaattttgcatgtaatcaattgtacatactagttacatgtattgttgtatttttttttgggagacaaatgcatttaaacttttgtatgaaatacctgcggtctatttttttatctgtaacttttttgcctttatataattagatggatcggtcgtcatggatgtatgagatgcggagaacgcagccgatatttattaagg

SEQ ID NO: 47540 - DNA, 774 bp, Oryza sativa
acgccgcctagctagaaacacacatgtaaattaagccaatagagggtcaattagaagaattgtttgactaatcttgcctgaattttcgttcttaatcatcctcaacaactcttgttcctcctctagaaaattaaaaaacaacttttttttcctcttcagaacctgctgataagtaaaacaaataaacaaacaaacaagctaagaaataggctcgatgaagtacatttcagcattcagcattacacgtgggatcaaattgaatggttaactaccacgagcacacagagagacagcaagagtccaaaaacccaagctattatgcatcgttaattaattgtactgcatcgcctgctgtactgtctgaaactctgaaagaatagtgatggagcaaaaactctgaataatactagtagcatgaatccaacgagatagacgacgaggatgatcagtcgatcgatgcccacgcctgaatgatatgtccgacgatggtttgatggatttcattcctgtcctggatcgagacgtttgttcttcttcttgtttctgctgctgctagctgccgctttgtttaactgatcttgacacccttttttttttctgatgggtgtttgttttgattgataagaggctactagtaacatgcatgattagggcaaggacgattgtgctttgcatggggaccaagcgtggctaatctctcatgtctcatctctcattgcgtttggagtttttctccacttaccttatgcttgcaatgatgatgatcggcgtttg

SEQ ID NO: 47541 - DNA, 658 bp, Oryza sativa
atgtttccttcgtccgtcacaaataaaaaaacagcaaaaaaactaaaaaaaggaagtccggttccccttaaaaaggaaaaaaatcggagaaaaaaaagcaaaaaaaaagatatccgattccccttaaaaacggggaaaaacaaaaaaaaaagtccgattcgaaaaaacagaaaaagtggcggaaaaaaaagatccgatcccttaaaaagggggaaaaaattcctattcccacgcacatttttttttctgttttcttcatttttttcgtttcttttcagttttttctttccttttttcgtttttttatttcttattaatactatgtatgtatacaaactaatatatatgtatacaaactttatatacatttatatttttttatacattcatatataaactttgtatacatctctatcactactcccgtccctacttaaaaaattcacataaaaaaagtctattcgattccctaagaaagtggaaaaaaaaggttcgtaaaaaataaaaaatgaacgagaaaaaaaaaataaaaagggcggaaaaaagcgtggcaaaatgttcgatttctattcgtttatgtagcccggatatatatctcttcactatctctaatataatttaactatttaaaaatagatgttttcatcgtactactaaa

SEQ ID NO: 47542 - DNA, 682 bp, Oryza sativa
cgtttgttgcggatcatacaacagctgaagcattggctttgaggaaaaaaatgtccgagctcgcgaagaagaacagatatccccatagattggggtcgagcggatacgctggtcacgtcgatcaatggcgggagatcgagcaaagatttgccgtggccggtaagcccctgctggtagaccccatggttgaacgtagcaagaactgggtttgggcgcgcagcacaggtcaagtctcggataagggagacatactattcgagactccagacatagaagaagtgactactaatttgcagcagatagtcgagaaagaaagatcaggacagttcgtcccacggagggagcgagatcagcttactgcggcgttggggacggttgaacactctggacgtgtaaggggtttgtcctcaaagacaagttggaaggtcgggtttccacaagacgcaccaagttataagaagagagacaaatacaaagaacaactatcggacaagatctatacacaagtgaaggaacacttctactcgttggcagctgaaaacccgacagcctttccaaggttattccctgatagccagcaacccacacaatccgcacagcaaacaactaatgtacccagcagtgtaggctcagtgcagacaactatcttccatgtggatagtataactggaccaacttcgtg

SEQ ID NO: 47543 - DNA, 680 bp, Oryza sativa
tattggtcatcttgtctctatgccaactgcgtcggctaccatcaatggacaattatgactacgacagaaagacaagctatatgctcaggggcttactagctcaaacacaagtatcataccttcaatttggacttgttccggatacatgcaacatgaattcatgatcatgggtctattttctatgctcaaagactggactatttattatttctcgtaagggttatcaaccgaatacttgcgctagtcgggattcaattattatatctattttggagtatcccataagggataatcactcagatcataagctattcatatgagctacacttggtctatatcacccggaagatatattactcgggagcatgttacatgcgtcatcctttaaagggtgtcgaaggcatattttttggcctagggctaatatgttctgcaacccatatttttaggtgtggcctatcacgttcttttagggacttaggcactttttgcttagggcaaagtgtgcgtgatcaagtgcccaataccttaaaatccttttgtaccgtagttactcaactttttagtagttggtacaatgcatcttaaaaggtgtcaaacagtaaagctttatatagctgccccgctgacttttttatataggttaaggtactgtttgggtttttaagcaattgattgga

SEQ ID NO: 47544 - DNA, 701 bp, Oryza sativa
tagatagatagatttatgctctgtaggcttgtgaaatttactctgtaatatatattgtcatttttaatgttttgttcttttttggttgtcaagcaaagaaaaatgatttatattcaaagttaggaagtgtttttcttatatatatagatttgatgggttcatcggtttaaacaatccaaatacttaaatctaatagttggtgtacatgtcggaagttatacttttttctatgacaaagcctctcgaccccaaaatataaacttctagcaagtggggacaactctcttgttaaatttgttccaacgtcgtcggtgcgagtgtggccaccggcgtcgtggttctggtcgtgtccgatccatgcttgcaaccttctctgccatggagaatgccagaaaccccaaatcggctagccaccaccgactccaagttggcagtggtgctcttcgtctagagtcacaaaaatggaacgagaaggatgctcctcaaactcttctcccggcaggtaaagacagagaagggcggcgaggaatcggtcaactcagtagtatagccccgaatgagagatggttttgacctcagtgcggggtagaggtgagattgaagttgccgagtgctcgctttatttagctttcgcagcgcccctgtaagttccaaaaaagctgcctcaacatagtcagcaagatgcttaggcggtggggctt

SEQ ID NO: 47545 - DNA, 684 bp, Oryza sativa
ttcttcatcaagtttataaaaaatatagcaattcttatgatacaaaattagatccattaaatctaatactggacatattttaatagtatatttgcatggtgccaaaaatattgttatatgtttttctataaacttgataaaacttaaataattgtgatttagaaaacaaaaggcatattataatatggaactgcgggagtattaggtaagaaaaacttgaaaaatagattaatatgaattattatagaactatttttctaaagaaaatcaccatttagccatctagaaagcgtgcgcgcggaaaacaaatgggtaaaagttgggaaatataatatagaacacaacctaaatgcattgattagccacaagctagtaaatcattcagccaccttggtacgacatgatacatgggaaattgaatatggagtatggacgtacgttctcaactaaatactagtgcgagttttgcttttatgatatttgagaatgtaaactaaaccaaaactaagccttgcaaaaaaaggcatgaatggtaggaacttcaaaaaccgaaaacttttaacgaaattaaaagttaacctcaaacctgatgatgaagatgaaaagaaatataattgtcaagtctcaaacaaacttactttaactgctcatgcgtttggtaagtgaaacgtcatgtttcattat

SEQ ID NO: 47546 - DNA, 686 bp, Oryza sativa
aaaacaaaagttgttttctattttaatacttgatccgaaaaaggcccaagtgcagagagagaaattttaatttgttttctatttattttaatagagtaaatgaactttgtggtattaaaattagttattgagcttcgaaaattcacggtaaatttcaaagaataatttagatcacgtagaatatttaaaaaatatttcctttttgaacttctattttaccaattcgagttcttttttcctttttgaaacgccaactctgagttgctgggccacgctatgggcaacatcctgggcctactcgagtgacatttggacaaataaaaggcaaataaaaatattttaagtacacattgggaccaatagaacaagtggttcaaatggtaagacgcattcctaccgtcagctaagtgtgggttcaaatcccacatgttgcagatttttacccatgcgcaccatatttttttagtttgccatattatgcatcatatacatataacatattaacaaaactattttgttcaaatttaacaaatcgtattttgggtttgattcttcttgcaatcacatttttttatttttctttgcgctaaatatgttttatttttttattgttttgggctacctaaagtatgacgaatttaaaatcatacattgtgacagtcctgataaaactgtcacgagttagt

SEQ ID NO: 47547 - DNA, 643 bp, Oryza sativa
atatatgtactgttcagtaatgagttgtattggtataaatttgatagtaccggccagccagtcctgacggataacttcttctgggatggaatatgtactggtccacctcttttgcggtagtacttgtgtgctctgtttgaaggaaacaattgttttattagtagttagaagactggtgatcgacctaaacaatttatagtaatgaaatgttatcacttacaaattcaaaatagtgaggaattccataaatgtctccttgtcatagtgtgcggggtccaatgatatgatcaattggtctttcggatatacaaggaataatatgtagtggtctctacatataagataggcttattggagatagaaaattccgaagaagataaattaattaaacaaaaagaagagagagcttacgtgaactggtaggggaccattaagacatctttatcggcgtgcgccaacattgctattgccaagtatgttgctacttctagcttcttcctcttgtgcaatgtcttcacatattcttccttttcttccggggtcttgccaaccaattgctcgcagtcctctctcagctttacggggggttgtggtttgcatattctttttgggatccacgtatccaaactttgctccagttcta

SEQ ID NO: 47548 - DNA, 544 bp, Oryza sativa
atgttcagctgaaagcaaactaaaaaaaaaaggcactcctcagcaaggacgcgggttttaaagtaggttctacacattcgagaagacccagccggattggagtggttgtgcgccggggcaatctctgcttgcgttttccaataagttctattgctttgacacatttagtatataactgaatagaaaacggaataaaagcggataagatagcgtattaggccgacaagtaggaagcatagcggggacaagttattaccggtttgaggggacaatggttttctaggttgtttcaccaatctgttgaattggaatggagctcacgaccgtgaaacccctcgttgtttgatggcacctatcttgttcccttcagggagaaatactactcacttttcctctatcaaaaagccaataccgacgctcgcttatcagcttaccagttcaaacctccttgctctgccttttataccagatgcctcctctcttaaaccaaggcatactctactggctttccttctctaaactattctttatctgctatctatgc

SEQ ID NO: 47549 - DNA, 857 bp, Oryza sativa
caccaaagcgctcatgactgtgagtacggctaatcgattagtttttagaactctgcaaagtttgtacagctttacccacatgatatgaacactctagtttgtctcgtgttggccaaagcactaccacactctacacattgagagcggtctagaggtcataacgaagcctttacattacttagagcctagccttgcaccagcacgatacgtgttcctccatcctaggcatacttggaatatgtctagaaccgttaagtggcgagcccacgccttaaacttaatgccgtggtggcggacacaacgagaatccaccacgtggcacaataccgttgtattggacacgcttagtcacctaaactactacttcgggtaaataggaagctcctctgaattattcgaactcatacacaccggccaccagaatgcaaggctagttctaaatagattaatcagcttaggccatcctatactagcacatgtggatgtacgaataactttaagttggtgacacaagttatgtccttatagacttgggcaaacactccccctatcggtatgcaactaacaccatatgcacaccacttgctgcccaagtctaaaatcacattttacacattttagtttacaaatacccatcacattcattttattccagcaaaggttcatgtgtccaaaatcacattttaatcacagagggtatgagcatttgcatatttctaagcatggctaagcaagtagttgcacatagagcatatataaacccaattgagcacaaagagtgtactctaaccattcctagtggttcaatcagcaaggatcacaattattcaaggtagggaatgcagcaaataggtcat

SEQ ID NO: 47550 - DNA, 696 bp, Oryza sativa
tcttaccggaacatatctctaaaggaactatttaaaatatcttaattaatagatacaattaccttcccaggactcaatccatacgtgacaatacttgggcaacacgtcgatcaaacctgaaaacaatcctagaaccaactcatcggcatcggctacatcggctattctttgttcgatccaatatcagccgatgtaggcactagccgatgctcattgtagccgatgcgtgctctgttcctgagaaacgatcctctgccaaatccgcttcgatcttgacctcgaacttgatgtataatttaccaaatttggtcgtcaacaatatagtatttctatacatctaaaatttatacacctaaagtttatagacccaaagtttataagtcaaaagtttacatacccgtttcaaattttaatttgaatgtattagtttatagacccaaagtttataagtcaaaagtttacatacccgtttcaaattttaatttgaattcaaatactttttatatagtatttctaaatataaatttttccaactttgtttttttatttttttaaaatttatggtgtagtaggaagagaagaggaggaggaagggggagaggagtgtacaggggggatggggttcccgcagaaggtgactttttcaccggggttttccaccaacgaaaagaacgaacaactggcagggcaactttg

SEQ ID NO: 47551 - DNA, 2573 bp, Oryza sativa
  unsure (1)..(2573): unsure at all n locations
acttttttttccttaggtattttctaccaaatggtgatataattaaggaattaattttaagattactcataattatttatgaccaatggtgttttgactatgaaattctaagtttattttgcacatgattgattaagccatagtaaactaattatatgcaattatcaatgcttattatttaagatcagttgcaatactgagtaaattatttctagataaatggaaccaacgggaagtttatctagaaagaaatgatttcattaagattgttatttccttaattattgtctacctaacgatgantgtaaaaaaaattaataagggaagaaatcaaagtattatcaattattattttctctgtcattttttatttatgccattagtgcattaactccttttatcacttctaccttgcggtgatgtgatcgaggatctaatctatccgtaagcttaattcctttaccatttctgcccaacgctgatatggctaaggattttaattttaattctatggcatcactaatggcatcatttcctaatcatttctaccgtatggtgatttgatttgggattttaaattatttactttatcacttctaccttttggtgatgtgacttaagacattaatgtttattccctaatcatttctgcccaacggtgacttgattttcgattataagtaatctcatctattaattccttcgttttttctctgcccaacggtggtacaaagcgaaataaagattaagttattattgtgtaagttaatgtgctattgtacgtaatttgcacaagcaaccacaataatagtgccacttaattttatttatcagttaaagtctatggaattattattattattcctcattgacttaactgagcctaaggcttatttgagtatgacttagcattaacaaaggattccttgtggctcccgcagctaatgccactaattttttcctaaactcaagaggcatctttagccaatataatgctatgtttcgcatgtcactcataaatattgagattatcatccctgttagtgttaggggtgaattttgagcatgacattgcgaaactgtatctagctaacgttgagatgaactttagaagtttgttaaaactaatgcttagtataatttaaaaagtagcacaagaaataaatcacatggcgtgcaaacttagtgagatgtacatcgcacatttcatatgcgccacttgtccatttcatatgattcttctcccattagactacggtcattttcagagttgtaatactaagacaaagtggaccataattgacttggttcatcattccgcaaatcaataagaaatatggaagactaaggagcaaactaagtaagattctgttaatcttgtcatttgatggcaaagatgaagcttcactaagggggagtgttgcaacttccaaatttaatgataataaagctcatattccttgcaaggggaattcaaactgcttctatgtcctatgtatgctactcttgaaattttcttgtgtaagttctttgcaagaaatagggacatgcttaatgtcctgatttaatggcattattttggcttgaatcattatgagacgttgtcgaaattatggccttattttttcggccacatttctaggggagaatatacgtctcattaaggtcgagacacttcacccttagaaatttctgacatctattattacttaaatgataatttactaagtaaaattaagtgattcaagtttatgaaaaataagatattatgcttccattaaataaataatacaatcagtgggagctcatcaaaagctctaataagagaagattattctacctcatttatgactcatagctccattatgtggacgctagaattttgtatctcttaatttgtgacttgcacaattaaatatacataacatgacttgagggttttgttatggaaatacaagtcacatatagggtacagacttaagaaatccatttgtggacttaatcaaacattgatgatgttttaaattccgctgcgtcattagtgaactaagcctaaataagaatgaggagaataattattctataatgatggaagtaagacgtcattgaaattgtgccattgtcgcttatgtcacatacctaggggagtttgaaacgtctcatgagatagagatattctttcccttaaattttaatggcgttgtttagctttaagtgtaaatttcacaaagttaagatattagccaacaaatgattttttatggctatgtttacccattagcgacctccgatttcctttaagaaatttaagacactaaagctaaaatcaaatgaagttatgagatcggattatggtggtaaacactaaataaagcttgttcaccttataagacattaaaaataagcattcatccaaatggttttcgaaccatgtaagaacaaattgagatggatgaacaaaataagacattaaagtgttcatctaaatggttttcgaaccatgtaaggataattgagattgatgaataaaataaagaatttagtagaagtttctaaatgagtcaaaatagtgg

SEQ ID NO: 47552 - DNA, 1038 bp, Oryza sativa
tggaatgggtttgatgtttggaaaatctgcggctgatgggatcagccaggccccgggtggccgtttgaaagctgttggccgggtgccaatcttgatcaatttaaaagactgaaacattgcacatactccgaccggacgagacgcactgtctcatccgtgtcgtttgagaagcactcccttagttgtttcagaaaagagtttaaataaaatcaatcgcaaaaaaaaaatagcggcctttccttgaagcctgcattaaacacttatttcccatggcttgctgagtactcctgtactcacccttactctatataaataatcccccctcagttgctgaagaagacgaagcggatcccgctgacgaggagttcttccaggagcaagccggctacgatgagttttagggtttcggcctagttcccaagtcgcgcctgtgatgtttggtccaagtcttggcttccgcttcccttttgtattgcagttgtgagctcgggatctgtccgcagcccaacatgactgtactcctactctataataaagagacctctgttgctgtgatattctgtcttcctgtgataccagcgctgtttcctgggactggtatcaattaacaggttaatttggagcgtcacgggctagttccggtcgggactagttcggggcgtgacagtgggtaggagcacgggtggggtgcggcgaatttttttttcgtcgagatgattttcgcaggtgggtgattgggccgcctgcgaaaattatttttgcaggcaatggcatacatgcggatcgctcccccgcctgaaaggttcagttttggcctcatggaaaaaccatttttctagtagtgagaagaagaaaacatacacgtacaattcgttccaaccaatagatggttgtcatgcatgtgcccggcggttagaacaatggtgggattatgttgtgatggttagccggtgaacagcagaaggcagcaacatcatcatagtcattattcgtggcatggaaaatactccatctagctagttgcagataagtgatgtg

SEQ ID NO: 47553 - DNA, 2305 bp, Oryza sativa
atacttgtctattgttatatgaggaaaatgtgtggagtttaacaaatcataaaaataaatcttattaattttgtgagagtgagtattgttttttatttacaaattgcatctgaggtagacataaaaaatgaaagaagattagacaatgagggaaaaataataaaaaacaagagcggacaaggacatagaaaaaaaagccgaagggatagggcaagaatttgttttattatttaaacaattttaataagtaaatacccgtacgttgcaacaggttaactaaaattataacaaatataaaaataatggatcattaggatttagtttttacgatatgagcccttcaaaaaaaattccttatagaaataaaaaagttgtaaaaaaaaggcccattataccctatcggcctactattgcgcgtccaacacatgaagcgcgtgtggtgttgtggcccaatatggaggccggcccgacgcgggatcgatatgagccattcgttttgatggacggctcagattgattctaaatccatcaacaccctaaccctatccacacctacacccgaccgcgagctccaccttccgctcggctctccccctcccctcccctctcctgaccagcgatgcctctccccctccctcccctctcctaaccggtggcgccgctcctcctccaccgtcccctctccgccgctccccacccctcccctcctggcggcgcctctccccctctccgctactccctcctccctctcctcccctcttgatggcgcctctatagtgtggcggcttcccgcgggtagatccggcgacaccaacggcgccggccgcttcccgcgtcccaatccggcggtggcggtggcttcccgcagtggatccgacggtgacgacggtgctgacgacttatcgcggcccgatccgccgacggcaacaacggcggcggcggttcccacggcggatccggcggcaccgacggctacgtgtgtggcggcagcagcagctgcttcccgcgttggatccgacggctacgaaggtggtggcggctttcggtgatgtttttattttttttcctctttcgcttgattgtcctattagattttgtatctatgtttgcaatgaattttcacttaatcgctcgtgcatttggttgttgctgcggactctggatgattttttttgtcttgtacgtctcatctcggatgttgtggacgagggatttttttttaggacactaacaaaaatttaacgcgttaacggacaatgtgacgaaaggaaaataatggatcttttaattaaaattaagataagataagaggtgccgttgttttaaaaaaccaacacttacaaaatattataataggtgtcagttaatttaaaatcgaaaactataatatattatacggaattgctagtgctctgttgacagaaaatagggtgctaaatctttcacttttttgaccattcatctctgtttacaattcgtgctgcatttggattgagcaaagtcatgtacggctgtggactttgagatggaccgagcttttgttgttgcattctgtggactttgttgttgcgttctgtgggtctcacatatttaccgttcaatttcgaaacacacgcctgctttttttccttgcatttgagcagtgttttctactgctactttgcttatgatccacgcttactaattacatcgtgcttacattataattacatatgtaattttatgacttacatcgtaaatatactaaaattatatatgtaattttatgacttacatcataaatacactaaaattacatatgtaattttaggaacttacaatataaatacatgccaactttttttgaatagttactctctaaatttaaatagatgagattaaatttatcctatggcttgaaaaatttgcatgataggaggctagaaaatctatcgcatgatgtataggcagtccctatattatattactggcacctaaaaaaccaaacagagtcttaggccttatttagttggggaaaatttttaggtttgattatcacattggatatacggacatacatttaaagtattaaacgtagtctaataacaaaacaaattacaaattctgccaggaaactgcgagatgaatttattaagcctaattaatccgtcattagcaaatgttttctgtagtaccacattgtcaaatcatggcgcaatcaggattaaaaaatttgtcacacaattttcgtgcaatctatataattgattttgttatactatatttgtatttgtgtcaaacattcgatgtgatagcgatgtgatag

SEQ ID NO: 47554 - DNA, 2201 bp, Oryza sativa
actcttactctttttgtttcttcagtatatggtgcatatactgcttaaataagtatatacactatttcttagatttagtagtatataccactattacttagataagccatatatagcttttcacgtgtgtagtataatatgctttttcacgagcaaaattcagaagtatgatacaaaattcttcgtaaataaaaaaacaagaggtatatatatgatctcatgcatgctcacaagcgaacgaaaaatagagaaaaagaaacaagaggtagatgcatgtatatgcttctgaaaaattcagaatctatattcagttatctgggaggttcgaacaaatgcattaggtgtcgcctctgatttttggcagcctatgcaccatgtgctgcagctgtaatgacaggatcttcaagactattatatttatacctctagaggtataaatatactcagatctactcctgggtttagagtagatctactcctgggctactagtatataccatttatttcagaccagtagtatatatatactgcatatactacttaattttctatcagtatatactgcatatactaattatgtttggtcagtatatactgcatgcatcatcctcgctaaaggagggtactgcctttttgtttgctcagtatatatatactacatatactacttttttttcgctcggtatataaataagcatataccactatttcttagataagttgtatatatattgctatccatggaagctggatatatacatatgcttttcacgtgcaaaattcagaagtatgcacgatacaaaaattcatccatatttaaaaaaaaaaaacagaagtgaaacaaaaggtatatatgtgagcaaaaaacagaagtgaaacaagacgtatatatatgagctcgtgctcataagattcagaatcaactaggcgaaaataaagagaaacattcaagaaagatgtatatgtgctgcatctgcatgatcgcctgctacttttggcagactcctgtagacgtatgcacaatgtgctgcagccgacgctggtctgtggttcgtcagtcaccatgcatgcatgcgtcctcgcatggcatctgcatacaccaaagaaattagtttcttatgggggcttaatcattcatggtctcatggagaacatcctcatcggcaataagtaatagaagcagatctaacaagaaaacaagagggatgatctaactagaaaaagaacaagggcttgccgcaccgatctgctgtcgtgcacctgcgattttcgccgcctcgccgccgctgcctttgcttgagacaatctgaaatcaaatcgtaagtgatgacgaaattaaataacaaaccttctatcggattggaaaaatggttatggatactcacaatcgtgacgatcgatagccgctggcctggatgggcatttttgatctggtgtagcgggaggattcatcatatatacccttgcctccacggaaggggtgcgatggatgtcctgctgcctgatggcgtttccatgggatccttagacgacggcagggtacaagacgatgccacacgcctgatggattgcatcgtcgcctccgactcgccgtagagccaaatcagcgttgttccctccggataaaccgtagatagcgcttccgtccaacgacctggcttatctagaccgaccgaccaaataaatattaaagaacagcggaagcttgactacccaatcacaagtacaccgactaggggtttacccccgttaagttctcatcctaaaagaagcaatcgaaacccgtatcactcaaagactaattctaaacctgcaaacaaaaggttatatcaacagcaagagtcagtacattaaacatgtaagcacaagtcaatcctaacatactacatgtaaggcatatattcaaaggaaggcaatatgtagttcaattttagcataaagcaaattttgtttcgcaattcttttgtaaaagagtttatgcttcaattaacaaagacatgttttaagttttaacattaagttcatcatatttccatcataatcaatctcttgatgtcatctttcacaacaagtcataatatatcatcacactcacacaactcaacacattttatcaatttcaaacctagtcacatgttcacattttaaaacatagagtctatacccatgacacttcaccaaagcgctcatgactgtgagtc

SEQ ID NO: 47555 - DNA, 1572 bp, Oryza sativa
aaatagattaatcagcttaggccatcctatactagcacatgtggatgtacgaataactttaagttggtgacacaagttatgtccttatagacttgggcaaacactccccctatcggtatgcaactaacaccatatgcacaccacttgctgcccaagtctaaaatcacattttacacattttagtttacaaatacccatcacattcattttattccagcaaaggttcatgtgtccaaaatcacattttaatcacagagggtatgagcatttgcatatttctaagcatggctaagcaagtagttgcacatagagcatatataaacccaattgagcacaaagagtgtactctaaccattcctagtggttcaatcagcaaggatcacaattattcaaggtagggaatgcagcaaataggtcataactaacttattccaaattttaaataccgatatagtctaagttcacatgcaactttgcaaacaaatattttcattcctcaaatcatgggatttaatgtgttcaaaggatgggaggagaaaacttgccttgatattgagaaatgttagtacctaatccactccttcaccgattatgcaattatctaaataaaggacacgttatgcatttaaactccgaaacaggtaaaaatccaaaatgctctaaaaatgcatgatttgtgcactgtgagttggtactgttataaaatgaatttaggtggaagaatttctattttatcactttttatttgtgaattatgaatttttagaagttatgtcggtatatagtagtataggtttagatagtgctataaaatatttttgcacagtggtttttattatatttgacttctcagaggtatagagatgtgttttctaagactaacacatttggtttcacaatttttagagttattatgaattctttatgcattttacaagttataacgtattataggtgtatagtgtcctatatgcacaggcctttggtatttgaggttcagaatttattctactttgtttgtgatgaatgaagcaaataattttgttaactagagggcccttatcattttagttcatattttataatctagaggggttctatatggatgactttataaatatcaacctaggaattatcatatgagctaagttcctctaagttttggtgaatggggatggaactatggcttggttctaacaagttttattttggtttgttcatagctagagtgtatttcaaatacctctacacatttattttacttaactatcactaggtgattaactcctaggttatctatttaaagattagagctaaaacatatacaaaaggtgtcatattttattttactatgttgaagttcaatattttctgattctatagaaacttggttcatttcatttggacaaaaaatgaattttctacaaattttacaaattaaaggctgttctatgttagtaaatccttacatgaatattttgaggcttttactacacagtaagtatatagttttatttttataacttggaaatacatgttttggtggggtaccgagctcgaattcgccctata

SEQ ID NO: 47556 - DNA, 1091 bp, Oryza sativa
agttcctctaagttttggtgaatggggatggaactatggcttggttctaacaagttttattttggtttgttcatagctagagtgtatttcaaatacctctacacatttattttacttaactatcactaggtgattaactcctaggttatctatttaaagattagagctaaaacatatacaaaaggtgtcatattttattttactatgttgaagttcaatattttctgattctatagaaacttggttcatttcatttggacaaaaaatgaattttctacaaattttacaaattaaaggctgttctatgttagtaaatccttacatgaatattttgaggcttttactacacagtaagtatatagttttatttttataacttggaaatacatgttttggtgatcctaccgaacttaagtttacccaaattgaagctaagttaaattttatatgaatttctaaagtttagcttatctaaaactagtcattttaaaaataatagctttagaggcatttcatacaaagtaagtatttaccttttatttcacctaatcagagagtgcaagatgatgaatctgtagaatttgagtttattataaaataagttaaattgaattttctatgcattttataagtttgtgtttgttttatgtatgatttatcctagtcaaatttttgaggcaaagtttaaacagtgagtgtcaagttttatgtttctaaattaaagttcataactttgtgaatctatagcaactggaatcatctcaaaataagttatatttgattttatatgaatttcgcaactttgggtgtttttctgttgaaaataaaatgtttagatgatttttctttacattttcagatttttataagcgatgggtccaccctgtcagtgagagaccaatatgcaaaaaggcctctagggttctagagaatagatcccgaggtccctagtacgagcacatgttttaaccaaattcattaagagtccttgagttttacagtttttactaatagattcttggtcccacatgtaagtctaatatattttacattttaaaccttacaaaatttaaactttctctaaattaggt

SEQ ID NO: 47557 - DNA, 693 bp, Oryza sativa
cggacgatttatttagggtttagggttagagagagttgagtcattacacagcctccctcctctttctttatatagcgacactggtagggctcgggggtttatctcaatctaaaattcgaatctattttgtaccgatcacacaaaacagatttatctcttagtttgtatcttattaggatagaaaaacccgtaggattttaaccatatcctaactaaccggcattagccgataaaatcaaccaacagacaccggcagcggccgcggccgcggcatgtcgttcgccgcggtggggacacgcatcgtgggcgtcggtgtggagttgaccaccgtctacgaccccgaggcctccacggagcgcggcggcccgcgactcgtcttccccaagttgaaccccgtcctcatctcgatctcggacgacggcggcggcggcggtggcggcggcaagctctacgctctctcccgcaccccggccgtcgtgaggcagctggatttcgagccatggttcttcgtcctcgacgacctcagccacaccgtgtggcgccagctgccgtcgccgccgctcttcccgtgccgcctcaacccgctggagttcctcgacccgcccaaggtgcgcgtaacggcgtacgccctcgtcgggtcacacatcctcctttcggtgtcggtgcaaccgccgcaccagcagcagcaagatc

SEQ ID NO: 47558 - DNA, 954 bp, Oryza sativa
aaataaattttaaaaataattttaattttaataaattttgtatggttttgtacggttttccacagttatcgcggtaaccatacttaccgtggcatggtaaccccggccggcggtttgggaaaccctacaacatatacttcatgagaaaatcgaaatatcatcatgaactgacaagtgagcattggcatcgcaaaattcaccccttttgtttgacgtgtctaagagattgcagcttggggaaaaccgtggaggatccacctattatatgagtctaattcaactcaagtggcatgtgttttcataaaactttagctgcatatctccgctatatacatgtcctgggtataacacctaccaaacattttagttgaactacgtgacttgatttagaatagctacattagcgcaagctgagttgagttagataagttacattagcacaagttgcactaacaggggatattttggagagcaccaactagaaaatcagaagtaactaagaataaaaccaacatcctaacaacgcatcttaaaaaaacagagtgaagtgaaacaaaagaggctatcacaacattctgcacgctgtttaacaacagggcagctaacaggtagcttaaaatcacgagcttacagccacaaaggcagctaacttaacctcggatcatacaaccagttaagtacttaactagagataaaagttattggcagatgtaacgcatgccttcacctactttcatggttcttatttttcccccacaatctcagccagctcaccaatcttacctagagttcagatcgagttctcctgatctgcgccagtcctcttgcatatcagagttcccattctcaggttcattttcatcattaaggaaatcttcagatggatcttcatcgtccctttgagcatttccccatccatcttcaccttgctcttgcatcatctcatgactaggg

SEQ ID NO: 47559 - DNA, 671 bp, Oryza sativa
ccggattaattttacgagtctttacaattatttgtaccataaattatatatctatttttatttttcaaataaatatataattttaatatctatattagatttattgcgttctagacctacatccatcttgagtgctccactaaataaaagaaaatattaaaatttgtcattgaaaatcaaaatatgctagcttattttttaatgaaactgttaaacccattaaaagtacattattagacatctaatgactttctaccaacttaattaatttcttcataaaaaaactttattaattcctcacaacatacacctgggggctatttacatatacgaattgatcttgatgcttttgtaaataaatgatattttaaatttaaaagataaataaacgatcttaaaatgatcatagcatctaaatcatacatatgattgctcctagcactcctaaacacttctaagtcgctatgtggcattctattaattacaaaaacactcatataatcgaccatcggtttccacttaaaccgatggacccaatttttataccatcatatctatcttttcggaaaaaacaaattctatcagaatctctgtctggctcactgcataacatgcatgtgtgcgctcctataccttttaaaccggtagaaccattgtttctacaagtgtta

SEQ ID NO: 47560 - DNA, 1172 bp, Oryza sativa
atgcaaatcagagtgtcatttccttacttgcttactctatcaatgtcgtcgacgtggagcaaccgctggttgttgctattggtataggtgaacacctccttgctggttaaggtgatgcccagtgtccggcagcgaggcccgaagtagtgccttcgtctcatccgctgctagccaccgctcgtcggccaccgccatcaaccaccacggtgtcgtcgttctcctccatggtgtgtcaccgatctctgggttgggatggtggatcgattcatatacgaaaaaaaagggaaaaaaatgaagtggggggcaagagtggttggttgggtatgggaaaaatagaatatataccggaagcaaagaagttatttttatcgtagtaaatcatttactccgataatagtgggagcacgatgcgggacgtcgggtgggatcggaagcaagggagttgtttttattatcgaagtaattaaatcgtttactcgaataaaagtggactctagaggtccccgcgcgataggagtaaatcgtttactccgacaacggtaagagtggattgacgggatgtggggtggggtgggcttgggctgatgcatgtttggcgcttgaaatattaggagcgcgctcctaatagtagttctagtaaatatattcagttattgatttgatggcactaatttatagtattataaatattattatatttgtctataaacttagtcaaatttgaaatagtttaagtttaaccaaagtcaaaacgtgttgtaacctgaaacaaagggagtggtatatatgaagtatggacagagcaacatgatcaccaaaacacctagctagtttctttattaacaagagtataaaacatatatatgaaaaatatagcaaatttataatattatttgaaactaattttgaagataaatctggcaacgatagtttaaaaaaattgaattgaaatgtgaaaagaaatatgaatgggaaagatttaaacaaatattgactgcagacatttaaaaacacatcacttatctgcaactagctagatggagtattttccatgccacgaataatgactatgatgatgttgctgccttctgctgttcaccggctaaccatcacaacataatcccaccattgttctaaccgccgggcacatgcatgacaaccgggtaccgagc

SEQ ID NO: 47561 - DNA, 568 bp, Oryza sativa
cattccaatttcaaccaaacttttaattttggtcgtgaactaaacacatccttgtttcaaaatggaagaatggagtaggtcgtactagctcgagaaccgcgtggcaaaaggagttgtggactgactgtcaaggagaagctccaggagtaggtgacggaagagatccagcgcctaagattactcatcatgatatgcctctcaaatcttggtgatgtcatccaatagtagctggtggggtggcattttagctagagaaggataggtacggggagagtgttgatatctaatctgatcttcgcctgtcaatcgcgcttgagatgacctgtttttgatggtctgatgtgatcccaagatcccatccgatctgcagccctggatttactgaagccacctgctgatgtagagtagggatagtgttttatccgttcttgctcgttttgtcgcctcctttctggcgcagagggaggaaacaggaaagagatggagtagtaagtttgaggttgatggataaacaagatcaggttaatattagaacagactgattagtgatcactgatgtgatgggttg

SEQ ID NO: 47562 - DNA, 700 bp, Oryza sativa
agcaatacagagaacttgaagtctactcgctaggaatttcgtcgaagccatctcgacaaggatctcgtcggtaactttgggatcagttgttctctcttataatctatggatttccatatcaatctcatataaactggattatgactattaacttacgagtggtccaaaacagtataatccatgtcttcttatttgcttgatgtcgaatcgtgtagattttcgtaccaacgtaccccaatacccatactattcggtttacaggtatctctcatcgacaaagaggtatcgaagaaataaatattttcgatttatgaatcgagatagataagaacatccccagcagctcatctatatttggtcctgcaaatgtccatatggagtatcatccaaaaaaagaatatcccattatcctatattttaggaatatctttccaactaactttacatttgtattttaagggatatatttccaactaacttaattttaacggtgttatttatcacgataatattttgaaacgagtaaattttaacggatatatttttaattgatagttttttaattgatatatttgaattgagggaaacatttttttatatattcgtagcatcatcaataaaataaaatgtacataaaaacacagcaaaaaatattcctatttcctatttccttttactctattcctatttgctatttcct

SEQ ID NO: 47563 - DNA, 665 bp, Oryza sativa
cactagcagtttagtactgactgaccaacaccaccagagaccaaacatggcattgagggctggtttggttgggggtctaaattggtcttactaatttttggcaatgccaaattttatcaagttttggtatggctaattttggcaaggtaaagttgcgtttggattgaacccaaaatagcctaacttaactattgaaatgatctattttcttaggcatgccaaaatttgacttcaaaccaaatagacactaaatactattaaaattactaaatattaataagactaatttaggcctcaaaacaatccagccctgaaggtagggcagagaatccggagtgagatgcaaacaaaaaaaaacctgaaaccacgttcatttcagctcaggcttcaggcggtagctgggccagaaaaaagggagaaacgaaaaagggcagggcaggaccgcaggagacggtgcacttccgctgacaggtggaccacagactactggtttactcgtagtatgatgaaagaggagtagacgacgagtagttcttgacgctagtggtggtggagcctggaagattcgggcatgtgtagattctaatttttttctttaaatttttaactttttcatcacaataattttttttacatataaatctttaactttttttgtcacatcg

SEQ ID NO: 47564 - DNA, 653 bp, Oryza sativa
cattcccaattaggtggactgaggatcaatcctaagatttcattcgtggcttgtacttaactaaaaaaaatgtttttttccctcagtgtttgtcccaatttcactatcatattaatctgtttccgcaaaactaatataataataatattattattacagatggttactgatttcaaattttagtttttccaatttctgtcggtgtgacattgaagttgacagtttagttaaattcataaatatgaaaatttcctaattgtttccgttcatttccgaaaatagtaatgaaataattatattgtttccatccttagcccgtggtgattttattaatctcaagatatatcagctaagtcttttggatgtactcataggggtagcgtgtacatgtcagcatgtgagcacctgcgtttcttccatgtttgaaaaaacaaaacaaaatcttatgcttttaaactttatatatatactagaaaaaaatgctcgtgcgttgcaatgaccaacgggagaagtttattttaatcttattattattgttatatggtttagttaagataaaattcactgtgggagttcgcttggatatatatatatatatatatatatatatatatatatatatatatatatatatatatatatatatatatata

SEQ ID NO: 47565 - DNA, 709 bp, Oryza sativa
cagaaaagatccatcataaaaatataattagttgactcaatcaaatagtatgaagtaacagttttgatataaagtacatgtagagatgggaagccaatcaactattactagctaagcatcatgtttcatgcatattaaatccatgataagaaggcatggaataagttatatacttgttcaagcaaaaggcacatgcactttttagccacgtaagtagcacaatttcttgtatggaagtttcttatctcaccatgcaaagaggatatgctaccagcatggagcgtggaagtgctgaggtgaagtaccaatggatggaatgtgtctaaagtttatggtagtcatggataacagggctgggagcttcgcataagtttcaggagataatacatagatttcaccacatgaatctaaaaagaagaagaggataagtcttgaacaagaagtgtatatatgttgcatccttttttgtattcatgtgactaatagagattaacatcatgttcagtgcatatgaaaatgaaacttcaatcttcccaatcttaatacaaaagatatgtgctttgcatattctcatatgaaatgtctctgtgaagtgacttagtgaaagagagaactgatgcatatatatttggtagtaaaaaagaataaaattctggctaaagagaaaggagtgcatatgaaaatgtctccgtgaagtgacttagtgaaa

SEQ ID NO: 47566 - DNA, 2196 bp, Oryza sativa
gggaaatgaactacgtgtatgtctatataatccaaaccaaagactatcttaggataaaaatattcgtctgggatttatccatgttattatgagtaaatttttactatgagtacttttcctacaacagtttctaggtatgcattacacacgaagtttgcactacacattttttttcaggtttaaaagcagaaggcactaaccatgtaactaaaaataattttaggataaaaatgttatgcaaaattgtactactagtctaaaagtcaagactggatagaaaaagatgaaaaaaccgcttgtacttctacggatccaaggattctttttttggaaaattagagaaattcaatccaaaggaatagtttttatgtaggtcatttggtttttagatttgattcaaatgaatttcaaaggtaggaaaaaaaccttcacattttagatgaattcgagcataaggtctaaccttatgttttcatattcttttaagagtttcccatgcaacttctctctcccttctctatctaatatatcaccatacagtcttaattttcatatatatatttcttttttaatcatgtgttttttctattcctataatttttagtttctattgttccaaagaaacctataatcaagtactactcccttcaaaatttatccagaatataatactcctagcacacttgctcttttatcttaaccaatcacaacaatatctcatttaatatattagtctacattctctttttaactaattataacattattctatttaatttccatgtacttatgcctgactcgtgaagttattactatattttaggacaataagtaaaaattttaaagttggctatgtctaagggcatgtttaggggagcatctagctattgtagcttctctcagaatcataggcttcccaaacagttcagtttttgatctagattctgataagctgtagctgtagaattcagaaaatgaactagaactcagaagctggaaaacctagcttttctagattctcataagctggctaccaatcagctgcttcttataatcttaagctccccaaacaggccctaaagctcaaacaaacatttttttataatggaaaaatccattcaatagaagttatagccacttattatattgtctttgacacacatgagccaaaagtagtatctaataaataatgacgaaaagacaatttagccattaaaatgaagagatacaacttattcaaaactcaattctatatctccaaagttgacaaatatgtgcatgattgttgtctctaatttttggcatgcaaaaataaattaattgattgtccttatcacacctttgtaacttggctcaaaaccgaagccaatatataggatttagatgtagttttataaaagaaaaaaaatcattcctactaaactatatagccatgcataaagtagatactccgagtaaaatatatcttttaatacattcaaaccaacttctaaacagatgagtaaaactatttaatatcttcagatcaaaagtaacaaacataattatccaaagaaattttagaaaaataacaaacaaattaagaataaataatggataatttcatcatgcataaaaaacaacatttagtattaccatatcaaaatccttcttactaaattatcttttattagaacaacccttttagctgaaacataccgtcagcatataactctctagtctttacctgttccactgtgaaacgagagaggcttaaagagagacgcagctttagagcagatataatagcaggctataaactagctataaacatattttaaagagataaagtataagagagaagagcagtgaactacagatctatagctagctgtagcacggacagctttagagcaggtataatagcatgctataaactagctataaacatattttaaagagataaagtataagagagaagagcagtgaactacaaatctatagctagctgtagcacggacttcaaaacgtaatgtgtgtatgacaggtagggccatgcattaatagcatagtaagcaactattgtatgaaataactattacatttgttataaatgatttggacctagtagttgtctatactattaaacttgctcttacagtacacagtctaaagtaacggcagagttagctaaaaaaatgtcatgatataacgggt

SEQ ID NO: 47567 - DNA, 648 bp, Oryza sativa
aagatgttttcaccggtattttggtacgtcatttgtgtttgatttgggttttaaatttggtcgtttttaaatacctattcgtgtttgagtcggattctaagttcgtttgcttttggaaatgcaaaaggagtcgtataagaaatctttttaaaaacttgcatgctaacttgagataaatgttggactcctaattgcagctcatgattttctagaaaaaataatcaagcgaattcccatagtgaaattcaccctagccaaaccgtataacaataattaggttaaaatagcatttatctgttgcaacgcacaagcatattttctagacaaaactcaattttgaagattattttagaatttttttaatttagcttccttctaatatttgtttttaagtcgttaaatacacacacaaataagcatgtgattaattgagggtggattatttaaaaaatatttgttttaaaaagtaacttctacgtatattttatataaaaacaccatttatcaattttaaaaacatactagcaaaaattgagaaaataatcaagccgatcctttagtcaagagcagacccgaagaggctagcatggggtagcgcctgacccagtcagcatctagctcagttgagaacttgagattcgtgagata

SEQ ID NO: 47568 - DNA, 1786 bp, Oryza sativa
atagccaatctaatagtcaattcatataatagttgtttaatatactattaatatatggtcccatctatcatacacaccgcgtcttatagtccgtgctgtagttggctacatatttgtagcccgctgctcttctctcttatcttttatctcactaaaatatgtttatagctggctaatagtctactattatacctgctctaagcgaagttacacgtaagcacatttcagttggtcctctgcatgcattcacaaataggagtatataatatatcgaatcttcagtcgagcttatgaattccggtcctttggtgcattctcggcagagcattgcaaacgagattgtgattaagaaactatgcattccggtcctttggtgcattctcggcagagcattgcaaacgagtaagaaaatatgctgacataaaatatgctgacataaaaatcttatagagagcctataaatctctacaagagatccatgtcaacatattttcttacttggaagatattaaatgaagagagagagcaaaactatctactaacctggagatagtctatagagaaaaacgaggcaatgcattagagagctatagataccgatgtagacatactattgaggtgatttactattaatctagtctattgctgagatgtacatgttttatagagagcaacttactttaccattgcgggtgctcttaggcagtaccagtttttattaacggatgcagatggaacggtccagatcagccaggcgcactgttcatcgtactgtagcagaaaacactgtagcacagaatactgttggtgtggtcactgtatcgctagatgactagatctgagccgttgatcacagaaatggatggctgaaattgcatgcagttcttaagttgcagtcatagctataactgcacctgatctgaatcggagttagcattggtcgctggactggacgaccaagggggttcggaatttgtttctctatccgaaccccgcgggtcagaaatttctttccctatttctcctagttattgcagcctgtattgtcaccttcttcgacgacgtttctatgtcccaggtcttttattgagggtttccttttctatttactattataaaaattaaagatgttttttccggtattttagtatgtcatatgtgtttgagtcagtttttaagtttgttcacctttggaaatacatattcgtgtttgagttggattttcagctcgtttacttttagaaatataaaaggagtcgtataataaatctcttttaaaaaactcatactaacttgagatgaaacacataatcctaattgcagctcatcattttctaaaagaaatattcaagcaaattcccacagttaattttaccaaacctaaaccatataacaataataaaattaaaatagaatttacccgttgcaatgcacgggcttttttttctagttcagaaaaaaggtaaaattgcataaaccactccaattaaataaaaaacatgaatattatgaaatggtctgatattaaataattagaaggggtgaggacctagacgggctagcccacctctgttttttcctgtcttctgcggtgctacattatcgccattgttgcaagcatcaacaattccaaactgtttacatttcatttgagactctgggattcagtgattttgcaaacctggacgagtgagggggtcggacttttattctccgaccgattttccttttcttttttttgttgtttttcctatcgagggtatggtttagagatttatcgctttca

SEQ ID NO: 47569 - DNA, 694 bp, Oryza sativa
ataatagtctatatttaatatttataatcaatatccaaacattcaatgtgatagggacttaaaagttttagtacaatctaaacaggtcatataattgggtccatagccatgcatggtaaagtacggactttgcgacagttgagctcccatggtcgctcattttccctaataaaccaaaactacgtgttctttgcgacttaaaaccaaatgttgaagaagaaattacgttgaaaatagcttaaaatcttcttcaaaattgagtttaaaaatttaaattttagcgttggcttattatggcaaccaatagagctctttgatgtttatgttctctcttcaggcgatttagcagcagagaatgggaggttgcaagctgaaccaaattcttgcttctgccgttctgacttcagcggcacatatgtacgagtgaatagcactagtatcagcgagaagaattccaaaaaaaaaagaaaaaaagtggaggtagactatgtgtttatgtgtttagttccaaagttttttttccaaacttccaactttccatcacatcaaacctttcatacacacataacttttcagtcataattttttaatttcaactaaattttaaactttggccggactaaacacagcctagctagaggaacacgcttgcacagaaagtgccggtgctattgacatcacagtccagtttttt

SEQ ID NO: 47570 - DNA, 1954 bp, Oryza sativa
atggggagtgatttccccctctttattgcgcgcggggacggcgggaggcggcgggattcgcggcggcggcggcgctagggcacgggcaaggcggcgggagcggcgcgaggtaggggatgacgggtgggccccacccgtcagcgagggtggcgggcgggcccgcccgtcagcggcgcgcgcggggagggggccgattgggccgcgggggacaggagagagaaagggagggaagtgggccgagccggcccaagaggggaaggggggggggaaaaagactttttagggtttttctttttataaaacccttttaactttgtttatttcttcttaattattatttgtgctctgaaaattccactaaaatttatttacgcattttaggcttttaggaaatatacaaaaatcctccaagccttattcgacttttaactttgcacattttaattgttggaggctttcacatggattttacttattctatgcataattttgaggatgtattttagagtcgtttcgggacgcgacatctaagcagcggaaaataaaataaacggcgcagacggctccactccacaggcaacttgaccagggctacacctaatcctccacaccatcagcatcattgtagaactcttcctctgatgaatgatcgcaaggtgagtatatgacatactcagcaagccacgcagcaaatatgcaagtgcacaggataacaaaggatcgcataatagggtttcatttgcaaaagcagcatttagcaaacatttgagaatttaataaaacagttaagtaataattaaacaatattaatccaacactatacaacatacccggctgtacagatctatctccaaaccaggaatataccattccaaaccaggagctaaacaaattattaccagttatagtatcttgcattatgatgagaggtgtgagacaaatcacgaaagacattgttagaccccgccataacccggggcacgggtattcgaataagtttactctgattagaggtgtactactgtacccacaagacacacgcccacatcatgtaccatgtgcctcaataccaccacggtacctcggaaaggagttgtgacaataccccttatacaacacaatccattgcagcgcaccttcctggatcataatcacccccttataaacaaggcatggactccccagcgacccccgtgggcttatctccgccacttctcagtctggtgccccgcaatgaaccatgctatacaaaagataaagccgttgcccatgctggcttgtggttggcacggctaatgtttcacaaccgaaactcgtgaaccggtccttaattgtcatgagcacgaccatcaaaaccatatgctcacaacccaccattatcaggttttagttggcacattaattaattaaccaatcacgattgaccatcgtgaactatcattaagccatcattaaataaaagtgaatcataagttatcccaatagtgtgctaatgtttctaagcagggctaagcaatcatatctaatatctagctgaaccaatatatatagcccaactagtcaaattttaataacccgaggtatcaaggagtaaagtaatcaagaacaaaaagggctataacaaacaataggttaattccacccaatgacattcgtaaatagatgcaatagttgaatagaaacaacagctttaaataggatcaacatgctcaaagggttgttcgggatctgtgtgacttgccttgctggccttggaactcttcaaactcttctcctgcgaaaacggactctccggaaacgtcggaatctaaacagaaagaagcaaaaacaccaaaacaatacataaacaagcatgaactgtacatgtggatatttttaacatgtagatctcaattttaaaaaaatttagagacttgaaccaactaaatccgagctaagatgaattagttatgat

SEQ ID NO: 47571 - DNA, 670 bp, Oryza sativa
caagtcggctgtattattagccttactctaagcaaggcgctcgacgtgggagcaagggaaagtggatccctcggagctcttacctcgaggggacagtgacactgtaaaatcaaagtgtttgattattattttgtgatggacaattggtatttcagattatttgttttgatatttggagataattagtgaaatggttttgaagatgattggattttcaggttatggacaggattgagttgtctaatgattgcagtcaaaccggctgggttaggccagtcagaccgaggctatgcgagcagtcagaccagttagcatgcggtctgatcggccgacgttgtgtcaatttcagtttagggttgattatttggatatccgtgaaaaattcatgtttatggcttagtcaacccaccgtgacacgggaccactcaaacggtcaaccgaaccggcagtttaaaacgactctattagtaaataacgacttgggatgaccgaatgaacgaggctttggactatacttcgtgcgaacgaacgattagcggctagcgaatggctccggcacaaccagtacacttaactcagtttgcggaaatggcccggtacgacaacgataggctagtagtgattcgagcttaccgctgcggctaggcaactcggctaccaagcgacaagc

SEQ ID NO: 47572 - DNA, 1734 bp, Oryza sativa
tcgactctagaggatccccaacataacccattacagcgcacctttcctggatcataatcacccccttttaaaacaaagcatggactccccagcgacccccatggacatctcgccacttctcagtctggcgcactataatgaatcatgctacacaaaagataaagccattgcccacgctggcttgtggttggcacgataaatgtttcacaacagtagctcgcgaaccggtccttaattgtcattagcacaaccatcaaaaccatatgctcacaacccaccttatccaggttttagttatcaattaattaacatcacacgattgaccatcgtgagctaccattaaatataaccattattaacaataataattatgtaatataatttatatttaaccccttttagttagctaacgtttctatgcagggctaagcaaacctaaatatagcatttagctgaaccaatccaatatataaggttcatgctaatcaaattataacccataggaaaataaagtcatcttcggccattaattaactgggaaaggttcaccacccgatgacattcgaaaacaatgcatagttgaaataaaataatagctttaaacgggatcaacatgctcaaagggttgtttgggatctgtgtgacttgccttgggcttccacaaacgcttcggaaccttcctcaacagaaacgctttcctccggaacgtcggaaactaaagcaattaaacaaaaatcaacaaaacagtacaaaaacaagcataaacagtacatgtggatatttttaacatgtagatcttgattttagaagaatttagaaacttgaaccacctgaaacagatctacggttatttagttatgattttctgaagttttaatctattagaaaatcgagaaaaagaaaagggaaaggagatgatgacgtcatgctgacgtcagcaatggcggccggttagggtttgcgagctcgccggagctagggcggtcgaccgggtgattggaggacacctacgcgtagagaaccactacaacaaaacaacccacaaaacaacccaaaggagacatcttatttgtaagatagagacgttttatttcgtctcccacagataactgagacgcttttataaagcgtcgtaggatcgtctctgtttgcaccgtcttaaaattatggagacgctttttaaagcgtacctatattatttaagacgttgctagagacgtgtaaattgcatctctacaaaaatatagagacgcttttatataggcacgcacatcttaatatatttgatattaatgctttcatctaggctcgaacacagcacctgcaggttacaaagttcatgcactaaccaagtcattaacgtgacaatcttgaaggtaaatagatagttttttttatattgcaactctgcaaacatgcgttctgtagcagttctcttcttttttaatctaagactgaatattaaatatttatttttttgtccaaataattataatattattataatggtatttgatgatgacgattaggatcagtgtgtttattttcttctttctctatataaataattatatattatctaataacgatgacacggatataataaaaacgtctcaaaactcatttctacacatgagatgttccaaaaacgtctcaatattcatctctaaacgatttaattttgtgctaacctgtaaagcgtcttaaactatatcctcaactaataaagcgtct

SEQ ID NO: 47573 - DNA, 743 bp, Oryza sativa
agatcgtcgggtaagaaaccatctataaaacagacaatgttaggatggtgaagaagagccgctccatgtgcatctcgcaagttaggatggtgaattgaaaagaaaaaaataagaagaagagcctctccatgtagttgggccacatggcaccacaacccaacagtgtgtgatcggaccagtgcaaacatgtaaaagagggaaaaaagaaaaaataaagagacaaaaaattactttttaaaattcttcacaaattatccagggcaagtattgtgaccacatatcttatgtttcgagaaactaaaaataatagatagaaaactaaatgacagaaatatctgctccttctttctaatattgaatcaaactctataatcctaataactattttttaaatattgtttttttttgcttacattataaaataaataatatctagatctttcaaattttagaaaaggcaacgattatgataaaacaaaatatctaaatttttatgccaaatctaaacacaaggatactcaaaatcgtaaagaagaattgaaatattagtatgttaattatgtggtttttagaaatcatacacacaggctaatcaactgacactggtggagaaaccatctttcgtccgtcggccaatttccacaatagtcccggatgcaataaaaaccggggctaaagatcatctttagtcccggttcgaatgctgtcagggcctgtcaggcccccccgggatctttagtccc

SEQ ID NO: 47574 - DNA, 756 bp, Oryza sativa
tgtgttgttggggatctgtgatgtttgagatggatctgtgatgttatattgggggggtgatgtatctgtgactagaatatatctgtaatgtatctgtgtttcagagggcatggctagcaaatcctaagactagccaatatttagcatttatttattttttctgaaattaactcatcagtgacgggtcggaacaaaaatccgtcaaaggtaacctaacctgtgacggactagcaaataaagacccgtcagaggtgacctacttgtgacgggcctttacttttggggccgtcacaggtagatcacctgtgacagcttctaactacggagacctcaacctctgacggcctttatttaaagggccgtcagagatgagtcacctgtgacgggtcctaactcgccctagtctagcggagaccaacacctctgacggccttctagtaacttgcccgtcagaggtgggtgtcacctgtgacggatgtccacccgtcaaaggtgactggactcaccagtgaccactgatcactgaccatgcgcgaagccgtcaaagatgagggttggggcccgtcacagtgtgccattggccagtgttgtgtcggctgatgacaaacatgaaagtagatatcatatgattaagtggctgatttagcatttctcaaggattttggtggtatagatttcagtgtatctaggtgctttagactcagctttgcttactaaatgggcggttaaagtagagtttcataataacagtttgtg

SEQ ID NO: 47575 - DNA, 607 bp, Oryza sativa
acatgagtcaaaaaaaccgtacacaaataattattcttacaataatgacagtcatacaataattataagatatctttattcatacaaaaatcataaaatattacaccaaataattcttaaaaactatttgtaaagttttaaactaattttaatgtgttttacttcttttaattttcattttagtttgttttctattatttaagattaattttcactagagttttccttctcaactattttataaaaacttgtttagcaaatgaactaaatttctatatattctttcttccccacacacattttctctctcatcaacttacaactaaattttggagacaaaaaaagtgtgcaaaacataggtgcaaatgtagtatgacaaaaaaaaacattggaggatgaagttgcaaaccttttaggcacctccgatttgtatgtaatcaccaaaataaattcaatagaaattttggcatgacctcccctcttttttgaagaaattttgaagcttactcgggcagctggaggaggaagaagacatatatataggggtgggactttagtcccggttggtagcaccaaccggggctaaagatcaccgggatctttagcc

SEQ ID NO: 47576 - DNA, 1155 bp, Oryza sativa
gcaggtcgactctagaggatccccagatgcattgatcttttttccttagaaaataggcatgagagacgttgggagttcttttaattttttcattgctgcagtttctgtcctggctggctgttactactatggtgaattgaggcatagagcgacactgcagacctaaccactatggtgaattgaggcatagagcgacactgctgacctaaccaaattttgctacttactctaacttttaaaatctatctttctaaagatggtcgtctcgagccatcccattaggccacatggcagtgttaaactttgagataaatctaaaaaaactatacataaaaaagtagcaaaaaataaaagacacaacctagagacttcccaattatctatcctttttagataaatatagaatatttataaaaaaatttatctatcctctttgagataaatctagaatactcatacaagaagaaataccgagaagcaaacaaaatatctttcccctttgcatctatctatctcctgttgattggtttcatgccagctgattgacttgagcgacacgtggcgagatacaagcggcggaaagatcgtcgggtaagaaaccatctataaaacagacaatcttaggatggtgaagaagagccgctccatgtgcatctcgcaagttaggatggtgaattgaaaagaaaaaaacaagaagaagagcggaaagatcgtcgggtaagaaaccatctataaaacagacaatgttaggatggtgaagaagagccgctccatgtgcatctcgcaagttaggatggtgaattgaaaagaaaaaaataagaagaagagcctctccatgtagttgggccacatggcaccacaacccaacagtgtgtgatcggaccagtgcaaacatgtaaaagagggaaaaaagaaaaataaagagacaaaaaattactttttaaaattcttcacaaattatccagggcaagtattgtgaccacatatcttatgtttcgagaaactaaaaataatagatagaaaactaaatgacagaaatatctgctccttctttctaatattgaatcaaactctataatcctaataactattttttaaatattgtttttttttgcttacattataaaataaataatatctagatctttcaaattt

SEQ ID NO: 47577 - DNA, 1206 bp, Oryza sativa
atccctcaacaccaaacaagtattcaggcttgtagcgcggcatctaaagacaagtgaaaggagggagttaagacatctatccaattaatagcacaagtttttggattaattttagaaattcaaagtaaaaggtaaataaataaagtaaaccaagtttgcaagataagttggaaaagtcagaaacaatattacaagttttatacttttgaataacaggttccaaaagaaataaaagaaagttataaaatcaacttgctaaatttattttattgcagcaagattaaatgaaacaacattgtaaaacttttgctggaaaatgagccattagtatagtaatagatgtacagtactaataacactggaataaattttgaatgagaaccattaaaagagattatgaagtgcatgtgccattagtttggtttaattaaaagagaaagggagaagaatagttctacttttccaatatttttagagggcttctatgggtaaccatttggcataacctagggtcaagggagctctgataccaacttgtcatgcccggaatttctatccaaaattccaaacgcttacatgtgtgtaaaccctcgtccaggaatcagccgaggcacacaataacaaattgataatagagtacagttattactctaattattaagcgtataaaatatcattacagaggtagatagttcctctcaatcaataaagatctaagcagcggaaaaagataaacggcgcggacgactccactccacaggcagcttgaccagggctacacctaatcctccacaccatcagcttcactgtagaactcttcctctgatgaatgattgcaaggtgagtatatgacatactcagcaagccacgcagcaaatatgcaagtgcacaggataacaaaggatggcataatagggtttcatttgcaaaagcagcatttagcaaacatttgagaatttaataaaacagttaagtaattaaacaatattaatccaacgctatacaacataccctgttgcataggcccaaccattttgaacaaccatcccggctgcacagttctatctccaaaccaggaatataccattccaaaccaggagctaatcaagttttaccagtatagcatcttctattatggtgagaagggtgagactaatcacgaaagacattgttagaccggccataaccgcgggcacggctattcga

SEQ ID NO: 47578 - DNA, 599 bp, Oryza sativa
tgcctgcaggtcgactctagaggatccccaggatgtggtatgcaagttatctattaattaggaatagtttgttagtttccttttatctttacggaagtgcgtttagtgtcctataaggactttatgttttccttttatttttaggaaagtttctttcttgtcttacaaggactagtatctccccatgggtataaatatgtacactcggggtcatcgtaaactatctctcgatcaataatactctcggcgcatcgccaccctctttaccgaggttttccttatcattcggcggaacttggcacctgatgtggggttgcataaactttcgatctccggcgaaggggtaagtcctacgttccaccggacctggcaactatattggcttcatcggcgtaggtcaattgctgcctcagtacgttcgatctcttggattgctctggttcggtcgatatattcacctacttatctatcatatgtctctattaatctagtcttagcatatcaatgtagctatatcggacgcttctagctttaaggattgcgctggtatcagctaaatcgtgttgctagattagattaacttagacattcaccaccct

SEQ ID NO: 47579 - DNA, 737 bp, Oryza sativa
gtaccccaagacacagccccacatcatgtcaccatgtgcctcaataccaccacggtacctcggaaaggagctgtgacaataccccttgcataacacaattccaccgcagcgcacctttcgtggatcataatcaccaccttataaacaaggcatggactccccagcgacccccgtggggcttatctccgccacttctcagtctggtgctccgcaatgaaccatgctatacaaaagataaagccgttgcccacgctggcttgtggttggcacggttaatgtttcacaaccgaaactcgtgaaccggtccttaattgtcatgagcacgaccatcaaaaccatatgctcacaacccaccattatcaggttttagttggcacattaattaattaaccaatcacgattgaccatcgtgaactatcattaagccatcattaaataaaagtgaatcataagttatcccaatagtgtgctaatgtttctaagcagggctaagcaatcatatctaatatctagctgaaccaatatatatagcccaactagtcaaattttaataacccgaggtatcaaggagtaaagtaatcaagaacaaaaagggctataacaaacaataggttaattccacccaatgacattcgtaaatagatgcaatagttgaatagaaacaacagctttaaataggatcaacatgctcaaagggttgttcgggatctgtgtgacttgccttgctggccttggaa

SEQ ID NO: 47580 - DNA, 1912 bp, Oryza sativa
gtcgtcttcgatctcctttgcttgcgtggtttccaccgcatctccagtaggtacataaacatcttgagactcctctttcatagcaatgacctccggagcgttggcttctttcctcacccacaccttcttcacctttttcacttttttcacctttgatccaccggaccgattcttttgtgggaaacggtcctgccttgggttagacgaatgatttagcactgtcctaggtgattccttccatccttgataatacggcataggtggttgaggcatccatggcatataatacataaaaggataaccatatagtgacattgaatatagataccatggcatcacaaccggaggtttgtatggagttggtatggttgatggctccgattgctttgatgtttgaccaaatctcttcctacgagatgatcttggtctttttgaatcactagtttgattatcaactcgttgaccagctaatcctttcttgtacttagccataagcatctcaaaagtgagcttcagttttttggtcttttgggaactagatgactcatcctttgcaactttacgatcttcggccttcgcatttttgatcctattcttgggccgaggatccccaataataacacttgtccctttctttttgtcaacatcaatagaattaatagggagaggatcactaacaatttcgatcttagccatagatgtaaccgaaatagtttcacaagtgaccgatgaagtatcaatcggtctttgctccattaagcttgcatctttgaaataaccatgaaactcatgctccatttgtgaccatgtagaaattgaattaggagcaagtaaactataccatgtagatgcaaagtttgacaaagaaagaggaaacaactttaacttaagcaaatcatcattaccggccttaccacattgatcaataaattggccgttatgctccattgttgttctagcatcctctcctatgaattttgtgaagttgagcacctcaaatccttgtgggtatgggaccgaatctatgtgttcaggatacggtctttgatatgtatgtacagctactttggattctatctcactactatcccgcaagacattgtcactatcttttccaacatccacatgaccgatttgtaattcggtcttaggtgacaaagctatttcacttgagcttgtgatacaatccgaaccgtcatttagttcggctatatcttcgatggcattattctctaagctagcaacacaatccgaaccattacttggttcggctattccatcattgtctaaactagtaacacaatccgaaccaacacttggttcggctatattggttattgcgttatcgtccaaactagtaagacaatccgaatcaacatttggttcagctatactcgttacagcatcattgcacaaattattaccacaatccgaaccattgcttggttcggctatacatgatattgcattttcatctaaactagcttgcaagctattatcattcactcggctttcctgagccagagcttcatgcaacacatgatcaatatcaagaaatatctggccattcaatttctctttatagaatcaagcaatccatcatatgcaatgttggccaaatctttgtcagttattttcaaattgaaacatcggtttttaacatctataaaccttttaatataatcagcaacagattcattgtatttatgcctaactgatgttaaatcagacaacttaaacttagtttcattagcataaaaataatcatgaaattgttcttctaattgagcccaagtatgaatagaatttaaaagtatcactattagcctcaccacattgcgccagaaattgacctaaatgctcccatgtggtcttaccatcctcaccactaaacttggcaaattcgggaact

SEQ ID NO: 47581 - DNA, 1805 bp, Oryza sativa
tcatctgttgtggtacgtctttgttcgttgagcgcatcacgccggtgtctttttcctgaatccactaatatgttttcatctgtcgtgtacgtctttctccatcgagcgtgtcatgccatcctccttgaatcccagttgttctttgcatactcagaatcggagaaaagaaaaccaactcagaataggagaaaaggaaaccaagttgtatccgttaatacaacaaaatcctcgtaaagtttcatagcttcaatatgaccaaatcggataacaccataagccaaaaacaagaaccgaagcttaagaaaacaaacccaaaaatttcataagaaaacaatatttgctctacctctagccgcctgagggacttcaccctcttcttcagtggctacagggtgggctgctggattaggcacctccgaactcactgtcgctagatctgatagccacaaggtgatgctggccgagagaaagcaggaggaatcgaagaggacatctcggatctggatactttgagcggcggcggcagcgtcgctggcctcatctgcctcctctcctcaccgtctttctcgtgcccttctgtccctgatgaggctaccgaagctacggggtgggtggggatagagacatcggcggtggaggaaagtagcgagcggcgtggctagggacggagccagtgttaggagcgaaaaactaaaatggagttcagagttcagaactctgaatggcggagtggatggcgccgcgtcaggctacttacgccgggtcggtggggaccgatggagagagagagagggggggagggggactgagagagagataaagagagagagccaagagagagagagagaggagagggtgcagtggaggaaaaaggaggagagaataatgacagaagagagagatgagaagaggagaaggacgggaggccaccggtgttcggctcgactcgattttaggagtgccttttttttaaaaaaaaattccaacacctataatatattagggttgtcagtttttaattaatggtcacctataatatattaaaggttctattttttaaaaaccattatctcagatgccagtttttctttagaaccaatacatataattatttaaatgtgtcagtttttgtattttcaatccacagaggtgagaaaaaaaatatagatgccgatttttagcactttcggtacctatagtgccgatctctatgtgcttttttttaagtagtggcaatccgccgcgtcctttccgatataagcctgttcggttgagtacgagtgatgatgcacacaaccatcagaataatttatccgtgttgacgtgctaaaggcaacatcaatgcatatagctaaagtagtacatatagatgggacactttaactattgcaatattcacaatgtatacaggcagtaagtagtaggaagaggagagaggaaatagagacaaatgacatattttattctatatgggcagctcatatgcttatggatgactttggctatttttctcctatgaactacttccacaatgtggttaggtagctgaatgtattattttatagaaaaagtatgaattaccccccaaactatcgcggcgtctgaattacccccctcaactttcaattccggacaaattacccccctcgacccaattcagagcggttttgtcctacgtggcgtacgcgtggcaatccagtcagcattttcttattaaaaaaatgggggggtccacctgtcatcttccctctttctattgttctctctctctcatccacaagctgacaagcggggaccacagggat

SEQ ID NO: 47582 - DNA, 550 bp, Oryza sativa
tttgcccgcagcccttgacgccataccttattgtactatggcgaaaggcatggcgtgtggcaaaagctgttcacccgcagcccttgacgctgtaccttattggtactatggagaaaggcgtgggtgtgatgaaacctgttcgcccgcaacccttgacgccgtaccatattggtactatggcgaagggcgtgggtgggcgaaacctgttcgtccgcacaccttgacgccgtacctcattggtactatggcgtagggtatggcgtgtggcgaaacctctttgcccgcagcccttgacgccgtgccatattggcactatggcgaagggcgtgggttggcgaaacctgttcgtccgcagcccttgacgccgtgccttattggtactatggggaagggcgtggcgtgtggcgaaaggtgtgcaaaggcttgggtggcttcgtagccccctaacttagtcttaaaccactttcatccccagcccttgtcaccgtaccacgcgggtattgtggcgaagaatgtgggtgtggcaaaaggctctaaaggctagggtggt

SEQ ID NO: 47583 - DNA, 888 bp, Oryza sativa
tagattaatttaataaatgttttgaacttcatgtaatggaaataaatttgtgtgttgaacaattaactgatttcaaaactagaaagatcattcatggtcagaaggagtaagaactgctacccggcccaccctgtgtccatcccgtgactcatacccagaagccaggaagctagaagaagaacgttatatatatgtttgcgtttgagtaaggggataaagtaggattgattgtataatcaaaattttaaatgaaaaaaataaatattaataatggttagagttatccaaattataaaaacagattgaggaatatccttttctagggtaattgaggaatatcttcactacctacttattatagaaaaatattgaagtgtttcttttatcatccatcatcggtggcatcgcgtgataaggatttttgcatgtttgggtggattttgatatatgagaatttgaacaaattttgaacaaggaaatactaataaaaaaagaaagtaattcgaacggaaaaattggattcgctctcaaatttctgaattgagtttgagcaaatttttggagaagttcaaggtacaaatctaatattcatcctaattttagtttgtcatgttgaacgatgcacaggcaccttttttttaagttacattaacgtacaggacggtttcgtaccgtttccgtatttcatgacactaagcacattattcatatatgttcataagcataacaaaggacaacagggaagtgcatagaaatccctgcttcttgaaaattttaaaaaagtatatttcccactttgaatcctaaaatctaataacataataaaggacaacatttaacgtggcctcgaaatctgtactttttgggaattagaaatgcccctatatt

SEQ ID NO: 47584 - DNA, 614 bp, Oryza sativa
ttacgatattcatgttttaccgcacatctcatcaggaacctaactttagaaaatatatatatatatatatatatatatatatgcacaccatacattacatgcggccaaaacgaagccatccatccatctatccatgatccatcctattgttagtttttgccatgaaatcatgaacgcgtgcagtaatacacacccctagaacgcacactctacccagccatattaatcctctcatatctttgacacacgctacactataaaatcagttatccatagccaacaattcatcacagattcaccaaccagaagactactcccgtcgtcatctgtgtgaggctagctagctctagctcgatcgatcgacatggcgaaagctagggtgaacctgaccgtcctcggcctgtcgtccctggtggctctcctcgtcctcatcatcgccgtcgaggatgtcgccgtcgtcgcgcaggtcatcgactactcgtccatgaatcgcgaccatattcctggaacaccgcagctcaaccaccccggcgacatcgctaacaaatacacgcgtggatgtgagaaagagcaggcgtgcagggatagcaagatgacatgatcgatcgatcgat

SEQ ID NO: 47585 - DNA, 663 bp, Oryza sativa
agatacagatttaatgcacccaacaagcatgaattgattgtgagatcagaataaaaactgatagcattattatatttgttgccagaatatttttctccaaatcatattaatgcaagttgtgtaagctaaacaaactcatggcataataacatatttaagcataataaaattaagtaacaccagtttagcatcaagaagacctgaaacaattccaacaggcgataagtttcttagcatctacagaaacatatttatacaatctgtgaaagctaaaaacacaccacagtataccccatccaagcataagagtagcactgatttagcttttcaactagacttgaaacattccctacaggcactaaattcactagtattgtggactgtggagtaatgctgatattgtatcaattatgcttcatgggcaagccaagatcaggcatgcttcatgggcatcccagctgggcagatgcaatgggcacaatctgtcaggcacactgttaatcatacccagaaaaaaatgagctcagtttctctaaataattcataacgacctgaatcccaacagggtttaggaaaccaattacaacatatagtacatacataccgaatggttatagtgtaattcaaagtaatcgtgacaagaatctgggcgctggaatacaa

SEQ ID NO: 47586 - DNA, 589 bp, Oryza sativa
ctgtgtttagttcgtgggctaaatttttttttaagtatacggacacacatttaaagtattaaacgtagactaataccaaaccaaattacagattccgcctgtaaactgcgagacgaatttattaagcctaattaatccgtcattagcaaatatttactgtagcaccacattgtcaaatcatggcgtaattatgctcaaaagattcgtctcgcgatttacatgcaaactgtgcaattgattttttttcgtccacatttactgctccatgcatatgtccaaacatttgacgtgacgaaaaagttaaaagtttgaagaaaaaagtttgaatttaaacaaggcctaactctgctcgaagtccgttttcaacgtaaactatatgcaaaaccggtgattttttgtcaactttggaaactggacatgacatcctaaaccaggttttatgatagttttgcttgatattatagtgatttttcagtagcatgacctttgattatgtaagtttcatggttgtgaacctaattgagtgatacatatttgcatcaacaacataggtatatataataattaataagagtatgagcaaggaaag

SEQ ID NO: 47587 - DNA, 648 bp, Oryza sativa
aaacactaaaattgtggaattgttttgtttagcccaaaataactttgctgcatcagcctgtcaaaaaagttcacttaatccccaaaggtattcatctattagactcttaagtattgaattccttgtaaacaaactcttaagaatatagatatactctctccattaacaaataactagcaataatcacgcgctacgctgcgtgctcgataacaaaagcaagacaaaacatatatagttgtcaatattccgtgaaaacaaactggcatacacatcaggttttccataaagattcaaatatgaattgttcctattgatctgtctatgcactatttgtacaatcatatgcatttcagcaaaattagcaaccatacaatgaacaaaatgctgtaaccatacaatggagtggatgggagaactgaaacggtgctataaccacaatcataaaaaggtggttctttatttgcaacatcatcgcatacttctcttcatcaaccgttgcaatcttttaacatagcagttgctttgcaatcaataatatgtaagttctacatggcatatatatatctccctcttcaaaaagggttccataaaacatttcatggtcagaagatgatatcttaatgaaaatatcctggccagtgaatctat

SEQ ID NO: 47588 - DNA, 702 bp, Oryza sativa
tacttaaagcaatgaacattttttccctttgtgttgtactacgatttccatctattatatgcacatgtacctatttgatctaagccactgatccatgttctttgtttgctgctcattattagttcaacatgaatgatttatgtggtcctatttaggtttagttgtttttgctatgagcagtttttatttgttaatttgttgcccgctatttttgtacacaggatgataatacatatgcatcgatggtattctttgcggatgatcttacaatggcaatggttctcacgaaagattctatgtatacctgacaatcttggcatactatcacatccaacctttcaatttggccactctggaggtaccatttttttattctccattttttgacttaatttcttgatctgtatataatagcaagtatttaccgtttttattaacttaattccttaatctctatgtagtagcaagcttattccaggtctatgtattatacattaatagttttttcttaattagcttcggcttatattgatttatttttcagcatgtactggcttcagtgcctaaatatatagggatctatttggagttgtcgatgcgcttttgttgttttctaccagctgatgtactgtatggttgtgtgattgctcatcaagattatttaagttcagttccatgctagcatctgttgtcatcagataa

SEQ ID NO: 47589 - DNA, 739 bp, Oryza sativa
  unsure (1)..(739): unsure at all n locations
ctatttttctaattactgattcgaatttactatttatttaactttgaggttattaattattatatgaaaaaaattcggagtactagagcctggggcgcgccgcctggatacaattcattcattagcagctaataatagcgatggatatccttgttaacagagtatatttagagcattaaagcagagttagaggatgtgcaattgtgatgttgtagtgcaacatcataatagcacataatttggtgtactgaaataaatagatacgtagctcacttgttagtgatggctatgactattgacaggacatgtttacagcaaaatttgttagggacaatacatagaggacaagcaacagtgtgacagcgtaataacataatatgtttaggcaaaagatgcaacagtgctggtgctatgaaagaaggattaagatttgtttgatcagatcaaagaaatatcaaatggtaactttataacaccgagggcaatggtgtactgacaaatgttgcacacccagatccaagtttatggaagtgacctcaatggtccatatcatatctactggctatttctttaaagccacagcttgtataatcgngaatagaataatagaacaaactaacaccttacattatggggatacccagaccagaaatatcaaatggtacctttatacaccgagggccatgacagggaggaggaccacagaggaaagattttatgtcagtagcacagggacttt

SEQ ID NO: 47590 - DNA, 699 bp, Oryza sativa
aattgagataaaagccttcaatttgttgaagttgggtgctaagcttttatggtgtgattaggacatgtgacttttctttttcctggttaattacgataattacgacccttcagggttgtaatcttataatttttttctgctctatcaatagaacttcgcaccttctcgtacgagtcgttccaaaaaaaaaaggacgtgtgacttgacaacgacggtagcataggggttgacgaagacagctctgatggatctgccggtggtggaaggagggatcagttggccatcttagccgacatggacgatgcaatcgcgaaggactggggtggactcgatcaacatggcgtgatgctacggcacggcgagaatgcggcgctgaagaatgagcgtggcgaaggtgcggcgttagggcagcggtcctcgaaataggacgtcacggataggatgggcgtggcacgatggagtttgcatgacaaggaagagagtgaaaactctatttggtgcagacatgcgtgggtaggctacctcacacgacacggttttctaccgagccatcgcataaagcccaagatggcataggatgaagccgatgatcatgatggcacagggatgaaacccatgatggcttggatcaaccatatatagtaagtgtttagtgattttatgcttttgaataattttttaatttattttcaaagtatg

SEQ ID NO: 47591 - DNA, 626 bp, Oryza sativa
  unsure (1)..(626): unsure at all n locations
cgacctgcaggcatgcaagcttttgaggatccctatgcctattaccaggagggtgatgagnnnnnnnnnnnnnnnnnnnnnnnnnnnnnnntcgttgcctgtagcaatggcgtaccactaccttaactccactaccttacctacttctatttttaaaatgtattccagaccactcaatccaataatttaatactatacctagtaacttataatataataattcatactaaactctcatatatatacacttaatatttcacctataagttcgtatataccaaactacttaatccaaagaaataatacagtttacacaaataattcctgttataaaaacaacaatctacatatctattatcacaaccataccactgtaagaaaaaaccaaaaagcacccccacccctttttctaaattaaccaaaggacaaattccccatttaataatactttcaaaaataaaaattctatatttacaaaactcaataccaattttatcttactcttaactattttctttacaaaacacattttactttcaacttactttaagttttttttaaaattagaagacagatcccaatttaccccccacttagaaataagcctacccctctcataagaatcc

SEQ ID NO: 47592 - DNA, 1007 bp, Oryza sativa
agtacgagattcgagtcaatccgcggaagacacctcctacttatttcgaacgaagattgacacgacttttctaaggaaaatcgctagcgccgatgtgaaattgaaagctgctgagttaagcacctccgacctagttactttcccgattgctagcccctggaagagtagtgacaataagcttactaagagcctctcacggaactccttaagaagagaatgaaaattcccccctcacttctcctcccttcctcgtcatcatcctccattctcgaagccagacccatacagcgatgagggtccctcttctcgtccaagctctcccgcgcgcaggcctccccgccgccgcggccgccgcacgccgccgcgggcggcggcggagacgcccacacgccctcgtcgcacggccaccgccaccgccgcttccccaaggagaacgtcgacccgtccccctccccgggcccgtacgaccaccactccgcttaccgctccccgtcgggcaagcagcagcagcagcagcccctcgccgccaagaaccgcagcctcccgccgcggcccccgctcaagcgcaagctcctcgacgtctccgccgcctcccccgcgcccgagggcgcgcccagcggcggcggcggcggcgattctggcgtccaggtaggctagggtttcggattgggtggagccgagagggaccttggctggatctggttttgatggttgtggttttgccgtggcaggttgtggtgagggtgcgtccgccgagccgcgcggaggaggaggatgagggggccgggaaggaggtgtgcgtacggaagaccggccctggctccgtcgagatacatgggcaggggttcaccttcgattcggtcgctgatgaggcctccacgcaggtaggaggagggtatacgattttagttccaattttagtgtgttcagatttacacgtttgcagttgtgtggggtacacaactcaaattcgcgctgtttcaaacgattgtcaacaaaggggcgcg

SEQ ID NO: 47593 - DNA, 925 bp, Oryza sativa
  unsure (1)..(925): unsure at all n locations
aaataatgtactaccaattattttgcctttcatgatttgcattgtttttttatctggttctcgttacttatcttaaacctgtgcagtatcaactaaaatttaagtaacctgaaaaattagaacaatgataattgagttgatgtcactatttcatcaaaactaagaacaatattttcctttgctgcagaagcgggctgagttagcagagcaggagatgaacaaggcctttgcagaaatcgacaacttgaaaagggatcatgaccaagaagttcttgtgctaaaccagcggctcgctgaatccaaactgcccagcaatgttgtacagtcacctgagcctagtgagaccggccccgctagatacgacacaggtgggagcttcggcgatgagcaatggcgagaggagttcaagcccttccagtcggtcgaggtctccaaaagcagtgatcccagctcatggttttatgggtacgacaaatgcaacatttgatgaggcattctggagccatttatattgatttatttttggattctttcacctagaaaggtataatatgttgtacaccttgccattgaggaaaagaattttcccaacgttggctttgccatggcccatataccaaaccgcagcattcctcgctggctagtgcctgcctgccctatcaacaagactttcacaggttgtatgttgtgtcgcaaactgaaaacctgaaggtgtatgtttagatggattgatgatgcatgtaaaaatggcggacttattntttgggcagttggagagttgatgagtcaaaacttacaatttaaaattattaaaattatttttttttttttacagttaaaatataaggatttggaagataaatttacttccaagtgtaattaggaaattatgtttaattttcttctcttaaattttcggtttttg

SEQ ID NO: 47594 - DNA, 652 bp, Oryza sativa
  unsure (1)..(652): unsure at all n locations
ctaaagtttagagaccaaaagtttataagtcaaaagtttatatatccgattcaaatttgaatttgaattcaaataattttttatatatagtatttctatacatctaaagtttatacacctaaagtttatagacctaaagtttatatacccgtttcaaatttgaatttgaattatatctgaatcaaatttgaatttgaattcaaatattttctatatatagtatttctatacatctaaagtttatacacctaaagtttatacacctaaagtttatagatccaaagtttataagacaaaagtttacgtacccgattcaaatttgaatttgaattcaaatattttctatatatagtacttctatacatctaaagtttatacacctaaaaactatagacccaaagtttataagtcaaaagtttacatacccgattcaaatttgaatttaaattcaaattttttatatatagtatctctcccttatccaagaaacaaaaggggacctctctctctcccttatccacactcacagaaacaaaaggggaccgggcggccctcgggagaggcggcggcggaggacccgacggcccttcggagaggcggcaatggtggttcggcggtaccccattcttnctccccttctttcttcccttct

SEQ ID NO: 47595 - DNA, 675 bp, Oryza sativa
aataacataaacatatcctattcacataagcttttaatatatgttttgcatatcaattagcaaatataaccgaaaattttagaaaaaaaaattatacataaatttctaattacacttgtatgtaaattttatcttcaaattcattatattttaactgtaagaaaaaaaagataattctgataaattttaactgtaagtttcgactcatcaactctccaactgcccaaaaaataagtccgccatttttacatgcatcatcaatccatctaaacatacaccttacagttttcagtttgcgacacaacatacaacctgtgaaagtcctgctgataggggcaggcaggcactaggcagcgagggatgctgcggtttggtatatgggccatggcaaagccaacgttgggaaaattcttttcctcaatggcaaggtgtacaacatattatacctttctaggtgaaagaatccaaaaataaatcaatataaatggctccagaatgcctcatcaaatgttgcatttgtcgtacccataaaaccatgagctgggatcactgcttttggagacctcgaccgactggaagggcttgaactcctctcgccattgctcatcgccgaagctcccacctgtgtcgtatctagcggggccggtctcactaggctcaggtgactgtacaaca

SEQ ID NO: 47596 - DNA, 989 bp, Oryza sativa
  unsure (1)..(989): unsure at all n locations
agcgcgcgtattgngatccactcttctcctctctttctctgattttgtgcgaacatccccgcgtgcgctttctcttcctcaccaccccccccccccaagagnnttttgaattcgactgcgcctgaccanagccgaatncgagctcgggacccggncagccattnnngnnncnncnnaaaatcatcaatctacgtgcgtatatattaatgatgatctccattttcgtttttgtcttcaaatcttcaatgtacttttttttgtttaaattaatttttattaaaaagaaatatcacatttagtacaaatttaaaaagtagaagaatggattaaaaaaagtttagagacaacttttaaaagaaatatcacttttttataaaaaagaaattagaagaatggatttaaaaaaacttgagtttttttttaaaaaataaacaacaagttgagaactaagggtaagttttattctaaaatgtcacgtgtttttttaaaattaaaacaacacttgagcttgtaaaagaaatatcacttttttaaaaaatatttaaaaggaataacacatttagtacatatttaaaaataaaagaatggacttaaaaatacctgagctttgaaaaagttaaaaccgcaagttgagaactaagtaaaaaaaaagtttagtaaaaacataaaggagagggttcgaaccctggtcactgtaacgccacctttcaaatacctaccactgagctaagccaaacctaattgttgcttttgcttttgcttttatttagccagtataaaggccagcgccgctgtagaacatatattctgatatatatatatatatatatatatatatatatatatatatatatatatatatatatgtaaaaaacagagagcatcattaaatatttatatgtactaatgtacgcacgtagattgaagatttgaagaaaaaaaaaaagaacgaaacaaggctgccgtgatagggagtcgaaacatggtgt

SEQ ID NO: 47597 - DNA, 1087 bp, Oryza sativa
ctctttcgaaacatttaattagaagcaggtatcgaaaaaaaatgcaataattgtgtcgtgaactctctataataacaatattttgaaatgtatgctttcgaagaaaatataagagattaccaaaaagagggagtatgctaaggcaccttttgatatgtgggaataacatagaaaacttagcctcagtttgaaacgtattattgaataaatttattttcggggattatctacttaattatagggataaattaaatactttaataaataaaattgaaaaataactcaaaacaagtgggtctaaataatacaatagattttttttcaaaaaatgcattttccgaagcgtggagcaaataatatgttcaacaatgtgataaataatatgagaaaaaaaaactaagcctagaggattttagtcctataagaaagtttcctaaatgggtttctaaaacaaaggatcgaattatatcgtttattttgaaatgaacgattctatggagattttggaggaaaataaatatgaggttctatctcatgtttccttattcatatgactctaattcttgtgttctttctttgtgtcaactaaataaacagtttttaggactttcttgtgttttcaattcctatagaaattcaatgagcatgacattctattctattttgatgttttttctattcatgcgtcttcacaaacatttcaaatggaccctctaatttctcaaaatgagccacatctaagtaattatcctttacaagtaaagtccaatatatataggtttgtacttttagaagttaatttatgccttgcttggttgtgcattggattgaaatacaaagaaattttgattttttttaagaatagaaattataaaaatagagttgtgcaacaaaagctataaagaggaatcctaaaatcaaattctaaaattcaaaatcatctacgcgactatgcattcgaatgatattatatgagtacgactttacctttcgttactgaaaatgctacaatttaacgcatgcattgatcaattttgtgaaataaatatgaattaattctactcgaagatttggatatgcaaaaaca

SEQ ID NO: 47598 - DNA, 646 bp, Oryza sativa
agtttacctttgaaatgaccggataattttgaacagcgagtatatctaaattcatagtaataaaatacatgatatattcttggacggagcgagtacgatgtacaaaggtaagagcacttgtttgaactatttgttaggtctaaatatataatatcttcagtcataaatattaagaaaaaattactagacaaaagtaaaaccaaaaaactgcctaaatattatgcaatatgcaccatgttagttaacggaaagctacaaaagctgcctatgtctgatcaaaactacatgtcttatgagacattttacctcacaacagcttggtgcttcaatttactgaaacaagacacgaaacaacaggttgtcttcttcataattcaaaacccaatcagctatttaaattaagctaaataagaaccatcggattcttgaataaatacgaatgataaataagaaagtgtttccttacatccgtcagtccatcacacgactatgtacatttgctactatcgcaatgctgcatgttactgcgataactgacaatacccacgtgctaccaccaaacctgaaggggttagcctgaagctgcatctgatacttccatttaattgtctcaacaaaatggccatgtaatggttggtgaattctg

SEQ ID NO: 47599 - DNA, 1050 bp, Oryza sativa
  unsure (1)..(1050): unsure at all n locations
atattcaaacctaaattaatcatcaagggcataacagacatttgcaaccaaacgcaacaatgaaaagaaggaaaatataatggcaggggtatggaagggatcaaattaaaatttcaagggtatagaagggttaggtaaatttcagaggtatgaaagggattgagtgagtttttataggtacacatggaatttactcaaactgcatgtgttatgttggtctgaatgtttgggttgcggtaatacaggattccattaagaattttccacagctttttcgttaccccaaatcctctttcaattgtatttcgccgcgagacatgcacctagttgaatatttcactagtacagaagagctttttccatacgggcgaaatggatctttccatgcagctagcctgcccgcatggaacaagaggtctgtaaaaatcgatatttctccatgcgggcaacacaaccgcatgcaaaaaggggattttcacatgtggtccacaaagccaaccgcatgcaaagatatttttcagccaaaaaaaataaaattccaaaaaccccccgaaaccctaacccgtcgcccgccgcccaccgccggacaccacgtgaccggcgccagatccacgccgctgcggccgccggccgtcgcggggcagcgccgtgcctgctgccctcgccgcctgccgtcatcgtcgccgagcgtcgtgctcctccgtagggcggcggatccggccctcccgaggacggcgccgccgactcgccgtgcccgctgctcactgccgagagcccctaggacggcggatccggccttcccgaggacggcgccgccggatccgccgccgtaggccgtcgccgtgcccgccgctcgccgccgagaccccctagggcggtttttttttcctcccccattntattcacacgtactccccagatttttctttctttgtatgtcttctttgtacttcatctacacatttcttgtattgctcactcctatctctccatcttcaacctccactgtgtttcaccattcattatcgcgcccgcatcctaaagtttacg

SEQ ID NO: 47600 - DNA, 521 bp, Oryza sativa
ctgtagctcttttaagtaaaggccgggatatgtattccattatctaaaaaaaatattttttttcaaacgcgcaaaagaattgcacgttagtatattaaaagaaaagagagttaaaagagagttttagttgcacaacgcaacatagcagacctgccattgccgttccatctaatatatcagcagcagcaaaaatgcagaactgaaaattaatcacaaaaaacccggtctaattaatgagtcaaacgggtgaattaggctgacacagtgacacgtactcgacgggaagcgactaatccccagaaaatatataattcactgttgacagtacctcaccgacataattagccgtccccgtttgttttactactgttctccagacgcctcaaaaacaattcttaacagttttccaagagcaatcgcatggactttcctcagaatccccatctgatttcgagccccaaagcccttgatttccacggccacattgatcgtttcccgcattccgtggtgcaattaagtta

SEQ ID NO: 47601 - DNA, 728 bp, Oryza sativa
ccaaaaaatttcacaatttgaccctttgcaaaaaaaaattttacaaataaaccatcaccaaaacttatttcaaaaataacccttggcgctgaacttagacacctcagcgccaaatagcgtggcgctgaatatacgttggcacgctgacttagtctcccatccgcggtggcacggcattcagcgccagttgacatggcgctaaggtgtctatattcagcgccaggtgatttggcgctgaccaaaagagtcatttttaaaataagttttggcagcggtttatttgtaaaaattttttttgcaaagggtcaaattgtgaaaatttcagcagaattccggtacaaagtcgcggggaagttatcatgaccacacagactgtacgggggagctagcgtatggttgatgcccaatcttgagcaggacacacccatgcagagagagggagagagagagagagcggccgtactccctccgtaaaagaaaagaaagataaaccttaagttttcgtatctaatgttttattggccgtcttatatgaatttttttataactagtattttcattggtggtagatgataaaacatgattaatactttatgcgtgactggcctttttaatttttttcatatttttttcaaataaaacagaacaaaaaaacgtttggcaccggaaccccgaatttggttttttttaacgggccgggtcctttgaacaagaacccattttttgct

SEQ ID NO: 47602 - DNA, 882 bp, Oryza sativa
tgatgatttcttctcttttggagtttggatgctactcccactcaaacgtaaggtataaaacatgatcatgatcatcacaagcaattctgttttttttcccttttctgacaataaactactccaatctgccaagctttacaccaaacagttcatccatccaccattaatttatgaccaagtagtaggcagtattacatggcaccaaaaccgcccaattttttaaaaaacaaaataaaacaaaaaagaaatttaaaaatctaatcgatttacttatgccaatatacaccaacaacaaatggaatgcacgttagctctctctctctctctctctctctctctctcaccaagtcactctaaacctcttgctcagacctgatgtcaccaactcttttaaaccgactataactagctagttgagagagtatttaatggcatacagcctaccgttatctgtagggggtatttgactttgacaatttaaaaaaaactcttgtatcttaaaaattttttataattacacaacaagtttcctgtagattttgcccccctcaggtatttccccttatttcccattcaatatttcccttttaggcttccaaacacaaacttcctttttaaagaacaagtttttagtccctttttcaagctgaaaatctctaacaactctccatttcataaacatggtgaatcccaaataaaaaaaaaaatgttttatagacccttttcacctcgaacccaaactattaaccccttttggccccaaaggcgtgcttccctaaccccgaatgaatttaagtctaaaaatttcttttttcccaaataatagtgcgttattccgccaacaccctttgctatctttttctcaaaaaaaccaataccgcg

SEQ ID NO: 47603 - DNA, 631 bp, Oryza sativa
tcctgcatcaaagatcatcaaacacatttctcatgtcaactctcaatcggttcttgaatgaatccacaggtcgagtgagattaacagcttgtaagatgcaatgcagactctgttctgcaactctgatgctctgatgtatcctgctactgctgagattctttgttcagacttcatacacctggcgatgatcagacacaccaacctagtgattgcttccaatgagggatttgattgattattgtgcagagttaatcagatgttgggaggaataattgtgggagatgagagaagatgtttgtccccagtaatggtgccggatcaagccaaaacaaggtgacctggccatggacggtcactgcagcagatactccaacagctgtgccactgcgcgtacgtgttggtaggtgaactcacagacaccgttgctctggccgctgacaccggcgtatctactctgctctgcctctaactcgccgacgacaatgatgagttcaagaccatcttcccttccaagggttgataccttaagacagcaaaatgacaccgtactgttatagcgaagtaactctagaaaatccttgccgtcggtacgtcaagaagaatacggtggctggttggttggctgccatgg

SEQ ID NO: 47604 - DNA, 6295 bp, Oryza sativa
  unsure (1)..(6295): unsure at all n locations
ccaccggtggcaaagcaaggcggcgggtggcgaaattcttgcacaagaatccataggtggacgtagatgtgttttgccgcggcgctgcttctgcctgcatgggactgggtggtagaaggttcaataaaaatgccccgaggaggaggggatgcggcagtgatgaagtggttccggcggggagcaccagggcgttgggcggccgccaaactagtccggaggtcggcgaggaagggcgacgactgcccatgaaggccgtggagcgggcccgcgacggactgagtgggtggggagttggagtggactagccggaagctcggcatggtggggagctcatctgtcaaggttgggnggggggnngggcgtgggggtgccgatgagggagcagaaggcgagtagtcagagcaggcgagtgagcgtgcgaccgccggagtggagcggcaacgactggcgagcggagtgtcagtggcaagaagcgagcggccggcgaagcggagcagcggcgtgcaaccggggcaggcccgcgagcacgcggccgacaaagcggagcgggtgacggcgagaaggttggaaaggagaagagaagagaagagaagagacaaaagaaaagggaaaaaaagagagaagaataagatatgtgggccacatatttttttcttcaccctatatttgttttggttgactaggatgccacgtcagggaaaccacccatatatattgccataggaccttgattgcacggtttgtgtgagtttaggggtacacatttctagttttgtggttaaggaatctaaaaacaatctcgctgttaagttgagggacctgtggtgaacttattcttagaatgagtattattactgggccggattattggacagatatccagaggcctatctaaatttgcagggagatgttttgcaattttcaaagaaaaaaaagtccattttgagtccctaatatatagtacaactgaaaggaaacagaacagagagatcaactactatagtagaagtgtacaacctataaaatggaagaggctggatagtttaatgtgcacaatttcacctctatcttcctttttcttttcaaatttttgcagtggaattttgtcttgggacaggggagtagggtagcagccctatttatcccttttccatcgatttaattcatctcaactacttcattcttcttttttctcttttgagggaacatgcacgttgttatttccttcgtttttttggttcatgatacatttggctctgttgttcaaacttcaaataagagtcctcactacttaaaaaatgatctttccagacacccgctttatttttgcaaacggacctaaagaatatctgcatattaaatgattttagaggtgtaatagggaagatttgttttgcaacaattgcttttcacacgcggaccccttaagagacttgcatgtgaaaatagagttatttccgtagacggggctcttatgagacccgtatgtgaaaaatatagcaccggcctccctcttctttaatttctctcctactcttcgtgtcctctctctaagtcctcccccttctctccactcctctctgcctttctctccattcctctccgaatggccatgatgagaggaggaggcagtggcggtggacttgtggaggcggtgacagcgagcttctagcggcggcaacagcaagtgcagagttgggagctcaccaatgaagagcttttgggggatggcgatggcgggtgaggtgctgggagctcgagaggcagcgaatccaacgtttaggacgtcagaggcggcggatctggcactcgggacctaggaggcagcgaattcaccgctcgagacctcaacggtggcggatccggcactcggaacctctgcgtcagtcgatctggcaccactggcctcgatatttacgacgcctcaacaacgacgacaacaacggtagatctagtgctcgggagtttgggaggggttaaggggtgacgagaaaggtattagagagatggccggggaggtggaaccctagcaataaggacaaagacaggtggacggtgagccagtggaggtgaaacaagagcagttatgcaacaatggcggttctggtggtgcgaaaccatcggaggtggctttatgtcgccggagttgtagaagaagaacaacaaagaggagagagaggatgcctattggacgaggctcactggcgtcattggcgacttctggtatagcgaagccacgaagccaggggccgacgcggattgggatgtaaggagacacatcacgaggagaaggggaattggtaatataaggttaatttgtttacggaatcttggtactatataagccatcggaaaagtgacttaaatttgtgagtatttttagttgaccaaaacttcacatccatttatttatatgctaagcatgcatgcgctcgagttctaaatccattccattttctcaaattcaataaagtatgaaacaacttagatgcatccaaacaatgctagcaatgctcttaatggaggagcagcaacctgaagggtagagtcacacctatgttttatggtatattttttataatggagatgtgttacgtgtaccagacctttagataattctgtaccatttgcctgcacaatgcaaatcctggaaattttgctgtaatttttatcacttgcctttcaagaatttaggatgagttcagcaagtcataagattgatcagaattactaccacttatgccattgggcttttagtttatatggaagaggtgtggactggcagcatgcgttgaataattcctcctaaggccacaaaacaattggccttcccagtttgattgattagtggctcaaggatgaaaggcaattagaattttgtgtatggagctttttctttgacttttcagtatttaccatttttgtcattgatgagtgaattgaatgatagtatcagatatcagtgatagtgagattcaaataccgcgcgctagcaatctcaacatgtgttcctcgattcgaggagcgacctcgatcattgtctgtgttttcactgtcttattgacctggcaatggatcaacaatgtatcaaaagtactttgtatgataaatattttattaatccttataggttatgaactaccagaacttacatataccatattctagacaaggatgatatttacacaatgcatgtagataaacagattctgtgcttataatatgctcaattcaatttatattgatcacagcatgcatttcacgtgcacgattactagtcagatgaaacgacatagttatgttctccgatgcaggatggcctggttcagtgcatgaacagcgagttttagctgctgggtacccatatatacaattttcctaggccatcacagggttagtaatattttctaacacatcgctttttggttatagtattattgaaactaggaagaaagcccgcgcagatgcgtaggtaatttatttattgtttataaaatgtacaaaaaagccctatctcaccatattcactgtatgaaataggccatagatttttgacatactaaattataataatgtccatcatatcccaaaaaaaatctttttgtactcatctatcaccactacttattatcatgtcttgaaatatggatatatagttagaattgcatctttgcacaaataaacccaatacataattaataccataaaaaatcatccctacttcatacccaagtactcatgtctcataggtatccaaatctacatgtaaataattaaaaataccacttctaccaattaattaatagaataagatcattaaacttatatatgaatgcccctttaacaaccggtgaagccaaatgtagccgctaaggcttttttctccaatgccttgattcatgggtcccgtattgatatagtcgtgatcctcaagacaagctcttagagcacaattttataaaggattgtatcggtaagtaggcaagttgagctctattgtcaatggtgacctcttacacggaccacttcagctcaataataaatactcctaccatagttattacaatgtagcctattgagatccatgcttggcacccttttagggtatgagtgagagaaaatggagatgatgaaaatagttttttttaatgtcttgagtcgatttattgtatagagtgtacataatttgtttacggtgttaatcgatactactaaattttagtggtacatatataattttaaaaattagcagggttcatcattggactctacttcgaaaaatctaatagctttagtggtgaggaccatgcaaaaaaaatatttgttcaaattgtaatcctttgctaacatacaagttaatataggttttgatctttttttcttgtgttatacatctaattcacctatgcatgttcgtgggattaatattcgatggaattttttaaaattatttttgctaactgttaacactatttggattagaacgacctgaaaagagatataatgtagttacatgtatgttttttttactagcgaatagtactatctcatatgtatttatgttttttttcttttttttctttcgaacgaatatttgcctatcatagtaatagggtatatgtgtttgtattcataacatgcgtctgcacacatttatatgagatcttgtgattgccttttacattgttagttaaaaaagtatgggtggctgaggcggcggcatggtgtggcttcttttaccatccatctcattaagagtggtcactacgtatatgctcaatttagaaaaaccttagagcctggaaagaaagagaaaactaccatatggggcataccatatacacactcttctttttttctttttatatttcttgcgtatgtatgtacataggagttgtgtatgtacataaggagatattagacggtttttagacggagggattactgttatagatctaatttaatggttgaaaataatggatcattgattttgagtgtaaatcgatgaataattgtttttattttattttatagtttttcttagtttctctctaattagagcatcacatgacatctaatgagcgtttgtaggagtatagaaatgctattactcatagtcacaatctacttgtagtcaactattgtttgtggtggattggttgcatcctctacctatcatttgttgatcattgcacacttagtatttccctttattttcggtgcctgatgatatatatgctcattagatatcaactaaccattaggtgcattgtgcatggatacctcgtgagtaatatgacttggcgatcaataaatagtgacttgtatataaaacctacatatagggggatcaatgaggacatatgattgatattttaggctaggattgtccaagtatattgcatactacatattgagtttttataatgcctaagtaataaatttaaggcagcattgtaaagttcttatagcattagctactccctatttataacgagtacgtttctcaaactactatacggtgcattacacggtatgtgttctacaaatactttttatataaaagtttttaaataaatcaaatagattcattatttttaatatttaatacacagttaatcctatgctaatacctgtatcattttgcatgtcatggataagcacacctaatgagctaaatcgaacgaagcctaagcaggagataaaagacatcgacacgatgtcaaaagaatatatttgatccttaacttataataatatataaataaagaaacatcacaatacatgaaaatacattcataataaatttagtatttggatatatcaatattttttgatagtagggagtgaatatttttttatagtagggagtgagtaattttgggaaattttactcacaactggagttattttatttttgaaaatgcaagtctaatcttgctatacaatatacatttatacaatgcatactattcatttatttagatcttttataagtttcgattacatgtatattgtagagtgcaactcgaaataatatatatttttacaactattggctgaaattattagtttgatttttttatctcatgagagtgaaaaagaaaaaggaaaaagaaaagaagtgaaagggggcacgtacaaagtatgtactacctccgttttttaatagatgacgccgttgactttttctcacatgtttgaccattcgtcttattcaaaaaatttacgtaattataatttattttgttataaagggttttatcactcaagggaacgagtgatctaagggcgc

SEQ ID NO: 47605 - DNA, 1923 bp, Oryza sativa
ttaaaaaacggagggagtacgtgcatgcacatacactgatacacgtattgggccgatcaacatgatgcggctttctaaacataaattaaatctatttggtatttttagatctacccaacaaaaatataggtcccccagattaaataaaaatcaatggttagatatgttttgttttttcttagaatttgtctaatttataaactggagttgttcatttgtttttgaaaatgcaagtaaaattttactatacaacatacaattatatagtgcatattatttatttatttagaattttttatggggaagggggatagttacaaagtatgtacgtgcatgcgtacatatatgggagcaatcgacgtagatgttctaatgataaattaaatctatttgttatttttagatctaacggttaaaaatatggtgtccactacattaagtgaaaattaatagctagatattttgctttattttttcttagaatttctctaatttattagagcgccacttggcagcctaggagcgtttgtagagatgtcatgtgacggcttaggagcatttgtagaaagttttataaacttttagtattatttttttcttagaatttttctaatttattagagcgccacttgacagtctaggagcgtttgtagagatgtcatgtggcggcttaggtgcatctgtagaaaatttctaatagatagatagatagatgcactgacctgactgaattgaaatatttgcaactaaatattttctcatggactcggaatatccgagtaggatgggctccatacccatgtgttaggttataaagggatcaatttgtagacgaacaagcaccgcaggtccgctgcccggggaaagagaagaaacactactacaaaagtgatttttctgtacgagagccggcccatgatttttacaaacggaccgtaactagtggcgtctgcaaaaatcgagggtcattttcccatacggctccttaagtggcccgtatggaaaaatcgattttcccatacgggcctcttaagagggtcacttaagcgcccgcatgaaaaaatcgatttttccatgcggctcgcttaagcgcccgcatgcgaaaataaaatttgaaatttgaaactagtgtatctcactcatacgaactccaaattagatgattctttttcctaaatgtttctaaaatcatgctatatcatgttattgtattcttactgctattatttttgtcattttttcttgagactttgttttatcaattaaaaatttgaatttcaaaacttcaaataatattttgaagcaataaatgattttagctgaaaaagtcaacaacaacaaagttgtataactcatcaagatctataacttctattttggtcatttcttcattctacaaagtggttgtaacattttcacaaaatttacatatctctctatagtttataaaactatataagagatgtacatcttgtgaacagtgttacaaataactttgtcgtatgaagaaataaccaaaataaaagttatagatattgatgagttataccactttgttatttatgactttttcatttgaaatcatttagtacttgaaaatattgtttgaaattatcataattttaaattcaaattcaaactgtcgaaacaaagtcatatagaaaaatgaccaatacaaaagttatagatcttgataagttataccactttgttgttaatgacatttctatttgaaatcatttattatttgaaaattttatttgaaattgtcatattttgaaattcaatttcaaactgttcaaacaaagtcatatagaaaaatgaccaaaacaaaagttgtagatcttgatgagttctacaactttgtttttggcaaactttttcatatgagttaatataaaaacataaaaattaatttaaaat

SEQ ID NO: 47606 - DNA, 672 bp, Oryza sativa
cgaggggcattcttctaataggctccgagggacttaccttctctctgagggcccaacagcccccgtcaagttggagtgccctctcgaaagaatggttcgagaagaacaggcaagtcggtgataaaaccggcaaatctcttaagaaaagggaatgactcgttcgagaagttccagaacaggtccgcaaagaggtgaagaaggggtattacgaggttggaatgacttcttcgtccaaaaagctgcgtcccgggcattgtttgatgagcaatgggccaagatagatttcactggcattgacgttgaggaagatgacgacgatgagtagtggttagtttggagctgaattccaattgagatggatatatgctctgaattctaactgagatggatatattgggttgttatgtatgtaggaatgccaatctaacaatgaagcatttgtcttttgagaatgtgttttgagagagagcgagacattttttttttgttaatgtaatttcaggtagttgtagctcaagcactgaacccatgacaaccatgagttcatggacaggttagctccagcctgctattagcagcaatttgcagctccggatatgcccccatgtcatcaaacaagaactacttactcgttcattgaacaggcacttgtgtcggatcctattccagatt

SEQ ID NO: 47607 - DNA, 680 bp, Oryza sativa
aaacataccaccaccaccacatgttagcaattccaaacatacccctagacaaaagaactagcaccaagccagccgccactatccgtgactgaatgccgctagtcttgcaaacgccctggcgaacactagctccaaaacagaagatcgtcaacgggctcccggtcatcctcacggagaaagcttggggagggagaggacaagagagaagaacacccacttgtccctcacgccaacctggtgacgacaactgacaaaacgccaaaaaccaaattgagagaagcctgtgacggcgggaagatgagatctcaaagacgatgccttcaaggagcatgatgctcaagacgccaccgacatccgtccaggaggtatgatgctcaagacaccaccgtcatccgtccaaaggactaggttttctcccggagaatctcccaaggaggaagagggtgtcagcttgacagcgccccaaaggggtgaaacgctgctagatgccgacactgccagcctagagaactccaagcaaggcgttcgcctacagatcactctattcaacatatcatcaacaacctaacacaaagccacccaagcggactacgatagcacgcagtcttgctgcgtcagctatcttgcgtcagggcaaccaccttaggcaccttcgggtgtgccctgctagccccaacgcg

SEQ ID NO: 47608 - DNA, 1298 bp, Oryza sativa
caaaatgaaggaggcagatcatcaaaggtcacaggccatatatattctacctagtttggaaaagggtagctagataattagataggagagaacaagaaaagaatttattctgccatgctctagcctggcaagaattggagggggaccaaggtctaaggaccaaagcttaattagcttctcaacaacacatttgcacctaataaaaagcctccaagagcagctggaaggcttgtcaagcatgcagtgagactacttctgaagcaaacctacaaaagactaaagagagagaggcccatagcatcaaggcatgcatgcagaacaggaatagtgcctagatgatcagtgtgctccaccattgtagctcatggccagtattgcagcttgcatgtggtgttgttgtccatgatcactgtataccgttggatatcgctgtgatcatcttttcacctgcctaactaattttgggtcctgatcaatttttcagaagatttgcaaaggagcgagagcgagcgagcgagagagagagagaaagagaggtcacacacactggctttcttcgagaattttctttaatgtactcaatttttataatgtttgagaaggttaattaattcatcctttagtaccaatgaataagtttagcaaattgtcaggaatactgaccactacactcaatcttactctttgttctgcagccactcgaccctgatcatctccatggattccctcaatcataggttgttataaaaaaagccttatatatgcaaacatatataatatttctgtcatatagatcattagtgggttaattcttttgggtggcagagaataaagaggatgatttagttaattcatcgatatgaccaatgttatgatcactgatctttattccctaatattgcgattatgcatctccatgtggaaaaacataacaatcatactagctactattcaccatcaattttggtccagccaagaacatgcaaagtctagctagctataaggccagtgatgaaccacaccactatgcctaacacgattgcatgcatgcctgaatacacgcatgcaattcagtgagaccaaaaaaaagaagatgatgtgaacttgcaactgactatgcgatggaaagatgtaaagagatatcaagatcacaccggcatctttcactctattttgttgtttatctccatgtccatggacactccatgtgtgatgcagaatatgctacatcttcggatatatatcatgatgatacataattggtttcatctgtcgtttcttcagagaagagaaaagaa

SEQ ID NO: 47609 - DNA, 669 bp, Oryza sativa
gtccttcaattcatacaaaagttgacaactgtttgacctactaaaaggttttttaaaaaatatatgaaagtttggtgtctttagccttcttacaaaatatttaagtttgtgtgtatatttcaaaattatctttcatatttttttagaaacttatttttatataactatgaaggaggaatcacatacataaaagattgccgcatcaaaataaattatatagcatgtgaatactatgtacataaaaaaactctattagcatataaaatacgaatgatattttttttaaattaatacatataaaataaaaatcttgaaatatacacacttccattttatgtaagtaggctacataaaaaaatcatattttttaaaaacttatagtaggtcaatcaattgtaacctcttgtaagcattgaagggtatttttaggtattctgtgaaaaatatccacccaatggtgtgttttagaaaaaaaaacaaagtccatattataaagggagacaaagtcgatagcgaattgtttaactagagtaaactgaatggtatataatggattatctaaaaaaaagcaagcatattaatacttcacctttttcagggatcgctggtgactgccagctccattcttgcaaggattcataatttcacatcattgctttggaaatagat

SEQ ID NO: 47610 - DNA, 1562 bp, Oryza sativa
attctatggagattttggaggaaaataaatatgaagttctatctcatgtttccttattcatatgactctaattcttgtgttctttctttgtgtcaactaaataaacagtttttaggactttcttgtgttttcaattcctatagaaattcaatgagcatgacattctattctattttgatgttttttctattcatgcgtcttcacaaacatttcaaatggaccctctaatttctcaaaatgagccacatctaagtaattatcctttacaagtaaagtccaatatatataggtttgtacttttagaagttaatttatgccttgcttggttgtgcattggattgaaatacaaagaaattttgattttttttaagaatagaaattataaaaatagagttgtgcaacaaaagctataaagaggaatcctaaaatcaaattctaaaattcaaaatcatctacgcgactatgcattcgaatgatattatatgagtacgactttacctttcgttactgaaaatgctacaatttaacgcatgcattgatcaattttgtgaaataaatatgaattaattctactcgaagatttggatatgcaaaaacacgtgctatatatctacctaaacaacaatttgtggcacaaatcctcgccatttccaagaatcgatcagcttgtgagagtgactctgtgtgtgccactaggtgtttccccatcctgccatatccatgtaccagacgcatgaaaggctgtgttggtactactctgagctatcgcagtaatagctctcggtttgcttcaccagaaggaagaatcatgccttgcctactttccaaggttgcccgctttacgaatggccaatgggatgcaattgattgcaatgcacgtccgcatccatatgacgacgagtcgatgatcaattccaccatccttttagctgcatcgacatcaactttgctatgttctagttgctacgatttttatcagagaaattaaggggagaaagtgtgatatgatttgattggccaaacaattaacctccaaaagatataatctttaatttacaatgactagcttgagttagtcaagatgacgctagaccagcgtactccatatgtcctatagaatataataacttttttatgttagaaacaaatattcaacaaatatatatgtggaattaaatagggaagattaattgcaattggctgagaagagaaaatatgtgaagaaactaaacaggagacggttgtgaacttgtgattaattggttaagatgaatgaatagatagaaaaattgctatatttattttaggacaaattttaatgttaaaagttcctatattattttaggatattttttttaatgttaagagttactaaaaaccgagcgaatatttctcttaagctaaagtgaagtaattttgtataagtggctaagtaacttatgctagtttttttccttctataaattgttgaagtgaaattaagctacatcagtgcattttgaggggaaaagcacataactagagcaatcatgttgacacttgacagctcacgccctcaatga

SEQ ID NO: 47611 - DNA, 665 bp, Oryza sativa
aaagcttctccaattttgtgtgtacggactaaatctttgtgtcatcggcaggtccaaacggggccatattcttgcttacgaaagcaagcaagcagcgtgcggttttccggccgagcggcaaggggatagccatgaaaaagaagaggagattgagttgagttggagctaggcgcccgagcttttagctatctgcctagctttgtttgtgctttgcttgattcccgcgcgcaggaggaggtagaggtagtagaagccgccagcgcgcgcgcgcgcgggggcgcatgtgcgcgcgtcgcgtcgcgtcgcgcgtcgctcggggacaaatcacgtggacggggtggggcgggcggctgcgacgtcgtgcacggcgcggcgtggcgtggcgcggaggcttcgcgccgttcgttcgcggtctctgagttaaatgtgcgggtcgcggcacatcagatgctgcctgctctgctcgccgccgcccacacacaccggccgtcacggtgttgtccctcccagctcccagatgtggcctgaaatctgaacgtttgaatgtcttaatcgctcgaaacgagtaaataataaatgcgtgaacattcaattgtgggattttctaagggtagagattttctaagggagtatggcatggtttagttcccaactttttcttcaaa

SEQ ID NO: 47612 - DNA, 657 bp, Oryza sativa
  unsure (1)..(657): unsure at all n locations
caaattatcaaaggtatggggcccaacgccatgggtaaatgttctccagtttctttttcgaagataaacggtattggtcagctgtttcccaagaaaccgaggaatttgtttttttttattggtcagggggagggtggaacagaaacacccatgttttggtttaaaaaaaaaaatgggaattttgattacctccctccctctctcacagatgattccttcccaatacgcgggagggccccagggttggcctctggcctgtttaatcaaagttcaggggaagggagtggcctataaaaagattcggttccatttctcttttatcgctaggcctgctttttttttattatgcaatatgaactttaatccagccttgttatggttgataggagaaatcggttttataaaattttacggtctttattggtgcacggagggttcataattattagatcagcctatatattctatgttgtatagtagtagcgagntcgtcatctattaaaaaacggaggtagtacatactttgtacgtgccccctttcacttcttttctttttcctttttctttttcactctcatgagataaaaaaatcaaactaataatttcagccaatagttgtaaaaatatatattatttcgagttgcactctacaatata

SEQ ID NO: 47613 - DNA, 1594 bp, Oryza sativa
  unsure (1)..(1594): unsure at all n locations
gaaacgagtaaaaaagggggagcggacaagcggcgcggctaaaaaggagagcgacaaaaaagccgcgcgcgcagaaggcgggcaataaaacaccacccccaaacaccagcgaganattggattggatgggcactcgcacccnacaaaacanaaaagggcncaannngagaaaaagagggnccaaccgaaaagggcgcgaagacgcacgaanagaaaaaacaccaaaacagaacagaacgccaggcgcaggggaannccaaaggaagggaaaacacaagaaagccccaaaaaccgggnaaanagggggcacaaagaaagaacacaagaacnagaggcacaagaaaaaggaaacaagagaaagaaccccanaacgaanngcccccaaaaaccccaaaaaaccgggcaatgcaaaaaaaacgaganaacccgagcctttgttttagaaacccatttaggaaactttcttataggactaaaatcctctaggcttagtttttttttctcatattatttatcacattgttgaacatattatttgctccacgcttcggaaaatgcattttttgaaaaaaaatctattgtattatttagacccacttgttttgagttatttttcaattttatttattaaagtatttaatttatccctataattaagtagataatccccgaaaataaatttattcaataatacgtttcaaactgaggctaagttttctatgttattcccacatatcaaaaggtgccttagcatactccctctttttggtaatctcttatattttcttcgaaagcatacatttcaaaatattgttattatagagagttcacgacacaattattgcattttttttcgatacctgcttctaattaaatgtttcgaaagagataattaagctggtcacgttatgagtttatgcatccaggttcttttctatttaattttattaataccttaatttgtattttgttgatctaacatatgggcggtgagctaaagacagataatgtgaagagataatatctatttttactttcctcaggctttatgtttcctgcaataagcatgcattcaggcgtttgcaggccgcagcagcaatctatctgctgacaagagaatgattcacagaagatctatccgcttagtgaacgcagcctttcggcgccaaaaaggctacatgatatgagttgcaacggcaaacggtccatactacaatctttttttttatttgtgttgcccattgtgatggaagtggacagtgtgtagtgaatttctgcttgaaaaatgaactagaaaaatgttcttttaaaaggaaacttgtgttttgaagactaaaagggaatattgaatcggagatatgggagatactgatggctccaaatctagagggaaattatgtgttattaaaaataatttctttaataacaattgttttttttaaaatctcatagtcaaataacccctacaggaaaccgtaggcagcatgccattacatacacactcaactagctagctagagtccgtttgaaagaaatggtgcccgtcagtctcaacaaaaagttttaaaagcataagtttacaaactggcgctga

SEQ ID NO: 47614 - DNA, 634 bp, Oryza sativa
ttttcaataaaatacatctaatataatggtctaaaatattagattcaccaatttaaatgaaaatcgatggtgacatttacttaaatttatattgaggaatagattttatctttaaatagtagaaaggataatcaattttttaatggtcctacgtatgttttgttcgctttattgatttttatagtactaagtctgtgcgtaatttttttctttcgataaacagtacgtaagattcattggtttttagtcttacgaatgaacatacttgagcttttgtgttctttttccggcgaacaataagataaacggtaataagattcattgttttttaagtctcacgtacgtacatacctacggagtacttgggtgtttttttttctttttcccgtgaacaggaaggtattagtttcctcttaaataaaatacatctaatctaatctaatggtctaaattatcaggtccaccgatttaagtgaaaattgacggtgagattaggtattgccacgtggccgtatatgagcgtttgcagaagtgtcatgtggtggcttgagagcgtttataggaagtttaatagacttttagttataatagatagatagatgacactaatttagtattataaatattaatattt

SEQ ID NO: 47615 - DNA, 635 bp, Oryza sativa
caggctagctctcaacgctggcggctcgcacctcacctcttcacacattagcttttcccaaatccaagctgttctaggctagctagctctggctacttcttctcttcccatgaaattattaacgactttgacacatgcatgtgcgtactatatacctctaattaaacaattcataacattgtatatatatctgctcacatatatatggagattcgatcatgataacagtcgttttccagggacctattttaaactctccggagcatctcgattgttaaatgtgatttcaaatagttaattaataaaaaaatctggaaaattaggtaatgtgggttatagtgacatataagtatgcaaggttaaatacgatctatacgccttttttttatccaaattgcttgtgtttagattgaatttgacctggcatgtttttacctgttagaggcacatgtgacaatatataatatgcctagtctagctagtttttttttaaaaaaaaatttacataaatgtttagagagactatatatacaaaaaaaacaagggcatatggacttgagggtttaaaatccactttccttaccaccttttgggctcaaatatgctatgattatcgagcgtgcaccactgaaacc

SEQ ID NO: 47616 - DNA, 635 bp, Oryza sativa
atacggtcaccttgaaaaataccactggaagatgataaaattattataataaaaaatcgacgtttaaagttcaaaactttaactgaatcttctcatgcataaggtattaaatatttatgaccagtggaacgaaaaatactccgttgagatgtactccctccttcaaaaaatatgagacatatttcatttttggtttctccaaaaatccgagtcctatttgtagtcactatgtgctaaattaaattgttgatcggaaaccaagaagctattctagtacttattgattacatgttcattggttttgccacatggtgagtgagttaattgcttcttggttttgatgaaaaagaaataggtctcagattttcacaaggagggagtactacatattaatactcaaaagttcataaacccaaagagcattgctagtcattagatacttttggttctattatttcacatattaaacaacatatttcagttatcattatttgcaattaaactgaatatggctgtttatgtttcacttatgcttcagattctttcacttcatttatgttatgaattgaacaaacatggttggttactttttcatttaacgatgctttaactagaaggagaacctttttattagt

SEQ ID NO: 47617 - DNA, 517 bp, Oryza sativa
atgttgccgttctgtcggcgtgtccttgaaggcttcattttaggagcttttcccttgttggatggttatgctttgtttaggttcagtttgttaataccagggtttttgctgatttttcacaaattaactgagccattgtaaggcttttgggtccgattttttttataaattagatcaactctcttcttctacagtggaatcgcataaactcccacccgttccctcgaaaaaaagagcactccaatgcatcatatctataacaatgtctatatatcttaatttcttacgtatacagtaaatacatagtactctactacgttcatcaaaaaagtgcatattataagttgctttgagcttttcgtagtcaaacttttttaagattaaagaatgatttagcaacttatagatttttaaaaaaattgtgcatgaaaaattcaaagtgacttataatatgaaataaaaaattgtgcatgaaaaattatatgcataatattataaatttagcactatgtcttac

SEQ ID NO: 47618 - DNA, 846 bp, Oryza sativa
ggggtacggtggagatggcagcgacggccgtccctccccctctccttctccccatcggcctcgatggccgtccctccctctcagcctcaagatccggcggcgtcctcccaacggcggtggcttcccgcggccggatccgataccggcggcttcctgcggtggatccagcgatgacgtagacatcaccgatccggcttcaccgatggcgccgacagcttcccgtggatggatttaccgcgtcacatgtaatcggattcgattttatttttcgccccattttttcgcccgagtttgtttctttttttgaatcggacagatttaattttttttcgtctttttttcgcggatggaggtggccattgcaggcggcggcgtggaggcgacactcacctccccttcctccctccacgctcctggatatggccggaggaggggagcgatggtgggggcggccactgcaggtgatggaggtggagctcctccctccctccctagcttccagtgttggatagtatagaagagaccgaagcttggcatagtacacttgctcgaagacgattcatcccatgaagacgtgtcgcagatgggcgcttgattgggtgatcaggccaaccacgcacagtacgacactggagtgagagatgccgcgtagaccgtagtcgatcacggcattgtcgaggaaatcgttgtagccgagctcttgaacggtgattaagtcaaagttgcgcggggctagacgacgaagacggagcagaattaatgctgatgtcggggacacgaagagtcgacgacgcaaacccgttcattgaagggaaaaaaaaaacaaaaaggtacagcaagcgcagc

SEQ ID NO: 47619 - DNA, 724 bp, Oryza sativa
cactcgttctcaaagcatcaagcaaacattccatcgaaatatggtttcatctatccctcacagccttcttggaacactcaagtccaaccccctattatgatattgtgattggctgaaaatatcatcactaaaaagagcactcaaacaaatatccagcctagcaagtagttaagatgcatggcatggtggctagtccatctatcactcaaatatttttctcaaaatggatagttgtgaccctaacaattgagacagaacaatagaaggcactagcactcaacacacatacattgttttattacacttactatgtaggaaaagaaaacaggcccaacagacaagagcaacaacaaaaacctcttagcatcgtcatcacatatgaatacaaaatcttaatgatatacaaataaaaacatagtgaaaggcaacacaagatcacacacatacatacaacgccttaatgatgacaaacaaccatggtgaaaaattaacacaagtgtacttgtacaaagcatatggaaaggtaactctatttacgcagatgagcaacgatataaaccacatcagggtaccaatacaacaagataaggaacatctacaacaggcattaagaaatatgggaatcataatcatttgcaatacaaaaataatagttggatgcaagtcgcaaacccacagccatcctatatgtgcatgtgtgtcaagttaatcattgttttcccta

SEQ ID NO: 47620 - DNA, 645 bp, Oryza sativa
cgaagagacaataccaagcatcaccacctattcacaagtcaacctcagcgtattcactaaaacacgcatataaagtaacgacaaaagttgcacctactgcctcatcccaccaaaacacaataacaaggaatgccacttgaactataaacaatattactacttcaaacctttatatctcaaaatataaaaaggctatgactgcaaaaaaaatacattttagaaatctacaaaacaagacctagttcttttatgtagaaagcacttttttgttctgccatttaaatggtctaattcacacttgaatgcaggcttcagaatctgtacagaatttcagaggatacatagaaaacaactatatccggagttctacccatccgatcaaagtgtactttaccaacatggaaagctcacagaaaactctaaggggcctgattgattccactgtttaacctctccaaaaacagttcaatctacaactatctagattttgacaaaaaaaagcaatagtcatactcaaaaattcatatcgcttattccacttgagataaaatcattccctttggtcagaagatagatcacgatgttatctacaacgtttctgtggacactttgttcagaatatatcattttgaccatgtaattgat

SEQ ID NO: 47621 - DNA, 1582 bp, Oryza sativa
  unsure (1)..(1582): unsure at all n locations
ccggactcctgatttctactctattcctattccaccagctagatactactaaactaaacttgatgagaatgagagagctactaaactaaacttgaggggaatgagagagctattacttgaagtgtgtgagtgaagtgagaaggtgaagtccttatatagaggtagttatgacggttgtggaaggggaattgtccgaagtgccctccaaccgtcattgggatgcaatcctggacgtccacgccaaaccttgcatccaacggtgctaggatgggttcggccgaaccatgggctgggtcttcccggcccatcttcggctggcggcctcctctattgcttcactatgtagacttgtaaattttggcccaattcatcgtgtcaattctgagtttgtggcccattcatacataagtctggttatcgacaacgtctgattgatttatcgtctgagttgatgtcgattctcctccactttattgccattgtctgcaaaaggttagtatacctaatactagtggaatattattattctaacagatatatgcgttgcaagcattactagttctatattttggcaatattgacggtcaaaactgatcgataacaaccgtcaacaaaaccccccaagcttgaacctttgctcgtcccaagtgaaggacgaaaggaaacaaagacttggttgttgatcaggagttgctactatgctgcatatctcaaagatataggtgcaaggtatatgtactctctctcagattaaataatctttggtacggtggcttacccttacccctgattcccacgagacactgcttctccttgccttgggcagttgaaagacagaacaacaattagagcaccaatcacccaatcattattcaactcttattccggaagttttcaaatgattttgcataagaaagcctagttcctcaaatgattcactcagtctctctaagtgtatcaaaatgaattcctcaccactttgcctttttgattcctactctaaggcttgatatgtggagctcggtagggatcaaacatggcatacttgcattcgcctttattactaaataaaaacttagactaaagcaaatgactaaacatactcaagatcaagatcatgcaatatgtgtgtgtggtatatgatggaaatggtatataaaggaaaataaagaaaaagcttctcctttgtgcttactttcttctcccaaaaaatcattcttttattgattaggagagggcatggctacatttttttttcagtgtcatgctcatgcttaatggagcataactntatttttattatttatttttttcataaccatgcctttccctctctcttttttttttctttttcaaaaggatttttttaggagaagaaaacatatgaaagtatggagaatttattttggtggtaatatggaaatggaatggaatattgcttagctcccagtgtaggagtttagcatgtgcatatatgtgggtgtatgatcttgatcatagagcatgagaattatctacacaactcacaagagtttgacaaagttcaatggaatgacaagcaccaaaatgtatatggtttaat

SEQ ID NO: 47622 - DNA, 785 bp, Oryza sativa
tacactattactgcatactaattgggaacagcgtaacagtttaacacatttatggaaacaaaccttcaattcaatatcaacatagtctacgcctaactccattgctaaacggagtgcttcaaatcttgtagcatcatcaccatcgtactggcctccttcccaattgggtctgcaaaaaaaacaatcagatacgtcatttatgcaaagcatagtgttgtaaactagtatacataagttagacaagtatgaccaactactacaaagtgggttgcaacattgtgaatataaaaaagtactcacgttggaaaaagctacaaaataaatcaactaaagctcacaaaatgaaaagataaatataaggatgggagaagcatataccttttatgtatattttttttacagatcctataatataaatattcatttctacaagtatagaaagctaattaatggccacagatacgctcaatcagtttaagtgtttaaccaaacgccggcttttacgaaaataagaaatgattgtgccacgtctcaatcagaagtgaacgaacagataaaaaaccttttaggttcttgggtttagttcttttcagattatttaccagattgttgaaatggattatttgctcaacacttcaaaaaatacattttctccaaaaaaatatactcctgatgtattgcttagaccacttgttttaagttatttgttaagtaaatttatcaaaatattttatttctccctatcatcaagtagattatccgcagcaacaatctgctcaataatc

SEQ ID NO: 47623 - DNA, 518 bp, Oryza sativa
gttcatggcaacactgtacagcgtccactttgaaaggaagagagcaactgcattacatttagtcatatagcatgaactcagatttgttcttgtgaaataccccctccagtcgggaaaacaaaacatgttattttgcatatgcatcaagtcaaatctctactccctccatcccaaatatagctacctttagcattcaaatgtcatcccaaaatatagctatttctccaccgacttcctcacctcaaccagtcacgaccaccatctcatttaatttcttcacctactttctcatctcaactaatcacaatcatccctcactttactttaattttctccttaatatccgtgtccaactataaaagtccttatattttgggacagagggagtaacgctttgtgcatttctatatatacataaatacatccatatatacatttaaatatgtattatattggaacatgggaatcatatttgtagatttgtctaaaaaagtgctttcattatattagaattttat

SEQ ID NO: 47624 - DNA, 682 bp, Oryza sativa
attattattatattcttgttgtttattaatgggtggatttgggttggacatgatcctatgcttaatgcacaggctcgtaaagtccaattcaattgcacagtgtggaagacaacccatcaaataacttttcgagcagagtgtgagtaaagagtccacgcaatccagtgagaacacaatggctaaatataactatgtgtgcatcattgttatttatatgattttttatgattgcttctatgatttaaatactttttctaaaaaatcaacaattaaatattatgaattatatgtaaggatgatccactttttcaacggtttgtacactagaacaaattatgttcatctatgatgtattaaaaatacattaaacattgtctaaattcgattagatggtaatatagaatatattttaaagcacttatgtgaaacattatttggcttgcttggattatttttctctcactgaaggcatcagattgtttatgtaatggttttagttattcattttgggttagttcttttttcttacatagtttatattttatctattcacatttgcaaaataatgtataatggtgcaacctttgttgttgaataattttgtaatgtttttatgtcagttgagatgaagtttagaagggtagggtgttgtccctcgataaaatatcgctgaatagtttat

SEQ ID NO: 47625 - DNA, 1090 bp, Oryza sativa
caccattattaataatccaggaagtcatatttaaaaatgaattcttaaccttcatcagacctgataaaaaatgggaatctcttgtttcctctcaacctgagttattgatttaccagtaagatattttcttttcagtaaatcttgccacacaccttgctcatttattaatttaaacaaccatttacttaaaagacattggttttttatttctaaattgtgaactctaagtccgccctgatcttttagctgacaaataatatcccatattgtcaatctatactttttttatgttcatccccttgacaaaagaaacaggatctataataaccaattttttgaagaacccctttaggaatatcaaaaatgatatcataaacataactagacttgacaaaacagaattaatcaaaaccaatctcccactaacatatatatgtttacccttccaactactaagtttttttttcaattctttcttcaattgttatccaatctttattactaagctttctataatgcataggaatgccgagatatctaataggaaaatcacctagctatcacatatgaaacaacaagtattaacagattgaaatatatgttttcctttcatcaaaatataatcatgcgatatcttgttctaaagatttaattacaacgaataccatagtgtgatcggattgttgattggataagtaatttagagaaaaataatcattttgaagcttgctaaaatacatgcacgtatgtatggatgaggtggagaaagtggagagagagagtagtagcaagtagtttaaggaattttgtggaacacaatgaagacacacattgaaacatatcactaccacgtataaaaaatttagttttaacggtttaaaacacatgtttttattttgacataatataatcatatgatatattgttgtgaagatttaattgcaatgaatacaacggtgtgatcggatcgtagattgaataagtaatttaggagaaagaatatttaaagagagtaggaaagaaagagaagaaacagctagacatgcatgtgacagtaacagggttcgtccgattcattgggctgctgatt

SEQ ID NO: 47626 - DNA, 634 bp, Oryza sativa
cggtgatgtaggttgtttgatatttttcttttgctcgtcatctctattgacatgaacgagaatgtttttacattttttcgtgcttgctagatgatggatggctgcgcaacgtcgggctcatctctataccataccgctacatccttctattattccatcgtcgactactactcgctccctggttgccctctccactaccagtctgtgttaccagtcagaagacacagactgttctcttcatccttatagcaagatccagcaaagccaccagatggatttttagctgaatcattttttttcatttctagtttgattcacctgtgagtaattttatcgcttgtgtgtgattgagcctgtaattttttcacttgtatgactattttatgatacagatcaacaatactcttagtatcaatttttactcttatactgtacattgaacatatcagtaaacatattactatatggtggctacgagatcatggctatatcgagaggaaggtggtaattgttttactcgcagaccaaggaatctcagtttttactcttatactatgtattgaacacatcagtaaacatattactacatggtggttacgagatcatgggctatatcgagaggaaggtagtaatt

SEQ ID NO: 47627 - DNA, 1034 bp, Oryza sativa
gggataccatggatcatgcttgatttgatcagctcaacggtgatttgatgctatctagattcatccttttttttttaagttcaacactgtacacatttgctggacataatgcatatatgttgttttcagcgtgacaaatacaatgaagaagaacctaatgcatttgatttgttcaaggagttccactacagcaagaaaaaaaatgctacaccactgctgtatagtaggctattgtaagataagtttcaaactttgctctttgtaatgcttatttttaattctctcatcaacaacaatgtttgctccttgcttgctagactcaaatggaaaacaagctgtctacaagttcgatgaagaggactcaatctgagatggaagcggaaacttaatcttttgatcagtcaagttcgatcaagttaattcatgcatgatgctatatcttttgctactacatgcattttgctgctattgctaacttgtgtcaagtcaatttttgactaagctaagctatacatgcttgcattttgctgccgcagcattcattaagctcctagacttgtatgcattgcttggaatctctatttgttgttggcttgagccatggtaaactgcaaggttgtatgcactttgaatgttgtaatctgatgttggatgaaaaatcatgtgatatgatattgaatggaaaaatgatatttctatttgatttgctgctgcaactattagttgcatggcctgtgtatatgggctttagttgtgaaattaagctgtatatatgggcggtaagcgatgtagtagtgggctgaaaagggcaccaaaaaatggtgacaaaattgggctgcaaagctgctgaaatgggttgtaaagctattgaaaatgggctgccaaatgggctgaaaaggagctgcgaaaatggatggaattgggctaaaaattggcccatctttgattttggcctgttaataaataggttgaggtagtgtctacgtcatcatccacgtaagcaaccatgtaagcatccatgatgatgtggcatt

SEQ ID NO: 47628 - DNA, 543 bp, Oryza sativa
ctcgcgacgaaaagggaataaaagcgcttcgcctcgcccactgccacgccccccatctcttctcccgactcctgagagaagaagaaccgctgcttctccacccgtcgcggagccccgtgtccatcctccggcgcggcggccgccccccagcgatccgcctcaggtgagagcaccggccgcaccccctactgctctcccctcccctggagatcggcgtcccactcactcccatcccccacctcatcggtggattggattggataccagtaggggggcgatcgctcatcgctgcttgggtgcatttcttctggtaggattgggggatttactgcgtgaccgtggtgtgatattatgttcgtgttcagtgcattgcttcttcttccaggaagagatatcaactctcttttattaatcgacacgcgtcctgtgtgttcttctttttatcgcatcgtaacatccgtaatgatgcagggtgggtatccgcgttgttagaagatactatatggattggaaaatctatagaggattgtttcattttcttct

SEQ ID NO: 47629 - DNA, 614 bp, Oryza sativa
aaaaacacgggccacattttacttgattcagtcaattttttttactacctccgttccaaaataagtgcagccatagtttttcgcgcccaactttaaccgttcatcttatttaaaaaaaatttgaaaaaattttaaaacataagtcatgagtaaagtactattcatattttatcatttcataacaacaaaaatgctaattatgaaaaaatttcaaataagatagatgatcaaagataggcgtgaaaactcatggctgcacttattttgggacggaggtagtagtgattagtatctctgtatgttatatctaattaagcatgtttctatctcatctatctcctcttctgatcaattacttttagtcttaatttcattataaaatttgtattataaaatttagattgtaattattgaaatttgtaaagtgatttacggcggtgtaacatttaaaattcacagtataaaaacgatttgattggtttttattgggaaaatatagcgccattgctggtaaaaaaatatagaaatactctttttgggggggaaaggaagagacttttttttagtattaactattttaaatttcaaaaatagattaatatgattttttaaag

SEQ ID NO: 47630 - DNA, 693 bp, Oryza sativa
tcaaggtttaagtttatacatctgaaatctatactttctataaagttatagcccacaattaaataaattatatatgatgttgtaaatatttgcataacattttaacaaatctatctattatttttataatttttaacatataattatcaatatgtttcatataaaagcacgggtatcatttgattgtttcatgataagtactaataaactcttatatttcattatttgtgttcccttttttactctggttgtcgagaaaaaatatattgagaattgctaattcctgcagtaaagcgcggggaattacctagtgacatctatttgtgaatcctaaatatgtttatacttttaaaacaacattttcagatgtataatttttaacttttcatccagattattacaaatctacaattaaagctatgttcgcattgcacttttttttcctttctttttataaaattggtaggttattgtatatattttgcaaaatcactgagaattgttgtgttgtttaatggaccttacttggatttgttaatatatatgcccccccactttaaaggatggtcgatcgtcacctgtacatttcacgacattcttatgatcctaagttaaaatcgccgatattactatatataacccgtttataaacctaaggaaaagttgtgctgctggcagattggtaccccaaaa

SEQ ID NO: 47631 - DNA, 603 bp, Oryza sativa
atatgggaatgccataatccgaccgtatccgcccgttttcacccctgtcgatatccaatcttagattgctgtattttgagacgaagaaagcagctcaggttctcttatcctgttttgccaccatgctcacgcggcaaagaactggcaccaatcaatgagaggagaggaagcagacatatactccctccatttatttttggctgctcctatttatctcaaaataagttcttttttagataaacattacatcggtatttgtgaaagtagaggccagataaatgcattgggagcagataaagtgcaaataattgaattagaatttgataaagtggatgtattctagtcttttcagttttatgttgatatgtgtgagattggtgaaaaatgaacttattctgagaaagtattatgtaagaagttgaagcaaacttatcagtttgacatcttcggcagcctaatccatggcatttgcgcgaggcgtctctacttggccggtgcaaaataattttcgtgtagttttaactttaatgatagcgccatctatgattataaaaagtttaatcttaaaatatatttctactcttataaaaattgaagaagttt

SEQ ID NO: 47632 - DNA, 2771 bp, Oryza sativa
actttctctaatttagtacacgtagcgatttagaaatagggagagctgctagacctagttgttggtctatttgtgtttttttacatgtaaaagtatttttgtttatattttctcattaaatagaaaataacacatgaatgaaaatatggaaagacagaagggaagtgcgtacagtacatacgcacgtacgttcgacattacgtacgttggttccgtatatgatggttccggatgtttttttttctttactagaaaaaatgtccgtgcgttgcaacgggagaaaacatgagaaattaaagaaaaggttaagaaaaatttacattatgtaattaattaaaatataaaatcatacctatacatgtatacgatgttgaagaaaagaaaggctcgtaaaaatcaaggtaaatgtggaaaaataaaattttccaaataaactatggctggatttattttttattaaattctccatgattaattacactatgtgaaattttttcggtattttcagagcaccattgctaattttaataatacaaacattattttagcatttatttaaatgcaaatctaaataaaaccctcctttctccctgggtcattttaagcccattctttctttagcccgtagccaagccggcccattaacctcacttctcctccctttcacctcggcctgcaagcgcgcatccggcccatcaagcaaccacaaagtctaatcggcatcccttctcctcctctcactatcgcgtgggtcccagtgctacaggtccgtccgctacctccgtccgactccgtagcttcctaacactgccggaaaccgccccctccatgaaatccgtccacatccgcggagataatccaaaattgattgaggggttttgatccttatctctttctctttccattttaccaaaattagagcaaaattgcatcatatcgacctcggaatcaagccatatagcaaacaacctagagttgtccgtttcgcgtacggggagagaatcggactgcgcgcctccagggacgacgtacgaaaaaagttggcaaaaacatcttaaacttttataataggtaaagataaagattaaatagatctacgtaaatctaaccatttttgaatgggtccaccaatataagtaaaaatagatggtcagatttttcttatttattatggtgccacttggcgatttgagagtgtttatatggtgccacttggtggtttgggagtgtttatagaaagtttaatggacttttagtatataatagattggaaataaactttttgatatcttattcttcatccattgctcttttgctcactttttcaaaaactgatgagagatgtacaaagttaggaaacggtagttacttgactttgcaaaaagcattctgctctgagctatatatatagaagcaagttcattacaagctcacaaggatagcatcccagattcccggtaaatgatataattagctctggtaaatggtagtagcccttaatatatataccctgtccctttgagaatatttgcttcataccgggagtcagtggtggacgcacccattaggcaggggagggtcagccggcccagctatggacacggtccgtgtcgcctcacgcggctacgcccctaaacctcatttgtagacctatttttaacatattattcatccgtctactattgaataatcagataaatcaaatattttaaatagagacaaaaatatttatgaaaattcatgacttataagtattatttctgtataagtagtaccattttgactgttcctgattttgaccatatataaaatttatttttttatttctatacaattcacaggaaatagttaaattggtaaatatataaaaaaaatatatttttactcacttgaactattttggcgaagcacttaaacccctaaataatttttcatcttgttttataaccccaattgaaagtggttccccatattattgtctaacaacatttctctttttctctctctacatataaatcatatatatttgttcgactaccaattttccttgttaactttctcgatatccgtgccgtgcactgctgcgccagtgtcatgagccggcgactatggtttgtgtgcattgtaccatcacctaattagagttagctctgccgccatcagccagtgactatgggttatatgtattgtgccatcatctaattagggctagctccgtcgtcccatctatattttaatcctgcgtctgccactgctgggagtgattgtaaagtggtcttttttctgttctcatttgtacgaatcgataaaatcagaaatcagggatttcataatttcattagacaaagctgaatacccagcttttgctcaaatcttaccacaaatttaattagacctaaacattagactcctatggattggttggacaacttaaaattaatcaaagttctcgtggagcagtgtagatcttggatgtcgattgttttgtatgcgagaactaatttcctgagttttcttccaatatttatgttgttgtaaaactttggtcgattctactgaatattattattctggtgatacaccatgatagagacgccggcctgaaggccttgggccagtctccaagggttaaattaattttcatcgtggtaataattttggcaaaaattaggctgggccggcacgcaagcggggtcagaaaatgtgggtgatacttaattggaataagttcacttcatgaccctcgaaattgatcgaaatctaatccgtga

SEQ ID NO: 47633 - DNA, 1013 bp, Oryza sativa
ttaagtagatgcaaataaaataagaaagttattagtacatgattaattaaattaaattatcataaatttgataaatggatatatttgatattttaaagcaactcctgtataaaaaattttcgcacggaaaacaccatttagtagtttgaaaaacgtgctaattgaaattggggtaaaatccgaatcttaataagaaaagaatattgtttaaatatagataaaataattgaaaccatcaatgatgaccagtattgcatactgacgtaatcacatgcatttatattttacatgaaccgtcgaggtaccggttgtattcacgtcgtgttcatcgtcagaactcgccgttgtagtttctctctctatcgggaccacgtcattatcggtcacgttcttgctgttatgattttcttcgttgccaatatccatcatctatggacgagtcacatcgtgggacacatcctaccatcttacttactattattggttcaccgaagcaccagcatccatcttcccttctttttgtttctcgcttttggctaggaaagacgatgaacaatgcctgttgggtgctattgcttctttgtccaacctaaccatgctcctgaatcactcacataatattgaaaccatagtaatatgaatataataggaaaattctaatttatgttaatgaaacgggcacccgttcggaattaatggatcaaattttcatctatgagttaaagtgagctttttcaattgctagctaatttcatttgttttttcatttacaattttagttttagcactatttgatccactaaaaattatttttaacttataatttttctctgtattgaattatttatagctaaatgaaaaaaggggatttagttatataattgttttaatattaaattatcattccgaccaaacttatttgtggtttcatgtcgttatttttttattatatttctttcatcatttatgccgaattatgatatatgattttaatttatgtcaatgaaagttat

SEQ ID NO: 47634 - DNA, 630 bp, Oryza sativa
gtgaatgggattacaatttcccgcaggatttggcggattctattgggatctgggtgggtgtccggtacttttgtacttacgtttcatgttgcgctcttcctcttcattgggcacgggcacatccaaggctacatccgtatctgaaagatggagggaatacaaatagagaataagatgatgctgggcgataaggtacgaccttaaatggaatttagatagcaacaaatgcttcaaagcaaccgaaccgccgccagccattcaccatccatccagccagccatccagccagccatccagccagccaaccaactatccatccacaatttgtggacacaattccggcattcaaccaaaattccagttgaatgggtgaatggtgaatggctgaatggacgaatgccaggggatcatcatgaatggcaatgcaactatcaggtagagatcccacctccgaactaagaccttccatttccacctctcgcttccacccaggtggcattcattaatcgtgcataaattgagggcaggtagaaggtagagtttctcgaacgggaagtctaacctacatctaactagggaagtgctttgtatttgaggatgtgcggactctggggttctgaattcatgggt

SEQ ID NO: 47635 - DNA, 1002 bp, Oryza sativa
agctcgggctcgtgcagagagagcggaagaaggcgcgatgggctcgggaaagagggggaaacgtaagaggagagcacggggagggtttatataggctcgggagggtgaaatcgtggccaagaggggcgggatcggacggcaaccggccggtgacgtgggactcaacgtgggcggagtggggactcgatttggcgccaaaaattggggaaaagtgggggaaaatgtggaggagttggaggggaactggtttcactcggtttgggtgtgagggtgcgagcgggagggcgctggatttggcgggacgtgggcagcaaccgccggccatgtcggcttcggcattggaagccgaaggtaggagaagggcctgacaggtggggtcgccgagcctacctgtcggggagggagagagggaggagaacccaggggggttatttagattttgcgcgaggggaaggaagatgggtcgacggcccaaggaggaaggaaggaagaagggaggggacgggccgcggggagggaaggagggctttgggccggaagtggcccaaagtgaaggagggtagatttaattgtttttctttttattaaattggttaaataaactttgtgctattcaaattattactcgagctccgaaaattaatggaaaatttcacagagtattttagggcacagagaatattacaaaatatttccggccaatgatttttaaagtaaaattttatttctcccagtatttcacttgattaaattgctttaacttttatttagtttctagaaaatgcattatttaatgatttttaatttcccgaacaaaaatcggggcgttacaccgccccagtgcgttgccgtccgccgcccgccgaccgttcacgcgcgctgtcgtcacccgccgcccggtccgctgacaccagtcgaccgggcgccttcaacttcaccggcacaatcggtccgtcaagcgcgtgcccaagttgggcattcttgacgtacccaccttcacat

SEQ ID NO: 47636 - DNA, 525 bp, Oryza sativa
cctggtcattgtgtttacgtggaccttttttttttaaatcccagcataatatcaatttctagagtgtcaagggtaatgatgaacgatcttatgccacttgtcaagggtaatgatgaacgcaagtcctctcaactagtttagcaagcaccaaccttgtcaaaaacgacaaatgatttcaccttgtctcaatcggaaaaggacgaacaaataaattgggtttaggttcttagctgggcacttttcaaaatttgtggttctacttgaaatcttgaacaatttattcacatattaataaatattcaaacttagtcaaacaatatagattaagctatatattcaggaacaaatataagcttacaacttttgctagttttaatgtcccacaaaatttaagaatgtgttatcacaaattcacaacagcttcataatcccccagaaaaacagagaactaaattttctccaagttgttctctatattttaatagagagaattatgtttttcttatctcctctctagtggatctc

SEQ ID NO: 47637 - DNA, 1109 bp, Oryza sativa
aacaccccttataaatttctcacgaaaccctctctaatatgggagttcgtagtacgcgcgtacgcgccgcgagcagaactagcgcgcacgcggcacacgttttcggaaggacgcggtagccttactaactctgttagttaaagataatgatggtaattaacaatagattttttattttattaggagagtttttttactaatagattgaaaaaaaataagttacatttgaaaacttttgacttaagatttaaactttgaactcaaattttgaaaactttcaactcaaactttgaaaaatttcaatttgcaagaaaattttttaaaactttcaactcaaatttgaaaagtttcaacttgagatttgaaaactttcaactcggatttgaaaactttcaactcgagatttgaaaatttttaaattaagatttaaaaatttttaagtcaagatttaaaaacttttttaaaaaatgaaaacacttgctactggaagattaaaaagtaatcaggaaaaaaagcaaaagaaagcggaaaaaaaagaacacagccgtgggtagattaagtgtgcgcgccgcgtgggccgtatgggccgggagtgcgcgctgacggcgcgcgcgtgcgaattaagattatcactgctggctggggaacttggcttaccttaaggcataacctccatctctatgtataccaagaaccttcgactttaacttaaaggacgtggcagactccatttgacgatattactcaatccatcatatttctttttctccaaaaccgcagacggacttccattcagactcctgcgagtccatgagtgggccggctaggaccagggcgaccgttgcttgcttcctagccgactcggtttactaaccaaccgaaccaaccgaaacccgtgcatgcaagctgacgtcaacacacacctacatgcatcaacatatgcatactgctcgccaccagcccggacacagtgcacacacatatgcatgccatgctacagtaccgcgagaactgtagcaatcactcaatttttcttccagttttccttcgcgaacgccgacgcttgcacgcacatctcgtgaaacccgttgcgaagatctctctcacac

SEQ ID NO: 47638 - DNA, 553 bp, Oryza sativa
cactctaaaaatttgcttagatattacaaatggtgtaaaacaaattataattcttttcatcgatattctctgatctattttaggtttttgttgctgtggaatgaagggtacacgcagacgtacccaccatcgagccagcctcctttggggtatcagaactactttggcaaggagcagcacccacctttgtattacctgccgtcgcatgaaatcaaaatggaagcaaaattagatcgcagtatactgcatatgatatattccatgtcaatgcatgcctggaatatatcatattgtaatttacatggaatatatcatatgcagtatactgcgatctaattttggaatatattgcattgacatggaatatatcaatttgattagtggtgcaaaacttcctggctattgtaatttacccaaaaactgatccaacccgaatccaactactgtcagaaagaatgacacaagcatttttttctgttgaccttgttggtttgagtttgggaatgtgttttttctttttcggttggtcttggagtcacacatggattgatgg

SEQ ID NO: 47639 - DNA, 3017 bp, Oryza sativa
aatttagccaaaagcgcttcttgctacataacaattgatacgatttggccaaaaggcgcttcttgctacataacaattgagctacattgtttgttgagcgtgtgctttgagatatcagagctacataccagtgaactttgataaaggatcctcacgatttcttacggaatcgttggcgctttgtgcctcctgaattgttattcccatcccaagcacttccccagaaaaacagtgccatccagaacagaactgcaaagaatatgcgtatcctatcctgtaatcttgataacctctcttgccaacctgtcaaaaggaagaaaagactagtacatatggttaaatgcatgcatccattaagcatgaactacaatcctgagatacactagaaatatgttgcgcatgaaagtaataggtagaaccgtagaactagagaagaaaatacaaaaatgattgcactgctctactggctaaaagttaaaatgcatacaattattaagaactaggagtataaagataatgtccacaaagttcaccagagattgactgttcctagacacaattccttgatagcattgtgaaacaatctcgttttggttgttgcaagcaagtgatacacatgatgtacataattcataataaatttcacacaaatgttgatgaacatcactaaccaactaatgaagtctctatatttatgatttaactaaaagttgcactgacaaagtaaatcaaacaagtagatacaactctaactatgatgtctgaaattaaaatagcatcaagaaattaagcattcctaagtatacaagataacgattatagtttgttgacgatgctgcctcaagttcaacacaaaccccacaaaaaagaacagcacacagagtcagcccttcaaaagtttctagtgggatggcaaacctaggcagctagtgcttgccggtgttggctgggtgtgtgggtgtgtttttttggtgggagggctttggttctcctactttgttttttttttctttttcttcttcccttaatgaatgaaacacatttctcttgcatttcgaggaaaaaaatcactacggagtttttcccattgttgatgagttccctttgttgcgaagaatgctgaagaccaccaagaaaactaaaaaccaaagttttgtgagatttatgtgcaagatcaatgtacgtgaggaccaattatgataatattgcaatgattgaaaatttgtgtttgagaggtgaagtgccatgtgcttagtggtctgaccagtatggtaccgtagtctgactatggccctagtggtcaaactggggacgactcattttagtttgacttttggtcgcctcgggtttgcatggttggacaggtcacataacaacagtctgactaaggccagctaagattgggttgattaggacttatgtccaagttggttttgagttggatggctattgcaatattcttagtgatttacacacattacatatgatgtgtaaacgctaatttgaatcaagttcagaagaacttgtggtaaaaaaattgtttcttggtttggttatgacgttatgtacagttattacttgagggtgagcgtggtcgatgaccttagataggaacaagacagatgggggtgttgaggttcagtcattcagatagtcaatgagttcatgtgggacacacgggtagataacagtgcatgcgaaggtgagatttccatatggaattcatgggagatgtgcatcttatggaaaagtataataatttaaaaatagtccaagtttggcgaggacaaactcggttatgcgagtctttcctctacagctacgagccctagataaagaaagatttgtggcttgtgacagccatgttgcgggtatataaacactcggggagagcaaaattgttgaggatttttagagaagaattagggatttagacattttccattttcatctagggttttcccatgtggttaagggtgccaaggatacaccttgtaaacattttaaagcaacaaagataaaattcataaatccaaaggtgtaaaatccttttgcttttcctcactgttcttcatttttgtctatttttgtacaagttgatccatccaaaacttgctagggcagaaagaaatagttctgaaaattttcattgttcctttctgatgtttgaaaatgaccacattttcatgttttttatgatttcagggtcaatatgttcagatctataagtcgaagtgcgaaagttcttcttggaacagtttctaaatagataaagtttatattagtcgaaaagttccaggccaatagaagttagggggttagaagacaccaattttacatttggtttgacagattgcaaacagggctcgtggtctgaccatgactaagccactaaggacaatccgacctaactaacagggcctaagtgtgattgcagtggtttagtgatttcagtcctacaattgcagcattaagtagctgctgtttgcaaatcaggccatccacctgatattctaatttatgatttgtactgttttacttctactagggagggcaacatactagtaactatatattacatatgttgcagcagtttcaacttttaagatataacaaatatatttcatattttagtttcctaggcaccaaaagaaaacatggtatatggacagctaacattctcatgatattgaagcctggatgtctggcctgcatgaacaccataaaaaaatggccaacgatacattgttcccctacatctatgtgctctgctgcaaactaacacactacggatgaagaggacactttcttcagcaattcattttgtcccacaacccttttataaaatggaacatgtataaaaaagcatacatttgccgttagacaaaccgacaatcagcatttggtatctcaaatccccggcaaatgagtctggatcggacacaattagtacatagtaattctctagtacaacacatcccaacctcaatcgattaatcaattacttgggagcacgg

SEQ ID NO: 47640 - DNA, 778 bp, Oryza sativa
cttgcgtgtctaccttacaatatcacaaaaaattattttatatatttacattaactttggcgtatacttatgaacacctcccgtagctggtgctactgtcgcacctacctttatgctgcaacatccatagccaaatccctgtgatatcacaactacctagctaagaaaatggatctttctcgcgatgggccaggctaaaccatcaagaaaatagggaaaagcatgattaaatatttgagtaaattttgtaaaactataaatattttgatcatactatcacaaaactacatatttaagtagtatattacagcactattgatttaactgttataaaatcagtccaaaatcaccattagaaaccaaacgcaaaagtaacatcataggagaaccaatcaagatgacgacaccgagacacaatatttgttaatgaggtttagcaaaagtctacatgcctatgacactgattacggatactcatttctgatccagcatattacaacgtttcaaagttacaacgaccctctgtcaatgccgccgacaaccgttcccttttgtcgatatgggtacaataggtccgaccttctatgagacgatgcatgcactggatgcctcgtataggacagcatacaactcacgcctcctggtgcctcccaagcgtagagatatcatcgcaataacaagtcactggaatgatctatgtccatgaactcatattgctgtcttatttgctaatcattttgccctgtccactcatccatcatccattttgtatctgacg

SEQ ID NO: 47641 - DNA, 719 bp, Oryza sativa
tgcaaacatgcatcatgctaatgtcgtcctgagcttccagattaggccctgctgtattgatcaatatattcaggtcagttgaggctctaaattaattctgatgataatttttattctgctgtatttgacgggcctcatgcatctgaagatctggattactgtggccgaattcgtgttctgattttggggtgtaaaatactgaaatcaataccgctgtccttgctttcatggggggtatttggtgatttggttacttcgattacatcgagttggaatgtcaatgctctctgaacctcgaatttattactgggttaccgcattagattattggcttcgcaagctgggccttgtgcaaatgatcctgcgtgaaatatgcacataatttgcttccccagacgagtttctgctaactattctatagatcatttgcataacccagcagccagctgtttctctcttcttccttttttcccctctgaacatgtttacttaggtcaatttccagacattgaaatgtcttgcaagattaaaattcaaggttactccgctcattctgttttgagagagttcaaggctagaagagtaaagttagtaagcaaataaaaatgatgcaaagaatatacttgatcagagctaagaatgctctcataagtcataagtctgaactcccagaaataaaacgtcaagctcttcgaaacatgatatatgccatttaaacc

SEQ ID NO: 47642 - DNA, 709 bp, Oryza sativa
ctagacatataacatatatatgtaataatgtggacaatactagaaagtcttataatatgaaccggagaaagtatgtagttatgattatacaagagaacaaagaaaaatacatgatgttggtgtgactctgaaatataattgtcaattgtattctaagtctgacaccatcaaaacatgcacagatcataaaattggcgaaataacattcatattagagtacttttctaagccaagattcacaaagtcatgccatatacagtaattgcatgtgcaaaaattataacttgactcaagcaaaactaattacaggaaagacattattagaaagcaaattcttcatatcttctggtaaatgttgcttctttttccttccccatctcctaggaacatgtctagtataaggagccttgtatatgaaataatcgttcctcttttataaggaaaatcaacattctcttcaaataatcgttttgacccttctgatcatgaaaatcaacattatgcatttcccacttgtcatatcatccataacatcatccatatatcatgtgtaccaaatagaatgaacagttaagcaaccaatgcaccataaggaggagaggaacacttctctaaagtaatatatagcaccgtacaaaaaatggcgggcactgtttgattcttctatatgtcactaacaatgcttccagactttgtcagtgaaaggcta

SEQ ID NO: 47643 - DNA, 796 bp, Oryza sativa
gctacaatgctatttaattttgcacaaataaacgaataggcacagttagatgatcatgaatttgggaagacctcaaaaatcttacgagatgatcaatataggatggagggagtagagatgtgtcgggggtattagaggtatttctcatctctattgactcaatatatgtcattggcgctaactcaatatatacacaacaaatctattccctatttctattattcactagagttaacatggtatcagtgcaccggattcatctgtccagttgacgtcgtcttcttccagctgtgcggcctgaagaagccagcaagatgcagcagcaggtttgctagcatcaaatgatcaagagctcctaccatcaaatgcagaattcagcaaattcgctgtaatagagcagctcctggtgtctcccaagcctactagctagctcccatatcgataaccaactagccattggaatgaacaatctccatctacatgtactcctttatatgtagagcaaacaggagtcaggacatggccgtatctgaaaattgattgttttgttcagtacagctgagctcaatgcataataaaccactagtattattactctgtattagctaggcagtactgatgcaaacagaaaaaaaaactgagaccaaattaacgaggtgacagttctaattggtgccaaatttattttgtgactactaatttatcagataaacaccaataatgtcaggaagtggtgttttgcgtaggaaacccctctttgaagtcgaaatatgtcttttaaaaaagtcgaaatatc

SEQ ID NO: 47644 - DNA, 602 bp, Oryza sativa
tcacagtacagacagggaaacaaagaaagcaactagcacgttaaaagagtcatgctatgaattcagaaagtcgaacattgactcttaaaactctttgggccatcagataggccttttagatagatctatttggtctatatttttcctttactaaaaaggccacctgattttcattccgcgagctttgctgaaaaattcttcgattgcgctcaagccgaacgttccactaacttgatggttcccgaggatcttcttcttcatggtccctgacgaaatgtggcaatcccaatagggaacttagttgatggccttctgggtgatgacgaacctaagaagcctaggagatgaaataactcaattttatagatgtttcgtaattaaaaaaatcaacgtaaaatggtgagggaagaacctacacgaggtgaccatcgtacaaagatccaatgttgacggtgaccagttacatgtactctctcccaaaaatctcatatatcattctttggtttttccaaaaatctaagtcctatttgtagtcactttgtgctaaataaaattgttaatcggaaaccaagaagtcattctaatacttattggttgcatgt

SEQ ID NO: 47645 - DNA, 510 bp, Oryza sativa
ttgatggaactgatggtttgggtgttgctgatttgggagttggtgacattgaaacaaccactgattgcacaaacacatcaaatatatgtataagttttatgagtctattagtatatgttctttaggttatttttttttgtactagtcttgtatctgacattctgaattgctgacaaatacatgtatgaaattttaagttttttgctgtgccaaaggaataagatgaagtttctgaaatttgatatccactgacaccctgctgaaatcaaacatggcactattattatagcagcaaccgctgactgctcactcaaacacatcaaatcctcaaacctcagctgcgatgctagctcatggagcttgagaccgtgtgttctgcatgcagagtactcgagcatattgtaattttggtgcagtactacagtggcatggaaacaatgtgccggcgtcccttagtcatggctctgcccagccaacccgacgaagtggtcatatgcttagtgtgtaaaa

SEQ ID NO: 47646 - DNA, 797 bp, Oryza sativa
aggggtgggacttaggccccggttggtagcaccaaccggggctaaagatcaccgggatcattagtcccggttggtataaccaaccgggactaaagttaagatctttagtctcggttagtagcaccaaccgggactaaagatcccggtgatctttagccccggttggtgctactaaccgagactaaagatcttaactttagtcccggttggtaataccaaccgggactaatgatcccggtgatctttagccccggttggtgctaccaaccgggactaaagtcccacccctatatatatgtcttcttcctcctccagctgcccgagcaagcttcaaaatttcttcaaaaaagaggggaggtcatgccaaaatttctattgaatttattttggtgattacatacaaatcggaggtgcctaaaaggtttgcaacttcatcctccaatgttttttttttgtcatactacatttgcacctatgttttgcacactttttttgtctccaaaatttagttgtaagttgatgagagagaaaatgtgtgtggggaagaaagaatatatagaaatttagttcatttgctaaacaaggttttataaaatagttgagaaggaaaactctagtgaaagttaatattaaataatagaaaacaaactaaaataaaaattaaaagaagtaaaacacattaaaattagtttaaaactttacaaatagtttttaagaattatttggtgtaatattttatgatttttgtatgaataaagatatcttataattattgtatgactgtcattattgtaaga

SEQ ID NO: 47647 - DNA, 913 bp, Oryza sativa
cggcacttgaagatggggcctcagttccagaacttcgcatagttcatatctttggagttaacctcatacacgttacccacttcatgtcatgcgtcgagatcagctcgtcattactaggataccatgtttgtcatcataagaatatcatgcttgtcatttacttctatcttgccacaaactgcctcatattagttttcctggtctccgggtgctagctacttctgctattcgatgcgagggtcgataactttgcctttgaattatgtttctcaacagaaccaacttatcccacttgacatgctttgacgtcttcctaaatgactttactgctgaacttgttattgtctgatcgttaccccgccaattctgaagcttcgctgttacatgtgattttaatctgacctctgtaaactatcttcgaacatatcacttggttcataactgggaatagttcccacgaacaggcaactcggatttactttctttacattcagtttacttcccactatccccttcatgttgtcattatttagcattcaaagcattcctttacacattcaaccctgacatccgaaaaagacacatctgaaactcttgtccaaacaaatgtctctttggttaatcgcttgattttcttttccctcaacaggttgtttattaactcgaggttagaacatagttcctccgaaatgagaccctaggtctcctttgacagtaaacaattatacacataatcccatatcagcatcttccgaaagaatcctcatagaacttgtctgtattacacatttctcccttattacatgaatacaaggcactgccttaaacaaaaagggaaggtgcttaacatcggtacattgtatcctcaacatgaatcatccataaacatagcaaactcattgttcataatcat

SEQ ID NO: 47648 - DNA, 765 bp, Oryza sativa
tatgggcaagccgagcaatgtacccaagtcagtgttttaattcttaaaatttgctcaacaactaaaatgtggaatggttggcctgggttggcttgggacgagctgggacccagggtcgggttgccagttcggtctgaatcatcgtaggccttgggttaaggcaggttcgtgtgggttcacggccttgattaataatactgtgtagctctaggatcgtcttcataaaatggctttgggcaactaagtgacttttaaatgctgctttctgcaaaacttaacccctatattattatccccttgtaccctcccttgcattaattatgcatctccggtgtggctcgctgagtactgtggttgtactcattcttgctcaacctttcccctcttcagtaagagaagctgtggagaagatgtcttaggtggagtcctggcttataccccagttgagcgcctgtgaagatggagccgtaggcccgctagttcgctgctgtttatttttgattgtcaggcctgaagcgcctttgtaataatgtaaatattatcgatataataaagatgtgccttttgtatcatgtttgtttggtgtaccccggcttttcctgggacggggattaatacactagcgttcgggaaaaggcaattttcccggtcgtgacaaaccagaactcacacttgctaagtttggcatacaattgatgttcccgcaactttcccaacaccagacggagatggtgctgatggtcttcctctgattgtgagtatacc

SEQ ID NO: 47649 - DNA, 1300 bp, Oryza sativa
ggtggtagtggtgcagcaagccgacgagccggggaggaggaaggggcggccgaaagaacgccggcgacgaagaggatggagaggccggcgcggcgacggcgttccggcgaaaccgaggagcagccggggtggaggacgatgctgcgacgtcaacggaggagacggcgacgtcggtcggcgcacgggaaacgcgacagtggcggccggaggtggaacagtggcggcaacgccactgttttgccggcgaggacgcgtctccggtgcttcccccgcgaaacggagggctgaccgagggggaggaggtggctgcgaggccgagggagaagacggcgcggccggacggcgctcgggcgaggagggggaggcggctggaggcggccggcgcggaggaaagagaggggcgacggcgggaatgtcacgaccggaaataacccaacgggctttcctgacgtgcgtgcattaatccttgtcccaggaggcaaggtacaccaaaagttgatacaaatcagagtttaacaagcggaagcgtatataaaattattacatgggcaacgaaggcccagcacactcagagacaacgaaaaacagcggaagactagggcgacgaccacaggcgcttgacggcaggcacgagctagacaccaaagccttcatcttcaaggaactccccatctgggcttgggaaaattaagcaagactgagtacaaccaccgtactcaacaagacacacccacgaatgcagaataaatgcaagggagtacaagggaattataacataaggggttagagttgcagtaaacagcatttaaagacttttagttgcccaaagctattttgtaaacacgatcttagaactacacaatattattaatcaaggccgtgaacccacacgaacctgccttaacccaaggcctacgatgattcggaccgaactggcaacccgaccctgggttccagctcgtcccaagccaacccaggccaaccattccatattttagttgttgagcaaattttaagaattataacactgacttgggtacattgctaggcttgcccatatccgagggctcggctattcgaatagatttactctgatcagaaggtgtacatcttttacccacaagacacatcttcctcacgtgtaaccacgtgccacataccaccacggtatacggacggaagacgtgacataatttccaacccatcctagacttagacaagagtaccgacccaatttcgcctacggccggaaccccctgtacatgcagaccgaactgggcccctcgcagcaaggcaccaa

SEQ ID NO: 47650 - DNA, 593 bp, Oryza sativa
agctcggtaccccaaattaagctagttcaaattaatgaagtttggagccaacagttgatcacgcacaccgactgggcaactgacatgcatgcaatctctactatgggctccttcagaatttattccatcaattttccccttttgttgaatttgttggttggctggttatgatttttagggctatttttcgcaccattgactattgattagaaatacctggcaagctaagtaatcaatttgcatttgacgtactgtaaatctgtaatcagggtgtgaaaaaccgccggtaaccgcgcggttaccgcggttaccgcccgtaccgcgggggtacggttacccgtaccgcgcggtacggtttaataaaattcgtccaaatcaaaaatttaaaaaaaaagaaaaaaatccaaaaaaatagtgaaggtagtgcttgatttatagtgttttatggtgaagaaatttctcaaaaaagagttatatttattcaaatttgagagcaaaacggagaaataaattgaaaaattgaaaaaaaaaaaaaaatgggcccggcccgtacttgggcacccaatacacatcgcgcggtaaccgcgccaaac

SEQ ID NO: 47651 - DNA, 691 bp, Oryza sativa
gttgatttcttaacccgcagcctgtcccttgccattcccctcctctacgtgagctaacctggtgcactcattcttctctaactaggatacctctcgatggcagcagtgctatctccactgatcgtggccaggatgtagaggtgggtatgtattcgttgatactctactgattagaatttgacgaaccactgtcattcaatctgctgacacatattgcagttaatgtctgttcttcctgcctgtataaacactgtttgatgcatgtagaaatgtgtaccttgcaatgtcatgcatggatcaaaatcagacagctcaagataaggtattacaagcacacttaattgaacaaattcgacatgctgcactttgattgacaattttgagggcaacaccaatcttgatttgagtgaaaacttgctttatgtttctatttgttccatttctgtcttttcacatgcaagtgcaaccttatttttttatgagacgttgctgtacaagattaccagcattttcttcccaatgaacaatacagaatgttgtttcttattaatggttctatccagcaatccagtcttctataggttgtcctgtttttgagcagtattcaggagggcagatccctcccttgaatttggaagtgactagtatattcaatgcgtgcgcatatgcaatgctctttgcaggcacacaa

SEQ ID NO: 47652 - DNA, 538 bp, Oryza sativa
aatttttggagagggccgagtaggtcccgtggttttttactcctcatctcgaggatgtttttccacgtaaatcattgtattatttgtgcaagttgctttgatcctttataattacttctgcagcatccttcacttctagagatgggctaagtgaaaggtttggaactgtcaatgtcatacatgaccgtcttccaaatcatgcatggtcgtgtgtatgtgttacacactagtacagatccttctatctgtgacgggctctaatatgcttagaaatagtgggccgtcacaaggaagtcatctcaatcgggctgaaaagtgcccgattgagatatggtcgcatagacatgttagatgggtataaaacttaagcccgtcatggatgacacctatcagtgacgggccacaacttgaggcccgtttgagataacaactaggcccgtcacagatgactcatcagtgaccggctatatacttaatctctatcgggcattaactaaagcccgtcaccgatgactatttttccatttttcatatgaaa

SEQ ID NO: 47653 - DNA, 583 bp, Oryza sativa
tctggagatttgtgacagtgaccacttgtggatcaaggaaggcaacttccggtgcatgcttctgacaccattgccaacttaacctacacacaggataaacgatcttgtaagcaagttaaaccgattgttattaccagaatgagttgggcgacaatacttacaaggagtagcacttaaggaggcttgtgtccaccgttcggagcctgtagaggtcgaaaagatccttgaagtcgaccacgacataatttgttggaccaaggaatggctttccatcgtgctctccaaggatatcggtagctttactcggcttcctggcgttagatttctccatgtagtataagtgaaggtccttccaagcggtgcccattgtggcaagcacgtcatctccaaccaatggcatgcctagtttgaacttcctgtggagcaacgtatttcttcttgacctctttgcccttagtctcttcctggcccttgcccagatctagcttccttggagctagaagcgaggcctgcacctttccttccctttctctcccctttgcttcgggtttattgagagttattctctaaggggaagaatgtg

SEQ ID NO: 47654 - DNA, 672 bp, Oryza sativa
gttctggctagatgtttggtatgggtcttgccctctgaaaacaagttttcatgagatttttgagatatgcaaccaacaatcaatcacaattctgagctgaaacagataggtataggtggtttatcttttaggagaacttttggccctctggaacttgaccaatggcagcaggttaggacaatcctagaagagctagagttgactgactctcctgatattttgaaatggggtttgacagctagtaagagatttactaccaactctttatacagagctatggcttttagatgggtgaaagatgagatgctacaactaatctggaaatctccctgtcccataaaaattaaacatttcctttggttggcaagtagagataggatccaatcttgtgaacaattgaaaaagaaaggttgggatggttcagaactttgtatgctatgcaatactattgaatctaccaatcacattcttttaactgtccaatggcaatttttgcttgctgcatttgtagagatgttgtgaactgggatactgtcccctgcagctttgaagagtttttcttgctaataaaacataatgcttgtagtaatagaagagctttggtttctttgcttgctgctatctgttgggttctttggcccacaagaaacaatatgatattcagatctaaat

SEQ ID NO: 47655 - DNA, 1777 bp, Oryza sativa
ataaaggttagtagtcatctgtgatgggcgctagttgtggcccgatagagataggtcatctgtgacgggctatagtttgactggtcgtctgggttaaagctatcggtgacgggctttacttagggcccaattgagatatattcattcgtgacggccgtttgcccgattgagataactcttcacatcagtgacttctagcctgtgacggatgctgtgtccgattgagatggggcttaccgtccgattgagatgagggtatccgttctagtgatatatgaagaaactggaatgataccattgtgaagatggtggactacgaaggaaaggggatggtggaggctcctacttaagcttgtggaggctagctgatggcaacggtggcatcctagcacatggcgaagtaggtggaggctctcacctttgaggaggaggcactcgctccaggtcctcgttgttggtggtggagattagtgcgtattctcgccaaggatctggtcccatgcagagcctagtgagccgcgtggtgaagtcaataaagtgaaatggcccctcttgtagggagcaccatggtgttgagagtggatcatggaacatggtagaggagacacaacgtcagcgatggggacaaaggaagatgtgtggttgagaaggtgcactggtgtatccatgcggcgtgaaagagacgggctacggtggttacaaaggagcaggagtgtacaagaaaatcgagtgagacagagaactaaagtggtggcatcgatgactagagaatgaatggcactagatcttggcaaatgacggatcataggtggaggcagccattgcacacttgagggcaagacactcgctccatgtccttgtagttggtgatggacattagcgtgtattctcacctaggatctagtcccctgggagagcctcgcgagccgtatggttaagttaatgaaatagagcggcctatcttgctggctagcagcatggtgttgagagtggatcacggaatgtggcacatggggtatagtgtcaacggtggcgacaaaggaagagacttgacagaggggatgcagtggcacggatagcagaagaggtgtgatgaaggcgtaccggtgtgtccgtatagtgagtttgatacggatcagagtggttacattggagcagtagtgcataaggagatcgagcaagacagagagaaattagagaggacacgcgggtgaacaactaaacaaacatcagtacgtaacgattccaaaaaatataatagaccctttattgatagaaaaatgtccgaattacactcttgaactatagaactatagagacatgcaaattacccctcaattcaaataccaggtaattaacattctagttctcggggctaattcgcaacaggtcagatgtaaccggaaccgtcactgatcgtgatgcactatatatctattactacatcgatcaagtgcagtgtgtgctgcagtagtcggcgcaggacgtcaggcatttcctcttggtaactcgcaggcagttatcgcatgcctcggcgggtgactgcccgtcgcatttgtcgccgcacgcggatgtcacgccgctgccgtcgcacgaagcgccgcatatgatgtcacagtcgccgcagaacctcgccgccgtcgccgggccgacggaggaggaagacaggatcagcgggatgcagacggcaacgacgatggctgccttaggagaggctgcacggcaagaagccatgtaaaatggtgtgttggtgattcacaagcaaagatggagatag

SEQ ID NO: 47656 - DNA, 675 bp, Oryza sativa
catggttgaattcaagcatgaggcaagcaataagaatcaaataataaaaaaagccagatttggtggagaaacgtcccccaaacatttttttcaaaattttttgctataagatattatgacttcatggacactctgtaaacgtcagagccgtcctaacaattttggggccagtgaaaaatataaatgagaccttattttctaaaaaagaattgattaatacataagggttatatatttggaacggatattcacagccactgtttttttaccactgtttgttctttgatatgcactgtctgacaagcacgtcaggaaaggtagcatcgacctaatactcttttttaagactggttttagatcgaggggcaaaaaaaatttttaaggtgtcacattgaatatacggatatacatttgaactattaaacatagtctaataacaaaacaaattatagatttcgcatgtaaactgcgagacgaatttattaagcctaattaatttatcattagtaaatgtttactgtagcaccacattatcaaattatggagcaactaggcttaaaagattcgtctcgcaatttacacgtaatctggataattaagttttttttctatatttaataccttatacatgtgtccaaatatttagtatgatagggtggaaaaaccttgctaggg

SEQ ID NO: 47657 - DNA, 665 bp, Oryza sativa
gtcgcatttgtctgcggcacgcggatgtcacgccggtgccgtcgcacgaagcggccgcatatgatgtcacagtcgccgaaaaacctcgccgccgtcgccgggccgacggaggaggaagacaggatcagcgggatgcagacggcaacgacgatggctgcgttaggagaggctgcacggcaagaagccatgtaaaatggtgtgttggtgattcacaagcaaagatggagatagctcgagatctttgatgcttaattgatgagcaattgagcaggtgtggtgtgcccatgcaatggagccactggtggagaaagcgtttgtagtaccggttcgtaacccccctttagtcccggtttctaaaccgggactaccaatacgggactaaagatcgctatctttagtcccaggtgaaataaccgggactaaagatcgatctttagatcgagctgaccttttttttttgcatggccctgttgctgcatggtttatatatatataaaccatgcatatatatgtttcaatacatatatacatgattaatatatatgtatttatatatatatatgttatgcaaatgcatatgtgtgtatatatacatacacaacacacacacacacacacacacatatatatatatatatatatatatatatatatatatatatata

SEQ ID NO: 47658 - DNA, 894 bp, Oryza sativa
cacacgtacagggacgaaacgccacgcgcagatgtgatagcacccgcgtgcggttaggttttgctcggggagggaagtgacggctagggtttctcacatgatgcaatgcctctgccggtcacacccctcacgaatatatcggatccatcactcgggcctccaaggcccgtaggactcctattcggaaccctatccgaattaagctcatattggatctccatccaatccccttattccggcccattaagcgtgcgaccctgtaggttcatgtatactcggctgtaacccgaaagctccttttcggtccacgcgtcaacagcggcacctagcagaacatattgacccactgggcatacataaagatcatatcggctgaacctctaatgtatacttgtatgaacccctttgcctcacgatatcgattaagctcaaggctagatatgtgcaaccctcttatagctcaatcattcactcgaacctattgatagattatatatcttgtgattgactcctcaatcacctttggcatggtcatggacttccataatctacaacatcgaggggcccagagatatctctccataggaggggcaaatcccatcttgattattcatatcccactacatgtttcatagcatactcaaaaactacttttataactacccaattacggagtagcgtttagcagtccctaagtaagctactacacatgttgggaaccatgataatatcaggtctaaggattcaacaccaacactaaatgagatcactgatgacacaacacatatggctcttgcagtgtctcaagttgggtctatccaataacatgttcactaatatgtgtccacattattaatttggtatctctataccatgatccataagacttgatca

SEQ ID NO: 47659 - DNA, 1226 bp, Oryza sativa
tcaccttgttaaattcagtgtcctatacttcaaaaaaaggtatcttgttgctgcctttagcatatccttatgcacattctagttcttgaaaatgtcacaaatatacataacttatgatttttttttcaaaagggaaaatgtcaatatcaacatttgctttaggcttgtacgatgctattgtctttatgatcatcacgattcctcgtgtttttaggaaaaataaacacaataaaatgatctagatttacctacaaaatatcagcatacgtatagaaaaataaatgtaaaactggatcatggcatcttgcagttacagaacaaattgggcaatttatcaaacttgggaagccacacataagagagcagatttatatgctttttagtgcatgtacaattcatacaacagaagttaaacaccattatatttgccaatatattcttgagaagttaaatacatttcctttctatggaatcccaacttcgcctaagcatctgtagctagaagtgctcatctcgtccctttcctatgtggtcttcctcaaaaagactcaccagagatggttgcagcggtgattaactttctgaacttatgtcatatcttacaaagattcctctccaacaagctcatttttgccacataattcctcatatttgagctccctttggtgcatctgcttgttgccctcctccaaacctatggctagaggtgccaccatcccaagtaggttgcctcctcttgcatgcacagatgaaaaaaaaaggtctattaagaactcgttgaaatgctgaaataatccaaagagcaatacatatatagaaatccatattttaattacattgatagcacacattgtgccactggttaaagaacacagaaagtgagaatatctgaatctgtgatgttgaacctgatcatcacctaattctctgatatttatactaccaattagattccccttgactgaccagtaggatgagacagccttcctgatccaaagcacaccaatatatcgtcatcagtataatccttcagaataaagctcatagaccacaacaagttcaaaaacactacacttgaatgcaactttaggtttatacagacgttagtgatgcagtactttgcagagtcaactgaatgcaatcaaaagaggaagttacaacttgtaaatataaaggggtggctgttgatgcgaaaaaacacacactggcctgggagatctgcttaa

SEQ ID NO: 47660 - DNA, 1177 bp, Oryza sativa
ataattacattattagatagctttggataatcttggagctaggcttgtttagaaccttttgtttttaatttctactatctccttgttggcttgttaggtggtgacattggtttgcagatatgtcggatgaatgaagatgatagccgataatttggtcatctacttttgcgcgtattggagtttgttagcttattggttgcattcttctgcttacatgttctgcactcaaatatgtgctgcctctttgttatatttttatacttcacattttagataagcttaattagaatcaaacaattagaaccatgtctatcaataacttttaaaacttttagtttgaaaacactagaacacacgacgtttgagtagtcttaaagaatacttttacaaaattagatgtttactacttttattaattacaacagaatatcatagtcaaatatatattttggtgatgatgtcattgtccaaaacattgaaaatcgtggaactggagggagtagatcttgtgtttctatttcttgtagtagcagcggtttgatctctcctattattattgatatttctttacataatatcatcacaatagcgagacttggtttaagctatttttaatacggtgttgactgaaaattgttgttttttttatcagttctctgtaggtttcggcgaacccgcacggggcgatttttatttcttaaacgaaaatcagcatcatcataccttctcttgcttcgaatgcatggggaactgagcacgcgcaatttatcagtaggttagattagattctttcctttcaaagccaacaattagcattcatggtcatgtaatttactgattagggatagctagctactccttccatccctcaaagtaatttcagccagggttggaaattatagaacgaaatcggtcatttcggacccctccgatacgatattatttcggcagaatttttttatttttttattttttttcatgaattttggtaatatttgttcaaattcaactaaactttattcaaaattacggaaatttcagcatttcggcgaggtctgatcaaatcggctaaaccaaaatttccaaacctgattttagcctataacttttacgttaagtatatattgataacaaagacaatttagaaatttgccatgaaatgaaaaataaaatttta

SEQ ID NO: 47661 - DNA, 1931 bp, Oryza sativa
ttagcattcatggtcatgtaatttactgattagggatagctagctactccttccatccctcaaagtaatttcagccagggttggaaattatagaacgaaatcggtcatttcggacccctccgatacgatattatttcggcagaatttttttatttttttattttttttcatgaattttggtaatatttgttcaaattcaactaaactttattcaaaattacggaaatttcagcatttcggcgaggtctgatcaaatcggctaaaccaaaatttccaaacctgattttagcctataacttttacgttaagtatatattgataacaaagacaatttagaaatttgccatgaaatgaaaaataaaattttagtagtttcatgctttaatttctaactaatgccgagtcatcctatatattgtggtggttgatggcggtgtcgcaattgtgaaggatgacgaggaatgagatcaagcgaggaaaacatctatcattgctaccgtctaatagtataggaagacaattttaccacttcaaatttcctactacaataagagaggacaaaataatctaaacgcttatatcacttatactatcagtatataccaccaatatattataacataaaagttctcaaattatctcacattgattgtattttatagtgggttctatagagctctttaataacaagtcgttttttttctccatattaacgaaggacttttatcctccagcttcatttgtgttggttaaaacatttagagacgaagggagcagatagtagcgtcgcgttttctgcctataaatatagtcaacacagtgcatcttccccagtgcaccgcatcggtttggtccattaatccgagcatcaatctcagtctcctcctcgctctccatctatctcagcttcttcctctagctttgcttgacccacacaattagtagtacgctgacaactagcatgccttccggggcaaactctcctacggcggccatcgccgtcgccgccgtcttcgccgtgctagtactgtcctcctccgtcgcgccggccgcggcaaagatgttctgcggcagctgcgatgacatctgcactgcttcgtgcatctacgcagacactatccccagggcgtgcgccccgcagtgcgacggctgctcgccggaggcttgccagagctgccttcaggcgctgaggcaggaatgcttgacgagctgcggcgactcctgccgcaagaactgcacttaattatctatcaacccctgtgatgtacgtcgtctcaacgtgcctgttgtacgtcaagctctagcttctggacttgacacatatatatgtggatgcttctgtttacttgcagatacagaggctagctgttcggatttctatcctttatcttaaaaagatatgcatgcttgtgtatttttcatgctacatgtaagaatgttatgttgagttgtaatccaaatttatttacatttgataaagacctgcttcgccgtagtggagcggaggcccgtgcacctggggacgcccgggggtgcgggggcagagcccccacggtacggatcgtcatcccttttagggttccaccatatatatacctcttgtaagccgccgtgcagcgatgtaacctcaccctagatatagtgaagatattttgctggctagcgcccgtggtttttttctctcctgctttgggagggttttccacgttaaaatctcgtgtcttctgtgattgatctattgttctttatcgtttgtttgcctatcgtttcctaacatgttacactagtatagaaatcatcatagggataacttaaagctcctgatttacttatgatctttctcattctttgaacgtgtctaaaattgaaagctggcatttttatcccttataagtgccggtttattaaaaaaaccggcacaagcataatag

SEQ ID NO: 47662 - DNA, 756 bp, Oryza sativa
ccaacaacctctccaagtgactctctaagctaaattttagctattctagccaaaagacgtctttcaacatcctctccaactggatggctaagccatccggctagccaaaactctcaccctccctccactagtcaaattaggaagctaaaaatcactagccaaccatgggcctcatacacattccacctccatctccttcggctcttctccaggacggcgcaggcggccacgacctcgacgccgccgccgtgcaccgctgcaaccaccagcttccggcaccgctcgatggctgtgagcgctacctgcatctccaggatggcgcagcggagcccaccagccgcaggcgcggggtcgccgccgcccggtgaggaggggccatggcggggttcccggggcagtgcgggccggcaggggagagcacgacggcatgcgcggctaggatgcggtcgaggagcgccatggcgcgtgggatctccgcgaaggcgtccgggctgagggcgttgagctgggcggagcggttgaggcggaccttgtaaaccaccgtggacgggtcgggcggcgtcacggcgagcgtcttgaacccacgccggagctccgcctcgagcaaggcgccgatgccgccgaggcgccctcctagtgtggcgagggagggaggaagcggcggcggggcggctcgacgagaaagaggattggagagaggggaaggaagaagaaagggggatgagaatgactggtggggtccattggttaatagag

SEQ ID NO: 47663 - DNA, 3951 bp, Oryza sativa
tattgtttctataaaaatatttattgaaaagtgatatatgtatacttttatgaaagtatttttcaagacaaatctattcatataatttttacattttcaaactcaataacttgagagttatttatgatttatattcccaaggtttgacttaaacattatccataaaggaatagaaacaataggtcaaagttgtgttttgaagaccgtgttgctgtccaaaacgacttcctttatgattactactccattaatactctgtcctacctctaatatacacataacgtcttagagtctgtgttacagccggctacaaatctgtagctcgcttttttctcactcttctcttttcttctcgatatgtggttatagttggtttatagcttgctattgtacctgctctatgcaagtactactagtactatctgctcggaacttggtagattctctctttttcaagtttctttttgtaagtttacatgtaattttgacaagtttattacgatactcgaaatctatgtaagagcagagattaataaatgatgcgctaccatagatcatggttgagatgataacaacatttttcgtatgaccataacaggataatgtttacaacaaaaaataatactgatattattaagcttgatatggccatacagcgaagcttgaaattgaaattaattaagcacaaggtggtacaatgatattagtgtgctaacccaagataatgtctattgataaaaaggaaaatagccaaaacaatgtagcttgcagatcaaaagcggacaaattggataagtctagtgtttgatcatgccatacgctagttgaattctagtggacactactaaattaccgacaagttgaaacgacgctgctactgatacggataatcaatatttatcatggatataaaataaaacgagagaacatgaactgagcataactttttttatagtcaaatctacacatttagattcaaattcttaaacagtacgggtgttcgtatttttttgctaattattattcatgtggaaggtcacaagaataaaatgtctagtgataaaataaccagtttctttagacataggagtgatttatgccagacattttgactagaccttaacataaacataattagaaatggaactttactacaatgccaaagcaccacgggctttgacgctgaggcccaacaccttaacaccgtggaatatactacgaaaacaataataggcacaaatgcgggggggctcctagttagcgcagacgcgccagataattttgtagcgcgcacttccgtaacttcctcctgtttcgtcgttttgtatatttttctgttccgcatcgcttcaggggaggttaagcgtgtgggtccactacagccacgcgtcattagcactaataacaacgctaaccatatggattaatctagttatagtttttattatcaaaataatacataaatagttaagttgaaagtttcgaaaatatgatgaaaattttcaaaatctgagttgaaagttttaaaaaaaaatcttgaaagtttcaatttcgagttgacagttttgaaatttgagttggaagctttcaaactcgagttggaagttatcaaatttaggttgaaagttttcaaatttgggttgaaagttttcaaatttgacttgaaagttttcaaattttgagttgaaagtcttcaaattcgggtcgaaagtcttcaaaactcgagatgaaagttttcgaaattgatttaaaagtttaaattttgagttaaaagtttttaaattttaaattgaaagtttaaattttgagttgttttaaattatggttgtgacttttaatttttcatctataaaaagttttaaatttcacgtatatattttaaatctttagttaaaaaatacaacctcatgaaaaaaaaggaaagattaattaaaaaacataattatcggaaactaattccgtcaactaatataatcttgattattttctccgaatctagcgcacttgagcacgcttcccggtgttccctcgcgcaaaaaacagaaatagaagtaggccgaagagaaatcacgtacgaggacatgggcctaaaacgcacgctagatggctagttagcgcgtctgcgctaattaggaaattcgcaaatgcaggttatagcatgcgtactgcagtgataaatggtgtctgtattatcttggagatcaatgtttgaatctttatcgctgcaatattgtttcctttttctttcgaagtgctgaagaaaaaagaaaacaagacggaacagattcctaagtggcaaaaaaacaacgataacgcagattctgaagtggcgaaaaaaaacaagatagtggaagtgggtttggacctagcaccttcacaccttatttagaaacaatgatagtgggcctcaacaccatgacccatgacgctgagatagaaatctatttttggtttataattttttagtttgtgtattactcgatgccaaaatatatgatgctaaggattcgtttggagagtttaaagattttaagaagctgctggttgatacccaacttctgataatatgcaaaaaattgagttcaacttctgacttctagcttatatgaatgaaaaacttaattattttgggagttttcgattcagggaaaaaatagagttttccaaagctttttcaaacaggctctaagcttctaatttcaacatcaagggtaggggtggatactgacatgactcggctcggtctactcgttaggataacgagccgaatcctaactcggctcgactggcaactctagctagcttgtttagctcgcgagccaatacatccgtgactcaatagaaatctctcacttcgagattctggctgccaacaattttttttgcaattgcttaagaaatcaaacaaccgacaaatcacaaagacttggcacaaatttttttttacacattgcatccataaaaacagatctgaaagtctcgtcatattggaaccaaacaaaacaccaagcaaacaccctagtgaatcctagaccaaccaaaattaacatgggagattgacttgccgaagtgccgaactgccgacggcgacgaggacggcaagattgaacttttgctccttgatttataacttgtagcgctgtcgatggagttgcatgctcttgcatcctgcagcaggggaccttcaccctgcttgttcgtcttcctcacgacgacgagactgagacaaggccacgcttgccacggagttggccgaccggctggagcggcgacgagaggaagcgcggcaccgtgagctcacaaaccacgctgttgctgccccctagaggctggtggtgacggccaggtcgtcgacgatgccggcgtgagggcttgggcgacactatggcgatgtgatactggacagaaacagcgtgcgctgtagattggggaatggggaaatcaatcgatctatttgatataactagggtttagtggaaatcagtggatctgatgggccttaggcctacaaataacaatgcgatccacctcagcactcctgggctgctttgtttttccatggctcatttagctcgcgagccagcttgagctcgctcgttatagcaaacgagctaaccctggcttagcccgttaataaatacaaacgagccgagtcgagttagtcacgagctatgagctttttggtatatttttgttatagtttttagggttaattggatccatgccactgtaaatgtggcaaattagaaaaataccactactatttgttttattggctaggtgccactacaaatttttaaaattgaaaccatgccactccgtcactatttctgtcgttctctctcacgtcgtcatcctctaatctcacgtaggcacggcgagggcaagaagacgaggcggccgccggcgaggacgtcgcgagcgcggggagcggctgcggccacgcccggc

SEQ ID NO: 47664 - DNA, 1222 bp, Oryza sativa
ttgtgcagtttggtgcaatcatttcgcataggccaaaccaactctaaatctctgtagtcgattaatttagtagcttcaatcaatgtagatcggcatgttgcgttgcatatggactcttagctatgttactatgtagtagctgttgtttattttgtccgttcttccgacgattgggggatgacggcgtaatcgatgctttcatacaaagtggcgattgtcggttcacgtgttgttagtgactgctggcaaacttacaaagtttcctgttgtttgtatacacagaagatgacattccggaagaagaagaagagggcaccggaaccgtggctaatgtaagctggctctgtaaatgcatattgtaaatttgcgtattccacgttgtacttgtcggataataacctactagttatcatggttagatgtttgctatgcttttttaagcactataagtttatatagaaattaaaacattgacttctattttaagccggtagaatttaacctctttcacttgaaatatatggtcgttattattcttgcaagatttattaattgatacttctttgaatggataataagataacatgtgtaaccatatgaagtcttcttaagttacacacttacatttttgtccagtgccagtgctacttattttaccttgataccctattgaatcttccatatgatcaagttcctaaacacatgttgctttatatgtggaatctgtccattgtcaatcctcagaattctgccaaagatggagatgacattcttagaaggtctgatagctatgacgttatggatcttgaagaactattgaaacagaggacattcacgaggcaagtacctgtttttgtataacattaataggctcatgtttagcaagtaatttgagcagtattagatttgttgctagcatttcagtaactggtaggcataggtaccgccgatatatcttttaattgcataataccccaaatacagcatacacctaaggaactgaacttgatctgcaatgatggggtacatccatgaagttcataacacagcatcacactattaccatgaaatgatttgtactaataataatttctatgtgaccaagaaaatataaaccatgaggctatagaaaacatgggtttccctaactggtttttctttttttaggagaaaaagaagtgtacttcagttctaaagctgggaactaagaaatggacagttg

SEQ ID NO: 47665 - DNA, 1579 bp, Oryza sativa
agatgacttccttgtgacggcccactatttctaagcatattagagcccgtcacagatagaaggatctgtactagtgtgtaacacatacacacgaccatgcatgatttggaagacggtcatgtatgacattgacagttccaaacctttcacttagcccatctctagaagtgaaggatgctgcagaagtaattataaaggatcaaagcaacttgcacaaataatacaatgatttacgtggaaaaacatcctcgagatgaggagtaaaaaaccacgggacctactcggccctctccaaaaattccactatttgataatgacagttacacaattgtcaatggagttctctctggattacactgttggacacaccaccaaggccaacaccgtattaagctagtgaccacaggaagcacaacataacaagatgcacaatttgcgttttattctgtccagcaaagcagcccggtaagaagtgttgggttacgcgtaggctacgatagcataaatcaaaattttctatcgcgtaaaccaggaaccatgcaagtattagatcatagatcgttaccactcgacgcgctgcgcagcggaagaagacgctgagaagtcgaaggaactctcgcgaagtagcgcgcgtcgatgtagaggaagtagtcgatcgcatcagctcgaccttctgctcctcgtgcgttctcctcaccgtactcccacgccgatcagcaccacaaaccagcggcgcctctaccggtatccacacgtacaaggacggaacgccacgcgcagatgtgctagcacccgcgtgcggctaattttttgctcggggagggaagtgatggctagggtttctcacgtgatgcaatgcctccgccggtcacacccctcacgaatatataggatccatcactcgggcctacatggcccgtaggactcctattcggatccctatccgaattaagctcatattggatctccatccaatccccttattccggcccattaagtgtgcgaccctttaggttcatgtatactcggctgtaacccgaaaactccttttcggtccacgcgtcaacagtggcccgtagcagaacgtattgacctaccgggcatacataaagatcatatcggctgaacctctactgtatacttgtatgaacccctttgcctcacgatatcgattaagctcaaggctagatatgtgccatcctctaatagctcaatcattcacttgaacctgttgatagattatataacttgtgattgactactcaatcacctttggcatggtcatgcacttccataatctacaacatcgaggggcccagagatatctctctataggaggggcaaatcccatcttgattattcatatcccactacatgtttcatagcatacccaaaaactacttttataactacccaattacggagtagcgtttagctgtccctaagtaagctactacacatgttgggaaccatgataatatcaggtctatggattcaacaccaacactaaatgagatcactgatgacacaacacatatggctcttgcagtgtctcatgttgggtctattcaacaacatg

SEQ ID NO: 47666 - DNA, 1011 bp, Oryza sativa
acgtgataaggagtgggtccaggtggctgggtgggttggatccaggattgtaggattgcaggattgtggatgaactcatactttttatattagtagagatgtaccaaacattacataagtttgtttggtgcgcggtatctccacatgtgtacttatctgattgcaggctctatctgcacccacgtccacgtccatacatgcaataatcatgtggtttatgacaatcaaacggctcaccgacgtgttgttggttaacgccaaatcgtgcgcgcgcacactaatcaaattttgcgattatggaacggtaaacgttgcaaggcaggcataataattgtactagctgacaacagcaagtagttaccgaagccgtccggaaagacacggcacagaaaaatgaagttacggaagagatcgttttctttcgggtgagttttgcttcgggctcagtttagttctcgatgttttaaatcatccaaacaagtcctccaaattaatcatttgggttaatatagtctttggacctaaaaacaaatgctacgtgagtatgccaagtcatcctcgcatgcagcgttatgaatgaaattagcattctacccttatatatcatatcatatagaaaagaaagaaaagatacaaacagaaatcgtaagtgacaaaggaatttatacgatcagtgcttggctacagcaatcgcaagtgacaattctataacgatcatacatgtgtgaaacaactatcttctttttttctttcttttctattggtacataagggtagaatggtcatttcattcataccgttgcatgtgaggatgatttggcatgctcacgtgacactttttgtgggtccaagtactatattaacccaaatgattaatttggagaactagtttagacaatttaaaacctcaagtactaaactaagtccgaaacgaaacttcagagaccgtattagctattcacccttttcttttccccacaagctcttaatggcctctacgtacccttccat

SEQ ID NO: 47667 - DNA, 732 bp, Oryza sativa
aaggcacattctttccacaaagaacaaatcaatacgtagtgcaataaactaatcaaacatgcatctctttctccacacacaacatgacttgttagagcaattcagagcgacaacattcaacacatttcatcaggagaaccgtatggtatatccccgaggccacgcactggccatcgtcggcaccgcgtgccactgacaagccatggccgctgcgccaggctacacgcctaaggacgtactccctctgtcccaaaaataacttacctaggatgggtcacatcctatcctagattgagctattttgggacggagggagtagaagcaaaacttagattttttttataataattattaagagatatgatctcagccgtagaagaaaaggagggtctatatttggccaaatccacctggtggggtcgtccacaactccaggagatctgaacccgcactctacctagtcacgtccatataggcaagatgggtaagcagatgggcaagacaaattcggatggaaaaaattccaccttgaaatttttaaaaaaaattcaaaaaatttattaattacccaaaagaatattctatacggggaccgaaaatgcaatccaaaattcaagatgggtaatcagatgggcaagacaaattcggatggaaaaaattccaccttgaaattttaaaaaaattacaaattttattaataacccgaaaaattattctatacggggaccgaaa

SEQ ID NO: 47668 - DNA, 755 bp, Oryza sativa
tataggcgaattcgagctcggtacccgtagagcttaatccagtttccaccaagtttcctctgttaaaactttcccttgttaggttcgcagccgcgcgcgagcggagtggctcggtttcgagggatgcagctcggtttggctagggttaggggcggcacggattgaaggaggaggtgatgcgggcgagcaggagctgcgcaacggcggtgatgcggtggaggcggggtgggaggaggtctcgctcgttaagccgccactacagcttccctcttgcacagcaaccgaggcagcgttgaagtcggagtcagcgttggaggcagcggtggcggcggcgcaggtggagggaagcggcggagcgagcgggagcggggagggtagcgccgacaagtggcgtggggaggcagagggaagaggcgcgcggcgtgaggagcgcggcgcaggcggagagaagcggccgagaaagcggtggtttgtgggttttctcgtttctttttctttttctttctcccggacgacgtgggttcggtttgtggagacgtgataaggagtgggtccaggtggctgggtgggttggatccaggattgtaggattgcaggattgtggatgaactcatactttttatattagtagagatgtaccaaacattacataagtttgtttggtgcgcggtatctccacatgtgtacttatctgattgcaggctctatctgcacccacgtccacgtccatacatgcaataatcatgtggtttatg

SEQ ID NO: 47669 - DNA, 544 bp, Oryza sativa
cggcgccggaggtgaagaagatgaaggccgatctccccgttccccgtgtctccggctgaggttcttgaggcttcttgaagaggacgtcgaggcgacgacggtggcgccatggcttgctccggcgtgctccggtttgacggcgacaaagacgatgtcccggtgatggcgtctagtcccggcagcccccacggcggcacggaccatagagttaggaaattaacgggggaacgacggaaaaggcgacgggatggcatggattcaatttcccaaaattccagcggcacctagccaatatcgtaaatagtagtggtatttttctaatttgatacatttacaatagcatggatccaattaaccctagtttttatcataggtcatttatataacaagttttgtggaagattcaaaatatcatttttttggcaatttatgtcccaaatatactaccaagcataaaaaaaataaaataccaattctatttctgccgtgaattattatggaagtaaagagaaaccgttcaaatgataaggaaggcaaaccttgc

SEQ ID NO: 47670 - DNA, 1568 bp, Oryza sativa
tgtccagtgccagtgctacttattttaccttgataccctattgaatcttccatatgatcaagttcctaaacacatgttgctttatatgtggaatctgtccattgtcaatcctcagaattctgccaaagatggagatgacattcttagaaggtctgatagctatgacgttatggatcttgaagaactattgaaacagaggacattcacgaggcaagtacctgtttttgtataacattaataggctcatgtttagcaagtaatttgagcagtattagatttgttgctagcatttcagtaactggtaggcataggtaccgccgatatatcttttaattgcataataccccaaatacagcatacacctaaggaactgaacttgatctgcaatgatggggtacatccatgaagttcataacacagcatcacactattaccatgaaatgatttgtactaataataatttctatgtgaccaagaaaatataaaccatgaggctatagaaaacatgggtttccctaactggtttttctttttttaggagaaaaagaagtgtacttcagttctaaagctgggaactaagaaatggacagttgtatggcatttactttggtattagttagttgtagaaaataccattgacatttctggaaggttctgttaccttagataatttttcttacccgtgtcttctttttctcatacgtttgtttatgctaccacattctctcctgtaccttctcccttctttttttctcacttaccgagaccaattttctgtggtgaagttatacttcattgttaatgtcatgaaccgaggccatgatggcataaccaccactgggagggtagccgggcggcgccggctattggagaagggatgtatatttagactagggataagaagatattaaggaaagaaattatactaatctgattcattgcttaatgataatagacacaatcccatccttatatagattatataacttgatccttaagtaaggactcaatctaatctttgactgataatcttatctctatatgggctgcttatggccctcagccttttggctcaatgctcatcacaattaacttactttattgtagttccatttaggctggtatacattggagaacactaagaaaattgatacatcctgcatagaaaaagaagttcgcattttctttgtagcagttaatgcatcagcctgcagttgtatatgatttgcgtacatgatttgtatggagtagcaatgcagttgggggaacacatcttcttgatagttcaatcctcatttatcctttaatacttccatgcttctgtatgagttgaagtgcaatgccatgttttctttgctagatcctattgttgtgaatacctgttttgcctattgcattgtaacttgcaaatttgttttgctaatgtccaagtgtacagtagaaatgcgaaaacatatttctatcttacaaataattttctgtcttgcaggagtgaatttgaatatttgtctgagttgttgttatctagaacggttgggtccaaattattgattccaggagttggtaat

SEQ ID NO: 47671 - DNA, 749 bp, Oryza sativa
atcaagttaccttgattcaagtattatgttaccacgctgttgcagttgctctctctgaatttcattagtagaaaataaaccttccatacattattttcttatttggcctcttaaaatcacaatttaacatggaaaggtccaaggtgaccaagttgtcgtatgtatatctagtatatgagttaaatttaattagtgtgtgtgaacaatgccaaatgtgtcttttagcgaacaaatatcagtttatttgttttaagcaatattagaaattttataattgttctttttctatcgaaaacatgtgcaattagctagtgctctacatactgccttattttattctcattcttgagcacaataccctatctctgttactatgtggttacatctctaactcaagttcctcaatctgttcagagtgctgtttcttccagggatttgtttggtactgtatctccatatcaggctccaagcagccttcatacatttggaaggcaggtattaatcacgaaacataatcttattttgctgtaaatttgttttgggtttattaccggcttctggatttatgttgaactgctactgcatgacttttatcttggcttctttgtttgattagtgaatgatttatgacatgaaatgtttggaccttcaatattgatcactgattgactcaccacataattttgttgctttaaagtacacgatacaatgttaattgcagatttttttgatcggatgctgcctatttt

SEQ ID NO: 47672 - DNA, 510 bp, Oryza sativa
ccatggccgctgcgccaggctacacgcctaaggacgtactccctctgtcccaaaaataacttacctaggatgggtcacatcctatcctagattgagctattttgggacggagggagtagaagcaaaacttagattttttttataataattattaagagatatgatctcagccgtagaagaaaaggagggtctatatttggccaaatccacctggtggggtcgtccacaactccaggagatctgaacccgcactctacctagtcacgtccatataggcaagatgggtaagcagatgggcaagacaaattcggatggaaaaaattccaccttgaaatttttaaaaaaaattcaaaaaatttattaattagccaaaagaatattctatacggggaccgaaaatgcaatccaaaattcaagatgggtaagcagatgggcaagacaaattcggatggaaaaaattcccccttgaaatttttaaaaaaattcaaaaattttattaattagccgaaa

SEQ ID NO: 47673 - DNA, 512 bp, Oryza sativa
tatgttgtgcttcctgtggtcactagcttaatacggtgttggccttggtggtgtgtccaacagtgtaatccagagagaactccattgacaattgtgtaactgtcattatcaaatagtggaatttttggagagggccgagtagcgtcccgtggttttttactcctcatctcgaggatgtttttccacgtaaatcattgtattatttgtgcaagttgctttgatcctttataattacttctgcagcatccttcacttctagagatgggctaagtgaaaggtttggaactgtcaatgtcatacatgaccgtcttccaaatcatgcatggtcgtgtgtatgtgttacacactagtacagatccttctatctgtgacgggctctaatatgcttagaaatagtgggccgtcacaaggaagtcatctcaatcgggctgaaaagtgcccgattgagatatggtcgcatagacatgttagatgggtataaaacttaagcccgtcatggatgacacctatca

SEQ ID NO: 47674 - DNA, 703 bp, Oryza sativa
cagcccgtcaagcactcttgctcagccgcctggaggcagctctggcaagcctccggcgagcagccgtcgcactgcggggcgcacagcttggcgatggtgtcggagttgacgcacgaggcgttgcagatgtcgtcgcagttgctgcagaacatcttcgccgccgccggcgcgacgagggaggaggacaggacgaccagcgcggcgaagacggcggcggcggcggcgacggtggccgccttaggggaagcagcgccgggagccatatgcttctgcgtgtcaagcttgcaaagcttgaggaagatagctaggtagctagagagagaagaagacgagatcgatgactatgtgttagtaattgacaaggtaagccgcagtggtacgaaaatttatacacaggatgcaattgcaaaaaggagctatctatagcttagcctaattagccctatcactaaattacatgtgtgagtaacatgcaccagccatgaatgctagtaaatgaggttggctttgggaggaaaattttctcatgtaatttaatctcagcagctataaattaattgtgtccggtttcccatgtaatttaagctagctagatcttctgatttatttaagccaatacataagcctatatttggcatacgatggtctgacttttggatgagtctaggacgtacgtggaacttgttaattactccctccattt

SEQ ID NO: 47675 - DNA, 684 bp, Oryza sativa
atcatcatatttaaacatcatgcaaacatactatatctttatagtttttataatttaagagttttttaaatacaaacatattaaattatcatccaatataattcacataatgtttcaatgtatatctttattatgttttatgatatcctatatacttatatagttcatccttagtttgtgcttaaataattaatctatggtccaaattatttttctccttttttttctctaattaagtcatatcacatcaattatttttagcctttagataattaatctacggtccaaactatctccctactactagcttactttttacatttgaatcaccattctacatactatataaatttaaattatcataaactacattaatttatttaatctgatgttatctagctattttacatgttattttttttattgttatcatactgaattcccgcagcaatgcgcgggtttcacctagttggatataatagttactccctcggtactcataaaggaagtcattttggacagcgacatggtctttaaaacacaactttgacctattgtttctataaaaatatttattgaaaagtgatatatgtatacttttatgaaagtatttttcaagacaaatctattcatataatttttacattttcaaactcaataacttgagagttatttatgatttat

SEQ ID NO: 47676 - DNA, 1036 bp, Oryza sativa
gacccggagagaggagggggctcgggcggctggctaggccgtggccttcggccggcccagcggggaggggaagagaagagggaatgggccggcggcccattcgaaagagaaaagagaaaaagagaaaaagaaaaagaaaacgaaggaaatgaattttccagggattaaatattgcttgtgctaaattttaattggttaaaattatttctagagctctgaaaattccactaaaaatcttgttagcgtatttcgacacgtagaactcaagaaaaattccacatgccaattccgattattatttgcattgatttattagggtttactcttgttttacaccggtattttcttgagaccatttctaaattcaatttaggcttgggagaagaacttcaggatgtgacatgagttcatctgtgacgggctctagtttcggcctgattgaggacagtagtcatctgtgacgggctctagtttaggcccgattgaggtcagtagtcatctgtgacgggctctattttaggcccgattgaggtcatcagtcatctgtgatgggctatagtttacgcccgattgagatgagtatcatctgtgacgggctctagtttaggcccgataaaggttagtagtcatctgtgatgggcgctagttgtggcccgatagagataggtcatctgtgacgggctatagtttgactggtcgtctgggttaaagctatcggtgacgggctttacttagggcccaattgagatatattcattcgtgacggccgtttgcccgattgagataactcttcacatcagtgacttctagcctgtgacggatgctgtgtccgattgagatggggcttaccgtccgattgagatgagggtatccgttctagtgatatatgaagaaactggaatgataccattgtgaagatggtggactacgaaggaaaggggggaggggaggctcctacttaagcttgtggaggctagctgatggcaacggtggcatcctagcacatggcgaagtacgtggaggctctcacctttga

SEQ ID NO: 47677 - DNA, 616 bp, Oryza sativa
ccttctccttctcttgatcctcattgacttgcataaagtatgtacactagtaacatcgctactcatttctatttctattttctccagttactctctgcccctatctgtagctttcccatcaacattacaaatgtgaaatgtgatgccctgtacatggccaaggtgaattatactctcagaaatctttggtgcctagctaaagaacaaactccagttttcagtttttcaatcaattcccctcccccgtcccaccccctctctctctctgtgttaaaataaaattcattgccgtttctgatcaaatacaaaagaaaggacaaataagaagcggaaggagcaaatcaagaagacgatggacgtgacctggtggcggtgaatcggcgacggcgctagggatggatcggcacggggcagatggggcgacggtgaatgctcgacgacgagcttagggtcggcggcggcgccaatctggcgaggctggaggtcggatatggccgaactggtggaagcgtggacgacaaatgacgcggggcaggtatggcggattggagcggccatgctgcggggcgaagtccgtggcggaggggacaggggcgccgggcgcaaccatgtgcga

SEQ ID NO: 47678 - DNA, 510 bp, Oryza sativa
tacggtactgtcaaatccatcagagagtatagcatttgtttgacttcttatcttactttccaaagtagtactagtagtactacttttctccatcaaatcatcacagttctacttttctcttgaatggagcaagctcgtggctgagtttccaatagcaagctcgagaaaaggctcgaggctcgaacgaaccgagcccaagcttaattccaagctcgatgtcaaattaggctcgagtctgttccgagctcaagcctacatagggaagttcgctcaagcttggctcgttgacagccctatacatgcggactgaacacccaatttagttacttcaattaggttatttgatatttcctttgaaaaccaccatcttacagcattctacttgcaagctacttgcacatatactaattaggtgagattgagaagataagtatatctcagctttgctgccaataaatatcgtcggctgcatgccccattacactggacaccactccggctagtcaatta

SEQ ID NO: 47679 - DNA, 697 bp, Oryza sativa
aaaaagttaaaacctaaatacatgagatggtacacgagaatgcttcatcttcataacttgtccctacaatccaatttccatctgaacacgaataggaatccttcgtctatatgatgcgaccatgtagtggcatagagtaaatgaaattgtacccgttcgaccatatatcgatatgggagaatagagtagaagaggtacacagaatcaatgccaggtttgtaagaacagatgacattcaaattttaacaaattcgcaatggttcatgagaggataaatcatacaaaaattcagttcaaaaaacagtccattgggtacctccatagctcatgtgccaaaattcggatcagccaaaagaaaacactggcatctttgccagctcaggcaaacactcctggtataaaatgaagaaatgtgaatttctgtttgccgatcgcctcagccctgaaaaaccagagcaatttgcaatgcaggctgtaataagttctcatgatccttgtccttgacagaggacgaagtgacttatttctttcgcttaacttttagaattcttcttgcagacttttcactgttgccaccagtagtgcctattgagaagccacctggggatgattgactatgctggccaaattggaacatgcccggtgaagcggatgtagctgaagcaaactgagttgctggcgtactaaacagagttgg

SEQ ID NO: 47680 - DNA, 724 bp, Oryza sativa
ccacgcgtcattagcactaataacaacgctaaccatatggattaatctagttatagtttttattatcaaaataatacataaatagttaagttgaaagtttcgaaaatatgatgaaaattttcaaaatctgagttgaaagttttaaaaaaaaatcttgaaagtttcaatttcgagttgacagttttgaaatttgagttggaagctttcaaactcgagttggaagttatcaaatttaggttgaaagttttcaaatttgggttgaaagttttcaaatttgacttgaaagttttcaaattttgagttgaaagtcttcaaattcgggtcgaaagtcttcaaaactcgagatgaaagttttcgaaattgatttaaaagtttaaattttgagttaaaagtttttaaattttaaattgaaagtttaaattttgagttgttttaaattatggttgtgacttttaatttttcatctataaaaagttttaaatttcacgtatatattttaaatctttagttaaaaaatacaacctcatgaaaaaaaaggaaagattaattaaaaaacataattatcggaaactaattccgtcaactaatataatcttgattattttctccgaatctagcgcacttgagcacgcttcccggtgttccctcgcgcaaaaaacagaaatagaagtaggccgaagagaaatcacgtacgaggacatgggcctaaaacgcacgctagatg

SEQ ID NO: 47681 - DNA, 583 bp, Oryza sativa
attctacccttatatatcatatcatatagaaaagaaagaaaagatacaaacagaaatcgtaagtgacaaaggaatttatacgatcagtgcttggctacagcaatcgcaagtgacaattctataacgatcatacatgtgtgaaacaactatcttctttttttctttcttttctattggtacataagggtagaatggtcatttcattcataccgttgcatgtgaggatgatttggcatgctcacgtgacactttttgtgggtccaagtactatattaacccaaatgattaatttggagaactagtttagacaatttaaaacctcaagtactaaactaagtccgaaacgaaacttcagagaccgtattagctattcacccttttcttttccccacaagctcttaatggcctctacgtacccttccatctgggaattgaactattgatgtataaaattcctttgaaaccataatgtgatattttgcatattccagatagggcgcaaattaattaggaacaaagctaaatttcggcggagtacgtaaacatatctgtgtggggtaccgagctcgaattggcctatagt

SEQ ID NO: 47682 - DNA, 672 bp, Oryza sativa
tgcaaactacaaataatgatttgaacctcaattactaatttcataatttgcgtggttaatcttccctttattagaactaacagtgtattaacagtgtatgttcatgaggcggagcctgggcaatggcccaggctggccgggccttggctccgccattgctctaatggtttagaagttgtgaactatcctagatatcgacaatccttgaaataaaataagaatttatcaaccatcatatgtgaataaaataaacgggagaaaaagtactggctgcgtttcatcatctctatatgatctgtcgttactgtatgcaccgttgccatcatggaccaaccacttcctcataaccggatctggagaagaagcagtgtatgagaaaaggcaaaaaccataatggaggaggacggacatatacactagtacagatccttccatctgtgacggcccataacaagactggaatttgcgggccgtcacaaggaagtaatcttaattgggccgaagtttcccccgattgagatatggtcgcacagtcatggtatataggcataaaactaaagcccgtcacggatgacacttatctatgacgggctatacttgaggcccgattgagataagtttggtgcccgtcacagatgacactcttcctttaggccttttataaagactcga

SEQ ID NO: 47683 - DNA, 656 bp, Oryza sativa
atcatcgatctcgatctcgggtgcatcatgcatatgcactcggtgcaaattaagcagcaaaagtctgaactgcattgcatatgcagtgagccccagggagtcgttgaaagacgcacgcatgccgacgatgaagatgctgcaccgatcatcgtccggcggcctcacccgggatttccatgtcgacatcctgccgcagcagggagagagacatgctcatatgcagcagagcgtcgatcaaaccgctgaaaagacagaatgtatatatgtaacccataatcattcattattctgtccatagatttagttcgtttttcttatgaacttatactgaattaattggtaggggtgaaagacacggtgataatccaggaggtcgccggcgagagatcggaagaggcggaggaggcggcggagcgtgtcgcggcagattccggcgacgaggctgcacctgcaggtatacgacgcaactgcaactttcgcaaaggactggtttttgactcgcctgtagctttcatggagaaaatctgacctctaaattgaacccacctgccagtcgccgacgaggacaacgccgtgaagaccacggccgccgtggaagaaaccactgctcgtcccgaccagccatgtacccatcacacacctgcacgcagtcaaat

SEQ ID NO: 47684 - DNA, 684 bp, Oryza sativa
cgatttgagctgcaacaccagaaagcatatgctccaaataaacgattggtaatcaatgaaggagcaaattagtggcaaactaagctactgatgcaaatcaagtatttcttcagcactgcattaggctctcaggctatgaactatgggtattcctgatgagaattaatcagtatggtcaatcaaagcaagcatcagaatgtatgatttacctaattattttacatcatataacctgcattttatggttgattagtattactccacctttgcaatatggatgaactgataaagcattaggaactcagtagcagaagctaaatgcagcaaacatgctctatttttttaacgcaacctagtgaaaaactaccaccaaaatacagtagtaacatatgtaattgctaaccaaaaatgaaagcatgatggcttcagtttacttgctaccgtgacatcaattaaaaaggtttcaaaatataaatatgacacctgtgagcggaatcgattgatgttccgttcagtggtaatcttagggtgggttcccgtctgtgcaaaatgtaaatcggtcagatcatagcaacgcatcagcacgctataaagaagaataggctaaatgaccaagtcccacaagaaagagtaaaaacctcgatagcatactgctccgcaggaagaccaaatgcatcccatccc

SEQ ID NO: 47685 - DNA, 676 bp, Oryza sativa
tgttgcgaggaaagtaaactggaataactatggagaatccattagaatatacaaaaactaaccatgattttgagcgaatttataattagtacaaccaaaagtccaaaacaaatgcttctgaaaaaaggaacataggactaacttttgaaatgtagctaggcagagcacctccacacaattgagctgcctcctcataaggtaaaatataagctaatacctgcatcaagtgtaaaaaattgaagtcacaagataaacattataaacttcaacaagaacagcttcgtgtgtcttacttttgctcctttagtaattaactcatttgcttctttttccaactcgtttttcttatcctgcaactgatctggtggaatgactcctttatactcaacgaaaggtctgcagtgaacaaagaacacttaattgtgcacacaataatctaactacaaccaaattagtttgagaacacatgataagttggacgcaaaggccaagagtaatcaattgttgttatggagcaacagaataaagcatccaaaacaagcaaccatacccatcagggaaatgatgtcctttcccagggtcgaaatgtgataagccaatattgctcatgcagatgtctatcaaatgccctgcagaatgaagcctgcaaagcaacatcacaggttcagcacgacga

SEQ ID NO: 47686 - DNA, 650 bp, Oryza sativa
ctgtatgttggtagacggtacagcccgagcaccgagctcgggttgccggacctagctggctagctcccccactccctataccattgccatcttcagattaaaatggcatagagtatttgtaacaacatgacccctcttgcagattgcatgaacgaagaagagggtaaagagtaaataccagacatctgtagactgcacatgtatgcatttttatgcacagatcagggcgtatgcttgtagagtgcgcatggtgtttaattctaactccggctcggcaaaagggcactgcgttgccggctggctttgccgccagtatgcgggactgcatgtggccatgccaccacagggagatggcgggaagagggacaccgaggaattctgccgccggtagggctcatctctccctctcactcgcacgacggcatcaacagatagggattgatctgaaaagagaattactaaattgcccttacatttttttagcatattcctataatacccttgtaaatacttgcagtatatactgttagtatattgtaccgtaaaagttctcaaatatttagctttaataattagtttatggttgcatttccgggcattttatgattaattaattccgtggctgcaggatcgacggatcatgtcatgtg

SEQ ID NO: 47687 - DNA, 504 bp, Oryza sativa
  unsure (1)..(504): unsure at all n locations
tgtatcggtatataagacgagagtaaaattttaaatgcattttccttcttactaccattatcttatcctatccttacattttantagcactttactttctcccctccctccttgacaaattgaaaagttagcctttatacatttagaccgttgttcacggggatgagaccagtcagtggttggtgtacgccactctctttctatctctttgcatatttgccaacaaatctgtacagttgtggttataacatttaaaaactgtttattcaagaaaattgtttccttttaagatggaaaactataaggagggagtatatttcagaattttaatattgattatatataaattactttctttatataataatctgtaagaaaatgtttttttgtttaattgttagtagatgaacatgcatgatttgtattgcattctgaatatgtatcccagttgggtatatgatatattcaatcagtacatattatcatataatatattttttagat

SEQ ID NO: 47688 - DNA, 800 bp, Oryza sativa
ggtgtttttttttaaaaaaaagacaacctaacggagggattttttttatgatgtggcaaacgatcatcagctcgtgctaacggggtgaccgctggccggatggcaattttgcaagcaaccctactgttgcctctaagggggtgtttctttaccaggctagagagttgttagatttagcgctggataaactcatctcattttatcagatcgaacacatgggaacaaagagtcatgctgagtgaagctgtcccaactcgttggatgaaacatgtgcgcaaatatagccgaacaacttcattaagtgcgacttcttcatgttcccatgtgttcaatctgataaactgagatgagtttattgattgcaaattatctctgtcatgaaagaattggaacgacttcattaaacgtggcctcttcatgttctcatgtgttggaactgataacatggggtgagtttatcgagcgccaaatcaaacgatcccttagtcgggtcgaaaaaaacaccctctcggagagtgataaggggactgcatgcaaaattgctgcatgcccattggcgcgactaactagtgttttccacatgaaaaaaaatgcattttagatggtgcttttttaatataaaaaaccatcctaaagggcgttatcgagtatagaaacataaaacttgaaaactcaaatatacttttataaatatttaaaaataaattacagcatttgaacaggcatacgtacctggcctgcattgtttagtgaaataatgtatagctaggaaacacaatatatgcatgcatggtgaggta

SEQ ID NO: 47689 - DNA, 756 bp, Oryza sativa
ccttgcctgctgcttcagcattctgccaaaacaaaatgaagatgactgtcaattaaacattatgatttaaatctgaccctagttttatctatgccaaagcttgaattataattcttcaacacttaagaagaggggtagtgtccagtcagcagtacttcaaggcatgttgctaatgaggttagtagccatggcatcaatatacgtggttataggttgttactgttgccagcagcagttaagaccactgttggttttagtcttgcacttcagaatgctgcatcttttagaatctacttaggcttgtaccaataatgcattcggtaattgatttcaaaacctctctatattcattaattaggcaattcactcagggagactctgaaaataatactaaactgagggactctgaaaataattcttaatttgaaagttacaactatcaaagttcaacaagagccaggtaattttcattggttaagacaaaagaaaggaagcttgtattggataagtgaaaccactatgaaataattctacaccaaagaaaacataacaccaaccgtgtatacattcggaaattgattttgaaaactctagattcattaagtaactaattagacaattcactcaggtttgtattgaagaagtgaaacttagaagactgtaaaaataattttctagaaaagaaagcgttccggaagcatggatatcttaagcttgtctcagattggaatatgttgaaagcatcatagcacaggg

SEQ ID NO: 47690 - DNA, 500 bp, Oryza sativa
tacatgaaacagttcggttccatcaaaattccccgtgaaattcctccggtccgaataagccatagatcagacatcaccattcaccaatgatagcagcaattctctcttcatgtactagtagtctagtagtacaactcatcagaaaaggtagctgatctatgtcaatgtaattaatcaatcacaggttattagtactccagcataggtaaaccaggacgtaagtacaattaatgaaactaatgcagcaaagcaaatgctaataatggccactttccaccctgcactgcaacctagtctactcccctcacatgtcgcaccagctgcagcgccacactccactcctcctgacgactccactgtctcctcttcaactgaatcagaccagaccacgccgcagctgagctgcaggagcgcgcggccagagccttcgtggcgcagcagcacggtggcggcagagccgtcgccatgaaggcggcggcgagggagaggaagccgaggca

SEQ ID NO: 47691 - DNA, 722 bp, Oryza sativa
tcctgtttgccaatgttgccttgcttgcttgcacgtatctgctactactcacctgccattccggctggccttgcatcgctccatcacattacaacctgttcgttcctcctctcgttgttgacatcacaggtcaaagttggcgacggctactcctctcctaccggcccaagaacaatcccatgtgggcccaatcatacgtgggcttgttgtctcggcccatggattgaatattactatattgtttttttatggaattattaatatattgtttatattgtttagaggaaacctggcattttgtgtgttagtgacaggtgagaaggaggcggcggttagttgcgcaactgaaccgacgactcatcagtttctgttggacaaccaaactctaccaacctctgctacttgtttacaacaacaacacactcaatgcaaatctgtcatctctaacaacgacatgtgcatatgtgctacacaatgtacttgtacaatttctagtagttgttgggtattctaattgtactttttttaaaaaaaaaatgaacacttatttgatcgagttgaaactagagatcaccaaatgcgaacacaattcagtgctaataatgaatcgatttcgttccattccatcctccattatgtgcatcaaagggaatacaaagagaagtagtataatgtaactgtaatcctgatcaaataatcgatcgatttcttttttctgtgaa

SEQ ID NO: 47692 - DNA, 549 bp, Oryza sativa
aaaaaaaaaatttgaaactggggtggtaaaatgttggtattcacaggaaccgttggatcgagaacgtgcgataaaagaagacaagcgaacgcatcctgcctcccaactccattccgagtttctgataaccagatggatttactgggcaaagccaatgggatgccaaaaatgacaacactcatcgaattttggcatgatgtagagggatggcatttcatgttgtacagttcagttcattgccatccatacttctatgcaaggtcaaacagattggcagtctcatacttctatgcaaggttaatgttttacttgagcaacattggagaacgttaatgctttacttgagcaacgtaggagaccgcggataggtaaggttgtatttccggtgcaaatcgagctccgaaatcccagtgcatcaaactaccaactgctagcagtgcgttcctgcttggggtacaccaccatgattcatgtttccgccaactcttcgtcaaagcttcatccgagtttggtgttaatcaagatcaacaagtcatattagtttgatga

SEQ ID NO: 47693 - DNA, 836 bp, Oryza sativa
cgatcgatgcgcttacaaatcatgatgctaattaagagtgtataaggtcatttccaacctatgacactagacatagttttcataaacttcacatcatcaagaaactagtactagtactagacactactcttccaatacaaacaccactattctatacttagatttaatgctacttatttcacatgatgtcttgaatattgtgtaaaaaccatgttccatgcaggacatggtttttttttctcatttatttatttgtcacgttatttttcatcctagttgacagtttatttaatgctataaacatcatcctagttattgggttagaaatggtctaatcatgagatgtacgatactaaacgtctgttcgcgttccgcgaacgttcacgtattagcctcacccgctgctcgggcggtgctgcgagaccgcatctgtctcgtgccaacagaccgcaaacagcgtctctctcgtgccgatgttgtggcgttgcggggccgtaacaacgtcacccatttcgcaccacgacaccgcccatgtcatgactccgtcacgcgagcaggacggagctagaactagacagagagatgctgctagcttaatttattttacttaatattgagtttaaactgacatagatacttatatttatattgagagggtgcatatatagcgaaaatagataagatatagttataatttttttttcaccgggttactaggaaccccctaattactctacctccaccctgcacgcgagaccgcacacgaattcagcacgtggtcattattttcacgcaacggtcgagcaatatcgtgtcatgccctttcactcagcgac

SEQ ID NO: 47694 - DNA, 738 bp, Oryza sativa
aatagaaaatgcagttcaatttttctggatgaaaaagaggaacatttcatcacggatcgttcagatgacaaacctgaacaccaataaataaacagaaacaaatgaaaaagaagaaaccatattatccaaattcaaatgccttgtcctgaactaataccgcggcaaatgggaatctctttgccggattctcctcacaaaccagcaagcagggcaacgacgaaaatgacaatgcaacagcagcaaggaacggtcgaagcggtggttagcacggcaatgtcccacaaacaccgttgagatcgacttaattgcagttataatttagagtaaatttcacaaaactacatatactctagccaaattatcacaaactacagatttaaaatgatgtatcataaaattacagatttaacaataaatttatcacaaaattacaattttaaggtggagtatcacaaaactatagatttagtaacaaagttatcacaaaactacagattttggagtttaaatctttagcattagtgttatatttgagttataaacgtctaagttttgtgattgaattgacactaaacctatagttttgtgataattttttttactaaatttgtagttttgcgataatccactttatgtctgtagttctctgaaaaatttagtggtaaatctgtagttttgtgataatttgaccaaagtatctgtagttttattaaatttactatataatttatttactta

SEQ ID NO: 47695 - DNA, 599 bp, Oryza sativa
tacagaagctatttggaatatagttgggcccacatgtcaacggcagtcaagagtagtattctgagaacatccatcatgttaatgcacaaatttgtaattttgtaaagaaaacaacaaacgttcatgcaaaattccaaatactagtactttcccaaacgtcctccaaagcttataatccaataaagtcatactctcaacataaatgaatgaatgcagttcgttgaaaaaaaatgaatggatgtactatattcacataaataaataaatgaaagcaattataatcagaaaccaacaaaatgtcactttgatctctaaataagaacataaaatcactttgtttttgggaacaaatattttgtgcttaccaatcggtttggcatttgtcgagtctcttttggagaactcttctgctgagacggcaccagacgtgttctttggccgctgccactcctgctccctcttcttctctgcatttgccgaaagaattcacgttagaaatgaatcggaacaccaatgtgaaaataatactagcatgcaaaatttgcaaacaaacagaagtaaagtaaacgtttgtgcttggactgatcgatgcaatctgt

SEQ ID NO: 47696 - DNA, 903 bp, Oryza sativa
tatgttttttctacgttttacaatcatctattttacacttacatttctatcaaaatcctacgttttctcaatcctgcaattcaaaggggcccttactatttatatgcgttatttttttctctctaaatggatgaatagctgaatatatggcctgtaataaatagttgatggtacaaatacattaattaaataatataaagttaataatagatttaaaataattttatgagaaatcaatattatatataaagtttctacaagaattaagacatacttcatctatcccagaattgtagtagcaattaaggatgggataacactatcacaaactaggcaggtaattatctaggatgagattgattacctatccagattactacgtattaacttgtccaaattcatatcattaggttaggtcaaataacaggctgattcgtacttactaaattagggctaatttcatctttaattgctactctatattagaggttttggaagcgtgtgccggcgagatgaaacggtttcgttcactacaaaaaaaaaaaagtcagccttctccatcctttacacactgaaaaaacggaagtacttgctccctctgtaaaaaaaaaagacaaatcctttctgtgtctaacgtttgaccgtccgtcttatttgaaaaaattataaaaaaaattaaaaagacaagtcatgcataaaatattaatcatgttttatcatctaacaacaataaaaatacaaattataaaaaaaattcatataagacggacagtcaaagttggacacggaaacccagggtttgtctttttttttttggacggagggagtaggccagaaaacaagatgacgagaagaaaagaaaaaaaagaaagggagaggagaaaaaaaacggaaaagaacaga

SEQ ID NO: 47697 - DNA, 2749 bp, Oryza sativa
ttgtcataaactagtgagaatttgatgaatttaagtcggtcggtgtagacacgtacgtacggtatggttgtcaaatgtcaatcctattttcttgtgcctgttctgaaagcaacaagtgtcctgacaaactcgtcactcttgcatagttgcattttcttctttctcttggttaaaaaaaggtcgcattttatcttgaaaattgataaggatatatattgttatattttttttctctatcacaaaatatcactttcagccatgagagcgacggtgctatttgattgctaatttctccagggaagcagatgcaatgtcaccgattatttcattgctcatgataggtgactatggcctactgcaagtatatatatactccctaaaatacatggataatcaacacctttttagatcgagattcctcttgatgataatcatgatcaatgaactgaacactacgctgaaatggagttgcctgcattgatgggcctcccattctctgaattctggtgcttatttttttcaagaactttctatgatgcttgttaaggagtagctctcaatgaactgttccgatcttctcggtgcaatgcagtacaactacagtgcatgcacggcagctctcaatattaatttgtgctactgtttagattttattctctgatcaagcaccgtcagttcagaagcgatggatacctgcattggccatcctggactccaatatttttcatgcagcaggtcattttcaggcctgcatccttaatgcaatacggctgccatttgacctgcaactacgcattacaatgggcttctgaactgaacagaaactgatcaggaattctccctggaaattgagagcacaatgcgagtatactatactgcaaaatggccaggagacgtaaacgaaacagagacgacgtgctggcttctttctgtccttgactagtttgccagtaacatgatttcgtccggacacggttatacacaacagtgtataatgtatactattttgtattaattagtggctaattaattataactagcaactacatatactatgtgctacagcctacagattacacgtagtaaagatcatgttagtgtagaacagagtggatgaggtgcgaccaacgactaagacgacgtggctgcagtacatgcgtagctacctaattgactcacctcgctcataaggagtatacatatttcatattaagggtgttgggaacccatctcccatacacggaaaacggaacggtccattaacacgtgattaattaagtattagctatttttttttcagaaatggatcaatatgaatttttttaacaatttttgtatagaaactttttgcaaaaaaacgcatcatttagcagtttgaaaagcgtgcacgcggaaaacgagagggtagcgttggaaacttgctcttgcacacacacccttaaggtggtttggcaacaacttataaacaacaagttctgcatcaacgctttgaagaacaacctcagcaagcttctaatctttccaaatctatttataccgatttttattggaattgaacactcaaattaggatcctgcattgattggtaaaaaacatctaaatgaacctaagccttgatgaatatccatgctttaagtttatgtggaaagaactcagaagggcgaaatctctggacgaaccttgcggaggaaaccctgggttttcgaggcattggattcttaccgatgttttgttactcaagcagacattctcacatccgcttcatcgaccctacttttgtggtggcttccctctaaggtggaacactcccctaccttgcagttgcttccctctaaggcttttgttactccagccaacattctcacttccactttgtcgaccctgcttttgcggttgcttccttttaaggcagaacactcaccaaccgatgtatattgagctattatgtactccctctgttttatattacaagtcgtttgattattttttcctagtcaaacttctccaaatttaaccaagtttataaaaaaagatatagttaaatagatatatttaatatgagatttaatgaaactaatttaatattttatatatggctaatttttttataaacttggtcaaacttaataaagtttgtctaggaaaaaaaatcaaacgacttataatatgaaatggagaaaaataaatatattatcaaaatatatttaatgtgagatttaatgaaactaaattaatattttatttgttgctgactttttttataaacttggtcaaacttaattaaatttgactaggaaaaaagtcaaacaacttaccctccaaaacctcgtagcttagcctagccgacgagcacttatacacactactccacttacactttcattctcgattcttgtaaataaaagggttaatccggaagtgatatggttggagggacaaacccttataaattagttccactcttgctaaactaacgagatggtactacacatgagcacacaaaaaacatgtcctcgtatgaaaacaagctttggttactcggtcagttggtgaaatggtgaatgctgcattgcacaggttacacattgcaggagctctactaacatgaattcggtgacatacatgtactctaccaaatcaatacaatcaatgtgcatgttcatacgctccaccaatgatgatggatatactgagccaaaacaaaaacaaaaaaggatgggttggacattctgtaccaaattgcgaccaa

SEQ ID NO: 47698 - DNA, 1010 bp, Oryza sativa
  unsure (1)..(1010): unsure at all n locations
tgcgtcttgatctattgtnccgtgtccccctcctcctagggggccttgtatttataaccataggtgtccccttgtctaagtagaactagggaaaccaatatggatacaatccgagtagtccttgtcgtttccatgtagaactctagtcatgcttccttatgtggaactcctcctatatccgaaagttgtttccgtataagacatggtatatggtgggtcctgtcgagatttagtcaactactattaggtatgtggtatccacaaccctgacatatagtaagtaactattgtatgaattgactattacattggctatagatgatttggaggtagtagttgactatactattatacttgctcttagtacggtccgaccgaaggcaatttgtgactcatgagacaacgaacccaactgtttacttggtcgaaatagctaataggcgatcagtcgccgcgcgaggagaggggagcgcgggcagcatgcggtttctttttttgttttgttttttttcgcacggtttccgggagggacgtggtttctttttttttctttttagggcaagtactataaacccctacatattgcccctaaatttgacatataggattagatgatgagttggaggagagaagttaggagagagagaatgaaccaccccatatgcaaggggcaacctccacacaatctccaagaaaaatataagatgatatgagagtaaactaatactggggtttgtgtactagaagtgacatgttgtacttgttaccacttaattaatgagaagatgatatgatgtaaattagatgtgacactcacctccactataaaacttgcccttatgcgtgcggttttcttttttttttcttttcttccttcagtatcgtactttttgtgtggcgcgcgttttttttctggtttttttctttccggatctttttcttgttttttgtttttttaatacatacatatacaaagtttgtatacaaattttgtgtgtataaatttttat

SEQ ID NO: 47699 - DNA, 1078 bp, Oryza sativa
gatttgaaggcaatttgaggatgattgttttgggattttggggacgggatagggttagggtgaaatcaatatattaaaaataataaagagaagaaaataataaagaagcaaccggatctgtctcaaccgggactaaagataaacaccaaccgggactaaaaatcgatttttactcccggttatctcacccgggactaaagatcgctatctttagtcccggattcgtagtctcggttggaaaaccaggactatataggggttatgaaccgggagtaaaatccacttctccaccagtgacacgttttaggtacaaaaggaaatctgctgcattcacgtgtggcgcgcccgcgcatgccaacctgttcgagccattcgcgggtacgggttaacgcgaacgttcacgtattaggtatttcgtagaaggaacgaacaaacggtcatgctgcccctaacgtgcgatcagtcgcgcttcccacgagccgcgcggtcagtttctgaccatatagtctctctcctctactagatgtatatatatatataaagtttatatgtatgtatataaagtttatatgtatatatatatatacatatgtatattttctaatatgtatatacacatataaaatgtttgtatacgtcatatacaaagtttgtatgcgacgtatataaaagtttatatatgtatgtatacaaaatatatgtcacgcccagaaatttagccctaaatttccagactattttgtgtattaaatccctgtccaggaccagccaggatacacaaaacgataagtaatatacagttccaaacgtaaataaagcgtaaaccatgcacccacagcccacgctggcttgtggtaagtacgaggaattcttgcagggtttcccgcgaaccggtccttaattgccatgggtgcgactagcaaaaccatgcacccacagcccaccattcagtcgcattttagttggataattacgaccatgaagcatggccagatgtctcgagcacgcagctcattcagatactaaaaaggtctaatactgcaattatcccatcaactgagctagtggcaattaagca

SEQ ID NO: 47700 - DNA, 1142 bp, Oryza sativa
aggtggaaaccatccagcgacatgggggcggcatcaaggggcggagtgaaggtggctcggtgccgtttttctcgggggaagtgggggaagagggggaggacgagggcggcgaccgcgcccacgtatgcgcgggaaaggggggtcgcgcggaaggggcggcaacgtgggcgtatcgggcggccatggcagttgccggcccaagctggaggaaggggaaggagctgacatgtggggccgggtcccacatgtcggccggagagagaagagctggggggggttttgtggactttcaagggagaggaggcaaatgggccaacggcccctgtaaggggggggaaggagcggtctgaaggaggggaaggagaggcttgggccgagcccaaagagaggatggagagatttatttggttttctttttacttaattgattaaatgaactttgtggcattaaaattatttattgagctccgaaaattcacgggaaatttcagagaatatattagggcacaaagaatattacaaaatattctcagccaatgatttttatggggaaattttaattctctcattatttcacttgattaaattgctttaaattttatttaatttttagaaaatgcattatttaatgatttttaatcccgaacgaaaatcggggcgtcacaatataccatctttatatacgtgtgtgtgtgtgtgtatatatataatttgtacgcctatatataaaaatttatacacacaaaatttgtatacaaactttgtatatgtatgtattaaaaaaacaaaaaacaagaaaaagatacggaaagaaaaaaaacagaaaaaaaacgcgcgccacacaaaaagtaacgatactgaaggaagaaaagaaaaaaaaaagaaaaccgcacgcataagggcaagttttatagtggaggtgagtgtcacatctaatttacatcatatcatcttctcattaattaagtggtaacaagtacaacatgtcacttctagtacacaaaccccagtattagtttactctcatatcatcttatatttttcttggagattgtgtggaggttgccccttgcatatggggtggttcattctctctctcctaacttctctcctccaactcatcatctaatcctatatgtcaa

SEQ ID NO: 47701 - DNA, 576 bp, Oryza sativa
aaccgtatcagtttcgttgcaatccgatcacccgttgtcgcgaccctaattttagccctagggtacgccgttcaccgaaattccaaaaatccctaaaattatttctttaaatccttttcacccattgttgcagtttgtgatactattttcttttggttatctttgcttttctgttatttattatggtgatgattgttgcgtaaatagaaagcactgacgttggtccggtagtcggagcaagtgaaatctccgcgccaggaggagacggtttgtacgactacatcgagcccgaaggttgcaagacatgcaccctcccttgaacaatttaatcccagtagttagagagttattttggtagcgtactcgtcctttggagtacgatagactgcacgaattcttttaaattaattatattactattattgcattatattttctgttgttgttataaacaccttaatgagccttagagtataacaaacttaggataaaatttgagaaacacctaaacaaatggttaattatttaacatgctattgatttaatatggatattattactgcatatgaaaacatg

SEQ ID NO: 47702 - DNA, 677 bp, Oryza sativa
accaagaatggcactgtatgatactagtatgagtaccagtagtatacagtactgtgcagtattatacctctttgttcttgttgctgcttgtcatctcctgacacatcaagtttttaattatccaggaaagctagctgttgagtaaatctgcaagcaaaacgactactgtaactgtatgtaattggattaatctactagtgagctggttgagcactttgccagtgttgacaggggtaggtaggtgcccattggttgtagggaagttgcacatactgaattcagacaaactgcttgtgaaaattttacagactgaattcggacaagttgcttctgaaaacaaagaaccgaacgaacggttagtggacagtgatgacttcacggggtgcagaaccatgcatcaactccttcctagaatagttttgatgaccacatcgcaaagcaaggaaatgttgataagacagcaactgctaaccacgaaaggagaacaccaatgcagattctgagattcagaagcgatctcctacgaatttggaccaaacaacaaactgcatcacaaagatagaagaatatttcagacttgttacaactgaattttgctcacaactttgtaaaatctgcatgtaattcagctattatcgtatcactcaaatactgaattcactgggcgatgttgagtg

SEQ ID NO: 47703 - DNA, 653 bp, Oryza sativa
tcctaagtttgttatactctaaggctcattaaggtgtttataacaacaacagaaaatataatgcaataatagtaatataattaatttaaaagaattcgtgcagtctatcgtactccaaaggacgagtacgctaccaaaataactctctaactactgggattaaattgttcaagggagggtgcatgtcttgcaaccttcgggctcgatgtagtcgtacaaaccgtctcctcctggcgcggagatttcacttgctccgactaccggaccaacgtcagtgctttctatttacgcaacaatcatcaccataataaataacagaaaagcaaagataaccaaaagaaaatagtatcacaaactgcaacaatgggtgaaaaggatttaaagaaataattttagggatttttggaatttcggtgaacggcgtaccctagggctaaaattagggtcgcgacaacgggtgatcggattgcaacgaaactgatacggttggattcggaataattctaggagtttggaataggtctcggattttgatttcgagctcaaacggatggtcaacttgataggaaaataaaaatgttttttcttatttatttttcaacaggaaaatcagatttcctattcatctcgttctgtgcacgggagccggtcgg

SEQ ID NO: 47704 - DNA, 996 bp, Oryza sativa
taaattttagtcccggtttgtaacatcaaccgggactaaagatcaaaaagtacccctcagcttttaaaccgggactaaagatgatttttagtcccggcttttattggaaccgggactattgttgaatttggccgaccgatcaaagatggtttcttcaccagtttgtacatatatatatatatggccctccttaatcaccgatcttttgagactaatcacgtatatgactttccttaatcaccgaattttgagactaatcacgttggtgaatttttttttatcgtttgccgcgcatgcatgcacatgccctcgtttgctactttgttttggcccaattgaagcttagtaattttttttgtttttggaatttattttaattttgttttaaaattcatctatttataaaaagtttgtatatcaaaagtttttatatataaagtttgtatatcgaaagtttatattagtaaagtttgtatgtataaaggtcaagttgtattaaagtttgtgagtagagatattagtaatttgaataggatttattaaaaagaaaagttcaaaaatttgggtaaaaaatctgttgagtagaagatgttactataaaaataaaagattatgtatgccttagttacacaataattatatggtaatgctttaattacaaacatcacactattttttttagcaaaatatatgcataccgtcaacatatgcaaatgattgtacctttaagtacatgctagctaattaaagtgtcggcctgtatagttgcatgctactccatttcttatccagttgcatgtgtgcatgcgatcgatgcgcttacaaatcatgatgctaattaagagtgtataaggtcatttccaacctatgacactagacatagttttcataaacttcacatcatcaagaaactagtactagtactagacactactcttccaatacaaacaccactattctatacttagatttaatgctacttatttcacatgatgt

SEQ ID NO: 47705 - DNA, 553 bp, Oryza sativa
tatataaaaaagagcttttggtgtaatatttatccaaaatgatcagaaaagattatagatagttaataagatggtgttaatatgtatttaagaaaaaaaaaagaattgaatatggtgctagtttaaagatggatgtaattttgaatttaagagatatgtatagggttctaattttttaaacgaatatggatggtagaaatagtttggtacaagagttgttgttaattaaagacgtgtataatgtgaattatatatatttttttaatttgttgttcgtaagttttaaatgtttagaaaagatccttcttttttcactttttactgagttgatagtttatttgaaataataagagaaaatgtgtgaatttgtactggatatgacgtagtttttagtaagtaaattttagagttgttttctgattttgatgggaatatatatgcataaaaaagtatattggggtatagttatagtttataggtagtttgggtctaattctttattcctagagggggggtgtttgtgcgtaaaggtgagaagatggaatttgaaaaa

SEQ ID NO: 47706 - DNA, 645 bp, Oryza sativa
tctggtttgcgtccaatcgggtgttgcgagtagcgacactttgaaacgggacgtgcatctcttcttcttcttctgtaggctgtagctagtaactcgtgatggcgatctaatcctttccccatttcgttcgcccagctgttgcttctgggatcaccatggcatgtcatgtatggtgctggttttcttctttgttttaaggagagaatttgcatagactgatcaagtctactgtgagggacccacgtttcacattttttataaacttgattaaatttaaaaatgtttggctaaggaaaaagtataaactacttataacatgaaacggggaaatattgtttatgctcttttgctgatttcttccttttggttgtcttgactgcagtggaacacgcatgaggaggtgaaggaggtccatttgaaacagaatgtccctgaaccatcttcttacctgcataagtcctcggtaaaaaagaccccctctaattcacaagtcagccataaatttgtctactttcctttaggttgtcctgaatgtagtagaacacgcaggaggaggtgaaggaagtccatgtgaaggagaatgtccctgcaccatcttcttacttgctcaagtcctcggtaaaaaaagatcccactaattctcaa

SEQ ID NO: 47707 - DNA, 568 bp, Oryza sativa
acactctagatgtactataattacatcctaattacagctgtaattatatgctagttgcactgtaaatactccatccgtcttagaatatagtaagagattttggacgaatgtgatgcttcatattatcaaccacatctatccaaatatcttggaacggagggagtacactatacttatactatttaggggattttctataacatgttagatagttagtccccaaaataattgtgaggtcttttagaataaggctgtgtttggttccaccgtaaaaaaaatatcgggtcacatcggatatatggacacatttgaagtattaaacatagactaataacaaaacaaattacataatccacatataaactgcgagacgaatttattaagcccaattaatctgtcattagcaaatgtttactgtagcaccacattatcaaatcatgatgcaattagacttaaaagattcgtctttaatttacatgcaaactgtgcaattaattttctttttcaatatttaatacttcgtacttatattcaaacgttcgatatgataggaaaaaaaaattacccc

SEQ ID NO: 47708 - DNA, 549 bp, Oryza sativa
atttattttttgttccaccgagaaatatttcatcttgtgtacttataatatttcactatgtatggatcaaatgttgtagtaaactgaaacattctttcgctatttgctgaaacattgtttttatataaggtgaaacaacacccaatttaaatgagtgaaacattccgatatatctggtggaacatcgtgcaacatttaaaaataattcaataataaactatttttttcccgtcgaaatatatccatgtatggtcttgttttgaagatttaattgcaataaatttaatggtgcaatcggatcatgatttggataagtaatttaagagaaaaatcagtttaaaatagttttgcacgtaaatcatacgctgacgtcagcgcccgatttttttccaaaccaatcgggtgcccgagccgtagactcttcctcatatatcaacacgtgtgtgacaaatgattaaacattaaatttaaaattgcaaatagttaaggccttggttagttcctattttttttccaaaaacattatattgaatctttgacacatgcatg

SEQ ID NO: 47709 - DNA, 566 bp, Oryza sativa
aattcacaatcatctggacagtccactagcaaaatgtcttgtgcatgtctacataatagtgcctagtccacttaccagaaaatgctaattttatgaaagtttttatcgagagatttacatgtaagatcttcatatatcaacctaaatatttaaaaagacattgatactcaaaagttaaaagtttgagtgcatctatgcccaagccgacatgtatttgtgactggcggtagttctttttggccttgtgcaaggattaatttgtaaaagctagaatctgcagtttttgaagagagaaggatgagattatgagaaaaatgttcaattttcattttcatcattagaagtttaacttaactggattattggactcacataccagtggctttctttatgaaatgttacattagataaattgaattctttaagtatgaaactgattttctttttgctttattttcaggggttaaagctacatatctcctcgcagttgctttccttgagatattgcgctttagctgcaatggcggcatactttcagccacctctacattgaataaatcaaatag

SEQ ID NO: 47710 - DNA, 536 bp, Oryza sativa
tcatcgggctatgtgatgtattttgccaaaagtcttcacagtttatttatgggggatttaactacaataagtgggaaaagattatttgtttagatcttggtttaaaattctaatttgactgagttgctggggcatcacaataatggtaaagattataaaatgtttttgtgaagtctgtttgttttacttcggatcgagttgtcttagccccaggccccagcatgctttgtacctttcctccatgtatgaaaaatagtcatgagtgttaacatttttatgtattgttcgtatattataataacatctaaaatttactaaaatgtacttagtatttatttgtgattaggaaaatcaatcttgctttgataaaagtattattccttgcatttcatttgcataaaatgttgttacgtgggtgcatggtttgggattaaagacgtacagactaattatattagcgtatgctatgttttgattaccatttatatgtaaaataaactattaaaatgagttttaacattaaaaggcagctaaat

SEQ ID NO: 47711 - DNA, 593 bp, Oryza sativa
aaagtcaacggcgtcatttgttaaaaaacgaagggagtactctaaattagtgtctaaatacaaagacttagttaaatcctgatccaaaccccaccgaaatgagaaaaaaggaaaagttagtttttacatgtttttttgcttgtttttctcttcttttttttgggttagttcgagagagccagcagctcgagagaacagaattaatgattggtgtggcgaagacaagcaaatatactgtcgataatgtgactttggacaagttgtgtagtactgtgtttggtgaatcctgttcaggcaaagctcatcaggtctggtttgtagttttcggagtaaggagcattagagctgaaccactaattcctctaaaaagaattagaccactagaattgtagtggatgttctaagcattaaaatttttcatttgaaaatggtagtgacaactttgatttcattactcaagttgtttgactttatccttttggcatttgtacaaccatcattatcaggcgtgcattcattttacccacagaattgacaattagtgatacaacagtttacataataacggctcaaacgcacgaccacgcctcatc

SEQ ID NO: 47712 - DNA, 552 bp, Oryza sativa
cggccggctcggctagttgaacggggagggggagggttagggttagggtttcatccatttcaaaattatctgagccgtccatcaaaatgaacagctgagatcgatcaagggtttgggccgcaccacttgggccgcacgcgggccaacagtctagcaagcgagaggaagagtatagggatataaattagactttggtcacttgtaggctgaagaagaaagtgggccgaaaaaggcccatagagataaaagaatttttatttagatttttatttaaataaatacttaaatgatgtttgtattatcaaaattagcaattaagctacgtaaattccaagaaaatttcaatgagtgtaattaatgatatagaaaatttaataaaaattaaatccaaccataacattttatttctcacacttactttacttataaattaatttaattatatacctacctacttaaaaaatacccaaatattacagaaaatttatatttcatttaattagaatttaatatgttctaattcaattttatctttttttctttcacgatgcg

SEQ ID NO: 47713 - DNA, 663 bp, Oryza sativa
tggattataagctttggaggacgtttgggaaagtactagtatttggaattttgcatgaacgtttgttgttttctttacaaaattacaaatttgtgcattaacatgatggatgttctcagaatactactcttgactgccgttgacatgtgggcccaactatattccaaatagcttctgtacttactagtactattcatgggttttactagcattgtaatgttactgtcaaattaaaggcaaagccatgcttttcactttccattagaaagatcatctaaaaacagaccaattggacccaaacatgaatactctacttaattagatcaatgagcaataaatgagttgaactaattactctctgtttgcaaattaatgatcgtttaactgattaattaataaatgagctaataaacctcgatgaatcaattttttttctgtttttggtgcaacagagaacggcaaggtagtgtgccgctcgaacgggttctactccgacacctgcgacgtcgacggcgacgtccggatcaacggcacggctctctccgtgacccttgtttcggcgagccggccgtcagagcgccgccgcgagtggaagatccagccgtacccgcgcaggaccgtgtccggcatcgcgaggtgaccgtgacgcggcaacaggaccgg

SEQ ID NO: 47714 - DNA, 651 bp, Oryza sativa
tgtgctgttggcatatttggtagcaaattaaatactagtattaaagtaccacgatttgataggcgcatattttagctcggaacaaaaatgcctccctcagctctttttttttctttttttcctttggtatagatttgtgctccaagataccctaaccctagaccagtccaaaaataaataaataaaaagaatggtgcccagaatctcggttccagtgacttcacttcgaacaactgtgcaattaaatatgttctctatttctagcattaatataatatataagtttccctttaaaggctgtgtgtagttcagcgcaaagtttggattttggttaaaattggagatgatgtgactaaaaagttgtgtgtgtatgacatattaatgtgatggaaaaggactgaaatttggatccaaactttggatctaaacacagccttaataaaaatcatctgctaggtttcgtcctttaaatttatttaaatttcactcattttgagtatgagattctaataattggctgtaactttttgagcaaaagtcggaatgctctgttccattatctaaaaaaaaatgtgtattaaagcgactgcaatagaatgatataaatggattatacgagttgtcacattgtacctgtgcttatgtagtggg

SEQ ID NO: 47715 - DNA, 650 bp, Oryza sativa
  unsure (1)..(650): unsure at all n locations
taatcccatttttttaaatagttaattattttattgactaccgggtgaagagatctattatagtatatttgaccatattaaagataaatattttctccgtttcaactatagtcgctttgacttttttcctagtcaattttttattatgaatatctaaaatattaaattaatttgattaaatataatatattttttatgttgaaaatgttattatattttactattacaaatttgatcaaacataaaaggaatttactatagaaaaaaagtcaaagtaaaaaacggagggagtatatgagccgcgtaaatacgatgctcgttaatccaagcttaagaacaaatcatattccacgctcatttgctccttcaactccatggagtatatactttgcccttggattaattcttccgcgtcagtcactgacatcgtcggtcaagcgcgcggaggtacagtacacagccgcacgcctccatgacattatttgtctcaactctcaaccgctttctgctcatgtgccatcgcgcgtgggccacccgcaccgnacgacacagccgcatccatgactactccactagtgatcatcatgcgccatctatcggcgcgtggcatttatctacccgcacgacacgacgcgtcaaagcataactcc

SEQ ID NO: 47716 - DNA, 659 bp, Oryza sativa
aaccgataccatattggttaaggtttctatcttgtaataatgccccacatcctatataaggtgggcactgggctggaagccttctaaggaatgattcacaaacagatcgtcagatcaatactacacccggcggattcgaatcctcaaacaggagtggggtattttctctcattgagagggcctggacctgtctaaatccttgtctctacatccatctacttttaggtctcatgcactatccctttatattgtcgaaattttgtttggacacatatttttgcctctcttttcttgttcgatcgctcacttccatttcggggagccattactgcacggccaaacagtttccttttccgtgaaacgaagcctcccgaggagatggatcgatgtcgttcgctactaatccgaactatacgcgaatcccatcacagatgccgcatatcccgtccaaaatatctatatgcggtcctacttcataatcgcatcgcgggtttctttttatcatttgttatttttaccaaaggaccacagcagggtttttattttaaataatgacctcagcagggtttttttttttggtggttaagtaaaaaccgctcctctcagattaccaaaaaaccaacaaaggggcaaagcttgacaactttcgatcaaaaccg

SEQ ID NO: 47717 - DNA, 1500 bp, Oryza sativa
gcatttattacttgatataatagcttgatgagtatattgttatcacccttgctttaaccccctcttttaaatcaatttggagtttttgccgaagccaggagtttaatcatataaattagtttcattccaacttagttcccaggtatagattagatagatggtttaattctatagcaaaacattagagttggcttatcctatagcttctacagtaatagttagccacaatcttgtgaataccctattattttatgtaaagaaatttccattggagccttaatcaaatgtatgcgatgaagattcagattgttgaacctgtatcaatctactgatccaggggttgatacagtttaaaaatgtcggttacccaatctttaattttaggacccgacaaggtgtgtgggtggggccccctgtgatttgccagcctagagcggccgtaccgctcgcgccccctccccccagagccggccctgactacatgggccttaaaaggccaaatggcatcttatgacgatttctgggcttgatggcgacgaaaatggacgtcatagactgtatgacgacagaaagatcatcactagattaatgacaaaaagataagcattctttatagaacgccattagagatgcatgataggtgattcgtcacacgaacgttagatttcacaacatgacttaaaattcaattttcatgacgtaaattagcgtcacctagactggtggagaaaccctttttccacccggttcgtaacccccctttagtcccggttatccaaccgggactacgaatccgggactaaagatcgctatctttagtcccgggtgaaataacctggactaaagatcgatctttaatccggtcagccacgttgccagctaagccatcttagtcccggttggtgtaagatcgatctaccaatttttttcttatttgcatggccctattgctgcatggtttagggtttatgttacaatacatatatatgcattttatatatatatatacatatatatatatatgtatatatatatataggacggctctttcgtacacccaggtgtatgtacacccttttattaatggatgatccattagcattcaaattaactgtgaaaaaaattaataatattaatttccaaatgactgcatgcaagtggcatagctgcacaccggattgggtgcagacttgaacaagatcgttggcatgcatttgctttcaaatttgataacgtaccttagatatccccaccttttctagtatgcaacagtatatactgttttttaagccgcagtatatatactctttgaagtgatgagcagtactatatactagttttttttgtgtattagcagtacgtaataaggagtaccttatatttttgttgtagcagtgaatacatctttttttaattagcagccgtatatacttactccagaactaacgtgtatatatatactgattatgtctttttattggtacgcgcagtatatactac

SEQ ID NO: 47718 - DNA, 660 bp, Oryza sativa
ctcgtcgccctctacgtgtccatgtgctccaaattcgcagcgacttgctctagctcgggcgaggttgccatcgtagccggccaccattgatgatgtcatcatgacatcatcggtttttctttttcccgattttctaatagattaaatcttcggaaaatcataactaaataaccgtagatccgtttcaggtggttcaagttgctaaatttttctaaaatcaagatctacatgttaaaaatatccacatgtactgtttatgcttgtttttgtactgttttgttgatttttgtttaattgctttagtttccgacgtttcggaggagagcgtttccgttgaggatggttccgaagcgtttgcggaagcccaaggcaagtcgcacagatcccaagcaaccctttgagcatgttgaacccgtttaaagctattattttatttcaactatgcattgttttcgaatgtcatcgggtggtgaaccttttccaattaattaatggcctacgatgactttattttcctatgggttataatttgattagcatgaaccttatatattggattggttcagctaaatgctatatgtaagtttgcttagccatgcttagaaacattagctaactaaaggggttaaatatagattataatatactatattattatta

SEQ ID NO: 47719 - DNA, 1314 bp, Oryza sativa
tgtagattcttgaagttatgaactttattccaggaatataaaacttgacactcactgtacaaataatgtctctaagatttatctaagataagtcatgcataaaacatgtacaaacttataaaatacatagaaaattcatttcaactcattttgaaacaaaatcaaattctacagattcatcattcatcatcatacagtctctgattaagtgaaataaaagtaattacttactttgcatcaaaagcctctaaaactattatctttaaaatgactagttttagataagcaaaactttagaaattcatgtagaacccaatttagcttcaatttgaataaacttaagttatgtaggatcactaacacatgtatttccaagttatgaaataatattatatacttactgtgtagtaaaagtctctaaatattcatataaggatttactaacatagagcagcctttaatttgtaaaacttgtagaaaattcatttttagtccaaatgaaatgaacaaagtttctatagaaccagcaaatagttagcttcaacatagtaaaataaaatttggcaccttttgtagagaacatagatcaaaaccttaacttagtgaaataagaatttaaacacatagtgttgtttaagtaatacataaacatatataagtatatatatacactttaggtctaattaaacctaaataaaaacttgattgaccagtgaagccatagttccatcctcatccactaaaacttagaagaacttggctcatataacaatttctaggttaatataatatattgctagtttagattagagcatctctagtttataaaatatgaaccatactagtaaagaccataaacatgtgaactaaaaatgttttagataaccaaattattccttttattcaacttaaacaggaagtagcatgttctgaacctataactcaaaagtcatgaacatataaaacactatacaccaataacacgttataacttgtaaaatgcataaagaattcattataaatccaaaaattgtgaaaccaaatgtgttagtattagaaaacacatctccacacccctgtgaagtctaatctagtaaaaatcactttacaaaagtatttcataacactacctaagactatactactataaaccgataaaacttctaaaaagttcataactccctaatggaataagttaaaataaaaattctttcacctaaattcattttagatcagtaccaacccactgtgcataaatcatgcattttagagcattttggattttcagctctttcggtgtttaattgcatatcg

SEQ ID NO: 47720 - DNA, 642 bp, Oryza sativa
aataataaattaatccgtaaatggtctgattataatatagttaagtactttgggtgtccaattagtttcaggatttttcttgaaattatttgagcatgggaagtatttttaacaattcaaagatcattttggtgattgatttatttggaaaagcaataaaaatcctcctcctcagcttgggcccttttgggaccattccttcctcccttctccctgttcctcagcccagcctaaagtctgtttggcctcccccgcgatacagtgcgtcttaaagctccagccagccgtctagaggccgtgttcttcccgagagccgccgtctcctgcatcaaattcgatgcatccgttgcttcccttccaaattgagtgcaaaaacggattcctccctatctcctctatcatatccctaagatgcctcatcaaattcgttatctatctcacgaattttggtcgtttttatccggggaaactcaggataaatcctaactttcttcaccgaattcatccgttcccgagccgatctccttcacctttgcctataaatagcatcccctcagccttctcttctggttcccgaagtttttcctaaccctagccgccttcccacgctcgtctttttcttcggcgccggcagtcgctcca

SEQ ID NO: 47721 - DNA, 781 bp, Oryza sativa
tttttaaaaataattcattattacgtcataattcaattaaaatctatataaatgatttaatccgatttaatctatgaaaattcataactaattcatcttagctcgcatttagttggttcaagtctctaaatttttctaaaattgagatctacatgttaaaaatatccacatgtactgttcaggcttgtttatgtgctgttttggtgattttgctcttttctctttagagtccgacgttcccggagagtccgaatttgcaggagaagactttgaagagttccaaggccagcaaggcaagtcacacagatcccaaacaaccctttgagtatgttgatcccgtttaaagctattgtttctattcaactattgcatttattttcgaatgtcattgggtggaattaacctattgccttgttatagcccttttgttcttgattactctattccttgataccttgggttattataacttaactagttgagctttatatattggttcagctagatattagacataattgcttagccatgcttagaaacattagcacactattgggataacttatgcttcactattatttaatgatggcttaatgatagctcatgatggttaatcatgattggttaagtaattaatttgccaactaaaacctgataatggtgggttgtgagcatatggttttgatgggttgtgagcacacgattttcggttgtgaaacatttaccgtgtcaaccacaagccagcgtgggcaacggctttactttctatatagtatggttc

SEQ ID NO: 47722 - DNA, 756 bp, Oryza sativa
  unsure (1)..(756): unsure at all n locations
tatatgagctagtgtctctaagcatggctaagcatcctattcactttagctaaagccatataatgttctagctaatcaaattattaaccaagtgacaaagaatagggaatcaatagcaaaagggctataacaaggcaataggttatttccacccaatgacattcgaaaataaatgcaatagttttatagaaacagtagctttaaacgggatcaacatgcttaaagggttgtttgggatctgtgtgacttgccttgctggctttgtaactcttcaaagtcttctcctgcaaattcggactctccgggaacgtcggaatctaaagagaaaagagcaaaatcaccaaaacagcacataaacaagcatgaacagtacatgtggatatttttaacatgtagatctcaattttagaaaaatttagagacttgaaccaactaaatccgagctaagatgaattatttatgaattttcaaagattaaatcggattaaatcatttatatagattttaattgaattatgacgcaataatgaattatttttgaaaaggaaaaagggattattgcgtcagcggctcgggttcacggtggaccaggtgcacggcggcggtctacggaaacgaacggctgagatcttatcgatctaccgncggtccacggctagcgtcagcgctgacgtcagcggtgacatcatcaccggcggcggctccgacacggatgctcgccggctaacgacggcgcggcagcgcaaacagaaggca

SEQ ID NO: 47723 - DNA, 803 bp, Oryza sativa
atcgatccattttctttgtttcttttttggcatagattgaacacttggtggtgcgctcgtcggcgttcctggtgtctagagcaccaccatcgccccactttgtcattcccgtcaactcgaatcatctccggttgtaccattgcgccactgacattgcctaggtcccaggagaacgacgcccacatatgatctagccaatacgccgccacgaacgccgtcggtcgccgttgctctcctactgcctctgcttctcttgctgccgagtcaccgacatgtgggcccagctgtttagctacttcattaggtgctaaggactttaattaggttctttttgtaaaattgctttgtttgccatgtgggcttttggacctaaatgcaattcacctaatgcccagggacctttttgtatagggtttagggcttaccctaaaacatgaaattactatttcatgcatttattacttgatataatagcttgatgagtatattgttatcacccttgctttaaccccctcttttaaatcaatttggagtttttgccgaagccaggagtttaatcatataaattagtttcattccaacttagttcccaggtatagattagatagatggtttaattctatagcaaaacattagagttggcttatcctatagcttctacagtaatagttagccacaatcttgtgaataccctattattttatgtaaagaaatttccattggagccttaatcaaatgtatgcgatgaagattcagattgttgaacctgtatcaatctactgatccaggggttgatacagttt

SEQ ID NO: 47724 - DNA, 642 bp, Oryza sativa
gctaatacattttttttgcatgttgcagaaaatatgtcgtcgtcgtccctcaagccgaagtggtagctagccctcggaggaatttgcgcaggcaagtgatgtaaagatatgattatctagagttaccacatatgattattagacatagcatatattaattattagagttttaatataagattattagagttttaatatacgaaacttagactgaacatatatgattattagagttctaatatatgattattagagtatcaatatatgattattagacttagcatatatgattattagacttatcatatatgattattagagttttaatataagattattagagttttaatatacgaaacatagacttagcatatatgattatttgatttctaatatatgattattaaagtattaatatatggctattaaagtattaatatatgcctattaaagtattaatatatgaaaatgcccccaagaagaagtaccatcaccacctgggtcaggcggctatagcgtcgcagtgccaaagtgggaggagatggaagcaagcttgattgagaggggtatcgaaccggtcaccgttaaatggccggatcgatcgaagttctggtactatgctcacggtggaacgcttaaccc

SEQ ID NO: 47725 - DNA, 1698 bp, Oryza sativa
catcaacaagaactccaaatagactctgaaaaagaggggttgaagtaagggtgagtacaacgtactcagcaagctattatattattcaacaatgaatgcatgagaggtaatatccgtgtagagctaggtttacttgcagaaggctgagaataaagagggagaaagcctgcaacgtatttgatgcaatagtatttaataaaatctggaattgagtttctaaccaaagtaccatatgagtcccgatcctcaaatccgtcagttcggctattcgaatagattcaaggatattcatactgcagtagatgtacgctttacccgcagtccatgacttgccactaatcattagcttagtcatggcccagtattaggttattaacaattgtggcacctgttccatgaactctagtccccatgcgctatgactgtaacgttatcagcagcgagaggagttctggcattcccacgtcatctcaaccaggttttcataaatttacacacacatcgcgcgataatcaagatatttacctgcgcctcggtaaatatcacatttgcccttcgcggcatatatttgcctccttcgcgaggacttacataagaaccactgtacagaggtaccacattgttaattaacataatatctaggtctgtccccattgtagaagctgcggtcgtactcgttcgtttgacataagtacttggtaaacttatatcgaccgagacagtactagccacccggaaatcaaccaaatcttgcgtactgtcccaatctaagttcattatattttatgcaatctaacttggcagggctaagcaaaagctagcatatctggtttgctatatgtttaggttatgcattgtaaatcatgaatggctaatgcatgtgtaacatacccgaaattttaggacttaaaatttcttgtcaaaatagttagaggttaatttctccaattttgagagccaaaaatttctgttttaatttaggtgatgaccaacttaaaccattgcatgattaaaatttgagaacaaaataaaaccttttcattcccaacattagactagaaatatcatcaagcatacatgtacataatgcatgcctaggcttgagttctttgtgcatttggagttttggtcttgcattccataataggtcccatgagcataatctaaaagaattatttcactaaacaaacctatagttaatcttgggtgataacatgtggacttaatattaaactcaaatatcatcttctcagtctaaaagaaatttaatgtaatccctataataatattagatgcaattatgaagtgggaatacatatacaaacaaaggtcatcctaattctctaaaatattttgtgcaagataaaatcatggaaaaatttatgtgtacagtgattagcacaaacttatcctctgtaattttggtaacatgttaacactcaagttgatatctcaaattaatcagttgaagcagacaactaaaagaaatcaaattaaatttaatcggctaaaaccatatttcatccaaaagtacatttaactgcacataagtgaacatggaaaattatttattcaaatactagattaggtatcatgaataaatgtaatttttctagaatttttctttctctgtttaagcctcctaaaaattcaatctagctttctaatagcccatttttgtttaatttgtgtgagcag

SEQ ID NO: 47726 - DNA, 673 bp, Oryza sativa
aggacttgcctgcagcatagtcgatgttccagttccggacgacgctcagcgtcgtcttgatcgtagcatgggcctgcatcgatgccgtcgccgtacggccacactgacttgcccgaagatcaatggcgtcgttgtctggtcacagctcttcggccagccagtcgcctgcggatagtcatactgaaggcattggtaatggaagacgccggcgtagacatcagcagacgccgtgaccttcgaatagccgatgggtcgcgccgtcgtcgccttcgaatcgccgatcgcgataacctgcagatcgatctatcgattctgtttacaaccacccacgagattttaatacgagctattcaaaagggttctggttagtacggaataattcagattatgaggatttttttcgtaactagaaatcaaaacgggctcggtatatggatccgcttgctgatttgatcggtggtgttcgctgatggacggtggatggaaccgggagtacctactcctgggagtatagaatcattatatatatatatatatatattatatcctactaccgggagtagctactcctgcatcatctgctatacgtgctttcaagatttgtgcagctttctgctaattcgaatttgtcattagcgggttaattaaccccgttaaatatgccgatcgctat

SEQ ID NO: 47727 - DNA, 564 bp, Oryza sativa
agagagagagaggtggggagggcgttgccgctgtgtcattaaggctgccgccgtctcccctcccgctggatctggtggagggaagggtgcgccaccaggcccccgccgccacctccgccgggccggtgagagagagagagagaggtggggagggcaccgccgccagagcttgcgggtgggcagggctcgcgggtggggggagggagagagagaagcacgggtggataagggcgacgcagtcgtcgggataagcggtcagctcggctcgatttttttcgatgtcggttttttaaaaactgatatctattataaattaaaggtgctggtttttttactatgaaccgatacctttctctgacacaggttttagaaataaaaccagcacctatttagaaataaaggtgtcggttttttgtgatttcaacccacggaggtgggaaaatggtctataggtgccggttttagtatttttggaacctatcgtgccgatatctatttgatgttttatagtagtttgtatatgcatattctgatcggtgtcgtctctgaccgaaaatcaatgtt

SEQ ID NO: 47728 - DNA, 806 bp, Oryza sativa
gacaagcacacccatgttgcacaggcccaaccattttgaccaaccataccgggtagaacagatctaactccaacccaggagctaagcaaattattaccagttataacatctataattatggtgagaggtgtgagactaatcacgaaaaacattgctcaactcgcccataaccgcgggcacggctattcgaatagttttactctggccagaggtgtaccactgtacccacaagacacagccccacatcatgtcaccatgtgcctcagtaccaccacggtacctcggaaaggggctgtgacagtaccccttgcataacacaatccaccgcagcgcaccattcctggatcataatcacccccttataaaacaaggcatggactccccagcgacccccatgggcttatctccgccacttctcagtctggtgccccgcaatgaaccatgctatacaaaagataaagccgttgcccacgctggcttgtggttggcacggttaatgtttcacaacagtagctcgcgaaccggtccttaattgtcatgagcacgactctcaaaaccatgtgctcacaacccaccattatcaagttttagttggcaagtaattaattaaccaatcacgattgaccatcgtgagctaccattaaatataaccataagtgatagtgaaacattagttatcccaaatgtgtgctaatgtttctaagcatggctaagcaatcatatctaatatctagttgaaccaatatatataaagctcaactagtcccattataatcaccccaggtatcaaggaataaagtaatcaa

SEQ ID NO: 47729 - DNA, 1465 bp, Oryza sativa
agagtccatatagaaattcaattagaaaatacctgaaattgggaattaaaaataagaaatattagaagaggagactagagtccatatagaaatacaatttagaaagaaattcggaattaaatatataattaaaggaatagaagaaggaacctccaagttcgctctcatggcctagaaattctcacattaatcggagaaaaagaaaagacagagtccatatagaaatacaatttaaaaatagctgaaattcggaattaaaaaataaggaatattagaagatgagactagagtccatatagaaatacaatttagaaatagttgaaattcagaattaaaaaaaggaatattagaagaggaacctagagtctatatagaaatacaattaggaaataactgaaattcggaattaaaaaaaggaatattagaagaggagactagagttcatgtagaaatacaattaggaaataactgaaattcggaattaaaaataaggaatattagaagtagagtatagagtacatatagaaatacaattaggaaataatataaattcggaattaaaaataaggaatattagaagtagagtatagagtctatatagaaatacaatttagaaaaaaatatagaaattcggaattaaaaaaataaggaatattagaagtagagtatagagtccatataggaatttaaaactaactaaaatttggaataaacataataaaattaaaagtagagtttagagtctgtataaaaatacaatttacaaataactaaaattcaaaattaagaaaaacatgggaagaagaatttaaggtcaatataggaatacaaatattggaatataatttagaagcaactgaaattcgaaattaaaaattaaagaatattgaaagatgagtttagagtccacatagaaatacaattagaaataataaaaattcataaataaaaataaataatattggaagaagagcatagactctatataaaaatacaatttacagaaaattcggaattaaaaaaagaaatattaaaagacgagtctagagtccatataggaatatatataatttacaaataactaaaatttgatattaaaaataattaataactaacacgtatataaaatataatataaatattacacattagtagttttgtaaagttattgcaaaatttaaaattatgttgtcattttaatatatttgaataatataatgagaaaacatatatgctattatatgagagaaaatataatgatgctagccgcgcagattgcgcgggccactatgcttgttattataatctagcactctaaaacaagtgtagttcagaaatgatagaagaaatgaccacacaaaggtaaatttaaccaaaacaagatcaggaaaacacattattgaagtctatttgtgaatctccatccataattggtaaaaagctgcataaccgttgtctcaagctt

SEQ ID NO: 47730 - DNA, 909 bp, Oryza sativa
agtctagagtccatataggaatatatataatttacaaataactaaaatttgatattaaaaataattaataactcccgcgtatataaattataatataaatattacccattagtagttttgtaaagttattgcaaaatttaaaattatgttgtcattttaatatatttgaataatataatgagaaaacatatatgctattatatgagagaaaatataatgatgctagccgcgcagattgcgcgggccactatgcttgttatataatctagcactctaaaacaagtgtagttcagaaatgatagaagaaatgaccacacaaaggtaaatttaaccaaaacaagatcaggaaaacacattattgaagtctatttgtgaatctccatccataattggtaaaaagctgcataaccgttgtctcaagcttacgacatacagcttttaaaagctcaccgtcttcattacacctttgtagttgtacccaaaaccggagtcaataggttgccctgaaaattacctgcatatccgtcctcaggtacgggaacacaagatgtgcatctgctcaccagtagcccaggccaacgtgccaattttgtccatcatatttcggctgagctgagatagagcatgtattgtagcgtggagctggcacgcagccaatgcacgtacgttgtgtatatatggccacattggtaccactgcgttgacgacggatctgagatgcatattgattgggccttttgtggtcttctcctgcacaacgccctcgcccagggcaatgaattccagtcttgtccttttcacttgtccttttgtctcaaagtcacgactcactcgctctgcactggtagaactaactgtaagtctgtaacacaccaattgtttcgggcccaagctagagcaacaaccaaa

SEQ ID NO: 47731 - DNA, 508 bp, Oryza sativa
tcccccacttccccctcccagtgccaccttccctcacccacccccctgaatccctaaccctaaccctaccccgagcttattgttgcatggtcagaaaacgcgcacgcttccccctgccgcgcatgcacggattaggattcctgaacaaatgaatactacgagaacaagataaatgcaaactaaatattatgaatggggaattaaacacaagaaattgttaaatacataatggatacatggtcgaatatatttagattatatcaacctagataatcaaacaaatgaactactgagatatataaatgattagtctttgactaagccatcaagaactaaagacaagatgaacagtacatggaaaaaatttaactaaacaaaacacaacttatgaaggaaaatagaaaaaaaattaagtgctttgattcatggaggtgggaggtggcacacttgagatggaagtcatagaactaatccgttagaagacccgatggcataagtttaactcgat

SEQ ID NO: 47732 - DNA, 796 bp, Oryza sativa
tggtgtgtgtgtgaatatgtgagaagaggggaatatgttttaatcctggcgtgcgctttgctaacaagtactccattttatattataagtcgtttgacttttttcttagtcaaaattctttaagctcgactaagtttatagagaaatatattaatatttttaatacaaaataaaaatattttcataatatattcaatctaaatttaatgaaactaatttagtgttataaatgttgctaattttttctataaacttaatcaaacctaaagaattttaactaagaaaaagttatttgacttataatataaaacggatggagtaacagttttgccaaattggcatgccacgtgtgcattgtgccgcctaaaccgctcggaataatgctcggggattatttgcccaatttaaatagctgggagtgcaaaacgatactcaagttcaaaggtaattcagtcaacctcaatgctttaggggtaatgtagactattctgtatttcttagctattctcactttcatatatatactcctgtgtaggcactgaatcttatgttgttacttttcccctctaataatacatatcttcatgctggacatctataaaattgagggtcaaaaagatatatacaaagtttttcatatttattccctacagaattgagtgcgttttggtgccactaagaggtccgcgaccatttatcagtcaaaagggttgggctaaaagtggcgttctgcttcattcatcattgggcccaaaatggactatgaagtatttacccaccgacttacaacccatca

SEQ ID NO: 47733 - DNA, 1735 bp, Oryza sativa
atttaattatagtcatagaattgcaaaatttaatataaattatggattattcttggcaatttctataagaaatcaattcgcggtaataatttagatgtagttaataactaaacaaatagatgaattcttatggattattatagattatttttttgggtaatccctataagtaatcaattcacggtagaaattcggatttaattcctagggattttagccgtgtattatatttaatcatctagtcatagactaaattaaatcatataatatttctaggatttcgtccgatatttagctcgcgatagaaatctctaacctattatatggatataatgctcgggtagattaaattaaaaacttatgacaacaaaacatttatacccgcaaaatagtttgaatcgaaattgggtttgccttagttcgcgaataataaagttaaaataaaggaatcgactttcgcattcgactttcatttggatttatttggattttgtttgaattctaatcgaattcaaattgttctttcgcacataattatagagaccgagggagccacggatccgggtgaaggccaagacccgcaagaccttgagcaaggcaagtcatcactattccttgaacatgttgatcccaattgcgaaattgttttgtttacaaataaaattgcatgcaattatgaacatcctacttgtaattatgccatgccttgattattgtttactccttattccttcggaaccatgtttacgtatgagtctctagtcaattatgacaattgcttagaaatgctattctagaatcatgcatactcatatttatcaaatgctatatgcttgggcaattacctttgggaaggtagttgagatgcggcatgtggagacatgagcgccacattgccatgatattgatgacatgatttgtgaaaggaaaataaagttaaacaactgttttcgactggggcggctggaggatttgggtggtgtccggaaaaggctagtgccatccctggtcaattaaggaccgagccatgaagttaagcatgaaacgaccccccgtacaaccgcacttctcgtatgggtatagacctagcggagtagatagctgagcggaggcagtatccatgcgtagtggtcttcttttaggtgtgtgatgtggcaagcagtctgctggcggatgcccggttcggatgaccaggtgaatggcggatgcccgttccggatggtcagaggctggcttggcaatactacatgaggatacccataagagaacaatcatgatggactgggttcaacgacaagaagcaacgtaggagtgtgtgtttttcccttcccgggagcgccagaactcctctcactgctagaaacgtatgacgcctagagtgcatgaggatgtaaagttcatggagcgggtactgccaatgcaaggttatcgaaaagctttgccgtgacgcgtctcatgtgttgggatgaggctcatgtgttgggcagtcgcggagtgcgggtaaagtgtacatccactgcagtgtgagtaaactaaatctattcgaatagccgtgctcgcggttaatgagcaccgggacatgtattacacttggctagactctaaattctttaacttgagtgggatggaatattgcatgataatttttatgctgatggagccacttcctgagaggcggaaacgtggacgtcctcagaaaatcataacgactcaatgacgggaagctatccttggg

SEQ ID NO: 47734 - DNA, 1613 bp, Oryza sativa
ctagactctaaattctttaacttgagtgggatggaatattgcatgataatttttatgctgatggagccacttcctgagaggcggaaacgtggacgtcctcagaaaatcataacgactcaatggcgggaagctatccttgggatcataatggatggtggacagaaccgtcattgtttaatatgaacaatggtattaaaacttgattagtctttgctaggtcttaggcttgtgaaaagaattacaaaacttgctttgcgcaaatgaaccatagccatcctttgaaatcctctgtcatgtgcatcattgctgtggtggcttgctgagtacggttggtactcacccttgcaaatataaaatttatcagaagcgggagatgaagcttcggaggatccctatgcctactaccaggagggagatgaagacgaaggcgcccagtaggtcttagtacggtcgttgcctgtggcaatggcatgccgctgcttaaattctgctgccttacctatttctgcttttggatgtattccggaccgctcggtccgatgatttaagactatgcctgcaggcttatgatgtaataattcgtactagacattcgtgtatgtgtatttggtatttcagctatgaattcgtgtgtaccagactacttgatccagggaaatggtactgtttacacgattgattcctgttataaaaacgggggtccacatatcggcatcggctagcattgctatatcggcttattggtcgattggctctttgatcttatatttatacatcttgtcagttacaagatcaaactgactgtatgcttggatcttatcaatattttggacctacactagagctaagtagatcttccaggccattgtgttcgtcgacttagttcatgccaacatagatctggcaccatcggccgagcgcggatttttcgtcaacaccgtcctcgtggagcacaaggcaccatgagcagccgcactgtccacgttgtggctacagacgaagatatggaactcaagctcgatctgccggtgcccgcgccattggagctcgatccatggcttccgagctcgatttgcaccaccggggctcgatccaccgccgccgaagctcgattcgcagaaaggaagatggccttgccaccttcgtctcggcctgccctttctgtcttcgtctactgggccgccggcggggaggggagagggaaacaatggtagtggagaggagagaagccagcgaaggggagaagtgccagtggagtgtggaggagaagcgacggtggtggagaggagagatgttgtcacaggggagaagcggtggtggactgaggaggaggagcggcggtggtggataagggaggcggccacggaggggagaagagacgacgcccgtggagcgaggagaaatggcgacgcccgtggagaaggggatcgggtgagagagaggggaggaagggaggagaaaaaggtatagggaggtgctgacatgtgggtcctgcagtaggttaagggtatatatgtaatcctttttattgttacagggtgtaaaatataaaagttctaattgattactattatagggactgacataaaaataactagggtctaaaataaaaa

SEQ ID NO: 47735 - DNA, 584 bp, Oryza sativa
cgccgagttccacaaccgggttctcaccgcgcggctcgacgacctccgccggctgcacccggacgtcaccatcgtgtacgccgactggtacggcgccatgacgagcatcttccaggccccaggaaaactaggtgagtgcgtacgtacgcgtcagctctctctctctctctctctccttattttggcattgtgtcgtgtcttgtcttgtgtgctgcaacggcgacgttgcacccgtcggcgttcctcctctctgttggtttgtgtggtgatatatgcatacacgtgacaaacgagcgaggcgagtactgcacaaagcttagcagttatgtatggcccgataagcagcatccaccgctgccatgcaggggccctcctaattcatacttgcgctaaggttcacgtacgaacagaggggtagagccgtagaggtcaagcgaacatggaattcagcggtgtccggttcggacgcgtctggctcatacgcaattatgcatccaaattccaaggtaagctgtaggcacttgggctgaaacacttatttcggtccctattgggctgggaagattttaataggaataagtcca

SEQ ID NO: 47736 - DNA, 3278 bp, Oryza sativa
cacaatcatgaatcattgacctgacatatttgttttttttttcaattttgttctatgcaaccaactcaagggtaaaacaattgatcacgtggaaatcatataatgtttaccaaatatttggcagtggcatggtgtgtattatcatatactagtatactcaaaatattgttaatgattgtggtatatctccaggcacgcacctttctagacaataaagccccacctactaaatagcaaccgctacgatttgtgcttagaaaaggagaactgccacgatctctcgttcaaaacgtcattgtcaaaggtgggtgcaaggcgagaggtgttttttgattcaaacataccgtccatgtcgccgccggtgcagagcatgccgagcagatcacggaaccactccatctccatgtcgaggtgcacggtgtcgtcgtccatgggcacccctctctcccggaagaagtccgggctgagcgccgtggcgccgcccaccgcgaagttggccccgctggcgaagttccccgcggtctgcccgccccagtacggccgcacgaacggcagccccatcgcttcagctgcggcgcggcgcgacgaggcgtacccatgcacaccacgcgcgcgcgaattattccacatctcatattagcaatggatcgagcgatcaatcgatatgcagacgaggcctggatggatgacgaggcgtaccgatgaagtcgatgatgaggcggccgttggaggagcggccggtggcgcggtggaagaaggtctcgccgtagggtggccacagcgagggccggcgggagtcgttgccgtagaggaaagcgatgttgccggtgtctgtaagcgagtccccgaagcagaacacgcgcgggtagcacggcgccgccagcgcccgtgacgccgccgccgacagcacaaccgccacggccagcacaaccgccggcggcgagagtcctccggaagtagaggagaccatccttcctacactttcgtttccttctgctcgaggtggtcgtcgggcacgaaggcgaacccgccactgggattggctctgcggtggtttttcgcgttggcctaacgttttatactcaaaaaatgcgagatatttaaccatttgccacatttagatgtagcaattaattttttaccactggacccatatgtaatagatatatttagactcacatgtcattgagatagggatgacaaatagttatttgccaaatctaaaagtggcaaatagttaaaagcccaaaaaaaatgcaaatactctaataaacgtggctcgttaatgttagtgggctcgaatgacgagtgcccacaggtcagtggacctctggtcgctgttagcctgttacacatgaatgaacggtgacaggtgtatgctccatcctccactaaatgcactgtgaaacgcagtataaattaacgtagacggtagacgttcacgatacttacacactcgtccctctaaacatatacatcattctccattgagataataattagtcgtaaatacaagcacctatatcaaaaatagggtttaaactcgagtgaatttatttcatccactgctgaagaaaccatctttattgggttgagcaaaaaccacaatagttaaagatgatttttttatcccggtttcaaattttatcggccctaggtgatgtttagtccctgttggtattagcaaccgggaccattttctgtccgaggctgtcagaggaccaggcatttttagtttcggttggtcacacggtcacaccaaccgggaataaaaattgactaaaaatcaatatacagtatataatccctatgacttatcccccgaactcctcatcttcctattcctctctcttatccctatcctctctttcctattcctcctcttatccttatcctctccttcgtattcccaattgagcgtgagagtgagcgagctgaggtcggcggacagcacgagagcgagcgggtggagggcggtggccggccggcgtggcagcaggcgggcgtggagggcggagtgacgggcggacgcggcagctgcgggtgcggcggcgggcgggcgcggcaggcgggcagcgcctctgagattgttttttttttttgagaatttgtgattcggatctaagatgtatttgatttgtgtgtgacgtgaatatatgatgtatttgtgatgaattttttagaacttgtgatgtaattttttttaagaatttgtgatgtatttggagatgatcgatttgaggatttggaaaatatccttttgctctgtgatgtgatgattgatttgggatttcacgatttggggatggagtgaaatcaatattcaatgttaaaaacaatgaaaaataataataaaaaaagcaaccagacctaggacctagcctggctccacttttagtcccagttaataacacaaaccgggactaaaaatagatttttactcccgattcatggtaccagttgtatagccgggagtatagggggttcccaaccaagactaaaacccctttctccatcagtgatgataagaaacctaaccagttgagttaagctcacttcgcaaggtagcacaccatttgtaaacagattattgtcgatcattattttggacccaatgatttgatacttccgtatactgaatttttttttccggcgatgtatactgaaccatgcataagtgaaaataattttgcccgtcgttcctgtttctggctttctgccacggtgaaacagctcattgaacgatatataatgaggcttgcagcaacaaatcacaaaatgattccggcgatgaagactcgaggagatataaacgggaaataagtgtagttcaacgacaatgacagtatttttgtactacgtaaattttcgtttctcttagaatgttaggtgcaaggagagtaggtactgaattaatgatgttgcaacaaattaaattgacctgattgatatatactggtggttgtgctatttattatctaatatttgcggagccattgtttatttgtggaataagcgaaatggcatatttgcaaacgaaaagtaatttgttaataaaacttttatatatgtattcttagcgatctaaaatcaaaggctgaaaaataaacttcgataaaaaaacctcaaaatcagctccaaatttaaaattgaaaattcaaaatttggctggcacaagcataagcgaaaatatgagtcccttgaagtgttttcgatatttaaattttcttaaacaatatcccgtaaatgtttgacactgacactggtggagaaaccat

SEQ ID NO: 47737 - DNA, 1241 bp, Oryza sativa
tttttgagaatctgagctgagattgttgtgtgatgtattttatttgtgtgtgatgtgaatatgtgattgaattttgtagaagttataatgtatttttttaagtttttttgatgtatttgaagatgatcgatttgtggatttgaaggcaatttaaggatgattgttttgggattttgggaacgggatagggttagggtgaaatcaatatattaaaaataataaagagaagaaaataataaaaaagcaactggatctgcctctttagtcccggttaccaaccgggactaaaaatcgatttttactcccggttatctcacccgggactaaagatagcgatctttagttccggattcgtagccccggttgtaaaatcgggactatatagggttacgaactgggagtaaaaatcacttctccaccagtgtgacaggtttttttatgtaagctatatggcacttgtgatgattgtggatacaaataagagtcatggaactcacccaaaattagagaaagcgcctggattgcatatttgcatgatctttatacaatatcgctgataagaaatgcctctacgagaacgacatcacgggcgcatcagccacgcagccaatgtggccaaacaatatagttgtctccttgtaacccctaaccctttcactatacacggaagaaaaacaatggagctaaattataataatagtatacataccctatagcaccgctggaactcaattttagtctatgtttgcaactctccttactatcggattgcaaactgggacccgaatcgggactaatgatccatcttggatattttgtttcaggtagtaacaccaacccaaactaaaaagtttttttcattgtttttttgccgcttgcgtattgattttccctaattgagttgcaaaatctaaaaaaaaagcatcacaaatactaaaaaaaagcatcacaaatacagattcacatcacagatcaaatacatcataaattctaaaaacaaaatacatcacatcatagataataggaaaaagtacgaattacccccccgaactatcgcggtcgtccgaattacccccttgaaccacaaaaccggacattcttcacccccaactatgtaaaccggacgaattactcccctcgacccaatccgcggtggttttggtctacgtggcatcccagtcagtgtttttaataaaaaattgtgggacccgcctgtcatactcttccactttcccctctct

SEQ ID NO: 47738 - DNA, 579 bp, Oryza sativa
ctataaggcgaattcgagctcggtaccccatatcacaacatatgcaatacagtccgaatactattaaagtgcttcttagagtattttggacagttccttccctgtggtcaaatgcagattgatgggaagccgtgtagatatagtattctaaagatatgtgtatacccatagtgacgccacattgtagctgtagcatcaatggatcgtataaatgttgattcaagataattttcttttctcataattgtatttgagatacaactctttcttctagttttacaaatataattgtataaaaccatatctaaatttgggcctttaaatcaaagcaattctggaggaattttcaaggattgaattcctatggaaagacatctatcctatatggtcatttagaacaagggaatggctctttcaaatcttttgaaattccttaggattgtctcaatcatggaaattttggaggatttcctacatgaggatcaatctcctggaaaaaaaaacctttgtatgtctatatctctgttttaattcctgtgtttttcctacgttttatccaaataatcattcatttagttt

SEQ ID NO: 47739 - DNA, 634 bp, Oryza sativa
gatgcaatatcttacagatatgcaatatatgtatatatcgacgtaattaataacttctacgcaagcatttaatgtataagatattgttatatcttacaaatatgcaatataatgtatgagatgttatatcttacagatatgcaatatatgtatatatcgacgcaattaataacttctacgcaagcatctaatgtataagatactgttatatctaataaatatgcaatataatgtatgagatattattatatgttacatatatgcaatatatgtgtatatatcaatgcaattaatgacctatagatagtagcattcaatttccactatagacctcccctatttaaaacccaagcatcctaatcaaaccactcaccaccactatcaacacaactcttgcatcaccatctgagagaaaccagggagatacacacaagcaatagccatggcgagacaacaactcctaggtttgttcttggtcctcgccattatggtggcggtcgtgtggggcgaccctagccggggctgcgaccaagaccggcaggacatgatccgggagtgcaagaagtacgaggggtggccggcggagcccaaaatcgagccgtcagaggcgtgctgcgccgtgtggcaaagggcc

SEQ ID NO: 47740 - DNA, 585 bp, Oryza sativa
atagaagaggtttatcattgagggcccaatggtgagactgttcttttatgagcccaaaaataagatatggcccattacacccgactctatccctcctttccttttttttcttgagatttttttccagcttacatatgatatattggcttgtaggattgattcaaaagaacttcttagggcccctttgatttggaggaaaaacataggaattttagaggattttaattctataggaaaattttctataaagccatttgaaacaaaggattgaatcctatccaatcctttgaaattcctatggaatggacaatcttatagagattttggaggaaatttagcaagagtttcaacctcttgctaactttcctttgagtctatctctctcatccaattcatgtgtttttcctgtggttcaatcaaacggtcattcctgtgtttttcctgcgttttgcaatcctctgttttacacttacattcctatcaaaatcctatgtttttcatattactacgttttctcaatcctgcgattcaaagggggccttaggataggaaaaacccttcatattttagggcccctttgaatcg

SEQ ID NO: 47741 - DNA, 604 bp, Oryza sativa
attcttctgtaatgtcttttgttacttctagtaatgctaacacaaactatctgttgcagatatcaaagtagcctaggtaataataataagagggttgagctctttgatatgggcgctggaagtagtgaacctgctgccgaggacaacatccaaatagcatcaggtgaaaataatcatgtgaatctttttcaaatgtggttaatgccatgctaataatcttcttaaatgtaataattgccttatgattgctgagcataagatgcagagcttgcaatcatgttgagagtatatgaaattacaaagtattgtgatggatcgatttcttaacttttgatactataatgacaagtagactatattatagattttcttttgaacaacaaagtagagaaaacaattagtttcgaacatggttgagctgtttggttaagtaacattacagcatccactatatggaaatgcaaatgaagcatggtatttatcttgtttgatttgaaggcaatagtgttatataattcataaataccttttcgcttcacgatgattaattttgcctggtaggttgcaagatacaagtttctcaaaaactgaagaggagctaaaa

SEQ ID NO: 47742 - DNA, 1378 bp, Oryza sativa
catgccattactcatcagaattcagaacgatggtcatatttctaactagtttagcatgaactgtaatacatattgcaggagagttaagcacacattcttgtcatcaatccgtactaggcatgaagactaattgtcaccaaaaccaatattttcgttaaaaaaccctgtttcacttttaccgggttttcgaagtatgtaaactgcgtaaaaacacccattgtacaccctgacaatttcagttttttcctgtcattctacaactgagagcaacataaaactgcatttccggcatcgactgaaaattctactctatgcctctaaaaccaacacactgatcttcgctcgatttccctgagcctgtcagaaattcagcatgaaaggattcactgaatcaatccctcctccgatgcctatatctcctacgtcacgatgcatccggatctgggaatgtcaaccgatgatccgctgcagtcatagcagagaaatatgcagttagacagtgcccaaacagtactactcctgcaagtaaaaaaaacagtgcaagcaattctgcaaatgaagatactactcggagttcccgtctttcgcactaagcactggacgatcattttcacaacaaattgaaactaccatccttcatatatgcaaaccatctgctgttgcatgataataatcagaacaaagtgaaattagcatccattctatatgcagataataagaactcgaaatggtttcagacaatccattttaggtgacagacccaccacaacaatagttctaggccagatcacacagtattaacataccatttagctactactaattcttcttatctacatattcagataaaatcctattcccaagaaagcatagtacaccaattgcatacaattttcttgtgacgcctgacttgcattccatcaacagaaaattcctcacatttgtcagcaagtaaaaacaattcctactgcaatgttcacttctgctgttctactacaatgttcttcagaaaactcctaactcagcaagtaaaaacatgactgcattttccacaaacagtgcactgagaactggaaaaatctacggtgctgagataaccaaaaggaccagaaaaggagatatatgccattcagaacaacataaactatgttcagaaaattcaggaacatgcatatcgaaatcgaagctaggctgcttaccttcgctgttgcgcctgagagcgacgatgtgcagggtctcccggctgtgaggcaggttgatgagcagcggggtgagccgcccatggcggccggcgcggacgcacatcgtgatggcgtagcccacacggttctcgagctcgtttctcaagagctgcaccgaacttccttggtactgaaac

SEQ ID NO: 47743 - DNA, 2117 bp, Oryza sativa
actcctcggcttctcggcgtggcgtggcgtggcgcggcacggcgtggcgtggcgtggcgaggaaggcgagactgcgagagaggcgaggcggtggtgcatttgaaagcgtcgcgaggagaggagggagacgcaggccgctctctgacagatgggtcccctggtcaaatgtggtcaaccgtagtcagtgacggatgtgcccgtgcaaaatgttgaatttgctcaaacgagggagcgcagattcaggattgagtagactctgcaaaatttttaagaaaaaaacgagtttctgaacttgttctgatcgctgctgcaatcaaaacgactctgttcggtttcaaaaatgtatgaactctgaagtcacactgcctctgcattcagctgcagtgtttcaaagaaaaaaaatggtcaccaccatacaaatcgctcaagataaaacgcaatatagcaaacttggcccttaaaaaaaatgcatcaatctgttttgaaaggaggaagtaatcagtctgttgttcgcttctagagaactctcttgtcatatttttttttactttttgatctaaaatttggtctagggtagacaatcaccgactcaccgtaacaagaaatgtagcatctccaaacttcaggagattcagttactgtcatgactcttcagaattcaaaacatttggcattactaactgtcaacttaatcaatatttttgtcatgactgaatttacagagtgaaattagaatctgtccagttcttttcaaagaagtgaatttacagagttattaggaagattccatggatgatcgatccatcagtccttcagccggttgttcttaacttttggaactaatagttggtttagggtaatcacaggaacaggtaaagaactactctactagattctgcatagcaaagcagcatctgcaaaccggcaccgtgaaagttcccaaatagatggagagggacacgctattactcatcagaattcagaacgacgtgcataattctacctagtttagcatgaactgtaatacatgttgcaggagttaagcgaacattcttgtcataaatccatactaggcatcatgactaaattgtcaccaaaaccaatattttcgtcagaaaaccctgtttcacttataccgggttttcgaagcatgtaaactgtgtaaaaacacccattgcacaccctgacaatttcagtttttttctgtcattctacagctgagagcaacataaaactgcatttccggcatcgactgaaaattctactctatgcctctaaaaccaacacactgatcttccctcgatttccctgagcctgtcagaaattcagcacgaaaggattcactgaattatggccctcctccgatgcctatatctccgacgtgatgatgctttgggatctgggaatgtcaactgattatccgctgcagccatagcagagaaatatgcagttagacagtgcccaagcagtactactcttgaaagtaataaacagtgcaagcaattatgcaaactaagaacttgaacaggtttcagacttgaaaccccacaattaaggtactacgaggatgccgaatctcacactaaacactgatttgacaataatcaaaacaaattgaaattagcatccattctatatgcagataataagaacttgaaatggtttcagacaatctattttaaatgacagacccaccacaacaatattaccataccattctgatactaccaattgatgttatccacaatattgagataaaatcctatcaattgcaaacaattttcttgtgatgcctgactagcattccatcaacagaaaattcctcacatttgtcagcaagtaaaaacaattcctactgcaatgttcacttctgccgttctactacaatgttgttcagacaagtcctaactcaacaagtaaaaacatgactgaattttccacaaattccacaaaacttactgaaaactggaaagatctacagtgttgaactaacaaaaaggacaagaaaaagatatgcatgccattcagaaacatcgcccacagcattgccaacaatttcagaacagcataaactatgttcagaaaaattcagaagcatgcatgcatatcgagatcga

SEQ ID NO: 47744 - DNA, 1048 bp, Oryza sativa
agggagacgcaggtcgctctctgacgtgtgggccctttggtcaatgaggtcaaaagaagtcaatgacgggtgggcccgagcacagtgaatgggcgtcgcgaggaggagaggatagaagagtcacgggttgccagttgcgcacagccagatagccaatgactggtggggtcaggcacagtcaatgactggtgggcccgaacacagcgggtgcaataggattagccatcgacgagccgtgctaacttgaacggaactacggaagatgtgtgaaatttgctcgaacgaggcgcacatttaggattgaatttgagtacactctgcaaatttcgtacagaacgagttctgaacttgttctggtcgctgcaaacaaaacgaacctgttcaaaggagtgaatttacagagttcggttattctctttttgcttaagggtgattaacatgagttactatgatatgtagaagacttcatcgggctcattaacatgaggattttcttggccgtgttgtttttgcaaaacaaataaaattcgaagtctgaactccaaagtcatacacaacattcaactgcaagtcattttgttgccatttcagtggtacatttgcttcaaggtgatataatatacagtagcaaacttggccacgaaaaaacttcaagcaatatacaagttaatggtgaactgtcttgtttgtgttatgtacggagtagtacttttgcatcaaacaatctgtttagagtaatcaccgcaataggtaaaaactaccaactactcggtacctaggtagtagaagcaattactcctgaaccattatctaaaaaaagcagcatctgaaaactggcaccatccaacatattgctaagtagaaatatattactgctgatgctaaacttggtagaaatatgcatgatgtgactgaattctgatgaatgattacagtaactgaatctcctgaaccattcaggatttcaggtagtatccctttctgtttgggaattttgaaggtactagtttgatatgtggaatgtagttaatttagtaattctttttac

SEQ ID NO: 47745 - DNA, 883 bp, Oryza sativa
aagcccaaatccaagagcagctagctagctaaccatcaaaagaaaagatacttcatctttcttgctccaatccaagttctccatggatttctgatgtgatcaagattcaagaacatgccactgcctttcttggattaattcttcctttcatccttcctttcttcgttgattcagttcatgtatagattggtcaagaaaatgacaactacacccccaatttgtacaattaattagattgtgtaattgatttgaggtgtgcagattaagatcatagtaggtcctaattaaggggaaagaaagggtagtggaaacagtctggcatggtaaagtaaaaactgattaggaaaagatgtagtcttgttgcaagattgaacaagaccagtgacttcttttcttgcaagctttgttgcttggaggaaacaaattccatggaggggaggaggaaaggggcaaaaggataaaaagagaacaccatgaaaagaagcaaagctactcctatgtaggaaggaaatgtgcttttggtaatggagattgtggccctagcgccatgcatgtgcttcttctcctcctttccatcccttgatccttgtcatgttctttcgcttgcttttgtttcaaggattatctagaagaataagtgaataataaccagtctcagatcccaagaatctccaactcatccattattcaaccacttctctctgaccggatacatctttgatgtagaagttggattgattaattatccttatcggaataaaaatcctctcaaccactctcaagctcaaacgacacactaggaagctaccaatacatttctatgtaaccaaaaaaaaaaaacgaccaatacatatacatacatcaacatcatgcagtatatact

SEQ ID NO: 47746 - DNA, 1761 bp, Oryza sativa
tagtagttaatactgtgtgcctctagttaacgactattgttgctaggcacaactaaaatgcatggtctaaaaccagttcaggcgtttatggtctgtttaacttgctctgaaaatgatcatatcagtagttcagttgtgaagttcaacttgtttcgagtgatacttttacttgcaatagttgtactgcttgtgtatcatactgtcaatgatttgtaaccgcatgattcctttgctatggctgcagcggataatcaattgatattcccaagtgtcagtgaaattgctgtcaaatggatcaaggcgaaccaagattgatttagtgaatccttttgtgctgaagttttgacaggctcagggaactcgacagaagattagtgtgttggttagagacatattgagtggaattttcagttcagccgattctggaatacagtttcatgtttgctctcagctgtagagtagctgaaaaacctcaaattgtcagggtcttcaatgggtgtataaccacggtttacgtactttgtgaacagggtttcctgacgaaaatatttgtccaattagtattcattcctagtatggattgatgacaagagtgtgcttaactactgaaatatatattgttcaagataagtgaactctgatgagtgttctgaaatctgatgcatggacgcgacatgctatgtggaatcaagttagtagtatttcttgttgttccggtgatcaccttaaaccaatttttagatcagcaaggaacacaagagagttcttgaaaagttaagagcacatcaatgagtctaggacatttcactgttagaatgcagatttcttgacatttttgtcatggctaagtttgctatactagcacaatttattttatgatttgtattgtggggatgcaagccggctacagtagtggagaaccactgaaatcaacttgaaagtaacaaaatggcatgcagctgaatgcagcgagtgtgacttgagagctagttcagacatcgttttttttttcatggaatcactgcaccagtcgatcgaggccgcactctgacttatctgcatttgttcgtggaagtcagacatgcatttttgatgaacttctgcaattataactattactgtaagaaattagaaatgtgcatgattatgaattctaatgagtgatgacagtaactgaatgttatgagttctgaatcactggacccgatcgattagcaatccacggcagctagttctgtaaaatgggtcgattgaatcactggatcctcctaattgtgtaaaaactaacagcttgaaaggattgaacagatttgttttgtttgcagcagcgatcagaagttcagaactctgcattttgtatatgagcaattctatggttcttgaggaggtactatgagataccaaaattttagtgtaaaattttggtactttatggtacctcgtagtacctaggtatcaagaggtaccaaatttgcaatagaaaaaatggtacctccttaataaccgtaaaattgctctttgtatataagatttgcagagtccactgaaatgcaatcccgaacctgcgccgcgtcatttgagcaaattctgtaccacgaaatctgctgcactcactccctgtggtcgggcccacccgtcattgactacggttgaccaaagttgaaacggggacccacctgtcagagagcgacctgcgtcttctcgcgacgccttcaaatgccaccgcctccctcggctaacaaactcttccacggctacttg

SEQ ID NO: 47747 - DNA, 4016 bp, Oryza sativa
ctgaattttctgaacaatgtttatgtggttctgaattttgctgtgaattctagtaacggatggcatggagtgggcagtgtctctgtttttttgatttttttttgtgtcagatcagcactgtagattttctagctttcagtagtttgtgcctgtttggaatttcctgaaaatgcagtgatgatgtatttgcagaacttatctttcagtagagttaggatttgtctgaagaatactgtagaacagcagaactgcagaagtgaaatatatctgcacttatctgatgaatattcattccagtcatcatcagacaattgtgtgcaccttgggtttaactgaatgctgtaggattcatctgaatgttgtagatttttcggtgtgaaattcagcattcgagtagcattttaacatgtgaattactggcactgtttttacttacaagagctgtaattcttgtgtattactctttctaactgcgtgatttgtttgctatggctgcagcgtatgatcagttgatattcccgaatccgaatgcattgccgtcagccgaggccacagatgaagacgatcccacgattgagtgaatccttttgtgctcaagttctgacaggctcagggaactcgacagaagattagtgtgttggtatagagtggaattttcagttcagccgatgctggaatgcagttttacgttctctcagctgtagaatggctgaaaaacctcaaattgtctgtgtgttcagtgggtgtttttcgacggtttacgtactttgaaaccggtaaaacagggctttctgacgaaaatattggttttggtgacagttagtattcatgcctagtattgattgatgacaagaatgtgcttaatcctgcaatatattgctattcatgctagacttggttacaaatatgcatagcgtgtctgaattctgatgagtggttccagtagctgaatgtctgaatctcctgtagcattcaggtttgttctagtctatgtattttggaattttgataggttccggtttgcaaatgctacatgctagtatctgctggttctaaacttactgattaccctaaaccaattgttggatccagaagtaaagtacacaggattaagactatgtctgatgccctgaagcattcagggtttgtcccagtccttgtaagagtaattaggaattttagaaaacttatttttgtaaatagtcccttccactcttgtaataggtttttagttctatttataaaataagttttctacaaggtctaaatgtaaaaacaacttcagatatgcttccacatcaggaagtggatttttgtccctcgagaagacatcccatcgttttgtgtatggtgttcaaaaagttatcaaaaaatttgaaaacaattgtcaaaaaaatcaatatatgatatatcttttcacaaacatacaagttaaaatttgacttatacaattcgaaacaaaaataaaaaatttgaccgtgaattactcattctagtcatagtcaaatttattaccttttacagtgtttgcattcctaaaatggcatagatctaaccgctcacgatgaaaggtatcagaggtagaaaggtactaaggattaaaaggtaattgataacagggcaattatgtctaacaacgtatggacgtaccgaaaggtacggtgtaagtggatttgaaggtaccacaaggtaccgcgtaagtagtttttaaaggtaacgtaaaatatgatttatgtggtgggacaaaaattacattctcttctattcggtttccaatcttcggtcgttctgtttgcgtcggttttcaaactttggtccgatttacgtggtacatatcatattcgcatgatcttgataattatttccagttagtcattaatttacatagcaatttggtgatccatcgtttgatgaatgtaatcaaagatcgaaaggacaacaaattgagaagatttacgcacctacaaagaacaaacaaagttcaatgaggaagatttgcgaaaaaaaaactaaacaaatcgtctgacagatcgggaccgtgcggccacttctagctccggcgaacataggtagtcctggaccacttcctcccggtcctcttcctccgccgcccctccctccaaccaccgcctccggccacacgtccaccgccggccctcaattctccacctttcaacttatcgaagaacacgtaaaccttacgtatgaacagaacgtatctaagaacgatgcaacgcaacaggctacaagctaattccttcgataccttctcataccttttcatatgtgtaaaagacacatttgtcattctaatatcatcatatttatattaatgccacctattacaatattttctttccataccttgcccctcgcagatcatcggctcacgtcgccccacctcctttacctcgcaaacatcgtataaattgaatttgaatatgcatgtttgtgaagtgacatatcacatattgatctatcatactttttttaaggaaattttttgatgactttttaagtgacatgtaaaaacggggcatatccaaatagagtttcccttccacatcactgtcctttgtaaaggtgataagctcacccaaggatgctcaaattacatccagcacatccatggccatctcaaacgcaatgaaatttctgcgggttgggattaagttcaagttctttaatctcaacctgccgaaatttattttctttgcaattacccatttgagtaaatttaaagcagcaaataatcatgtttcaagcaaagtgagtgtttttcttgtgcggtaactgaagcctcaatttggtggcggagacctggtggccttctgcgtgctctcaacacagcttatttcgattgcttatccgccaaaaatggtggagcttgaacgaaaaattggagaggaccaatatgatagtttcatttaaaataggaatattatgctttgtttaaaacttgagcatagagagtcaacaaattcagtgtaacttttctaagactgaggagacatgattaaagttagcttttactcctatcgttccaaaacataacttaatgtaagaggagatatgacccctcctaatacaatgaatgtgagaccctgtttagatgggactaaaacttttaagtccctatcacatcagatgtttggacattaattaaaaatattaaacgtagactattaataaaacccattcataatattggactaattcacgagacgaatctattgagtctaattaatccatgattagcttatgtgatgctacagtaaacattctctaattatggattaattaggcttaaaaaatttgtctcgcaaattagctttcatttatttaattagttttgtaagtagcctatatttaatactctaaattagtgtctaaatacatagactaaagttaagtccctggatccaaacaccacctgaataaccctttatccagattcgttatattaggaagggtcacattctctcattggttgagtagagtgatcaaagaaacaccatccggactgtgtattagattggtgctactaatgatgaaacaaaagatatagtattgggtaattttaacatcctcgaaaaagtaccgggaattaccatattttctagtataaaattaatttggtacctctagatactaaatatctcgagataaaaaaaatagtataaaatttagatacctcgagatactttttcaagtacgataaaatttctctatagtattactttgataacgtgctacatcgaaacaaatgctacagtgcccaaaaataaaaaaaacatatgcatgaagccaaacagttgatgaaatatggggatagctaactttgaattcagggattgcagaagtgtaataaatgacctaataatcctggataattaagaacttaaatctagctcgttaattaattatgctttctccttttggcacaaggcacatcatcatctgcaggcgcgtgaccctccccgtcctcttgaccctcctcctcgtcctcgtcctcg

SEQ ID NO: 47748 - DNA, 1171 bp, Oryza sativa
tacccataaacatctggggaaagtttcaggtggaaccccctctttcagtgaaaccatggaacctcaactgagggtgtgtttagatccaaagttttcatccaaacttcctacttttcccatcacatcaacctgtcatacacacacaacttttcagtcatagcagagaaacgacacagttagactcaggcagtgtggtacaatcataaaagcaatagtattcttgagagtaaaaactgggcaagtaattctgcaaattaaagatgctgaatttcacactaaacactggcatgatcattttcataacaaattgaaattaacattcataacatatacaaaaaatattttcctcaaatgaaaatatacagaaaataaagcattgaaggtgtatgagaccattcatttcaggtatactggagacaatgtcaacacatcatttcagctacaattctgtttgtgtacaatattcagataaatcctactcacagagggtattcccaaagtgcatacaattttgtcctgatgagtcctaaacttgtgttgttctacatgcattctcatcaacagaaaattcctcagatgagtcctaaactcaagtcaacagtatatttcgcttgtgttctacaatattcttcagactagtcctaactcaagaatcaaatgcaggattgcatttttcaaaaaattccacaacaagcacaaacaatctacagcgatgcactaacaaacaattacccgcataattgttcaacaattactagcgatgcgttcctttgacagcaaaattcagaatctacagtcatgcactaacgaaaagaacctggagaacggaaacactgccagcatgctaggctgcttaactctggtgttcagaaccacattaacagtgttcagaaaattcagaaagagatcgaactaggctgcttacctgcggtgttggacttgacaaggacgacgtgcagggtctcccagctgcgaggcaggtactcaagtctctgacccatcagcatcaagaattgccacaattagaactcaaatcgatataatctttggcgcaaacgagttcaagaatcgcaagaagagaggggacgaggaggaggagctcacatggcccatggccgggatgtctcgcctgaagagagttgtggggacgggaagcacctcccactgcatc

SEQ ID NO: 47749 - DNA, 712 bp, Oryza sativa
cgcgacgccggcgaggcacgggagccacctctcgttgacgcgcaggtagcgcgcggtcgtacttgtcgtgcagcaggacgacgccgtcgccagccgccggcgcccagcccgacggcacgccacatgatggcgtcgacctcacctcctccctgtcgaagtcgcgctgcccggcggcgggccagaagcagaagggcgcgcccagaagtggctgatggcgtcgggggcaccgagatagcggccgtaggcgccgcggaggagcacgtggcccgggaggaggacgccgtcgccgccctcggcctcggcgttgatcgtcttcgctggcgaggaggtacctgccgacgctgccgtccacccgcgaccgaagccggacggactccacgtcctggaatacctccattgctcccgccgccccgccggtggtcgcctcgcgcgcgcgggcgctcgcgtcaccaagcgggctcctctcctctcatcggcgacggcgaggcgtgggcgcgtggcgtgcggaggaagacgagaggaggagtttgttagcgacggttagagctgggacatgggccgttccgggctaggcacggcccagcgtgcttcgtgccaaatcgggccgtgccagcacggcgttttcatggacgccgcccaagcaccggcccaatggcccgatgggcctattcgtgccgggccggcacaagcacggcgcatgatggatggatga

SEQ ID NO: 47750 - DNA, 1071 bp, Oryza sativa
aaaaataattttttagtctaaaatatttaatacccaattaatcataaaatatttaatacacaattaatcataaaatatttaataatcataaaatatttaatacacaattaatcatacgctaatagttcacctaattttgcgtatcttttcaatcttctccttttctcttctctcgagcacaaccttagacacaggtttatcctcaaaagctgtttatttatggaacataaggtgtacttccttaggtcaatctaagcggtaatgcgctttgcaatagatggagttttctcttctatcgtgaaggttaatataagttatatcataggttcagtttaatgttatggaaaatagcatggtcttcatacgtgattataaaataaagtgtgtgtgtgtgtttttataattgtctgcgcttgcattgtgtttcgcaaagaaaaaaaaatcaaaaagtagaacctttctagaaatctttgaaaaccaaacaaatgatatatctactatactactatttgtgtaaatagggatgaaaatggtagcagtaattaccaaccaaccggacggtcgtttctgaagtttactgatcagacaatacggaaatggtaattcctagaaacgaaaattgtaaaaaatacagaaacggtatcggaaatggttggtgatttaccaaccgttttgtcggttattgtattttttttggtaattaccatttacatatttcggtaaattaccttttttataaatatctctggcccaagttatctccaatggcccattcccttagcctgaatataccagtcccagtgtcccacgaggttgtgataacgctaaaccatagagctgctcctagtttggtagttcctcacaccgttagttcgtattaatatgctttatagacttacaattatatgtcattgaagttataactattgtcgaatacttgatcatattatcatttatcaatctattatacatgtttgtacgtatttgtgttgaatagagtgaggatgaatttgtctcatgcaaccatgctagattgctatctaaatgtgtgatgttatagttcgttgcctc

SEQ ID NO: 47751 - DNA, 1888 bp, Oryza sativa
aagaagtgatgactgatgactatgaagtgaggttagaggccaatatatagggttgggcgaatttattacttctaaccttggaagatttagatgtagggtatattaaataaatgaattaatgatttctaactttagaatatttagatttaggttattatataggggccatttattgtactcatattaaataccaattcttggttttttatttttttttcttgtatatcttatttttattaaatgttttctaacttcgtggttgccacgagttaggtgttctatgaggtggttgccactgaaaaccgaactttttggtaaccacgaaacttgaagaaaaacatttaataaaaagatatacaaaatcaaagataaaccaagagtattgaaatttgattagaatccaataaatgactactaagatgtaagatgtagatactgattttgatttacgatgcatttaataacgcaaatctaaattctctagtaagaaaatcataaatcttttcaagttgaaaaatcataaattcagccctagcctgtataatggtctccaagtctcacttcatagtcatgaatatcacccaaatagtatatctattctgaatttgttgagaaaacgcatttgtgataccctagccccgagccaaacctcatactccctctgtttcacaatgaaagtcattctagcatttcccacattcatattgatgttaaagaatttagacatatatatctatctagatttattaacatcaatatgaatgtggaaaatgctagaatgacttacattataaaacggaggaagtacatcagagcaataagtctgctcctgacattaccatcgtcattaccactgtctttcaaagcaccaaacttctataagccactcagatggaaatcatttaataaaaaaatacaatcagagataaaaaccattattactggtattcgataagaatctcagaaatggtttagatttacaatgcattattttgtaaaatgccctcaccatactctatccgcaaaccaaacctcatatacaagtccacttttgctattattaatggggtcgtttgacggtcaaggcacagcatgctgcgcaacctcgagcaaccgaacatccccaattaccattgctgtttagggaggcgatggtaattgggaatgtttgaatgctcgaagttgcgtagccaacgtaaacattataggtatttctattcaatgataagatttagattagatttaccatagatttatatatagctcataaaagaagaatagcaaagacaacaaaaaaggcaaaaaacaacagtaaatcagcattgtagcatatccaacctatataaatcatgttgagacaattggaatttttttctaccaaaagaaaaaagaggaaattaattgaggatttgcttaccatatctaacgattttgataagaaggatagatgcccctccccttgatgaggcctctgcaaagaccatttcctttgttatgcttatcatcatcgaacctatcaaatccgcgttgaaagtaaataccttttacctcgagcaagaaagtatagagattgttttcttgagaatacctgagaactttcatctacaagtgttctttctctctattgaagcctctacaacaatattaacgatcatagacttaaaaagtgactctggtagcccatggtaactacagatctatggtatatgatgggggtgggggagatacgtgcacatatgcaagaaagaatggtaaggttacatagtagcaacaatggcttctagcgtaactatgacggacgactgcatctatatataggaaagagtgaaatggaagatcacaaatagcactggcgtcttctatgtgggtaaccacatcgacacatata

SEQ ID NO: 47752 - DNA, 655 bp, Oryza sativa
attaaaaaaatttatgaaatatgcaaaactatatatatacatgaaagtatattcaacaataaatcaaatgatagaaaaagaattaataattacttaaattttttgaataagacgaatgattaaacatgtttaaaaaaatcaacggcgccaaatatttaggaatggagggagtatttggtactgatttgcatgctctgctatcgaatgagattccatccatgtgttgtgtccgattactctgtgctgtgtgcgcgagtaagctaagcgcgcgtgattatactggtacatatacatgccttagactgctagtgacgccgtggtgggggggtacgtacgttcgcgtgatgggcttatgatgcgttaatgatagaagaaggggggattagataggaggagtataatgccggcgccagctggagtccaaagcggcaacttgcgacttcgctttcctgacagccaggcatggacagcaaccctcttcaccgctcatctcaaattcccgttttgccccactattttcttctggtttttttttctcatctcattgctatggaataagggggaaaatatacagcgtaaagcacatatgtaacggaaacttgaaaactaccgttggttaaaaaatataccgtctgattttcgtccacttacaacg

SEQ ID NO: 47753 - DNA, 1142 bp, Oryza sativa
acatgatatcttacacttctcaaaggaatttttttttgaacggaaacttctcaaaggaattcaaatcatgaggtttgagctcatccttaaaaccctccaaaaagtgaagaaaaataatgattcttatggagtttttccaaccaaagcctatagaccagagggctacatagaaaataatcctacaggatttgaatcctttgaaaatcctataaaaatttcatttcataggaacccttaattttcgtatgagcagggtgaaaaaaaagcatctcatgattttagtggagtacttaaatattagaaataaactaggggtaaatttggcgtatagaatgggtttactgtccaatctctctagacggtatgtggccagatgtttaatccatagaaatattgtgacggttcaaaagctaatttcgatgatgtaaactaaaataagaatggattcatacatgttgtcaaacaagaaatcaaaggtcatggtcgtgaatagtttctcaaatttatgtacaatgtttcgccatggaaaaatcatgttgagttatcgttccttagacccttaccatcggttgtgctattagtgggcgctaaaccgtgttctaccaattcgtggtttatcacggacaactaatgatatagtctttgctgatagaattttttttcaaggatgtacaataccaccgcgaatttagggtgctcatcaggcctaacatcctctctttatggcctaacaaagtcgatctctgaatgttttttccaccctttcaaacacacacacatctatgcaccatgatggaagtggctggccaaatttatatagaacttgtggtgaattggatcgactagaaagatttttcaaagctctgctacactaaataaaattcagaagactttgaagtccttttgtccaccgtcagtcatgggcatacacacccatataggagtggagacttccactcttccagcctgtgctcctagtttttggactcagctggcaagcataattatcctcaaaatttacatttcagtctatattttctttcagataatccagtcactacttttaacctatcaaatcctacatggtcctgactgtggattggattggattgtttggatataacggggatcctctagagtcg

SEQ ID NO: 47754 - DNA, 2233 bp, Oryza sativa
atccccttaatccaggggcccgtgccaccagcgacaggtacaaacaactactccatctatctcaaaataaacttaattattagacttttatgtctagcgtttaactattcatctttttaaaaaaaccataaaaaaattttaaaagataagacatgcataaataaagtattattcatattttatcatctaacaataataaaaatactaataaaataattttatataagacgaataaaatatattatttgtctctacttctcctaataactttttatagacggaggtagtactcaccgccgagacgacacagtccaaagcacaacaaaagatcgcctcttctgaaagaaaagaggagagcctactcgttccgtccacacgtcgcacgcccacacgccgcataaactactcgtaaatgctcttttttttttcttttttctttgtctctacttctcctaatagtatgaaaactttttatagacggaggtagtactcactgccgagacgacacagtccaaagcacaacaaaagatcgcctcttctgaaagaaaagaggagagcctactcgttccgtccacacgtcgcacgcccacacgccgcataaactactcgtaaatgctcttttttttttcttttttctttgtctctacttctcctaatagtatgaaaactttttatagacggaggtagtactcaccgccgagacgacacagtccaaagcacaacaaaagatcgcctcttctgaaagaaaagaggagagcctactcgttccgtccacacgtcgcacgcccacacgccgcataaactactcgtaaatgctctttttttttcttttttcttttccgtctagaaacaggtccttcgctttctcaactgcaggtgagtctaaaaattctaaaatttggagtagctctcaacagtgaagtgggatattttaccgtcttaactgctactgaaacaagtactactccgtcaataaataggaggaatttttgctatgcatttttccttatttttaatgacggcattttattcttagagcaacaacaatatatataatgtatatagaaaaaatagcccatataaataggacccacatatataagcttaactattgtaacctttacaatatgcatagataacaaataatattaggaggaaagagggagtagagacaaataacatattttattctctatgggcaaaccatatgcttatggatagcttttgttatttctttgctatagactacttccacaatgttgttgggtggctgaatgaaatattgtattgcttatagactacttttgcacaacactgtggatgcccttattaccatatcacctagttatattagtgagatggcaaaagagtttttcatattggtttataatcctctttcattccttattgcagataaatacaacactatcaaaacgggttagttatctccttaaaataaaggtttgagtgccattacgaagtattttgattgattttaatagttgggagaggctacatgtttggttttacaggaaggggctgatttctaccgcattaggaaaatataactgtagaacaagcatttactagaaagctgctatttagatattgggctaaaacatctaaggctgcgtttggcagcaacaccaaagagagaaaattgttttgtttttcgcacgcacgtttcctaaactattcaacattgtgttttttaaaaagttgatttaataaatcatattaatttgtttttttaagtttggaataattagtaaacaaataatcatagttaatcgttcaccttgttttgcgcatctgttcaatcttctccttttctcttctctcaaaaattaatttttaagtctaaaatatttaatacacaattaatcataaaatatttaatacacaattaatcataaaatatttaataatcataaaatatttaatacacaattaatcatacgctaatagttcaccttattttgcgtatcttttcaatcttctccttttctcttctctcgagcacaaccttagacacaggtttatcctcaaaagctgtttatttatggaacataaggtgtacttccttaggtcaatctaagcggtaatgcgctttgcaatagatggagttttctcttctatcgtggaggttaatataagttatatcataggttcagtttaatgttatggaaaatagcatggtcttcatacgtgattataaaataaagtgtgtgtg

SEQ ID NO: 47755 - DNA, 1591 bp, Oryza sativa
tatctccgtttccggcctaccgtttttattccgtttccgaaaaataatatgaatagggaaatggtttagcgtgtttcctgacccttttttatccctacgtgtgaatgcacgcacggtttcatggcacattggcacagacgttttgcaccccaagaacctgttcaaacgaacacggttccagccttccacacgacatggatgggatggacggttggatttcacaccccgagacgagacgcccacattttcaaatttcaaaattcgaatcgccgtcacaacggccgcaactccctctcaccaccaccttttcatatataaactccccctctgtcccctccccttccaatccattccccttcccccaaatccaccctaccttgccgcgccgccgcgacaatccatagagatcatcgagagaggagtccaccggagccatgaggagcggcggcgacgtcaggtccttcttccggcagcagaaggcccacgccgccggcggcgtcaagcccaccggcggcgtctccaagaaggcggcgctgccccgccaccaccacaagcccgcgtcgcagggtgcttttctcctcccggtttctcccgcccccgaaactgttcgatcgattgcgtctccgctgattcgattgttcggtttttttgcagcgacgccagatcgcgccgtcgacgacgcgaggaggcacgtcgagaaggcggaggaggaggaggggcgggagaggatggctcgggagttcgacatggacatgcggtacgggccctgcctcggcctcacccgcgcccagcgctggcgccgcgccgccgcgctcggcctcgccccgccgcccgccgtcatcgccgtctgctccgacgaccagccgtgcctctgggagggccgcgtctagctctagcaccaacacccgatcgaccgatccgcttccagaaagttctagtagcttgtatgtgttttaagtaggaacagcttctcctctgcttccatctgccacgcctcgtggtgcttgcatcgacagttcatttcaaaccgctgcctgatgagtcagtgatcggtgccatcttgtgttcttattatctgaaatttatgatgttgttcttctcccagtcggtatgatctatgagactatgatgtttatgaaccatggcattttgattggattagtacaaactctaaaatcatggtaaattaatccaaacatttcattcccctatctcgattgttgcgggctgtgtatggtatgcaagatagtatctcagattctgatgccattctcccagttagtatgatctatggcgtcttcattgtatcagttattacattttgattggattagtgccaactctaaaccatgataaaattaacccaaacatttcattccccccaatcttgattgatgtgtataacaaacaagaaatcacacacaattgaatcgttggtactgggaaaaggaagcaacaattgcaactcacgattggattaacagatctttctttgcaatatatcccaatccacaaatcctgttattacattacaagcacgagtacaaaggcaataccgaatcaggacgaacgaacatcggtacacacaaac

SEQ ID NO: 47756 - DNA, 1472 bp, Oryza sativa
tatcatcctctctttttatactactatactgcgtatagtatttatatacatatgtagtgtaaactttgtattacactatgtatagtgtgtatatacacatgtataaacatacgtatataagatatatatatatatatatatatatatatatatatatatatatatatatataaactttgtatacatgcgtataaaaaaaaactttgtatacgtgcgtaaaaatatatacatatatataaactttatacacgacgtatacagactttgtatacgagagtatacaaactttgtatatgtatgtaaaaatatatacatgtatataaactttatacatgtacatatacaaacttggtatacgtgcgtatataaagtttgtatatgcgtttacaaactttgtacatgtctttatatacgtacgtaaaaatatatacatgtatgtatacaaactttgtacacgtgcatatacaaacttgctactaaaaaaccgaaaagggagagaaaaaaccgaacaaagacgaaagaaaccaacgtagaaaaacgagaaaaccggacaaaaaaaacagaagaacggcagaaactaacgaataaaacgagaaaaccggaaaaaaaaccaacgaaacgaacggaaaaaagggaaaaccggaaaaaaaccaatgctacctaactcctccgcgcgcaatccgccgtcccctctccgcgcgcgccacatggctagtcgtgcgggaaggaacgcgcgcgactagtcgcgtattagcgctttcgcactcaaaggctgtactagagtgcatctactatataatcgtttaagaaaatagaaaagaaaaacgatagaaggctcgattgcctctaaaaatgtacttcctccatcctaaaatataaaacttttttggtgtatgtgactatgaatctgaacaggaactcgtagttttaagataagttacatccatcttaaattccttatattttcagaacgaatgcagcataaaaaaaataaaaggctttggtcgaacttgtgtatgtcattatgtgcagtcgtacagagaggggtactgaccacaagtgctctgatgccagcaggggcaccggtaggattccatatatctctctcgatcatcggatgatctgaaggctgtgccgccggcggccgtgccggcgaggccagccgcccttgttccagcaagctgcacaggagatcggggccctccgccgccgcggccttctcctcctcctcctccttcttctcctcccccatggcgaattggcgattcgatcgacaatcaatacagctaaactagctatgcgcgttatgttgaggccgtgtgcacgtacgtacgtatatacgtgtaggtttcggatgcggcacgagcaaaagaaatcatgtcaggttcgagttagacaacttcccggggtgtttttctctggttgtcagctagctagctctacctctgctcatcttatatcagatagtgtgt

SEQ ID NO: 47757 - DNA, 1843 bp, Oryza sativa
caatggatctacgaaaagatcgtgtatttacaactacaatggaatagtatacaaagtcaacacaaatcattaaatagaatttatggctacacaaaccgttgaagatagttctagacctagaccaagacgaactcgcgttatgtggtgttagaattaaaaaaatatatgtgagacccatttatccgcagagtgactgagtgactggcgcctacctcgggaggccatgcgccatgctgatgttgtcgacatcaacaccgatgagcgcctccttcctcctcccagtcaccgctcaccgacaacatgtggaggaagagaaatggttaggtttgaccgatgttccgtgtctttctccggtatccgacaataacccctcgttgcacactttgcacaatgccgcgtcacccttctgtcttctaagagcaagtttaatagtatagcccactactgactctaattcatctatagccaatttatataatagttgcttactacactattaatatatggtcctacctatcatacacacaatacgtcttagagtccgtgttgcagctggctacagatctgtagcccgctgctcttctctctcatcttttatctcattaaatatgtttgtagccggctaatagtctgctattgccctttgctctaacaacgctttaccctttgctcaacttccttaccttttatttccatcacacgcgttttatcatctgacatcattgcaatatctctctttcgtgcaacacacagatattttgctagtggtaaattaatttcaaatgctcggttggacaatatgtcatatcagggataaaatttgatcctatagcaaaacattattagctattatccctatatcaaactgaaaattttattatgcacaacaagtaaaagaattcatgttttttagcattcaaaaaaaaaggagagaaaatgtaaaagggctagattgatcacaaataggactctaattattatcggcctccctctctagccttcatttcttcgtggatctcttttagcgtacaatgacccatgacaggtatcccaagaaggatgaccaaacagaaaacgatggcaaataccccctcgatactgttgcaccgtggaactaacgggacaacaaagaaagcaagcaacacgagagcaacagtgttcgcgaaccactgcaatatatatgaagaagagttaaaataagaactaatggttagttgaatatataacgaatgtaaacaatagtagctgataagacaacgagacaaaatatacagatatgaactttcaatggtatagctttaatgctctaaattattataagtataggtttgtccttgatcaaaccatttatagaaacagaaaaaaaaaatataacaatatctacaacaccaaattgatttcactaaacccataattaaatatatttttatagtatatttatttttttgaaaaatattgataattctttttataaacttggtcaaagtcaatgatgattttacttgaaacaaactgatggagtacgatttaaagccacataacttatagatggccatctggaccgtccggcacggcacgacccaagcccggccatgcctgggctgaggctagtcgggccggcatggcccgaccgacacaccgggccatgccgtgccagcccacgggcggcatacacggcccaatactactcgggccggcccgaaggcacaatggctcatcatgtttcctcatagaaaaagtctatttttggtccctcaactctgtgggttgtgtttaaatggctggaaagtaagtctattttatatacctcttgtcttgggccttgccttatacaattatttaa

SEQ ID NO: 47758 - DNA, 704 bp, Oryza sativa
gaacgctcggtgccgagacggtgcgtcgcgtcgcgtcgcccggccgcgcggggagaaagaggatcgagcgatcgcgacggcgatggccgccgcacaaaaggtggcggcgtgcgcccggtgccaaggcgtggcgtggcgtggcgtggggaggaaaacgagagaggcaactagccgtggaggaatttggtggtggtggatttgaaagcgtcgcgaggaggaggacggaggcgcacgtcgcggtctgacaggtgggccctctggtcaatggtcaacctcgtcaatgacgggtgggcccgtgggcaccgtggccacgtaaaacttgggggcgacctgcaaaattcatgcaaacgagtttctgaacctgttcagatcgctgctgcaatcaagatgaatctctccagtttcaaaagagtctgaactctgaagtcacactgtgtctgcatgctgcaatgtttcaaaaaaaaaattgaccaccatcatacaaatcgctcaagataaaacgcaatatactctctttaataatgtcaatctatcggtctgcatgtcaatagtgaactatcctagactcgctgagtcatgtgttcttcactttttgatgtaacaattggtttagggtagataatcaccgtaacaagtaaaagcagctactacctaactagattccacacttgacattaccaaacttcacgagattaagttactgt

SEQ ID NO: 47759 - DNA, 2093 bp, Oryza sativa
cgattactctgtgctgtgtgtgcaccttcaggaatgtttgctaagatgcattatgcatgtagtacaacatatacatgcctgttcctagtgctgctactgattatagagattctacagtgcagagttacaatgtttctgtgactactgtgaaaaaccttgtgctttgtctgcaagtgatatcaactgagattagtagtttctatctgaccttgactggactttttgacaagccttgcatggtgcatggtttgagttgactgctgtaatttgtgcagattatgcaatcattaggtgctatcctgtttgagtggaatttcattgtttctatttggctggtagctttgtgggaataagttgtttttagaaaaggaggattgctaggttcagtgtgtggattgtggaccttggaatcgattgttgcttaatgctctaaaaaagaaaaaaaaaacataaatgcactgatttgtagccactgctgggctggcaatcttgcattgtggtaatgtggcatggcatcttcggatctgatctaatcttgtagagattgaaaggggatgatattctgtgcccactcttgcaccacttgggaaaaaaatgactgatggatttcctgccgttcttttcggctggactgctgcattctcttgctagaatatgttttcaattgtaatattgatcaaaaagttttttttgtctgattttgcccatcatatgatctgatctctttgggcaacgtactcgaatcatacatcatatgtatttatcagttcacgagcttatcatacaacctggatatatatatgtcttggaaagggatcctctgacttaactgctgtgcagttgagtcactgacatatgggccatagcaaagtgggactcacatgtcagtgactcaactgcatgtgcagttaagttagaggatctactttcatatgtcttacggtgaccaagatagacatgtaggatgtagctagctttgcccatacaacaatgacttacaaaatgaataaaataaagaacgaaaaacagagaaaatgaatataagaacaggttgcgtcaatcattgaatggagcataagttagtgactgagtaatttattcagtaggatacatttagtggtataatccattgtaggcagagtgctttggctaagacagcagttggcctagatcagcttaactcctgcttgcatgttactgctattagtagagtgtagaagcagttggtgtaggttatattagctgctgctcttcaatacataatgccaaaacagttggctacagtctgcattacactaatgctgcttacaagataattgcatcagtgctgaatataaaatgagaaaacagaacatctacaaacttttgctgaagatctctacgacagttaggtttttatttgaagttttctcatatcattttaaattaatccagcacataaaatttcagttctggtacaagaacagcaacatttatctctttcttaaaaaaaaaaaagaaatcacgctgagggctttcctgaaaaaaaaaataaaattgtgcttcaggctaaggacttgttcataagtagaataaaaatcagggattttggtgctatgctacacattcccagacctcgctataaaacagatccgatcactctcctgatcggcgccggcgttaattccaagaaaagaagaagagaagaatctgaaaaactttaagccgctatgggtctgcaggtatgcagatcactctctcaatccaccagcatcatcgtttctacgcttaataccgctataaagatgaagaaatctttaccatcgtctgctccctcgtttgtttgattgattttattctgtgtgtaaaatgtattgtaccttagatttagcctagaacaattcttgttcttccccttccctttgtggcgtaaaagaaattcttaatctcccgtctcctccgctccttgcgccgcaaagacgagtcgctgctgacaaggggaggggcggcgagcagagcagggaaaaggatcatgatgagcatcacatcctctttctgattcatctctctctcccatcgggtctggaatttgcttgtgttcgttcggtaaccct

SEQ ID NO: 47760 - DNA, 1966 bp, Oryza sativa
gctccgccggctcccgcgaccgcatcgggaggaagggcaccgtcgccgacctcgccaacgcccgccgctgctccaacagggccccagcccccgtccccgccgccgccgtcgatctgtaccactcccacgaattcatcatccataaagtcgccggaatctcgtggtccgaaggcggtggcgaggagtcgcgagagagtggcgcgcgcgcggtggcgagtggcgtggggaggaagacgagagaggcaagtagccgtggaagagtttcttagcgacggttgcgtttcgacgccgagggaggcggtggcatttaaaggcgtcgcgaggagagggacggagacgcaggtcgctcactgacaggtgggctccctggtcaaccgaagtcgggtgggcccgtgcacagtgaacctgtgatcgatggaaggttcaagatttacagagtctatccgcttgttttcaaagatttggatttacagaggctgtgtttagatccaaagtttaaatctaaacttcagttcttttccatcacattaacctgtcatacacatataacttttcagtcatatcatctcgaaattcaactaaaatccaaattttgcactgaactaaacacatccttaggaacttagtaggattccaaggtggaaatccatcagtccttcgtccggttgttctttaagttggaataagtgaaatgatatatttgtaaacaaaaaataatttgctcaaaggaggcataaattcaggattggatttgaacgagtggactatgcaagattcatacaaacgtggtctgaacttgttctcatctctgcaacaaacaaaacgaatctgcccagctctttctagtgagtgagtttaaattactgtcgaattttacaaacaaaaaacagagttctggacaaaatttgttaggacgatcccatagccaccattagaattcataactaatgcttgatcgcctgatcggtccagtgattcagaactcagcagattcagttacttactgtcatcactcattagaattcagaatcatgcacatttctaacagtaatactatagtatattgcaggagtttaatcacaaatgcatgtctggtttcattgaacaaatgctgataagtcagaatagtgcggcctcgatcgattggcccagtgattccaggaaaaattcggtgtctgaactagccctcatgacacactcactgtcactgcattcagctgcattgccatcttgttactttcaggttgatttcagtggttctccactatttttgcaggcttgcaacaccagaatacaagtcactcaagacaaattgatgtgctattaacttttcaagaactatctcgtgtaccttgctgatctaagaattggtttaaggtgatcacaggaacaactataacaagaacgatggcctgttctacttgttgagctttgatggctcatggctccatatgcacattggattttaagttggtctaatcccgatctcttggaggtacggaggttgagagactcggaagaaatagacgaaattcctgatggtgattatgaacaattcctgatggtgattatgaaccggatgaacctgatgaggatttacagaagaaattatgtgttatactccttatttagttgataatgataagcacaagtttgctaagatgcgcagcattggggatcatgctatgttcttgttcggttacacaaggattcgttccgggccaggaatgataggtataacaagagatttataataggtacaataagagatcgggatttattccgggtcgggaaccaatttacttatattagctaggtacaacaaaaagttttatacctcttaactagtgaattgattcctgatctcttattgtccctatcatgagtaaattggttcccggcccgaataaatcctggtctcatgttgtatctatcataaatttcttactatacttgtcattcctga

SEQ ID NO: 47761 - DNA, 697 bp, Oryza sativa
cctctcctcctcgcgacgcccattcactgtgctcgggcccacccgtcattgacttcttttgacctcattgaccaaagggcccacacgtcagagagcggcctgcgtctccctcctctcctcgcgacgctttcaaatgcaccaccgcctcgcctctctcgcagtctcgccttcctcgccacgccacgccacgccacgccacgccccacgccacgccacgccgagaagccgaggagtagcaagccactcgccgccgcgcgcgcatcaccggcgtacgtacgtcgtcccatccgcggcgggcgcgcgggatgcaggttttccagggcgtgcagttcgcgcggctgcggaactggtgggaggagacgtacatcacggccgacgaggacgggaggtcggtctaccactacgccccagccgccaccgcccggcgcacgaggcaatctgggcggtgcagttggtcctcgccggggcgcccccgacgcagtacgtgctcctccgcggcgcctacggccgctaccttggtgccccggacgccgtcgtgcgccgctggccgctctcctgctgctggcccgcccccgtcgtcggccagcgcgacttcgaccagccggaggtcgacgccatcatgtggcgtgccgtcaggcggaccggccacgtcgtctgcttgcacgacaagtccggccgctacctgcgcggcaaactg

SEQ ID NO: 47762 - DNA, 1258 bp, Oryza sativa
aactaactataaccatagtaaaagaaattaccactactcactgattcgagcatggataacagtaaagctaaaactaactggtgtggaaaaaaggagaaaaaaaaatgagaggtgttagctctcatataacaattagttctacacgtgttccaatatatttacattaaatccatagtgaaaaaaaaagagagttgagaaaaaaatagagttaattttagagttaatttattactccatccatctaactttaatagtcatatttcatcttgacacatagaccaaggataaacaattctacttatcatccattactagtcattcctcgtaaacaagcgattcattaatatttacatttctcgatgcccatgtagccaatcttgtgtgaaagaatggagagtcacgcattaaatccgaaaaagtcattaagatgataggttgttggcttgaaatatgcctatcaaaaataaatttttcagatttggaaatatgactaccaaaagtagattagatggagggagtatatatgtaaactctaatataaattaatagtcaatagctttactattaaacttgttgttaggaattgagctgattgaataagcaagcaaaggttatgtgccgtgctgttgctgctgctggtgctggtattagaaggggaattaagtgagtagcagtggagctgtgtgcgcgagtaagctaagcgcgcgtgattagactggtaattgcgtgattagactgctagtgacgccgtggtgggggggtacgtacgtccgcgtgatgggcttatgatgcgttaatgatagaagaaggggggattagataggaggagtataatgccggcgccagctggagtccaaagcggcaacttgcgacttcgctttcctgacagccaggcatggacagcaaccctctccaccgctcatctcaaattcccgttttgcccccactattttcttctgttttttttttctcatctcattgctatggattaagggggaaaatatacagcgtaaagcacatatgtaacggaaacttgaaaactaccgttggtttaaaaaatatacgtctgatattcgtccacgtcacaacgagtaaaaattttactcatgaatgaatctgcgagtaaaacttttacctgtggtaacatggatgaatcttaaacgttcatttttcgatccaacagtaatttccagattttcactacatatgtggtttccaccatatattttcctggattaagggtgggttctaaattgcg

SEQ ID NO: 47763 - DNA, 517 bp, Oryza sativa
cccattatcggctttcaatttatacagtcttgtaaataattatgttttcgatattatatccgtttcaggcctaccgtttttattccgtttccgaaaaataatatgaatagggaaatggtttagcgtgtttcctgacccttttttatccctacgtgtgaatgcacgcacggttgcatgagacaaattcatcctcactctattcaacacaaatacgtacaaacatgtataatagattgataaatgataatatgatcaagtattcgacaatagttataacttcaatgacatataattgtaagtctataaagcatattaatacgaactaacggtgtgaggaactaccaaactaggagcagctctatggtttagcgttatcacaacctcgtgggacactgggactggtatattcaggctaagggaatgggccattggagataacttgggccagagatatttataaaaaaagtaatttaccgaaatatgtaaatggtaatgaccaaaaaaaatacaataaccg

SEQ ID NO: 47764 - DNA, 810 bp, Oryza sativa
aatttccttgtccattggattactgaagaaacggcaacatatatgatcgaccaaacacccgtctgacatgtataacagtgaaagtccagccacaatctcttgcatgcatttggagcatgccactgtttcagcacaaccgaatgattcagaacatacactagctggggcatatttgctactagtaagactatgctatcgaaattaaattatagtgtttgcaacaactctgcccaaggaagtggccaggaagaacacaacttgaaattaagctagcgattacaaatcgataaatccaagcagaattaaagaaaaaaggatgaaggagaagaacgctgtaattaacggtaatgcatgacttaagcagtccaaaacgatttgaggatactactcacatgtgtgcgtgacttgacgatgtaggagtagtattgtccaacagcacgagctattcaaaactcaaaagaggagtcaagcaagccgcaaagccaacagcctgcaagtacctgacattgacctgttgatgaaaagtctcagcttacacccaaccattttcacatttgccaacaacataaacaacgcaaagaaatgagcttgctaaaccttcctttggtgggttctgtacaagaaaaatgatggattaatgttacataatttgatttcgaaatattgctgaaactgaaagcgtccatttcattctttttctgcgcttactctgattcatgccaggtcaagatttaattaggttaattgcatgtatgaaatgtactagttagtactggccgttatatataaacacggtcaaaattaacctaa

SEQ ID NO: 47765 - DNA, 626 bp, Oryza sativa
atatatcaagatggatagaatgtaatcaaacctgcagctgtttgctccgagaaagaagacaccgagaggatgcaaaaggctgcttctacattccaccccaccctgtggggtgattttttcgtcgattaccagccaccaaataaatctcaggtagcaattaatcgcaaatattttgttttaaaacaattaattgcaaatatagcgctgaagaatttcagtaacccgtgcattcacgcgtgctatttatatatactatgatatacaaacattgtatatggtatttaacgaacaatagatactcccaaaattttaatatacaacattatgcataccaattaatatttttatagttttttatcttcttaatttagtaatcttgaaactcaaaattaataaattaatacacagttgtatttttcatggattatttattttagtgtttaaatgaacagaaaaatcataaatatggaattaataagaaaactatacctgatttacagtttcagttttagtttttcatgttgtttaacaatataaaaacttgaaattaataataattggcatgccatccctgacttgcactcatatgttgttcaacagtttcagttttagtttttcatgtaatg

SEQ ID NO: 47766 - DNA, 706 bp, Oryza sativa
taattgaagtcgaagattactaaacataaataaatatataagtgtaaagatataatggtagaaaatgacctttgttgaagcaatatcatttgagagccgtacacatgttgtgaaagacttaagaagttctggataagtcaaaaggcaatcaagagtttcctttgctacaaggtcgcccatcccaacaaaagaagcacatgctagttcaaaggcaccaacagtctttcttgaaagttccaggtgttcctctattgtttttggaatgtaatgatcatcacgccattttatctcttgagagaattcttgaactaacctcttgaactatattagaggtgtaaaaagtgtagtgttaattcagccgttatacgggcataattttgaagaaatatcattttaccaaaaaatatgattgagtcattagaatgtcataaataaagtggttaccataattttctcttaggataaaacaatcagtattgttcgttgagttagatatattctattaaaacatacaatcaaataaatatttatatgtagaatataactaacaatgaagttgtatatagtttataacacaaattgtatcataatcatgggataataactatatcattatattccaatctatctaatactcgcttcatccaaaaatataaggcgcctgattcacatggtcatcaacattgcacttttgaccattaatttg

SEQ ID NO: 47767 - DNA, 1038 bp, Oryza sativa
aagagttttaaaaaataattccatttcaaaagttgtatataataaacttcctccgcccctaccataggatggggcatataaatcaccatatggtaagacaatctatgtgcaatgaacccgtaggagggaccaactatggcaattttgtagccggccttctccggcgataaatcaccctcagggagggcgagaaggggcgcctgcaaaattaccatggtgcgcccctccagccttgtgccacgtcgcatagcacgtcctacataggatgggaggagtataatttcgcaaaactttaaaacgacgacttatttttaaatctttcaaaaataaattaaaaaattctggaaatgatatattgtgggctactagactcttggggttcaaaaacttacctaatgtaggaataagtttattttgcttccctcatcttttgcacttagttgaatcgcatccctcaaccgtaaaaccggatataatgcctccctgaacttcaaaaaccggtgcaaattgactccttcgttgcttttgaaagcattttctgatgacgtggcacattgacttggtttaagtatgttgacgtggcagcgtcataaaaaattaaaaatagaagttggtctgacatgtaggtgacaaaagtaaaagggacattgcttatttgaccctattttgaagtttaagtactaatttgaccttgttttttcaagtttgtttatttgaccccgtttttcaaaattgaagctaccgtttgaccctattttcaaacaccgttagggtttcatttagatcaaattaaaaaaaatgaatttacaagcctaaatgactaaaatgcctttattcactcattccttatcctctccatgctctctcaccacttccttcattagagcacaaatggctggagagacggcggctgcgttggctccacggcggcggcatgacggggaggaccgcccgcggcagcggcggctgcagaagggcgatgacggctggaggaccgtcggcggcggctgcgttggctaagggcggggggcagcttgg

SEQ ID NO: 47768 - DNA, 612 bp, Oryza sativa
gcgaattcgagctcggtacccaatttacatagtatttccggttttttgttgatctgccatgtaaattctagactaaacaaacatctcaaatacataaatatgatctagcatgttgacaaagaaaattgctgtacataattttataattatgttaaaaaaactataatgatgtgattgtagcatgcattggcatataaagggaagaaaatcaattttctggcatttgttttcataggtggtggtctagcatacatatccttattctgtggagcacatccagcagcttaattattttacattgtgatagttccttgagtcctttatagtgcacactaggcctgtaggccatgattattgacaattgctgacttcaaatttgactaaatattttaatgagttacagagtaaaaaatactgtagtgcaaagtttcctattaaaaatgctcctagctctaatgatctgaaagagtaaaatacatggcgggtctttaaactagagcgttggtattacttaggtccgtaaacttgaaaattgcacatttacgtccatgataacgaaccacagtaggtctgaacctcatttgactgggggctgactgccgacgtggcgct

SEQ ID NO: 47769 - DNA, 812 bp, Oryza sativa
cccccattctttgggcaactgccgcatgtgcaaccacagattggagcaacagctgctcttggaggcacacagccaccaacccaagcaaaccaagcagctggttcatttccaccacctccacctccattaccacttatgccacaatttgttcaaaatactggaggaatgtttggaatgggaccttttgggatggtgagtggctctgcgccacctccacccccattgcccaacattatgtcagcaggttttccaagactaagtgtgcctccacctctgcctctgcctacacaatctcagaaccagagccagccccagcagcagcagtctccacaggcaccacagcaatcgccgacctcgactggattttttcaaccaccaggtgctgggttcttcccaccagtgcaggttcagcaatctccatctgcccaacggcaatgatgattctacaacaattgttgggctataaaggaagcaccttgtgctaactttgtatattaaacaataatccctgaggattgatctgatagttggcgagtcctgcatcgtgaagcaggattaatgcttatgaattgggaggatttgtaggataggcttgcggcttatgtgatgtacaactgttccttttggtctgaggagtttgttcaactcttcttgattatgtgaagttagttagactttacttttgtttgcatagccagatcttattgttagtcctgaggcaaacaaatgtcggcattacatttgttacttaaagaggtgcccaagtgaaagaacttttttgggctcctcaatggtagaacttacctgtggct

SEQ ID NO: 47770 - DNA, 660 bp, Oryza sativa
cccattagcctgtgaaacagatggggagaaaaaggaagccgaaaagagcccacaagtatcattcacatactgatttgaacgacggacaataaattgctgttaattctccaattgcttcttctcggtgaattgaaggatacagcagattaactgattaagctagcttacctaacggccagaacgtgagtcatccagctgattaagctacaagctactaagctagcagtgtagtggaactaatgataaaactagcgacacgatcttaattgtactaaagaaagctgggttaaaactatctacaagttgataaaactcatctgcaaaacttttgctaactaaaaatgtagagcagaatccagaaagaagcagaaggtagccgggccggatgcttctaattgtgcctgggattgaagttggtcccggggttgtgcttcatgctggcgtcgaactccaccttgggctcgccgttcgcctgatgaacgccattgactcggaaggtgttggtagccattgccgccgtcggcgccgctgccctgggctgctgttgctgcagcagcaatctcctgctactcctagcagcaacagcagctactgcattgttgttgccgtcacgcaacaagccggtgctggtctttggtgatgcagcagcagttacagcga

SEQ ID NO: 47771 - DNA, 641 bp, Oryza sativa
atattcagattgcagtgaacacataatgaatataaagcaagcgctaacaaaagaaatcttcgcgcgcacacacaccccaatccctcctctttccctgactagaagtaatgcagacaaaattataacaccggcatccacacaaaatagtggtggaaaaggaaacagtggaatgagaaaacatgtacaacataggagttattttctgaaaccagaaagaagatttgcatgaagatatatgaagaaccaccatagttaatacagtgcagtgtagtgtgaacaatggtaaattcaactgaaaagactagctgcagcagttaggtaagggtgactaaattattgatctcatcctaacatattttgatgccggcagagaaagtgacgcgataagatgaactgacagagctaaataggcaaaatctgacctcaaaaaataatccaaatagtgtgtcagggatctttcgtgaaacctcccatgaagcatcaacctctactagtgctgtctgaggcaggtccagctttgaagataggcatttggaactgaaacaaaaaagaagcaaggagcagaaggtgcaaaagaatgcatctttggaacccatgccctcggtcctgcctgccgaacaacagtaggtcagtaaaaaact

SEQ ID NO: 47772 - DNA, 508 bp, Oryza sativa
atttattcatcaatgcgattctacaccaaagattcatgtattttttagtatcatgcaaacaatccattttagcaaagtcaagctaaaggagtgatttcctgaaaaaggttcctggggagtagcgtatcttcaattttcccaacaaaacacgcctcagatccagatcggtatacccaacataaacatcatgcatgtaatgtaatgtaatgaactatgaattttttttaactaaggaactgtgattttcttaacgaaaccacaaacaacaagcagataagcatgaggaggtaaatctatggaagcattacttgattacttaattactgactggataactgttgaaggagcaaactgcagaagctgcaactccagtccagcggtttaccatcaggggttgccaatgccagtctggcagacaagaaaaactatgccataggcagcgacagaaagatcgtcttgactaactggatatcacaccgcaactgcaactggtgtttcatatcaatat

SEQ ID NO: 47773 - DNA, 614 bp, Oryza sativa
tggtagttgttttatccaagtgctcctcgacagcaacagtctcaaccttgtcaatcgaacagtcagtaatggaaatcttggatttaaaggacaaagtttgttgattctctccaagaacaagaacagcaggttcaccataactcaaaagtgctccaagcagaagtgcagttaacaggaagactggagatgaagacagcaagaagttgaatagagaagggcaaagcctgtgtagaaacagcaacaaaacgccagcagctagtactatagggtaatcacaagcaaattgatatccaattctgacagatgaatacattagtctcttgatatgcaacacaatgtcatttgcaccaaaagccatatatatcttcttgaattttaccctcagataaaacgttggcctggaaataggaaagagagaagcaattcatcactataacattatggtgaatattcaaacaagtaaagatttatacttgaacaatagcgggcgtacagctcttagcctccatggcagctgtaattgttgtactagtttgaacctcttcccaatcttaataaacttcagccgcgtatcttacgccagcccggcgaaaaaaaaaaagatttatacttga

SEQ ID NO: 47774 - DNA, 667 bp, Oryza sativa
ctatagggcgaattcgagctcggtaccctaaaaaaagaacaatttgtgtggtgtgcaaggtaacacaccactagatgcatatgctgatgatatccattagaagttacaaatggtggtggtagttattgttgaaacctgaaagggagtttatatcacccatatggtggttttgtagctctagcatggtgtggactgtggatcatctcactttcttttcaaagatattagagaaatattactgatgtggtgtagtgcgcataatgattaaactgggcagttggtttgcaaatgggatctaaatgtaaatctggttacaacttaccccaacaaacaaacattctagtaattaggtatatttacacgggatcggaaatgtttgcaagattgcaggaatagagatacaacttgtagcccacaatggcagccatacacaagacaacaatgattaagatggcaggaaagtgatgtgagttaaaatttttttagggaaatgacaaattacatacacccaagagaaagaaaggagagaaacaaaaatagtgcgatcttgaaggagagaggaggaacagagaaacttaaactagaaaaagaaaagggaagctctacttgttttatttgtgtacttgagactaatgaaagtcatgtgtggattcgcacttaatttgcc

SEQ ID NO: 47775 - DNA, 2265 bp, Oryza sativa
  unsure (1)..(2265): unsure at all n locations
caccgcccccgccggcccggcgccaccgcgcctccactgctgcccctacacagagaaagagagaagtggaagaaatagagaactggagaagagggagccggccggccttatctcctcctgtgggccccgctgggagagcagatatatatatagtggcagaagtcatctcaaacgggctaggacttaaagccgtttgaggtgagtaacctcacctctgacgggccgtccggctgcgacccgtcacaggtaactagtcacctgtgactggttaggacttaaacccgtttgaggtgaggtaacctcacctatgacgggttctattttcaacccgtcacaggtgactagttaccagtgatgggtcgcagctggatgcctcaccgatgacggcatcccgtatgacccgtcaaaggtgacggtcatcagtgaccattttgtttgcccgtcacaagtatcccatcagaggtgtgaggatctggtgtagtgtacttacattgtgaaacagaggaagtatatatatatcactctcatgcatacagttcatatcaaatgcggatatataccttatctgtgatggctcatgaaggctatctctattagttgaacagattgatagagacaatttgttagtgatgagaaagactcatccagccgatagtgatgtaattatctgtaatggttataattgtgattgtgacaatgtatggttgatctagctggccaagatgagggggctagagctttaaccatctttcgtacttcatggtatttgttatttgatccgcccattctgctagatccaagcggctcaagatgcaaggtatctagtggtacttcaagggtcgtaacaacctgtctctagaaccgtatagcccaacccatccgacgagaggatccacttatacttttgtcatcggttcatgtaaaagggttaacctggaatagtatggttggagggacaaaccattttcacccttactaaactagtagtgtgatacatagtaagcgtgtgcacctaacttttataggccacacaagtgaatggggctatgtcgatcgactcctctgcgtgcagatctgagtgatagccaagaagaagtgacacatcatcagccatcctggtgatttcatggttggcctttgttatctagcaatcatcgttggtaatgagcgcgtggttgcaatgtttctgggaccccacggatgcctctaatcgggttggagtaagaaacaaggactaattaaatgttctatatctcagaattcatgtccaaattcaggggctgctggcctcaacaaattaaggcacagttggatattcggagatgtattatatatatgcagcatatatatgttcttttttctcattgatttgatttttttatatcatacttactagcaatcatgaccgtgcgttacaacgggaattaaagaattaatattagaaattgctttgcaccgaacattcgatgctacgcattattgtcggacattgcacctctactgtagagttgacgtgaatgctatctttatccatccgatctatgcaagcccatacacacaaaaaatcattctccaagttcttctactttgatatgatgtgatttgccaactttagcctaaaacataaaatcacaattatgatcaatggaacactccatgatagaaccgaactggaatcgatctccctgatcgcatgcgaactcgatgtggcgcgtcgtgcgggagtatagcaacgtacatgggcaggacaacgatctagtgttgaaaacggctgcaccacgtgagagcgggagatggacacacggtcccaattcaagacgaatgcgtcagcgctcgctcacggaattatataaaattaaaccaacttaaacacggatgatgtaccaagtcttnnnnnnnnnnnnnnnnnnnnnnnnnnnnnnnnnnnnnnnnnnnnnnnnnnnnnnnnnnnnnnnnnnnnnnnnnnnnnatacnnnnnttaatttgagtgtcattcttgcgaacgtactctgcagacgggatacttnnnnnnnaacgtattagatatagcactacacgggtcgggtcacacaacacctagtatccatcgtttacggctaggactactggggtcaccaatcccattttctcccctagcttttgtttctgagtgtcaatgttggcctaatagagtgatttcgccattggtgtcctttccgatcttaatgctcaaaccatgctaccatgcattaacacagttgtagataagggccccttgagaatacg

SEQ ID NO: 47776 - DNA, 1920 bp, Oryza sativa
caccaccgcctccttcccgggggcagatgtccagcttcaccgccggcgcaatgtgccgctcgtacgccgccgccagcttccccctcacctccttcagttccgcctcactccccccgccgttcgccgccgccgccgccgcgccaccaccaacatccccatcaccaccaccgccgctgatctgcggcgcgatacctgcacgagcaagaagagagagaaaaaaaaaaaccgcacgtgagaccgtgagctcgacaagtgtcccgccattgttcacaaaagatttggaggtgcaatacaatcatgagcgcgcgcggcgctgtcgggcgcggggaacgcaaatgcgccgcgccatgattgggcagctgctcgatcgatccatcgatcgagactcgagagtgcgccaagctaagtgtgtccccatccatgtccctctgatctccacccaactaagctattgcggctgccgatcgatgccggccggcatgccgctatcgctcgctcgccattgcgcacgcaatgtaatcaaacactaccgcgacacgaacgcgtgatggcgatcgatgatcaagtgtgagggctgttcagattaatgctattttaaaatatacattttttttaagttatcaaagatatgcatacatttattttttttaactttggtaaatatataagaaatccagctaaaatttcagcaatattattaacttactaaaattttggtactagtttattttgactataatctaaacagtctataagtattaagtattgctatcgtcaggggacccatggaacggcatgcgcgcaccgtatcaaggacacaatctctcaaacacgttggctcgtgcttctcttctcagtgctcaccaagctcaccctcctctctctatctctgcttatgcttttctttttctttacttattaaaaaatttatgagcccatggtatgtgtaagtataaattgtttgattattgctttatgttcacctttttgcaaggtggttaactgaacaactgtggggagaattatatattatgaacaagtgttgaaggatctgattcctctagcttttttatatgggacgaattgtacgggagaataatcctgtgaggccctgtttggaatgtggggaatttttcgttttctacaggaattgaaatgtttgcttgtgaaatttccgcaaaatccgtttatttgagggttaattagactctgtattttcttcagtggttggactctgtttgcagaaaggtaccctcacagaaacaacacatggtataattccaattccaaagtataaccaatgaaaaaaaatgctaataaaatggaatatgccatactgtgaattgagtccagttaaccacacatgtatgtgacacaaattcttatagggcgacctttcaagatcactgcattacttttcaagctcaggacttttagctgataatagtggtgactaagggctacgagcctatgatcaagtgtatggtacatgttctaaatgtcatggagatgccaagaactgatggttgcaatgcttgaaacgattttaaaaaaaaaggaattgatgttgttgccgccatgttgggaggcaaaggggagaatcctaatgacaaactactgaagggtgaaaatctacacggatgctcgtccatcgtttacttttcagcttataagtcgctggaaaaaaataaatattaaaaacttatttttagagttggttttgggaattttcatcatagtttatttttcaacttccgcttttatatcgctaagaacatttataaaagttttacctctaaattattctttgatcacttataaaccgttacgggcttataatcagctataggcgaaacgttgaaacacaaatgtgtatcatgatttttcgacgatataaataaaccttctaaaaatctatga

SEQ ID NO: 47777 - DNA, 1410 bp, Oryza sativa
acatcgttaacttgttcatctaaaatagagcaaaacttggtttcgtttttttaaaaaaggagggaaaacaaaaccctaaaaatagggtctaaaaacaagggccaaataagtattgtacatcaaataaatgaatacgaaatttccaccattgaattaatacttccaccaaattcattgaacattgactatggaagcttttgataaaaaaaaaacgtgacctaatatcaaacaattaaaattaaaatggatgaagcttttaatcaagatcgtttacatgcatatcttgatatttgaatgcatatgttacatttgaaaaaataatttgtgtgcatttcttttctgctgtttattactggaaagaatcagtgccataaaatgctctatctgaaaaagaaacgcaggtagtatcattacctttatcatcacttaggccttgtttagttgggaaaaatttttaggtttggttgtcatatcacatatacggacacacatttgaagtattgacaaaacaaattacagattccgccaggaaactgcgagacgaatttattaagcctaattaagccgacattagcaaatatttactgtagcaccacattgtcaaatcatggcgcaattaggcttaaaatattcgtctcgtaatttgcacacaaactgtgtaattagtttttcttttccacatttaatactccatacacatgtccaaacatttgatgtggtgggtgaaaagtttttgttttgggaagtaaacagccccctatattattgagaacccggggaaaacatgcattagggcattcccaacccaatgactaggatggtgtccatagcattaaataagttgtcacctaggaaaaaaaatgatgtggcaagtgaataaatgaggaaagagaaggaaaccatgtcttacacgagacatggtttctacacaacatctaagacatcatgtgagataaagtagcattaaattgaagtatggaatagtggtgtttgcattggaagagtagtgtctagtactagtttctatggaaaccatatccagtgttatgggttgggactgcccttataaaaaaagcaattaaggcgaaacattgttgatctgttcgtcacggatgagcaaaacgatgagctcggcaagctggaaggcatcgtcgttctccgcggagagcggcgacgtcacattgctcttgccgaacccgtcctggcattccttcaccgcgctcgccgatttctccagcgatgagatcgcctcctggaacatgcctgccttcaccgtcgcgccgacggcgggctgagattacagtatgccgccgtacaccgactggcatgactagaggcaccgcgtcgcagcggcgtcgccgctgccgttccggagcttgccgtctatctcagacttggtgctcgtcgcgt

SEQ ID NO: 47778 - DNA, 1439 bp, Oryza sativa
cgagctcggtaccctgatactctctccatcccaaaaaaaaaacttaacttctagagtttaaattttatcccacaaaaaaccaacttctaccatcctacctatcttcaacacataaaacgagaagttttatctcttaaataatctttacctacctatcaccagtactaccttttctattgatgagggtcattttagtcattttacttctcactaaatttgccttgggatgctaggaatcctctttttatgggatggagggagtatatcgtagtttcctttctgctgggattattatgtgtcaatctgttgggttctttctttttaagataatggaagctttattgatctcactcaaaagtttttgctgggattagtatgtgtcagtctgttgggttctttctttttaagataatggaagctttattgatttcactcaaaagttttgataacactcccagcctctgcactacgatagtgcacacagccaacacactcaaaagaagagaaaaaaacagcttgcaagatcaagaccctacaaggctacaacccaaataataggtcgtcacctatataccgaggtataaaactcattgacacttgctttaaatatagacaagtcgaagtgacaaaaccctacaaattgggcttctcgagaataacccatgatcagagccaatgtagagccaatgtgtaattaagaaaataacctgcaaaggagaagaaacagttttcctataaaaaccacatcatttcttgagagccaaattacctagcaagttgttaccgtccctattaggtctaaactctttcttttgtggggttagaggtctggtcgttttggtgtggactgcgccgcatgggaagcaacaacatattagcgctgtagcgtgtccgttaccggagatgaatgctcttggttagtttatgagctttgtataacaccctgtttattcctgtttggctttctcccgagagctgggtaatggaagttacattttatcaaaaaaaaaaagagtaaatttcactttgggcctgattttttggccaaagttttaccatgaaccaagtctaactctactttttcagttagcaccaggtatgattaccttcttatatagtttggaccgggtaccaatacttttgggccagcacgttggcttgagctggtgaactcagttcagggcagagagttatcgagggagactagcgcacgggaaaggaggaagatagtgtcgtggaggtggacttgctcaatgcctcgatctccaccctcgcaaccggtggctcacggccgtgtctccggagcggcatggcgcggcggcggcgtgctcttttctggctccgaattggcatggcggcgcgctcttcagctcaagtgtagtgctggcggaatgaatcaatgtttgtttctgaatgagtgtgcaagtaagatggagctg

SEQ ID NO: 47779 - DNA, 1020 bp, Oryza sativa
ggttcccgtggactcgatagggttcggaaactaattctccaaccccgcgtaacattcgtgacgcctccgacccctctttcctccgcatcgttgcacattctcgatccaacggctcgatcgtgtgaacccaacttggggagggggttcggagaattattcttcaacctggtgtgacctcccgctaagccgtcgcagcgcctgccgtgcctcggataccccattctaccggccgaacgcctccggcaagccattgtgttgcgctcgggcagcaaacaccacgagacttatggcgctcactatgtatctcgagataaaattcgatacctctagatactaagtatctcgagatacatctagatatcagtgtaaaattttctagttaaaatctaattcctatgtatactaagtatctcgagataagaaaaaggtgtaaaatttaggtgctaagatatcttctcaaggatcgtaaaatttcacttgttttagagatgtcggtacatgatgattacaagcatgcatgatgcatatcatattttactataaagttaatgctcaataactgctaaatcatttttttttgaaaaccgaagccagcttaagctggagttatattaaggaggagagaaagtatttacaatatcaccaagaaggtgaaagaaattagagggggcgaggaaaaaaacctaaatagagctacacattgaacaaaaacctaagtgaatattctcgcgatgtcttttgctccacacatgctccatagcttgatttcgtcttgtattttggcaagtagctgcagcattgtttttttttgacttcgaaacaccctcctgttatgttcacaccatatttcccatgccaccaacaagtggattgacttgagtgctttagccttgctttttccaacttgagatgttcttttaatccaccattccaaccgagcttcattttcatcatgtgggtggtctatgtcgtggcagtataggctacttagaaccctctcccagatctgacgcacgaaag

SEQ ID NO: 47780 - DNA, 676 bp, Oryza sativa
aattaatgtttatgtggtcacgtacttgcatctttttcttcccctcttgtcctttgcagcgttcaataatttcattgccacccaaattcatccatgtaaaaaattttattcacataactaggcacaattaataattcaagctagaaagagacgaacttggtccgatttgtgctagtacaaatacgaaaatacggtcgtattttctcgatcccggtcatgtctagcccgggaagcaacaaccgagcggttgcccgttccgcctttccaccgctcgatcgaagatgacaagatccgtcaggaattcaggctacagatgtcacgttgtgatgtagcttgccggcaagcccatacttgtcttgttcatacttcatagcatcgcaggcctatttaaggatgcaagcagcatcacagctaaattccctcctgagctccgctaacactatcgaagcttcacaaattctgttcacgcacttgtagctgttgcctctcgtctccaagtgttggaggcaaaggcgtacttcgatccgcaggtcgaaaagttctttctctagcccccctaatcatgttcctgttgtcgtgcagtttacatgtttgatgaaatgcctgagagaaggccactactttgcttaccttctgttcttgattcattgcatgggtaccgagctcgaattcgccc

SEQ ID NO: 47781 - DNA, 657 bp, Oryza sativa
cagtggggccacaacattttttagtgtgaattacttatgggtcccacaaattttttttttacattctcatgtcacgtaagcgccacgtgggacgaaaattaggtcaacatccccatgtcagcgccacatcagcaaaaccaccctccaaaactgctgagagagtcaaattgcactggtttcaatagtttggggagttgtcttatccggctatgcggttgagggttacggattagacttggatcacttttaagaaagtcaaagtggacttattccagtaaaaaaccggcacacgtggaccggctggattttggcccatataaacccattttactccccccacacacttcttttctgctcattttatactgtgaattattgaaaacggttcactctactttctaacaatatttatgttttctattatttatattagttatattttacactttaattttggtatgatgatatatgtgatacgactttacataccaatatattttttgattttttttaatcacacctcgcatggttggaaaatatcgaggattgaaagttcaagcaaactttcatgaaatttttttgaaaatatttgtcaactctaataatggtgtcatttatggttccaaaatgtcttagcttagaatacaacttatataa

SEQ ID NO: 47782 - DNA, 711 bp, Oryza sativa
ccattttttttttggttagaactactcaactctctttattattcatgtacttcaatttcgggaaaatctgtcctgcatatagatggaaaagttcacatgcgtaccaaaaccgatttgattgagattattaatgagtgctgaagaagttgattgggtggtccaagccaaaaaaaaatttataaagttacctgatccaaaataaaaagattattttaaaggagatccaaagtgaaacttggataataaaatatgacctaaaatgaaattcatacacacactacactgccttgaaatcgtttcagagtttcaggattttcatggtcaggtcttctccagcgtcgtcacggcgtggctgccgaagcccagggcatacgacggcaatagtgtggagattatggataccccatatctacatgacagttataatttagtcagatatacggtaccaaatataaatagaatatctttatgaggactcgggttagttttgaacttgtatgtcaaggaaatacccgagatcttagtcggttacgattgtattttatctgtaattacatattccgttagggatatggactgtactttgtaaagcggaccctttcccctatataaggagggtccgtgtgcctctcggggcacgattcttttttccagtttatacgatcaataacacactcggcggaataatccccggacaggagtagggtatta

SEQ ID NO: 47783 - DNA, 504 bp, Oryza sativa
catcttgtgaagaatggagaatagaattcatgcactgaccccaaagattttagccactacaccatgccaggttcaatggacaccctgttcaaatcatgtctgctatttgatattattcaaacttatttaaaaaggtcatcataaaaattatcaatttattcacattgctatctgacaagaaaaaaaagtaaattaacttatctgtaatcagtaatcccgtagagatggcagatcgagttattgttccttaatctacatttgcttactatgagtccataggagttgttgatcgacatttttcttctacatatgcagggccatggttttcgcaaggaactcatgtacatgcttttggacttaaaaccacggtttctacggtttcctggtatttcgaatgttttccaactggcaatcaatttcggttgccctgtaatttaatcgctcgcattacatttggcagggggttgctttgtcgaaggcaattggttaaaaaatgcattcagg

SEQ ID NO: 47784 - DNA, 544 bp, Oryza sativa
aaaacacacgctgagccccctacctggcgcgccagatgacggagctcgtggctcttcaccgggagaccgcgcaggcccccctttgccggttcggccgggggcttagggtgaaatctcaagctctcgctctccctctgtatctggaaagatcgtctgcccgcaaaacacacgagacacggcgatgtatacaggttcgggccgctgccaagcgtaataccctactcctgtgtttttgtggatttgtgtatgagtgagctaccaagtgtcagccaacttctcccccgttctcagctctaaatctggaaaagaatccaaaagaaaaaagaagaaccccctctctatgggcaaggtcctccttttatacttcaaggggataccacatgcaccctcccctttccaaactggacttttcttctctttatggacggagattggtatggttgctgtccgaatgacactccgatgggacagcccacacctacctccactcccggcggagacaggcgcaacgtgggatcggggctgcccgttgctgacgcgacca

SEQ ID NO: 47785 - DNA, 562 bp, Oryza sativa
cggtagtagtagataaaaagtttatctcttcggatccgcttggtaccaaattgtagttttctgtacttgggaaatgaggaatggagttaaatggactgtagtaccattggtttcccttttctttccctttaattttttatgtacatcctcttaatatacgatgatattacacttagcataacggttgaccatccatcttaaaaacatagtagaaatatgttatatttaaagtacctcaaattataaaatgagtaaatttcataaaacgtgaggtcttgagccatctgtaacacaaaatcctaaattttacaatttattttcatgccctccatgtttcggggtaaaatgtttcatactattctagctacgagtatatcgtccattttactaatacatttgattataatatttgtaaaaagtgtaaagatattttttaatgcacatgttatgtgatcatggttttattgagtgaatttcactttagtcccctatgttatcgaagtttcactttggagcacttttatctgatttttttttcactttggatcatctattttttttg

SEQ ID NO: 47786 - DNA, 612 bp, Oryza sativa
ctatcagagaagcacggacatctagcgatgagtgggcttgccaaaaggtggtggggtaaagaagatcgagtggtgaatggcatcggtggggaaaaagagaaaggtgctggagcaaaaggtagagacgttgttggacctagggggagggggtagccggggcgccaaaggcatggagcaggttaacctcttgattgtttgaaatgttcttcatcctcgtcatgttcttcgatccaccggtccaagggacggtcatgacgtgtggcgcaaatcatggtagcaggtgaggcgtgcggcaatacgtagatgacaacgagcatgaccttggcgtcattgatcctggtgaggaatgtggcctcactacctcaatgccggaacgccgccgccgctgccttccgatctcctgcttcctcccacgccactatagcctccccgagcttctgctctaaccgtgactctgaggacatggatggagcctcgtctctaaggccgttcccagtgcatcacacaaatttgaggaacctcgaggtgccatgtaggctagagctacaggtccaacctttgggttcttcacagtgcaagtggctctaggagtagctttaattttgtatttta

SEQ ID NO: 47787 - DNA, 1281 bp, Oryza sativa
tgtaaattttaatcataattatttgggacatctgtagaagcttttgctatatcgatatcactgtttaccctgatcatcacatcaccatatttatgcactgtacaagataccaaatagtatgaatcaaggtgataatatgtttggaaaccgattagccatgtgtttccttgattgaatatattcgtatccaaccagagcaaaagcttcttttttctaacaaaatctcagaattccatcccccgcatttgttttgacaagatatacaggctatccttctccttctcttcctcgatcatgaatctttgatcttcttttccctaattattacgtgttagctttgctccttgttaatgatgacataaatttcttgcagatgtattgtagcttgaacaggtgccctttggatttggatgacatcgtggatcagcctcactatcatctcaagatggtgtgcatatttggattttgtggcaacacaggccaggtggagctagcaaaatacattctcagaaatgcgttaatattggagcaaatgatcatcgaccgaaaagggagatatcggttggatggatgttttgggcgcgaggaggcagatgagaagcttgttccagaagatatggatggtgtactcacaattctgtaacttatactccgtacagtagcaaacaacagtcacaagttaaagtgttgttccttcaaggcactagtaactaggattaagtttttttttaacagagtttacagagattattcggtactgcaagagttgtggttcactgttcaatacgattatattagtatgtatcccttccgattaaaaatgtttgacatttaggaccatatttagttgcatttttaaaaatctagacatcaataatttgtcaaatgcttagttttcaaaatgatatacgtagatttgtctcataatattataaacttattggattatataaacttattctggtgtaaaatagattgccaaaatttttaaagtgtggctgaagtttgtgctaaacattaaactacttgagaaagtatgcactattcatatgttacaatgagttttaatctccaacccatggaccattttttttaagcttcaattcaaaggatgccaaggggttgggagttttaatctccgtcccccaagggactattttttctttccccaagatcgagttttttttaatgtagttttgtgcaaacacatgtggatagttttgaactactagtatattacatagtaggaaataattgattactatggaagtattcttcaca

SEQ ID NO: 47788 - DNA, 647 bp, Oryza sativa
gctcttaacacacggattgagaaccaggtatctcgtactagtaatacccagtcactatgagagcttttgtttctgtttaagcaaatgttttatatttgtattgttgcaaacttttatggtagtgtgacgaattatttggtgttctgctcccaggttgtaattgcagacgcttcacagggcagtcaatcccgtctgcctacttccattaccaacttctcattgtcccaaaaggagaaaactcttaatgaactcatacaggatcgttggctgtcatacactcccacaggaaagattggtcttggcatacgatcatttcttgatctccgaagttggttacgtagtaatgatatcccatcatgtgaggtctgcaatgaagcttgcataaaggtgcagatatgtgattacgaattacgattctacatttgcatttatcttgttacccatggtcatatactccactaatgtcattccctgtatttctattacttatttaaaacaggcatcatcttgtcctaatgagggatgcaatgtaaggattcacgtgtactgtttgaagaagaaattttctcagagaaaggtagttacctatttttaattccactttacacatatgaacaggagtggctttctaaattgtttgtgtatgt

SEQ ID NO: 47789 - DNA, 1382 bp, Oryza sativa
ttgatttgattgatggccccagatgagctgagccttaagaactaagatacatactttgctaaactagtatatactccgttttaaattatttatgattctagcttttatcgtaagttaaatatttgtattttttgactattaattcttaaaacttcatgtggtttagcattttagaatcaacataagaaacactttcataatatagcatccgcatgttgttaaactatccgaattttaaaaaattgatggtcaaagatacaaatgtataatttaggataaaactaaaactacatgtaatttgaatcggatggagtatatttcttgcggtttgagtaagatcataccgtttaattagatagaagagaaaaggaagaaacacccaagagcctagtatatcctaaggcacaaagctacagctataaattactcgtcatgcagacctacatttccctaagtttcattctttcccgcttacccagcacacgttcatggacagccgctccgccactagcccactatactttgcatcctaattaatcctcttgtcataattaactaaaccaggtcacgacagctcaatatcataatcattatgctactgcctacttatacatgaccagggatcttcagaaagcgttcaaggatacgatttatttcctttgaaataatgtataccccttaaaaaaattttgaaaagagatgaatgacaacagctagaacataaccttggagtaggacaatcaaacaaagtttcagactgcttgctaacgtttggtgaataaaattataaaagagacgggggcagaaaactctcagcaacctcgttggacgatttcgtttttgtcgtcagcacaattgcactgcgtcaattaatggacaaatgaagaaagcgaaggtacacggacgactaggcaagttgatagcacaccagttaaaacgaaagctaacagcacaagcacacgacttgactgacttactattaactacaggcaaggtcaccgaccaacggcaactgaaacttacttacattgttcttttctgattaactacactggccatgttcgaatcaaattttatctcggttttcattagcatatttttcaaactattgagcggtacgtttcgtgcgaaaattttctatatagaaattactttagaatatcaaatacacctatttatcaagtttataataattaaaatttaattaatcatgtgctaatggctttctcgttttacccaacttcatcttcatcactgatgcaggggaggtgccattttggtagagcaagatcaaagatatgatcaaatttacgcttattttgtacaataataacagacacttatctgtaaccacaacttcatcagttacatctgaaactgag

SEQ ID NO: 47790 - DNA, 788 bp, Oryza sativa
agtgggagtggtcgcttgcttgccggatatatatgctgcccgcgtagcgtagaacgcgtgaaaagagaacaaacagccaaacacgcgggaaacggtcatctgacggtattctttttattttttttcttttataaagataaatctcacgatatcctgttcatactctggtactattaaataatttcactatctttttttctattgatagttagtactctttttttatgtatgccaccgttgctttttcgtataacgtttgactatattaaaagttttagtgtaaatatgtaaaattagaagttaagatttctttggtgacaaaacaaatcataacaaatatttacataatttttttaataataagaatggtcaaacgtcatgtcaaaaatcaacgacatcagacattaaaaaaagagagagaatagtactccctacgtcctaaaatatgagtatttttaggttgtttagaaaatcttataaaggttaagtaaaaagatttcctttccattaaagtagtggtaaaatattaaattatttagattctcctcccaagcatttgattggttgaaaatgcatgaatttttatgcattggtacatagtgacgtaagcgggatgtaaaagttgccacatcagatttgtacttacgtgaagaagggaggacagaagaaaaaagaaaagcggactagatttgtagccaactacacgactggcttcaataaactatgtgacggagatggatggattatgtattattgatgtaatatatattacaattatgtagtatatg

SEQ ID NO: 47791 - DNA, 620 bp, Oryza sativa
tgactgtgaaccaaactaatttggatagagtctagttttaggcaccatcagaatggtcctggtggttcatgaagtctttcctaaaaaatagccatagcttgaaaagtttctaacgcttcaactgaggtgatattctgtcattcccaattgcttttgtggtgctctgtatttaaggattatggctgttcactcattactaatagaagttacaattctctctcatgatatccaacaaattatttattttcatgcagtagtttcttaaattgcagtagtcccaaatcccaagtgtgctagccgctaatgcatatagcgcagtgaggtgttttattaaatttgatttgctaccagctttgttatgttagaaaatgatagtgctgggtattctgacacgttgcaaggaaccaaagatgttttcccggtgacataccgatatactcttatgtgaaaggaaatactaacatagaaaggtcatcagtctgcaaattaaacgacttaaggaaaaaagggaattgcctttttacatctagtatgctgctaggacctttttgtcctgggtttctgatatgtaatgagaatggcagaagttgcttgcttccctttatgcacaagaaattatt

SEQ ID NO: 47792 - DNA, 795 bp, Oryza sativa
tgatcttgattgattatgtgcatatgcattccttcatatccatatgtatgcacatcttgagggggagcttattctatattttgttcattataagatctctaccttgatttgaaattatctttcatctcatctctttgtattgtttatatcggattattatctatcacagaagagagaaaagattgaaagatcttggattaaacaatttgtgtaattgttactttggtgatagatgataaaccgatgtttatgggattaacctctcttttacataagttttcaacaaggttatttcccgataatgagatgtggtagatatgcattctttggtgatggaccttaatcatgacaagaatgaaattcatggagataaagcgatatgtatcacttcttatctcctactttttgataggttcatatatatgatttccatgttattgttatataagtgtgagactaatgtttacttgagtcttatcttatttagtctcctttacattgagaacatggagatcatgaagatatgtgtttttttgtttatcttcatcattactacatatgccttctctatgtgtataggataaacccccattggttcttctttacttatgcatacacttgtctctcttgtatatttctttgtatgcatatacttagggggagcaaatcctatacatttattgtgcatgttttagatccatgttgttcacctattatttatatcggatctttgcacttgagcttgcatacgagtatatgacacttgtgatgttaatgaatactcaacaaacatat

SEQ ID NO: 47793 - DNA, 641 bp, Oryza sativa
cgccgattcttcctcgacgccgtcgccgtcgttgatcttccgccgccgttttggtcaccggagagttcgccgcgtcattctctacgtgctggtgccctccgttcgcgtcgtcgcgccgtcgttcgccggcgagcttgtgcgcccgagccgctgccggtggtgacgtcaccgctgacgtcatcgttgccgtccgtcgtggtccggccgtggaccggttgatctcggccgttcgttttggttaggatcgatctcggccgttcgtttccgtgagccgtcgccgtgcacccggtccaccgcaaaccctagccgctgacgcaataaacccctttttccttttcaaaaataattcattattgcgtcataattcaattaaaacccatataagtgttttaatccgatttaatctctaaaaattcataactaattcatcttagctcggatttagttggttcaagtctctaaatttttttaaaattgagatctacatgttaaaaatatccacatgtactgttcatgcttgtttatgtgctgttttggtgtttttgctcttttctgtttagattctgacgtttccggagagttcgttttcgctggagaagaatttgaagagttccaagggcagcaaggcaagtcacacagat

SEQ ID NO: 47794 - DNA, 1134 bp, Oryza sativa
atcttgcccacgccgttgacaccctacggccagccggcgaggcggacggcggcgcgttggggcagtggcggcggaatgtgcgatgggagggcaacggaaggaggggagttagggttaatgcctctgcacgaatattaaagcatatccgatggtccaaaatttaaaagatggaaggtgggactttctgtcaacagatatatatacagtgccatattttaatttcaattttagctctaccaaatttcaattttagcgtataaaaaaccttttgaggggttaaaaaagggttaattagatacatgctattataaattctgtggtttagaaaaataacattactattcaataaatcgtaaagatgccactggtactttggtgaaactctctcatcgccactctgtacgcacgaatcggcgttggcgccgtttgtagtgtacggtatttacgtatggactgaaatgccccaggttggaccaggccgactccaggcccggccctgggggggggggggtcgagctgtgcagtggcatagggcccacgaagtgaagggacccaaccccatcagttttgctatatatttgtcgacaaattttctcctaaaaatttaacagatgtaattacagtacaattgtagtgtaattacactaacttgcatgtaattacactgtaactatagtataacttgtatgtaacttttaaaaatctctccgtaatatgttatttcggtaaaatagaggtcgtgggaacaaatccttacacatatgtgtatgctgtgttttttttcttcctcaccaaaataaatcttgtaatagatctaacgattcaaaattacatgaaacttacatacaagttacactgtagttacatacaaattacagtgtaattacatacaaattacagtgtaattacattacgattgtactataattacatatatcaaatttttagaagaaaatttgtcgacaaatatataggtggtcccaaccccatatatgctgtacataatagcctatagaggaattagaaagcccacccgcccaagagaggaagagacacatccgtcgtccgtcgatttggcttccttccgcgatcgcttgttctgttcgcctcatcacctcgcctgttcgctgttct

SEQ ID NO: 47795 - DNA, 625 bp, Oryza sativa
tagggcgaattcgagctcggtacccgcaagcacagcactgcagcttcctatctcctttatttggtcttccattgcttcttgttgctgaggttgccttcctattgcccccttcccttttccactcttctaccaacacttgcttcaggctactgagggctttggcttctcggtgttgtcgctacaggtgagcttggcattctgtgcatttttgcgttctactgctaatctggtcttgtgctaagctccactattagcctcttgtgtggtcataggtggctcctaatttagcttcttgtgtgaatctgatcgtccaatctttttctaaatgatctgtaaattcgctttgattttggtctgattagattattttgtttatttctttgttactttcctctcttttatgggttgatagtatacaattatagcccaaaaatactgttgaattcagagatcttcattgtgataactgactgaacatttaaagagatggtgcttttccacctacctgttgaatgttaaaccattgcagatgatttttttttttgaacatgcaatttctatagatctctaactaaggaagctggaatgtcaccttatttgagcagtttgattgtattgcacatta

SEQ ID NO: 47796 - DNA, 673 bp, Oryza sativa
attgcttgcattcatgattttactgcttttctgtcatatattgccccattctcgttgttcacccaaaatctacacacaagcttatttttgtgtgcaaagtgctcaggatagattttttttaacaactgtactttagtacttacgacaaatcttttgttttcgcagccaaatctgctacaagaaattgatacccagaaagtaagttggaatcctcacaagcattgcttggcatttgtatctgggaagaaccaagttacagttcatgactttgaggagccaggtgagatctgctgaactttcttatgttgtattaataagatagatatgatgaactgaagcatgatggctatatgaacatttattcttgtatttaatgaactgaagtatgtttctcaactcagctgaagccaacaactaatcatttgtattctctgaacagataataaagaatcctacattctaacaagtgaccatcaaaaggatgttaaagctgttgaatggaggccaaatagtggaaaggtgattgcagttgggtgcaagtatgtcctactgccgccatatactagagcactattaaagatttgttttgatattcttttcatgtcataatacctagtggcacaatctactattagattaacttttattattattattttcaggggagggatat

SEQ ID NO: 47797 - DNA, 680 bp, Oryza sativa
  unsure (1)..(680): unsure at all n locations
tataggcgaattcgagctcggtacccacacgtatgtatatgagcgtctgcacgtataccgaaatctgcaaaaataaagaaagagaaagaaatctgaatacgaccactacttgtgcacaaacggaatgcgcacttacatcaataataatgtataaaaacagaggaaatatctgaaatgaaaaaaaataatgaataagtgtatcaaaattgactcgtatggtggccagcttgaggccctgacgcacaaaaatacaaaaaaaacagaggtgtcatcttcagttaatgctgatgatggtgattagcaacccaaaaaacccatctctgcgctgcacttcctttcgttccccccctccgctataaattacaaaacttcaggggctccacttcgctgcctctccttctcctcctcacctgcacctgcaccaacgcgagagatcatggcgaagagatcgtctcctgatcctgcatcatcttctccatctgcatcatcctcggcgtcgtcttcttcctcctcttcctccgaggattcctcttcggccatgtcgatgccctgcaagaggagggcgaggccgangaccgagaaaagcaccggcaaggccaagaggcccaagaaggagagcaagggaggtggctgatccttctttcaatggcggcggcggcggcaagaggagtctatctaca

SEQ ID NO: 47798 - DNA, 653 bp, Oryza sativa
ataactacttgtctcgtgggcaaacagaaggttttcatgacaaacctacaaagaggtgtcgcactctcacagcggcggcggatgatttacggcgtacatcgacaaagatagactgaaactagggtaaagtaaaaaacatggctaaaagtaaagataaaagaaaaagcgattcaagtatattatgtgttcgggggttacaattgaaccggccttgtctcttaaataggggttgatcttgccctctacaggccctcctccacgtccaactcgagctagaaaccaatggaatcctgaaacatgccttcccgagcaaggaaacccgagacccgacaaaaacggcgtctgactcgaactcccgccggtctgaccggccctctggtgtcggtctgaccggcccacatatagcggtcagaccggccctctctggaggaaatcggcagagccccaaactttggcaatttttcctatttcgatcctaggtactaaatttgggtgtaagcaattattttaagtaaatatgggtgtgtttagttggtggaaaagtttggaagtttagggaaagttgaaagtttatgtgtgtagaaaagtttttggatgtgatgtgatgtgatggaaagttggaaggttggataaaaagtttggaactaaacaag

SEQ ID NO: 47799 - DNA, 660 bp, Oryza sativa
tctctcctctctctctctcactgctgctctatcttctcctctctttgtgtgaggctggggccgaatgaggtggtcaatttcgttttgggctaaaatttcagaaattttggtgcaccgaattttttgaaaattttcattctgttatccgaaattatttgaaaatttaataaaatttgattgaattttaataaactttgaccaaattaaaaaaaaccaaaaatttcgacggatattatttgaatgccggtagggtgcgaaattacgcaaattgacaaccctgaccagcctaaactgctgtcgcctccccctgcttctcgtctgactcgtcgctggccggcatcaggccatcccctcctggtgctgctgtaaacggcatcatacttgattgagtcaatggggctgattcttaacaaataccgatcgagtagccaatcttgatgctatcgatttgtatatgactcaatcagtgacatgacgacaggctaattaatttgatgtaaattcaattacatttaacagtgtgttgtaaaaatgagattattatatatacatataaattggtttatggaactttgcctgcatagatatacttgtactgatttcaggcgatcgtacgtgcgacaattgcgccggctgcgtgtgtgcttctcgccgcgactc

SEQ ID NO: 47800 - DNA, 612 bp, Oryza sativa
tcccacctatgactggcgtggcttggtgccacgtggcctggttcagaaacccccggtgtccctaatagttggtggtgggaacccatgtccccacttctctgacactattcgtttggtctctccctcgtttagggtgtgtttagttctacgttaaaattgtaagtttgaagaaaaaagttgaaagtttatatgtgtaggaaagttttgacgtgataaaaaagttgaaagtttgaagaaaaagttgggaactaaacccggccttagtatgagcacgtttcccaaactgctaattaaatggtatgtttcgtgtaaaaattttctatataaaagttttttaaaaaaataaataaatctattttttaagtttgaaaaatactcaataatactaatgctatcttgtttactgtgctgtttaaaatccgagccaacaatctagttcgaactaagccttaataacgttgttagcataagtgacagttatgatgctaccatatctatttaaatatggaacaattaatggcaggacatcatgatgaagcctaagcagcaaaattggtggcaaattaagtgcgaatccacacatgactttcattagtctcaagtacacaaata

SEQ ID NO: 47801 - DNA, 596 bp, Oryza sativa
taattttcattaccacatatatgtttctctttaacaggatatggcctttgctgaatcaatatggacctttatgccaggaaagaagggatcagttgttcaggggccaaacactagaactctaacaaatgctcatgatggtatcttggatgatattaattgtgctcagattgctgggaagcatgtgggagatcattccaattgtgctaatgtcatcaaggtagatatatgctataactttctattaattctttgtatcttttcaattttgatacatgttaactagtgccttttccataatgtctgttccacatgtattttcacgctttgatatgaatatttgagtacatagatttgaattatattataccatcttttcctccttagaaaacatagcatgttatggttaaaagtattgatgaaacttcctagctttccatttgaaccatgacaaactccccattccagagatgcgctttcaatgatttcagatggtcatgtatgttgttggattgcagtttattctttgtattgcagcatttcaaaaccgaattacatctgtgttcgctgcacgcagttgggacctatctcagcgcacg

SEQ ID NO: 47802 - DNA, 2202 bp, Oryza sativa
atagaagcccttctctaaaaaaaatttagaagccggctaagtttctaaaaaaggcggcatatatccgttaaaaaggcatttaaatccagttggatgtagttccctgtttctgtttgatatgctaagttcctaattttaaaaaggcattcaagttcctaaaaaaggctgcatatatccatttaaaaggtattcaaatccaattctgtttgatatgctaagttcctaattttaaaaaggcatctagaagctgggtaaaaaatacccttctctagaaaaaatggttcttcttactgacaggttagaaaatacacttctctaaaaaaaattggttattctactgaccgaaaatacccttctcagaaaaaaaaaggtttttcttactgagcgtgcaaaatccgattatagctgatattatgatgactcatgtgttataccttatgcagcagacaacaattttggaaaatcaatttgggttaccttcacttgttgataaagccacagctaacacaacaaaatcttgtggcatgtgcgtcatcttccatgacacccgatgaaataggagaggggaaaaacaatccagatgaggtaatgccattggcatccatcgcttgtttattttagaaatctatgtaatgtgagtgctttgtgttatctgctgcttgcatagcttgattgtagttttgtgaatttcacaggtgtttgtatgtatatgtggagagaagcttttattccatacaaacttcaatacaacggcagtaaaagaacttgtcgtatttgctctccagaggaggaacatcaagtattgtgatatttatgtaacatggtgcggaaaagttctgaaaggagatgagatcttgagctccatacctatccacacgaatacgcatattcatgtgacacccagactgaggggtggagagtacgtaccgcgtaacttatctatgtatatgtattttatcacttcctactttagaggtgtaacaagtgttcatttgcaggttaattccaatggaatatgagcgtatggatgaacttattgaccgtgcggtccgtgacaataataatgaccttttctattatgtgaaccttcccccagaattgataaacccttataaggatacatgggtaacttttctaagtgatttctcgagatatatcatacaccaactattggtatgtgtttcccgtgatggtcaccagcggaacattacttggtatggtacttttgatctcggggacatactgattcaagcgggcatgttaggatcagcccccatatcgtcgaaaatacatacacccctattggtggtagacttgattatcttaagctagtttcaattctaaaggataaattcgtcgataatttacaaggttcttcctccccttgccatctgaacaattaactttctgtattgtgcactacttcccatgaaacttatggaagatccgatctattcattacattttttataaaccatccgtgcttgttatcatgtgaagaaagagttgcacgataccttcaatatgatcatatgattacaaatcttgtgcaacgcgatcttcgcaaatttaagcaatatttgaatgatacttttggagatcctccttcttggatcgctgatatcagctgggttcctgacatgtggaagacatacaattatagtcctaataacaactcaacgttatggaccccacgatatactttggatctaaacagttgctcacattttgccaggaatttcttgaaccatttcggtcgtgaggttagtctttttttaattattattttaacttttctatatgaaccggtttaggcttttgtttgagcttagacttttaagcaactttttggctcatgtgatttatacaccaatattataggctcttatatctgccagttgtaaaaccaacactgatgaccatcattaattggtgctgctttgtaggtgacggctgccaatctagcacttatgctaggttagcagccaacacttagggtttatttactagtgcttttaagggtcctatcttcacttcacataaactaaaaattactataacttagcttttagcttaacaatataagagtagcttatggtttattggttttaaaaaagccaaatgaaaaaaaaaactaaaaaactgttgtttgccttagattttttagattataagcaggcgtaagcctataaataaaaaaaa

SEQ ID NO: 47803 - DNA, 553 bp, Oryza sativa
ctcagaaagcaagatagcagcaaaatggtacgtgctgttaacaccacaagtatcaaagcgtaataaatttggtaatatgggcactatgcattatcaatacagaaaaaaaatgcccaatgaacccatattgatgctgactgcatccctgcttaactcacatcactgtacttgcaattaaacgattaattactaaagcatgtgtctcgttgcacctgagagcaagtttaatagtatggccaactattacccaaatcatatatagcccatttaataactcatctaaacaatagttatatataaatatatactacacaattaaaatatggtcccacctctcatacacacataacgctttggagtctatgttacagttggctccaaatctatagaccgcttttattctctctcttatcttatcttctccacatgtgcatatagctaatttgtagcctgttattgtactcgctctgataaacaatttgtcgtggcctcttatcccttgatattaggagatttgcccgttacttctgtcggagtttgtgtttaacaatct

SEQ ID NO: 47804 - DNA, 563 bp, Oryza sativa
gcagtggcggtggcaactccacacatggtgataagcagtcgtgcggaaggcactccccaaaaacctgatcacccgcctacccggtgcagatctcaggcaaaggtgtggtttcggaggcactgctccttccaatctctcgtgcgcgtaagagatcagaagcgaggaagcgagagcaactcaggcgcggagaaggagaaactaactccgggaaagaagcgatgatatcggatcggactcgcggcctccttatctatcaggagaaagaacgtgaaagcgctgttgcggagggaatcgtgggaacgtgggttagtggctgcaaaagccagccacgccctcgccctcgcccacggcccggcccggcgcgcgcgcgtgcgcgcgtgtggcattccgacccccacctcaactggtcaacagggagcctccaataactccctatttaggttgagatatttctcgcttaaatcctgaggtggtattattatcctcaacacttattatgggcctttgagatttaatattataagttgggcctagcccaattattctagcaatccccgccaaat

SEQ ID NO: 47805 - DNA, 1574 bp, Oryza sativa
  unsure (1)..(1574): unsure at all n locations
acttgactgtgattgtagatggcaatatggaatcacatggataatgcatttcttcatattccaaaaaaacatcaatgcataccaaatacctgaatctgaagacagcttgagtacatgactattattattatgtcattgcagttttcatagtttcaaagtttcccacaggcaactgtaccacaaactttgacaatgaggtagcaactattgttaatgttttaaatatgttcaaatactatcttttttgttttttcgttttttgactagcaaagttcagccactaccaactgctctcttcaatccacgtaagtccacagatttgatcagccatttgtcaggtttaacttccaagttggttctagcccctgtcaatcattctaacattcttggacttncatagtagatggcatatggaacatgggacattagaagagtggacatcaacttgtctacatttctaattgtgtcacatgctcattgtatgactgcaaaagggccttctgaaatgaatagaaccatctgcggtctctgaacttaaaattggaatgttctaaaggtcagcaaggagctttatgattacctacacaatttgcaccatggatacacattttgtggcaagaatcgtttttgagacaagctgaagactgataagaacaatatatgtcatcagagtcttgacaagctagaagaaaaaacgctagacattcggcaggagacgtactgaatttatatgcagaaaagcaaccgacagtaagttcatacggtctcagtctcacagatcatgcgcatgtggttagaaataggccaatcttgtacaagtggaatactggaatatgatgaaacacctatcatttaggaaggttcagggaataaatatcaaacaaatatgtttcttttacatgattcctgtaactaatgcatacatggtgttttcgtgttcatgtctagaaacaaagatactttagtcttggaaaatatacaaattttgatgatattcagccagagataagctaatccgctgcgcctcaaaacacaaagggggttcggagttttagactccgagcccccttgggtctctgggctaccgtcggataaggcttgtgtggcccagattgagtggatccactccacagcgtgaggtgtcagcgacttgtttgggccgtcgtgttgcttgctggacctcaagcccagcacggacacatgtgtaggcccaacctcacacttcattgcgtttaggtgtgatcaagatttgacttcctgtgatggcatatgatctgtatactttccatttggtaataactattttttaataataattactccctccgtttcaggttataatacgttttgactttggtcaaagtcaaatttgaaataagtttgactaagtttatagacaaatatagtaatatttataatactaaacttgaatatattttcataataattttttcttggattgaaaatgtaactccctccgtttctaaatatttgacaccgtcaactttttggcacatgtttgaccattcgtttaattcaaaatttttgtgaaatatgtaaaactatatgcatac

SEQ ID NO: 47806 - DNA, 1113 bp, Oryza sativa
aacatttttgttgaatgttccctttattctgaacgagaacagccatttttgatgaatatgcgaatgctactaatcagtttgctgttgctcaagtaaacatctattcataatgattttcttagtttcatttcaaacatcaaaggggatgtagctcaaatggtagagcgctcgctttgcatgcagagaggcacggggttcgatcccccgcatctccactctaaatcgactattttagttctcttctccttttcttttgtctaattaaattttgtgctcttctaaattctagtctaattcagctatgtgttcctctaattttcttctaaattttcgtctattttatttctctttctttttattttgtctaattaaattgtgggctcttctaaattcttgtctaatttagctatgtgttcctcttattttcttctaagtttttgtctattttagttctcttctccttttcttttgtctaattaaatttgtgctcttctaaattcttttctaatttagctatgtgttcctctaattttcttctaaatttttgtctaatttagttctcttctctttttgtgtgccatatgttgccttttttggtctagttatttaattttctgctcaccaaaattttcagcgccttattttgtacgtgaatgtgacacgatgaattattttgacttttttttgtttaatttagttttttgagcttgtaaatttgtataacattttttatgggattctctttagtagtagtccctccgtcctaaaataagtggagttttacactgtttatgtctcacgtttgaccgttcgtcttatttgaattttttttatgattaacatttttattgttattagatgataaaacatgaataatactttatgtgtgactaacttattttaattttcttataaattttttaaataagacggatggtcaaacgttagacacggattttcacggctatacttattttagaacggaggtagaagcgtctttagtgacagtgactgacagcttggtcccatcccacatttcaacgacatcggctagagccatggctataggtaaacggggccatcgtttggccaaacggcatattggtaaacgga

SEQ ID NO: 47807 - DNA, 606 bp, Oryza sativa
ccctattttgaagtttaagtactaatttgaccttgttttttcaagtttgtttatttgaccccgtttttcaaaattgaagctaccgtttgaccctattttcaaacaccgttagggtttcatttagatcaaattaaaaaaaatgaatttacaagcctaaatgactaaaatgcctttattcactcattccttatcctctccatgctctctcaccacttccttcattagagcacaaatggctggagagacggcggctgcgttggctccacggcggcggcatgacgaggaggaccgccggcggcagcggcggctgcagaggggcgatgacggctggaggaccgtcggcggcggctgcgttggctcaagggcggggggcagctgggctcggcggcggcgccgcacggaggggacaagccggcgcggctgctcatggaaagaggtagcggcggtggcggagggatggcagctgcggggcgccgtggaaggagcggtggcgagcggcagtggaaggatggcgccccggtgctagtggcgcgcgcgcggagaaagcagcgccggtggcggatgcggggcgcaacaggagcggcggcgagcggaaggagcagcggc

SEQ ID NO: 47808 - DNA, 826 bp, Oryza sativa
tattaatttgattttatcacactgaacacatgataaagcacgaaaatttaataggttacatatgcatgcttataataactaacaatttgactaaaatgatttgctaattactattaaatggttatatattatgatgaataaaagttttatgattatatttataacgctacacacactcgatgatataacggagggagtatatttgaatacctataaattttcataaaaaaacaagtggtcaaaatttaaacttgaatagtgttattaccaattattcgaaaacggagtgactatatatcatatatatgtatggaaaacggctcaacaacatcctaagcatgaaagcatccaaattttgctcggttacacatcaagtgatattataacatgtcattaataaagggcattatgcaactaatatcattttcaagctgggatgaaacttggtgtgatgggtcacgacctccttgtgcatgttaattttgtctctatataatcgagcaaagattatcttttttgagctaagaaagttccatgtcttatcgtttgacgcacagcagataccaacaagagttggagctccaaaacgacggcatgcatgttctgaaaggccatactacttttgattttgtgaggattcatctcacatgcacgcactagtttaaaaaaaaaattgaaacgaacatgtgtatgtgaaacacatgggttaatatatttcatcaaccttgaattttgaagtagaagaaaatggagttagatgatgtcaaactgcatgtgatctgtgccctgctttgtctcgacagtcaacaccaggagctgagctgtg

SEQ ID NO: 47809 - DNA, 784 bp, Oryza sativa
acctctatatgcatgataataaaggtccaatcgggccaacagtatggctaccgaaggaaatcaggatcaagggagaggacacgtcactccagtctccagacgtgctctcgtcctcgcctgttcctcttctatttcccccagacctcctcgttccttcaatcctttcctgagacaagcgttggtgttgccacccctgtctcttctgatttctttctgtgatttgtttaccactcggaccagttttgctgacttgcctgtaattcgttttccctcttctatagatctggttcagagctaggagacatataaaggctcagattggtgattcttactaacagtaggctgctggtatgattttcttggctataatgtaggagtatacagaactaagatacagttttggaaaggttctaaagactagtatattttgaggtgttttttcagatataaaaatctgaggtattcatgttttgttagtactatttcaaattctaactaatttgcacatcaaggtactaatgtactccatattttgttagtacttgtgttcggaggtcaaggtagatgtgtcttgtttagcccatattttctgattgttatcccgtagaatagattgctcattttagccttagttcgtgcagatgattgtagatgatcaaagcttttaatacgcatcttgttgcataaggttttatttgatatatgcaacaacctagagaaaaaatctgtctggtatgccatcctgttcttgtctttgattctgttctttgagttggcttcaaat

SEQ ID NO: 47810 - DNA, 1416 bp, Oryza sativa
cacccctccctacaaggagccgccgccgcctagccaggctatcaccgattcctcctccctgtgagaagctgccactgccattgcctggttgggccaccactgtcgcctcctccctacaaggagcagctgcctgactgggcctccttcctacacggaactgccgctgtcatcacctcctcttcgccgcctggctgagctgctattgccttaggtttgggggcatgaatttggatttgggataggaaaatgactcaagggtattgtttgcatatggcaaaatctccacgggtagaaaggttaactgttaagttgaaataatattatttcttgttttgttactttttagtttagcaatcctggacccactaacttctataaaaaatatttgaaaagaaataatgaaaaccaaaaaatagggaaaaacaatatcggaatcaaagtagcagcaagaataaaattgtcccaattcaatatgatggatgaaatgaaacaaaaagacgattatatcttgctgtttcaaattgctatgtgatgcaaaaattatgaaattgtttcaaaatcacactacaatatgtaagtaaaaaaaaattaaaaagccctattttaatctggttggggtaacttccattcgaaattaatttactagctgaatttgattgcattaattacgaactctatacttataccagtaaacattggtccttattgtaatacaatggttgacatattaatggagtctaaatagttcttttttttaagaaataaggttataggacccggctaattgttaaacatttatgtccccttaatgcacatctttataaaattgactaatgcgtgcatgcagtcaagctttacaaagtttcgcaacgatcacaaacaagtatcaacatttattatatgacattgaattattactagcctttagggcttaattgatcatcctcttatatttatggcctaaaatgtaaaggcgcaacagagttttgaaagtaatctacgcgtcttgagccaatccatcttcttgatgattttggtttagcttatagcaattatcggtgcaaataccatgtgtatatggaataacatgaccaacagtattataggtggcaaataacaattaacatcggtaccattagttgtggcatacaaaatcaaataacaattaacatcggtaccattagttgtggcatacaaaatcaggaaaaggctccagggtgttggtctgaccggctataggtagcccgatctaaccagccaggtacttggtctgaccgacggctataggtagcccgatctaaccagcctggtacttggtctgaccgacagttagtgagatggttagaccggccacaagaggcatgatctggccgaggtagggcgcagtctgaccagtcatgatgagcacggtctgac

SEQ ID NO: 47811 - DNA, 780 bp, Oryza sativa
ttttgtttcttttttgcaagtagcagggcagaatgtgttaaaagagaaaaacagtaataggatcatagtaccagtggctgacttgcaagaaaccaaactttttgcaggcacaataaatccatctaaaattcaggagcctaatctttgggactagaaccgatgagtgagtattcctaaaaaagatggagttgtacagtttttattactcgaccatggaagatcacaaagacacagaagttagtatggttcaagggcgcatctgctataatgtgagagtccaagattttgctacccctgggctaacagtacagtgttctaggcttaattttggcaaaaaaaaaaaaggaaagaaaagaaaaaaaaacacagatagcagcctctgagatttgacgaatattgtcaatttacagtgcttagattacttttagtttttccgatgacggtgcttagactacaagccggctgtacaatggagtcatacaagattatgggttcagtcttaatagtaactcttcaactctgaggctaaaaacctaaacaagcaaatgctcaacataataaacataaaaataaaggatcgaactatgctttgagcaacaaattatattgtacatttggcatcatatcagcttgtcgtggggcaaggaaaacatacaaaatcttgtaatttcacaggcaaaatgttcattctctagttcgttcagacagaaaggtgttaaattcaatcgtaatggtcatacctaatatcaaaaagaaaatatcacaagaatcctctcaaac

SEQ ID NO: 47812 - DNA, 695 bp, Oryza sativa
tcacagcaaacattcaattcttgtagaaacgaaaaattcccacttttccaaacagggcctcacagatttattctcccgtacattcgtccccatataaaaaagctagaggaatcagatccttcacacttgttcataatatataattctccccacagttgttcagttaaccaccttgcaaaaaggtgaacataaagcaataatcaaacaatttatacttacacataccatgggctcataaattttttaataagtaaagaaaaagaaaagcataagcagagatagagagaggagggtgagcttggtgagcactgagaaaagaagcacgagccaacgtgtttgagagattgtgtccttgatacggtgcgcgcatgccgttccatgggtcccctgacgatagcaatacttaatacttatagactgtttagattatagtcaaaataaactagtaccaaaattttagtaagttaataatattgctgaaattttagctggatttcttatatatttaccaaagttaaaaaaaataaatgtatgcatatctttgataacttaaaaaaaatgtatattttaaaatagcattaatctgaacagccctcacacttgatcatcgatcgccatcacgcgttcgtgtcgcggtagtgtttgattacattgcgtgcgcaatggcgagcgagcgatagcggcatgccggccgg

SEQ ID NO: 47813 - DNA, 648 bp, Oryza sativa
caatccctagtttctgcatctaaatctacctagccaaagagattctgcatctaaatctacctagccatagagatgagggaggtaaaatagacttattaccaccatataatgtacagcccaaagagatgagggagacaaattagacttattgaaggacaagcacggtggactagtcatgccttcaagccggcacggcacagtccgagcctaggccataggtacagcctgtggacagacacggcagggcacaacgagttggtcgggccgtgccttggttgtgccctagcagagccatgccagacggtctatttggccatctatagttggagctccatcacctgcaacttgtgtggtgacctgctctcttctcacctcctcaccaagctggaggccgagtggccgatgtcccacgactcgtaggtgtacttgtggttgacgtactaaaaaaatcgtgtttgatctcagattatagtctcagagcaatgatcaaataaaaatcatgttaacagattgaatcttcaatttcccactcaaaattgggattcttgattttttttcctttctaatttaattctttcttgtttgcagcccatttaatttgtccattatttccacctcaaccaagtccagctgatgagtctttttcct

SEQ ID NO: 47814 - DNA, 586 bp, Oryza sativa
tggttgattgagtttcacatcatatcccaaaatagtaggaaactttggcgctaatgagcgcaatggctccaattccaagggtagtttgccattctctgcttcatcttcagagttctccatggtgaactcttggagaaattctggcagcagcaaaagcagaagtcaataaatagtctgagcatgatacttgtatgtatcagcagatgaatgatgtctcagaacttgatatgttaagaataagtacgcgagataaatataaagaaaacatcgttcagtgcaaatacaacgtagagcaaagaaattgaataaaaagaaaatagatctgcaaaatcagaaagctgcatcaacttctgaacaatcagaaacagaacaatctgcatattttggccattgatcggtcggctgagcactgatggctcacttaaagataaaaatgtgtcaatgcgaagtctctgtggcatatgaatcatggatgttctgtccggaatctatttggctcacataagcattaacatttcaaagttctacttgttccccccttacgaattaaccaaaacgaatgcaggctctacaatgacgaagatgg

SEQ ID NO: 47815 - DNA, 690 bp, Oryza sativa
tatcccctcgacccaatccagaatggttttgtcctacatgatgtacgcgtgacagtccagtcagcattctatttattaaaaaaatgtaggatccgtctatcgtactcctcttctactcttcctctctctctcactctttctctctctcttctctctctcctctctctcactctctctctctctcactcttcctctctatctctcgtgggtcggcggcaagcgggcggacatagagtggtggcggcggcggcgatcaccatgagcagccgccccctcttcacctgaccctacgatgtatagggttttcacaatgcgcgcggcacttgggctttcccgctggcttcaacgaggaaccgtcagggctcaactcaacgataatggacaaaaaaatttccgtccatgcaagggctcagacatggggatccaatgtccccattcttttcaacatagtggctggtatgtcacccatcctattgaaagagccaaaatcgaggcccctatccacgggggaatcccacacttaatggatgatggtttgtccatcttccaatatgccggccatcccatttattcgttgtgacatgactttgacacggccaaaaacatgtagccccttcttggcgcgttcgaccatctctccgcgcttaaaaaaaaccttcttataaagggcaattattcttcttggcggct

SEQ ID NO: 47816 - DNA, 565 bp, Oryza sativa
tccgggaaattaggtactcttattggatcaattaagcttgtattgtgtcgtccatataatctcaaaatgtatttttcgaatcctcaaacttattattctgaatattatacaggttcaaacaggccccaactcgctttgtgcgtggacgtagcgtaccatggtggcacctactatgtattgtagtaagtgtaacatgccatgacacaccgtacaactttagagactgtgtacttcaccttttttttaagaaagttaaaatgtgcattcatttatagacaaaagactctcactattatagaaaacgcatgaccgatgcggcgctgatgaaccctggttattggtgccagtttcacaaatgacacctttgaggtgcacacgagcttaaaaaaatcggctcggtgcattcaagctgatacatcaaggttgcatatccttgaaataccccggatcccaaatgatgcctcaaatcacccaaaataatgccccaaatccatgaacacattaactacaatcaataaactcaaacaaacaacacattcagatccttaagatgaagaccctagat

SEQ ID NO: 47817 - DNA, 1706 bp, Oryza sativa
  unsure (1)..(1706): unsure at all n locations
cgagccaaaccagcggggaactcgccgccgggggcgcagtccgggggatcaacggcgacggcggcgctagagatcagaggacacaacagctaggttagacgggagattattgacattggattaaccaattcaattaagaaggaaaccggattatcggcgacgcgagggcgacaatggcggggacgacgacggcagcggtgcggcagctcgggcggcagcgcgtcagcgggctagggcggcgcacaactaggagaggaaaaagaaagaaaaacagggggaaaacacttatataggggtggataggattaggaaaggaggagtcctagagggagtaggactaggagggagggagggagaccgactcggcaaggggtggggaggcgcgcatggcaggggggaaggtggctcggccggctggggagagggggagggaaaaaggaaaaatgagggtagtaggactttcccgaaaaggaaaaacaatgtggtgccattttagtaaaggaaaggaaacggtcccatgaactgacgcagatacggttcgtcaagcaaaacaaaaccgctgactgagaggggagtgaattgggcacaattcacgaccaaaggcaaaggaaatataattaacttgccacttttaacttagcaacattgcccccggtgatctgatatttactctttaagtcctgttaagagcaaagagattttgaaaaaaattctcccagacaattctgattattaaatgcattgttaactggggttttctcctggttaaccaaagcaaattcttgaagccatttattagtgatttggaacctaagggaagagaaaactccgggtgtgatagacagtcaagcgatagacatagggttgtcaacgagccgagctcgagcgtgcttgtctgtgtaagctcgagctcagtagagactcgagccgagctcgaactgagcctcatcattctccgagcttagaggtaagcttgtactcggctcgtccaagcctcgagctttcacgagcttgagaggtataataggttgaaaacaaaaaattgtgcacaaaactaatggttctagtactaagaagttgtgccatgcacacctttatgggaagaagtattagttgttggtaacagagcattgatggcgatgtagaaaacttcacaccatagtagtatagctgcacaggcttttgtagggcagtagtataggctatatggtactgtgctacagtagtataggatagtagtaggtactagtagcacttgagcatacatgaggctttgttgtgacgtgtgttaggtagcatagcatttagacaaataaaaaaaatttaagccaagtagcagaagggtctataggactaatgctaccatgcatgagtgctgatctcgacgagctattcaagctcggctcggtgaggcttgcgaatcttacagaagggcttcggggncctttcggggggccctttccgggttttgggggtttggggggaaaaaaaaaaaaggggccccccctttttttctttggggggggaagttgagctttggttgagccaagctcgaacagtttgtgagcttcgagcttttttgacagccttagataaacattctatttcctgtgatcatttggccaaaagaaatacatgcctatagaaaccctatttcctttgcagcttgtatttggagaggcatattttgtgaaaaatgtttgttt

SEQ ID NO: 47818 - DNA, 2289 bp, Oryza sativa
  unsure (1)..(2289): unsure at all n locations
cgcgattgtacgttnnnnnnnnnnnnnnnnnnnnnnnnnnnnnnnnnnnnnnnnnnnnnnnnnnnnnnnnnnnnnnnnnnnntgaatctttatctttatctttatatactactttaaaaatccgtagtggtgatgttaaagccagcgtaaacataaccgcgcctccccctctcacgcgcccacaccgacgcatcgctccgctgcccctcccgccacaagccgcccacaccgccgcccatccacgatccttaatcaccgtatggttccgccccgatccaagcccccaccaacgctgctgcactacggtgctcactgatgacgacctcctccacctcagcttccccaccaccctcgtctccaggcgctggctccgtcactcctccaacctggctttcctctgctgtttccgcgcccgcaacccaccccgcctcctcggcttctaccacacggcacgccaggatgagcagccagccccagccgtcgaagctcgccgacgtgctccgccaccgcggcagattcacgtttggcggtgcgtccagcgctaacgactccgtcgtgatcttcgactgccgctcacagctccaagccacacactgcgcagcccccctctctcgctcaccggccgcgtcgctccattcgtccagcctcaaacaacgccttcatcaggctttgcaacaacctccacctgcaattaacggttcgttcagtctctgctcctctccagttcactccttttctatattaagcgctatggatgcatgtattgtaatgtgcccagtaggtttttgttaaatgccgttgagggatggatggattggtaatatcatataggtgcaatggtgaaggtaatttggttctcaaaaaaaaagttactgtccctcttcgcagtgcgccactgtcatctttgactctcttgccatttgcttatcgaagaacttgcacagggagaggacattgtattaattgttccctgctatttgttgttgcatcttgtcctagtgacaaacgtgcaacttgacctgaagattttttctatggtcatcaatgatgctcgttacaatcgctctcattactgcgacaacagaagctatttgatccttagtgccaactccctgagatgcctctcattcctatcatgtagttctatccttgctagtatgggagtgcacatactgttgtaatccacgagcttgaccaacactttgtctagttctgaaacaagagtcgagtatatggaggcacatatatagatcatgaaccatattattattatgttcccctcaaaaaattattattattacgttcatcataccacaacaagtacaaagatgtgaggacaaaccaacagaaaataaattggaacatacatttacctagaatggaagaacatgagacatgaatgcatatacatccatgcttgtctttttttttgttgagggaaaatccatgcttatgttttagatatatatgaaaataaatgaagtgaaaggcacatctggtgtgtgctgatattgttttgtatacatgactccaacctattaactagtgttgaaaactagctagaactcataactataacacatatgtacatttgaataaaaatctcgcggaattcatgttgtagtccatctaattggcttgggtacattaagagtgcttgtgttgtcttgtcttccatgtagagaaaactacagtgctcgccaagtttgtacattcacatccattactttacatgaagacatatgatattcctttgagtaaacttcacttaatcctatgtattgtgttctaagctgcacaaaaccaaaagtctaaaaccatagaggttttagcacatgacacttaacccgacatattatggctgtaaagtctcacaaaaccacactattgatctttttgactttgttctaactaacgcatttgcataaattattttttcaacttgtaccataatcgataaatatggttttatgaaatttgctatttttttctattggggatgccttttgcatatgcaagctaacagttatatagtacactcatatttcaatttgagttgaatatcgttttattttcttgttgaaacatacatttccttgaaaaatcatgtattccacctagtatatatttccttcaaaaaacaatgtaatcctgttgaatggtggcgttgggcagttgggccttcgttagaacaagttggatggctgttctttgaactttcgtccccaaataacattgggtaccgagctagaattcggcctgtatgcatcnggtngtcaatcaatccat

SEQ ID NO: 47819 - DNA, 1076 bp, Oryza sativa
  unsure (1)..(1076): unsure at all n locations
tgccctgccccctcctaagtcataaccacgtgggctcctaatgatgatgcccctgccgctagacccacactactgccattcttgatgtatggctgatgccacttcttgctgtcctaaatgtactatgtcaattgatttcaaccattaattagatttcagtcatactgtttagaaatggagctaatccatggatattcatcctgcattttcactaatatgttaagtagctaaacagaaaatcaacacacgaactcaggaactgatagatcaatggggattccaacgaattccaccgctgccgccgccgccgttcgtcgccaagttctattacttaatcgataatcaaaacagagattgcttcctccttataaatatatatctctctctccctctcccttacagaccagccaagggccaaacagcacacacacctactgagcccattccggcccactcatgcgtacattagctttacgaagtctttttcccctccctccagatgcttcctcctgcaccctgctaccattgccctgagcaccagcggcaggcaccttaacattcccccctccttgaaaactggcttgcccccaagccagagctctgggaagacgagtgcgaaggtcttcccaagtggcttcctaaacagcactgtcagaccactgaattaatacttgtggtatagcagaagtacctgatttgcgaactcgggtgtcgaggacagcaacaggaactttcttagtttccatttgagcaggaatcatacgagaagaaacacctttgaagccttgggcagacttgaggttgagtaggaccaattgggggaaaataaaaaaccaaaggggggggggaaaaatttgtgggggggggggaaaccccccccaaaaaaacaaacccgcttgcttacgataatgctaattgatatgccacttcttccaccttgcgcaataccttataggggccaaaggttttaaaacnnannnnnnnnnnnnnnccaccnttcccccagtnngatttnnnnnanngnnnnnacnnnnnnnnnnnnnnnggtttcatgttttttgcattataagnctacc

SEQ ID NO: 47820 - DNA, 1142 bp, Oryza sativa
ttaatgggtaagaacgcccatatgtgttctcctggtttacatgcagggcgggtcctgactttttagggtcctggtgggaaactaaatttagaggccccttcccatactattatcaatagttacatatactgaattaatcctataaacatttaaattgcattcagaaataatatttaaatagccaataatgcacatgttaccttaaaagtttcttctgcgattctatcatatcatccacccttttctttttttcccttttctctcactacccgttgcatactttctcgacgacatggcctgataattcaaaaaaaatatagtagtttaactcatataaattacataacaaaattacaaatcaaaattacaaatcaaaatttaaaatcgtaccaattagttgatcacaagcgtctagatgcacaccgcaagtgagtcagaaatacacactagtgtcttcgtcatgtctaactattggaacaactgaataaacctaacatacgactatacatcaataaatgcttatttacatattaatagataaaaatcacaatagtaaatttcaattttttatttgacgatcggttaacagccaaagcttgtatagcaaattctttaatctgacgactatacataactgaaccagacgaagctaatccagctgctaccatgtaaatgcacaggcacataggatcctagctaatagtaatacctgaatcaagattcaagaagcggcaggcggcaacggctgcatccgccaggcgctcacggagtcacagctggactgcaacctcgtacccctactggcggtcgaaccgtccgtatcggagtcaagatggataggaaaaaaggggggaagcccggggcaacccggcgccgcccgatgcggtggcctttgcgcccattgcgcccgggcgattttcgggccgtgaggaggaaaagattagaagagcggcggcaatcgcgggatcgcattatgtttgtcttccgcttccggcttctggcacggggcgtatgcttcccttgatgctaagcctgggtggggcgtggccgagggagggggggtggtttataccaccataccactatatattccaccccccgggggcccgggcctaaggaccaacgcggcgagcacttcttac

SEQ ID NO: 47821 - DNA, 658 bp, Oryza sativa
ataagagatggttttgtagatatggttcaggaaatctggtcaaatgttgttagataaaaaagttaaatctggtcaaaggaaaagaaggacttgctgaaaatttagattttgttagataaaaaaagttgaattaactctattgagtgaggatgagattgatacaagacgttttttaggaatatgttagctagtttgcttagagaagaggaaattaaaaggtatcagcgagctaagactaaagatattttggaaggtgactcaaatacctaatattttgcttagagaagagctttttttgtcttcgtgaagcttcttcttaaactttgtatgaaagccagataagtgatatcccccaagtgtctcaattagaaaacaattctttagtagatgaatttacggaaaatgaaattaaagatgcaatttctcaaatggaacataataaagctacgggtccagatggattttctgctaagttttatcaagtgttttggaatgttatcaaacctggtttggtagatttatttaaggattttcatagaagtctaaatctttaatcactcaactttggtactattattttacttcctaagtgccaggaggctattaaaattcaacaatataggcctatttgcttacttaatggccattttaaaatttt

SEQ ID NO: 47822 - DNA, 986 bp, Oryza sativa
ttgaatgccataaatgcttgtatatatttgggaatggaggggtacaccataaaagataaaagatactgtataaatgatgttcataccatcctgctcatcaacaaaaatatatactacttgataaatccaaagagtgctagtggtggtggtggaacccttctcaattcacagagcatgcatgatacgaatgcaatgctttgtataataatataaaacaacatttttcacaaaatatgcctctccaaatacaagctgcaaaggaaatagggtttctataggcatgtgattctttggccaaatgatcacaggaaatagaatgtttatctaaggctgtcaaaaaagctcgaagctcacaaactgttcgagcttggctcaaccaaagctcaactcgagcttcacacgagccgagcccgagcctgctgtgagattcgcaagcctcaccgagccgagcttgaatagctcgtcgagatcagcactcatgcatggtagcattagtcctatagacccttctgctacttggcttaaattttttttatttgtctaaatgctatgctacctaacacacgtcacaacaaagcctcatgtatgctcaagtgctactagtacctactactatcctatactactgtagcacagtaccatatagcctatactactgccctacaaaagcctgtgcagctatactactatggtgtgaagttttctacatcgccatcaatgctctgttaccaacaactaatacttcttcccataaaggtgtgcatggcacaacttcttagtactagaaccattagttttgtgcacaattttttgctttcaacctattatacctctcaagctcgtgaaagctcgaggcttggacgagccgagtacaagcttacctctaagctcggagaatgatgaggctcaggtcgagctcgggtcgagtctctactgagctcgagcttacacagacaagcacgctcgagctcggctcgaagacaacc

SEQ ID NO: 47823 - DNA, 4012 bp, Oryza sativa
  unsure (1)..(4012): unsure at all n locations
tgctcgcggatgcgtatnacattgtctcagtcnttcggtgtgtaattctatcagcgtgtctctttgcacacgaagcgcgcgtgcgtnctattaatatataacgagntgtctgatcttntcatacnannnncnnnncccnncccccccnnggcgggatgatagtaacgctgttatntagcnnnnnnnnnnnnnnnnnnnnnnnnnnnnnnnnnnnnnnnnnnnnnnnnnnnnnnntttgccatacgggggctttactcgtgaattgtgtctagctcgttggtttagtcgcagacgtagttgagtcgttcgctcgttcgttcaaacgaggtgttcccccatggttcgttcattcgtccatcccgagttgtcctttaggccaggttaaagccgttcagagccaccagttccgttcgccgatttcgtttgatcatttgggtgatcccgtgtcacgttaaattgactcgttgagttggtatcttgtgaggctcgcttgccagtcaatgcatcctttgatcctatgttcctttttgggctttaatccctgtcaattggctaaggtttttctgttattagtaaacagcacaaagcatcttgtaaaattcataactaaataatctgagctccgttttaacccattcaaattgcagtgaatttgttaagatgtcaagaatccattaaaattggtttcttttgctgtttcagtatctttttagcttgtatttattgtgtgccttgtttgtcgtttagactccggcagttccgtcgctccagtttattttgaggtggtcgctgaggtcccgtcagctgaagagcaaggcaagtcatacatacatcattgattatattgagcctatttgcgaaaccccctgctttttctctgaaaactgcattacttttataacgttatgtgggatggtttctacccatactcagcctttgtttaccctgattcactgatagcctaggataataatttgactagatgattggtctaggattgcttagccatgcttagatcaactagctcacaatgggattcactataatatagtccttaatttcatgataatgttatgccttcttggcatatggttcattaattaaaatatgctttacttggtgggtcgtgggcacatgcatgatggtttcttttggtggtcgtgcccatgacaattaaggaccggttctcgtgaattcctggaagatatactcatactaaccacaagccagatgggctccaggctgaatcttaagtataatcttttctagctagcgcaccattggcaagggtaggcatgatggagtatggatggacctggattttggcctatgctgcttccggatttacctaggcacgagcgggggcttaatttcaaggttgtaacctatgtcgtaactaaatatcgactcatagttgtttcaatgtgtttctcttatgttatgttgttcagatcgatggcgctatatgtcttctatttcttcagctttatcaatgtaaagttctcctaccaaaagaaatatcaacacagatgggccaagcccacagtcacttgaggaggtcccaaaaagtactaaggggtagcaaactgtattcaagctagacaaagttcggaggaagcctcactatttcttcctccgtgtaacacataactaattatgggatcttttttttagtatatgtgagtcaatgcacacctgcattcacccctacataagtatgtggactaaactgaacaatcagtcatattgaacataatatcacacaatgatcagttcaaataactccagtgaagtaaaatagccttccagtaggattttcttcagaaaatcatatatatcctagatgctgtttactaatcttaaatggacattggaagattaagcatatttagaagatttagtttgtaatctgtctatctctgattttgctttcatgcatacatcaaaagataaagggtattggtgcgctcacattttattagatggcatggatcttcaagtgtgtattgttctgcaattataataaaaactggtgggcctctgttgtagttccgcatttagctttgctggtatgaaacttaaattccacttgctaccaaaatttaaagcatctatcatctttttatgtgacgagatatatccagaactctacatgaaaattatcactactagataagtgatctttgcccggatggcaaaaatcacattagtcccggttcgaataggaaccggaactaaagtttttttttctagtcccagttaaaaagcctaatggaactttttgatctttagtcccggttgtttataccaaccgggactagccgagccgcacggggagggagatcgagagccatgtcttatctcctcgctctgcgtcgtccttatcatctcctcccggcccgcttttccctcctcctcccctcccctcccctcccctctcctcccctccggttgcggcgccatgcggggcagcatcggcggcaggcgggaggcgctcgaggggaggcagcggtgagctaggcagcggcagcaccctccgctccaccggattcggcgagaggggaggcttccggcgacgacgcacgagggcagaggtggcaggcggcttccagctgtgtggcggcggtggcagcggcatcaaacgccgcctgtgcggagcggatgaaagcatgatggacgcagcctccctggccagggcgaagtggaggatgcgttggatgaggtcgttggagagcgctgagatgcggtcgatgccgccgacgaggaagaaattgtagaattttttagatgtttgtgtgaatttgtcgaatgttttagatgtttgtgtgaatttgtggattattgagtatgttcatttaattttgtggatgattttgttgttgagtatgtttttgtgaatttgtggatgtgaatttgatgttggggatttgggcatgtgaaaaaaaacaatgaaaaaaaaccaccaaccgggataaagatggatctttacatccggttatttcaaccgggactaaagatgtgcattcttagttctagattgggcgtcccggtttacaactcaagactaaatgtggttgcaaaccaggattaaatatgagttccctagcagtgtatattgttccgtggtatatatttccctgcttgatccacttctttggatccttgacgtagtgtgtgtcaacctagcctgtgaacttccagttagtgccacaaatagctaccttggaacataggcatcagatgcatcaggaactttaggtgatctgtgataaccaaataccgcaaacataactagacaagtgtctctgaactgacatctgtagtagataatcatctctagctgatagtccatccaaactgaggtgcacacaacgctaatggtaatgctgatgcacacagtgctgatggactattagttagagatgattatgtactacagatgttagttcagagacacttgtctagttatgtttgcggtatttagttatcatagatcacctaaagttcctaatgcatctgatgcctatgttccaaggtagctattgtgtcattggtaaaatgcaaaagaacgacataactttttttatgtcagcggtagttgtgtcaaaattaatttttttttatcaaattttacatttttatggcagaatgtatttcaaaacaatcaacaaattgcagagaaatattactagcaggtganctttttacatcaccctattaactctcacttacattgtctttnaaagatgtaatatgtacatagacgtaagattcaggaagtagctctttggtactattatgaatgattgattttcgagcgacggagtcatgaggtagtggtaggatcgtgtttcgtagtttgatttgagtaatgttagatgcgacaacgaattccgtgggttggttttatttagtatgctacggtgagtctgctttgacgcttcaccgttcttaaccgtactacgatctgagtgtaagatacaattaattgattgagtgtacgtattcaccg

SEQ ID NO: 47824 - DNA, 529 bp, Oryza sativa
cttgtaacatacccaaaatttcaggacttaaaatttcttgtcaaaatagttagaggttagcttctccatttttaagagtcaaaaatttccgttttaatttaggtgatgaccaacttaaatcattgcatgattaaaatttgagaacaaaataaaaccttttcattcccaacattagactagaaatgtcaccaagtatatgagcatacatgtgcataatgcatgcctaggctcgagtctcttgtgcatttggattttggtcttgcttttcataatatgtctcatgagcataaactaaaagggttaaaattactaaacaaaagttaatcttgggtgataacatgtggacttaatattaaactcaaatatcatcttctcagcccaaaagaagtttaatgtaatccctgtaacaatattaggtgcaattatgaagtgggaacacatatacaaagtaaagtaatcctaattctctaaaatattatgtgcaagttaaaatcatggaaaaaaattagatagataatgtttagcacaa

SEQ ID NO: 47825 - DNA, 548 bp, Oryza sativa
ttcatctgtgggttttagttgcttggagagtaagggatatacctggttaagtgagtatgtggctagtaatggtcgaagttgggctttggtagaagaatggctaggatttacttgttctcgagtcgatgctgaaataggatagcatatcggctcgtatttcatgtataggttatgagtagttggagggtaaatggttgggatgatattgtagctggcgtggagtctagatagcaagctgattgaggtaggataaatatcagttagggtttaggtgtttgctagtcgttgctagagttgggcagcatggcgactagacttagcatcttctctagccgatgtcaacagacagtataacggctagagggataggaggtttgtgtgggtttagtggggcggaagtgttactccgacaaccgtgagtggcggcggagcggctaggatcacacagagcccaagagctaactgtgcggcgtgctgtggaggtcgagggaatagtgaagctccgaccgctgtacgcatcaaggcgtggggtgccaggagcagcattt

SEQ ID NO: 47826 - DNA, 777 bp, Oryza sativa
agtccatatagctaaagcataccactcctcctctaaatatatgatgctacttagttcgaaacaaaagaacacgaagggaattaagggagtagtaacataccttgggcgatatataggattattccacagagatttcagtatggtggatgcatggtgatggtcctgatcaacgccggcgccggcgatggctgacacgatcgacggacttatatatattagaggtacttctccggccggccggccggcagcgagctagcagctagcagcttcttctgatccctcctctctctctaatagctatagcttttcctttcttctgcagctagctagcaaagcaaaggaaacgaccttgagagattcaacgatacaatatttatctacctatggactagttttcttcgatcgatatctgtagtgtagcaaaggaaccttcagatttgaggatacaataatacttcagatataaggagtatttaattatctatagttggtactcaaattgaagagctgaccctgactttgcgcgcatcgaccgtctggcgcgagcgcgactggaatggaatcatccacgtggggcgtaaccagtcttcactctctttcagaatgtaaacgaaagcagctagtggtcgatactcgttttccgtaactatacttaagctgaacccctcctccggcatgtaaaacggagcacgcattattgcatgattaattaaatattagctattttttttaaaaaaaatggattaatttgatttttttaagcaactttcgtataga

SEQ ID NO: 47827 - DNA, 766 bp, Oryza sativa
tagtaattttattgttattagatgataatagatgaatagtattttatgtgtgactaatatttttaatttttttcataaaatttttaaatatgatagacgatcaaaacgctggactcgaatatctatagctgcacttattttgggacggaggtagtaatatatatacgttcttttgcgtgcttcgagaaacactgggcaataataagctgtaccgaatgaagccttgtcttaccgtggactcagtcaactctggatgaggaagtttcttagatggcgagagaaaagagccgccgctgtggagtgtaggacggattggtaggagtaataaatttaatgaattgaatgcgctgctaacgacaaatcattgtgcatacacactacaggcactgttcaactgttcacctgcaccacactgtagacggagacacggtcaagaccgcgtctcgatattagaacatgagttctcgttcagggggtgattacatacagccgggtaaagtttcagcgttttacatagcatattatataaggtattgtatggggtcttcgaacactaataaaacaactaattacagattccgttagtaaacaacgaaacaaatttattaagtctaattaatccgtcattaccaaatatttaatatagcgccatattgtcaaatcattgagcaattaggtttaaaagattcgtctcacaaattagtcacaatctgtgcaattagttattttttagcctatatttaatacttcatgtacgccatcaact

SEQ ID NO: 47828 - DNA, 789 bp, Oryza sativa
attgtaggggcaaaaatctgtcaaatatcaacgaaaaaatcacccgtgtgatgtttagcaaaatcgattttcttgagcctgggcaagctagcaagagataaaaactatgggctgttcactttgttgtcattttcaccctacccaaattttggtaaagttgtcaaaaaagtggctacatttagtttgctgccaaattttggtaactatttaagaaatcctgtcaaaattttagtaagttgccaaatttttggcaactatgtgtaacatactaaaaatttgctattttctaaatatgtatcatgccgattcttctattcttaataacttcctaaacttaagaaattataattagagggacctcctaaaactaacatgcataaaatccctgtctagtatttaaaatttttcgtggtttttattctaaaaattgatcttgttaaatcgaggtattctctttgatttgattttgcatcttaaaccttcttttgaccaaaatttcctttattcaaatttagtctaaaaatcctttttacttttatgaattgtggtccaagaaatcctccaacaatacctttgaacctaaaccaaagcaattccaatttcattggaattaattgtcgacccatcctttgatttcagacctattcttatttatcgccaaatatccaagtttcccattagcctcaaatacttctccaaattcttgccaaataatttgaggctaacatcctatttatttcccttccctctcaatcgagtgcatcaaataaattccgttatattctatct

SEQ ID NO: 47829 - DNA, 1777 bp, Oryza sativa
agtggttcttatttaagtcctcgcgcaggaggcaaacctatgccgcgaagggcaaatataacatttaccgaggcgcaggtaaatgatttgttgagctcaagtgtgtgtgtattgtgaaaacctggttgagatgacgggggtctctcaaccagttctctctctaaaaacctcgggaacgccagaactcctctcgctgctgataacgttacgttcagagcgcatgaggatgagagttcatggaacaggtgccactgatgttagtaaccgaaaagctttgccatgactaagctaatgaatattggcatgtcatggattgcgggtaaagcgtacatttactgcagtaaagtaaacctgaatctattcgaatagccgtgctcacggaattgagtatcgggactcatatggtactttggttagaaacctaattcaagattttactaaatgctgctacatttaaaacatcaggctttctatttctatattctctgccttctgcaagtaatcgtaatcctactcaaatattacctttttatacattcattattgaatataatagcttggtgagtacgttgtactcacccttgcttcaaacccctttttccagagttaaattgaagttcttgccgaagccaggagttcaatcatataagttagcattatttcaacctagttttcaaatctagattagttagatggtttaagtctatagcaaaatattagagttgagacactctatagcttctgctgtaatagttagccacaatcttgtaaattcccctattaatttatgtaataacatctgctttggagccttgttcaaatgtacgcaatgaaaatccagattgttgaagctgtatcaatctactgatccagggcttgatacagttaaacatgtcggtttccgaatatttagttttgggatccgacactgtgccaatgccaaaatttggtaaggtttttttttgcatcaaagtgaacatgccctatatatatatatggaaaattgtaccgtttatctagacttaaagttgattgttgccaagttacaatttatcaatgaaatgttggttgtttattgtcaaggagttagagtacggggcttctatacatcaagaaagcaagattaggatgtggtacaactcgctagtcatctaattaaccttccttggaaccaggaagcaaggtaattatgtaagcaattaatgagtaaatgatgtttatgctgtggagcaatgtgtgttgcgatggcatggagcccgggcagctgcctccgccactgctgccaatacacactttggggtcagtttgagtttggtacgtaaagctcctactcctgcttctgattttctgaaagaagcgtttctgcgactgaaagtgattcactaggttaatcagcagaagccactcttttttactagctccgaaaatcacttcaccgaatcagcctagagcccaacaatcactcctctgtaaaaatatcgtttggaagcagctcagcgagctgtgcaaaacatgccgcccaaatatttgccaatacactacaaattctcaaaacgcatgctaactgaataaggaatgtaaaactagtttcccctaaaaattctcttgaaaccaggtttattaaaaataaaaagtgactatcatttcagagccttaaaagtcttctttaagcccacaatttgtcctcatcggcatggggtagtcgcttcgcctcccaccctcaatgacacgtcggaccgcgattgccccagctgctgctcatcgcgttcagcacggc

SEQ ID NO: 47830 - DNA, 1082 bp, Oryza sativa
tagggtttgggttcggattttttgattttattttttttgggatttttattttacgtgcaggtgatataagcacccgcacgtggaaatcagatttttccgtgcggtccacttaacctgaccacacggaaagatgtattttttcatgtggttgatcgcccgcatggaaaaatatttattttcccagacacctgatgcagacgggtaagatctctgtagaaaaaacactttttgaacccacggaaaaatgcttttcgtagttgtgttttacgctagtcgccatgggatgcaacgaaccaggtaagcagccaacagttaggctgtgtgtgaggggaaggctgttttctccgataattccaaaaattggtggctagtggccccatctttttgacacacgacgggcaaagaatttgcatggaaagaagcaacaatattactgcatcagcacatatcttcgcgcctcattaaactttagtagcaccttaaatcctgggtttgatttttatgggagagaattttttagattttaacggttttgtgcttttagtggcatgtgatgcacccgtccacaacgagacgtctgtagtaacttcgtcagtctttaggatttatcagctcagtcttcaaagatgctcgtaggagtagggtttacgtgcgtgcgtttataggggtgagtgtacgtatgttgtgagtgtctgtgttgtactttataattattttaaaaaagcatatatcttcaagcggaacaatgtcatcagccatcagccacttgcctttctgtttctggtcaaccaaagtggccgccataagctagctctagctatagcatacttgaccaagagttatggagtatatagctgacatacatcctgacaaaagcaagagcatacatggatgcagggtcggataaagaaaacaattagggagagacatattttttaatcatagaatttattcccatcttttctttaaaaggctataatcaatcattatagagattacatggacaatgataacaagacatactagagagtgaagaatcaccaagtccaattccgtacattgtactggttgaattaaccatt

SEQ ID NO: 47831 - DNA, 738 bp, Oryza sativa
tacataaatgacttttccaactttaaacacatcagcagcccgtaacccggtaatattttccaacttacacaggcaattgtttacaatattatagagtagatgcagctaaagaaaatgacttgggcggtccaaagtgcaccaaagataatcttacctagtctaaagtaaaaatatgagctagaggatagcctaaagtgaaactttggcaataaaaggtggaccagagtgcaattaactcttgtttttttcctacatttaatacttcatatatatgtccaaacattcgatgtgacagcgtgaacaattttgttttgtgactaagggtgtgttcggacccaagggttcccaacacctctccatcgttttccgcgtgcacgcttttcaaactgctaaacggtgtgttttttgtaaaaagtttctatacaaaaattgctttaaaaaatcatattgattcatttttgaaaaaaaaagctaatttctaattaatcacgcgttaatggaccgctccgttttccgtgcgaagaagatttgttcccaacctccccaagcaaacacagcctaaacagggcctaaacctcgatgcgtttttatcatttctgaataaggtaactaatagatcgtcatagtcttcgtcagacttctatctcgatcgctttcaacggggcacatcagcctaggcggctttgggtcatggacatgtacaggtaggtgcaactaatcatacattttgcaagtttt

SEQ ID NO: 47832 - DNA, 768 bp, Oryza sativa
accgttaagtggtgggcccacgccttaaacttaatgccgtggtggcggacacgacgggaacccaccgcacaataccgttgtattggaaacgcttagtcacctaaactaccacgtcagggtaaataggaagctcctctgaattatacgaactcatacacaccgacctaccagaatgcaaggctagtcctaaatagattactcagcttaggccatctcatactagcacatgtggatgtacgaataactttaaatgggtgacacaagttcggtccttatggacttgggcaaacactccccctatcggtatgcaactaacaccatatgcacaccacttgccgcccaagtataaaatcacattttacacattttagttcgcaaatacccatcatatttattttattccagcaaaggttcatgtatcaaaatcatattttaattatagatggaatgagcatttgcatagttgtaagcatggctaagcaagtagttgcaaatagagcatatataaacccatttgagcacaaagagtgtactctaaccatttctaggggttcaaacagcaagaggatcaattattcaaggtggggtatgcagcaaataggtcataactaccttaacccaatttcaaataccgatatagtctaagttcacatgcaactttgcaaacaaatattttcattcctcaaatcatgggattcaatgtgttcaaaggatgggaggagaaaacttgccttgatcagagaaatgttagcacctaatccactcctt

SEQ ID NO: 47833 - DNA, 630 bp, Oryza sativa
aaaatgctctaaaatgcatgatttatgcacagtgattaggtactgatctaaaatgaattttaggtgaaataatttttattttatcttattccattagggagttatgaattttagaagttttatcgatttatagtagtatagtcttaggtagtgttatgaaatacttttgtaaagtgatttttactagattagacttcacaggggtgtagagatgtgttttataagactaactcatttggtttcacaatttttggagttacaatgattttcttatagattttacaagttacaacgtgttttaggcatatagtgttttatatgtgcatgactctcaagttgtaggttcagaacatgctacttcctgtttaagttgaataaaaggaataatttggttaactaaaacatttttagttcacatgtttatggtctttactactatggttcatattttataaactagagatgctataaactaaactagcaatatattatattaacctagaaattgttatatgagctaagttcttctaagttttagtggatggggatggaactatggcctctctggtctaacaagttttattttggtttattcatagctagaatgcaggggatcctctagagtcgacc

SEQ ID NO: 47834 - DNA, 913 bp, Oryza sativa
caaaccaaacaaaagctagaaagaaaatggtgccaatttgccgaaccagaagctaacacgcgttaacgtacggtttggtatgaccacactaaagtacagtgctgaggagagccaacacccactcatcacttaatctcgcatcttctagtagaatttgctagaaaaatttggcttttttaggttaaatatcaatttgatttcctgtttttgaaaagaaaaacatatacctttatcgaatttattccgatacccttttcgcatacttgatatatgcggttgtaaaatcctttatgcgtgggaccaatgtaggggcagatccagcatgtgacatagagggtacaattataccctaaattattttgtaaacaccctttattaatttgtataatatatgtttgaggagtaaatgatttcgaattaacagacattgtattgataacctacagctagtatatacttaagagaaaatctcggtcaactgatagaaaacaagacatatttgcattactcatagtcactataaatcgataggtattatccatgtaggtgcgggtcatatatttaaataaatacaattctatatttaaattttgtctcaaaataaggacaatccaactatactacttattattgtgacattaatcacatttaattcaaatttctgttcgtcttacagtcagctaccatctcactccgtaccatttgtcatttaatagggggtattttggataattttccttctattttattttctcatctcacttctaaacttacatttacaatgagatggagcgagtaaatgttaaatctcatccaaccaatcgtttatattatgtaaggcacattgatcttatacaccaaggtacatgaaggtaagatcctgttttggatgtagggactaatttttaacccc

SEQ ID NO: 47835 - DNA, 772 bp, Oryza sativa
atcggtttccgccgccgccgccgacgacgacacgtagatcgaggagaggagaagtgggatgagaatgtccatttggcatgtggatgcaatgttgggacaatgaggatggatggatggagaagaaaagagtgacagagggtgagtgagagcaagtgttgtgttggtcactcttgatgatgatcagtggtttacaaagaaagattatggcttatggtgtgtaatcctctgcttttgagagataaagatggctttttctcttctttttttttttgaagtggtgtttataaaacatcaccagttaagggtgctttggtacacttttgtgtttgtgagttggattgatactgccttggacaactatcagtgtaggtgggttttataggggattttggtccaggaaacattcctttggattacttttcaaatcaaaggaagaagagctggcccaaatgtagtttgccaaaattttagcctgaagttgcctttttttcttctttactgtatttgctactcctgtacaaaagtttttttttaagtcttttctcctaatatgaaacggcagaactcctgctcgcctcctcgaaaaaaagtttttttattcagtttatgtggaaaatgaattgttttcagtgaaattcctaagcgccaaagtagccatcaggggtttccttgccttcatacaatgatcatataagcaggggaaaagtacgaattaccccctcccccggcccgaactatcgcggtcatccgaattaccccctaaaccataaaa

SEQ ID NO: 47836 - DNA, 901 bp, Oryza sativa
tacaccataatttgacaatgtgatgcgacattaaatatttgctaatgacggattaattaggcttaataaattcgtctcgcagtttacagacggaatatgtaatttgttttattattagtctacgttcaatacttcaaatatgcgtctgtatacttcgaaaactttatgcccaaacaactaaacacacggccacaccctaaccagggtgaaagcgtccttggagaaccaaaagcagaccgcgagcggtacatcgatcaatgtacagtcccaatttcagagccaaaaattatatttgatttaatatactctaaaaaaaatttaaccgacacataagcatttttatgttgatacgatatggaaaacctttaacagagttcagacacatatctatttgtgcagaataatgtttaacgagtaacatcagtgattgtgtctctggttgagtggggagatctgcattatattacttgtcaccagatgtgatgttagaaaaagggatttttaaagttcctgcaaatatatatttttgtgtgcatatcaaggttgctttgcttagggatcaatgggaaatcatgtgtgtgcatgggaaaggcagaattgtgctgcatgcactcagaaaggtaaggggagaaaaatcagtggtccatcacagacagaagggctaccagggaaggaacatcacatcaacttctttaaaaaaatttctattggcattagagatgataatgcttccctctttactctgcttcctattagggcccttgtgatttaataatttctatcttcattattattgcactttatatgtgataagatcatgtttttttgtctgttatgtttttttagtgatggagaaacaaaattgaatatgataatatttatgcgagtatatattcagttt

SEQ ID NO: 47837 - DNA, 754 bp, Oryza sativa
acttctgacgatttggatgtcgggattgatgttgtgaaagaaacatatctaatcatcatatcagtatggagcatctaaacagtacactacaaacgtggctatgtttctgatgagatccatgcaggcatgtgtgatattcaattaaaaaactaaaaagaagataggtgttgttcataactgatggcaagtctcaaaaactttaatgagaaataaaaaagagagaaactaactaaaaataatttaggagtgtgcaacaatttcctcttctttttgttgaggcaaaaacaatttcctaactggagtggaattgttatggagatatgtaccaaaatcctagatgtacaacttgtgcgttgctattgaagttgcatatatctccaaattatgcgggtaaatactaccttatatttcttgacacaaattaaaatcttttacctgcagagaatatggttaattatttgtttgcaataccagtatatatcttataccttcatatatggaatctgttgtttctcacagaacaaaaatcttcagagttgaatctgaaactgaaaccaaaatgttgagaattttttaggaaaaaatagtaaatattagatcaaagggaattacattcatgatggcgtctctgcccgcatgcttgatgcatcacatccacaagctaagatgcctccctttaattactttgatgactagtttactgctgctattataacctttgcgattgcaaagcacctttgatttcatcctgcca

SEQ ID NO: 47838 - DNA, 777 bp, Oryza sativa
cgttttccgtcggtggtgatttgctgcccaacatgccaaacatctgccatacttttggtggtgtatgtatctagggactaaatttcatatagaatgtttatactaattagaagtattaaacgtaaactaataataaaactaattgcataaatgagagttaatttgctagataatttttttaagtctaattaatctataattagcacatgtttactgtagtatcacataaactaatcatagattaattaggctcaatagattcgtatcgtgcattagtacagagttatagaatgagttttatcattagtctacgtttaatacttctaattagtttcaataatccgacaggggttaaaaattagtccctacatccaaaacaggatcttaccttcatgtaccttcgtgtataagatcaatgtgccttacataatataaacgattggttggatgagatttaacatttactcgctccatctcattgtaaatgtaagtttagaagtgagatgagaaaataaaatagaaggaaaattatccaaaataccccctattaaatgacaaatggtacggagtgagatggtagctgactgtaagacgaacagaaatttgaattaaatgtgattaatgtcacaataataagtagtatagttggattgtccttattttgagacaaaatttaaatatagaattgtatttatttaaatatatgacccgcacctacatggataatacctatcgatttatagtgactatgagtaatgcaaatatgtcttgttttct

SEQ ID NO: 47839 - DNA, 597 bp, Oryza sativa
tatcacctcccccacatatttcttctctcctatttccttcttttagttacatggaaaaaatattttataataacaaattttaaacaattatattatctaaatcatataaataatttttatttgtgctcactattagattattttctgtaaaatttaaaattgaatatccaaattaactatattaattattaaagaaattcaatacttttagtcatatatattctacgaattatagctattgttcattgatccatacattttttaaaaaaatataatatattttaaacgttctgattaataatatgggtgggcaagtttgaccgcaagaaaactaaccagttgaactacgctcacttcataatgttggatataaagacaaccataatttttaagctacatttttaaaatactcctatgccttttaaaccggtagaagcattatttctaaccgttagatctatcttatatagaaaaagtgtttattcatggtacatgacatttcaaaaatattactgtgcaatgataatacttcgtcgttatcgtgttatttctaggttgcgtggagtctctcatctactctacataaaatgttcatag

SEQ ID NO: 47840 - DNA, 1227 bp, Oryza sativa
aaaggaggtatagtccaacacatatttttcatttgctgatatatacatcacatgtactgctagtgtgagagtactccatccggttagaataacatcacacgctgctacttctaatattacgcaatttataactgtgagcaggcagatcaagcaacgcatatattagattacttaaacccgtgggatctttggaaggttagggacgccacgtcatcggttttttcaaaaacaccactcacctctgattaatcacgttttgggttaatcacgttttgaaaagtaagtgtgccacgtcattgtatttttttgcaaaaaaacgcctgcacttcctgttaattgtgcgttggttcctgccgctatggtccgttcgatcacgcgcgagggactagcgtgtcccagcgtggctgctcttccaccatcgtgagatcgttggatcagaaacggacggcctagatttggcaagaaccctagccacctcgcgctcgcctctcttctcgctcgtgctgccccaccctcctccctcgtgcgggtcgccgcctcgttatattataaaccaataggtatatagttaatttaggctgtgttcttcccccaattttcccaactcatctctcttgtttaccgcgcgcatgcttttcaaactgttaaacggtgtgttttttgaaaaaaaattctatacgaaggttgctttaaaaaatcatattaatctattttttcttttaaaaaatagctgatacttaattaatcatgcaataacacagctagttttatttttaaacttgtaatatttattcatttaaaataaaacgagtatcaaaagttctacgggaagcaaacataataggtttgtctatttgcacagaactttcgagcaaggacgaatagtcaaacgtactaaaaaataactgcatcatattctaataacatttaaaaggcggtatagtacaacacatacttttcatttgctgatatatacatcagatgtacagctagtgtgagagttactccatccggttagaatgacatgacacgctgctacttctaatattatgcaattttataactgtgagcaggcaaccaacgagatcaagcaacacagattttatttgaaactagcaggtatagagttaatttacgctgtgttattccctagtttttccaactcatctctcccttttttcggcgcacgcttttcaaaccgctaatcggtgtgttttttgtaaaaaa

SEQ ID NO: 47841 - DNA, 537 bp, Oryza sativa
gtgaatgaagttgattaaaaaatgaaattcaatcttggagaccatatcaaagagctaatatgccttacttttctcaatcaaaagattaatatgtacatatgtgtggaacaaaaattgatactgctggtgagcccacttttgttttaggaaaaataaaaatgaagaggggcagtgatgccgttttctatatttttttctctcctagttaactcgatatattattttaataggagaagtgtccattagcaaataaccaaagttttagagtatcttttagcatagccacatttttacggtatctcttggcaaataccataaattttggatgtttagtagcaaattttgccaagattatattgttttgtacaaattacctgatttgctgtaggagggatgattgcaaatgatagtaagggtatcaagcttcttgcaggtgaagttgggtaatttggaaccatgccattataattttacaaagtttgagatatgccatcggtatctcaatgtcgtggatcctctagagtcaacctgcaggca

SEQ ID NO: 47842 - DNA, 765 bp, Oryza sativa
agggagagaaaaagaaagagtgtggtgaaagctgagagagaggcagggaacaaaagtttggactgaaatttacaaaattttgggtctattggatcccatacaaaattatttcacctggaatttttggatttttgcaatattcgtgaattccacaaaaatatttgaatttgatcaatttttgtttaaaaccttcaaattatttcggattaaaataaccgaaattttggaaattgtgaccatatcgatacccccgatgcaactaactaaattaaaaaatggacccttaaagagaggagcaggatagaatgacttagcttgtaactgtcaagctcaggtggatctaccgtagttttaccactgccgctcaccgtggatctgccgccgtcaccgtggaaataaccctcacaccgcttgctccaccgcattgggctggttcgaggtgactggttccattggctgatgcaccacataagggcaggagaggtgggtgctgctcaccaaagaagtgaaaaaggtagatgagagggagaggagttgagcagacggtgtggtagagagtgggtttagggttactgtcagtgcgggtcaggtgggtggacaggaaaccctccctctattattagtgtgagtttttcttaaccgatgccgataggtggcacagttgactgttgacatgttctccattagcgcaaacaccaaacagtaagaaaactatgcagggtgtcacacccacattgtgttaactgtacagttgttgtagataaa

SEQ ID NO: 47843 - DNA, 701 bp, Oryza sativa
cgcgaatttggatgtgtggaaagcttgagtttatgttgtaatttggaatggtgaattgcatttgtaaatttggggtggtgaattgcattgtgaattttataaaatttgaggatgtttggtatatgccccgtgaattttgacctgttgatttgtgaatttttacaaatagtacttttataattcacttttttgtcaccggaaatcctttttcctagatgctggcctaatggagctacttgggaagatatataattttcatatgttgctatcttaagcatgccgcctgtggaaatgtatttcgcaggcggtcagttgtcttcatttttactggcctttactgaggcggcttacgccaccatcagcgaaaaccttttttctattagtgatgaaaacttatgcttgatttgtagtgtttttgcttgaattcaaaaagtagtctactcaaactttcctgaaattttctactcaaatgatcaagctttctactgtaataactttattgtctaaaagactaaaaccttttacttcgatgacaaaattttctattcttgtgacataagttcctacacaaatatttatcaagaaaagaacgcttgtgaagaagcatgtgggtacatgcgagattttttacggcataaaaaatcttaatatcgatgtctatttttttaaaaaaaaatgaggcagcagcttaaatgatgtaa

SEQ ID NO: 47844 - DNA, 858 bp, Oryza sativa
  unsure (1)..(858): unsure at all n locations
gtcttgaacatcttggggtgtgttttgggagtcgttttttagcagcggtagcagctgnagcagttcaaagtggctgcagtntgcagcaattttgacctgcgccagcctcagcagctgtggcaggtatggctgctgaacagagcccctatttgttcaattatcaccctgtgacaggactttctgaaggcaagcttctgcatctagaatttctattttggtacttatagttcttgcgtgacatttgttctggcacaatgtaccaacaattttgatagtgaataactgagtacaatttaaaagatgaactttcaagatgattgttttgacggattctggatgacctcttatatataaactaggccactttgtaggatctgattacttgcaatttcaaacgttccccatttctccatttactaaccatgagcatccattttacatccaggaattttaataaagaagtaactatgaaatataaggaagttactccccaatgccttgaaccacgtggcccatgctgttggcctgttgtttgtgtaggcagagttctgttgtatgcgtagattaggagttctggtcgagtataattgctggatcttagactaggttcatggcaaatttgcaatgtgctacacgggactgtattcgtatgtggtgatttgatccatttaggcaatcaatcttcgttatggcgaactggtgtctgtttagttagtattgcaaagtcgcaaactggctaccattggatgactttctttatgatttcctttttaaaatcaaaatttccatggtaaatttgatttaactaggaaaaatgcctgtgtgttgcaatgggtgaaaaataaaagtacaccaaat

SEQ ID NO: 47845 - DNA, 630 bp, Oryza sativa
ctagaaacatttgacaaggtgcagcttggctcgtgcttgtttttttcttgaactgaaaacttctgtactttttatctggcaagcttatttacagctgaggaagtgctccagtgctgtcaaaaaaaatagtgaaatggcttctttggatctaactgatcgatgaaatgtttagttcatattctgtttactactagtctattacattgtgttcgaggagtgattaagctcacattccatgcaacacatggttttatttttgtcttttttgcaggaagttataatgttcaattgttatgatacaattttattgacgatggtcagtatgttgacaattaaatgctgcaaactatgaagcaagattatagtataccttatgctgatcacctatatattcatttcagcaatgtactcttgcttcctgtttaaaagaactctagcatttccatttagatgcttaccatttgaagtgagctttctattatgtatgggtcactgggcctcatgatagcatcagtcggtgtgatattctcagtcataaaattctagaaaaggtaacttgcagtatgcttgatagaagttatttttgtcctggtttcagtccacactggccctgcaactgattcagtatgc

SEQ ID NO: 47846 - DNA, 718 bp, Oryza sativa
tcttgctcaatgtttgtttttttgctttagcttgtccattgggatcatactgtccgcgtgccactgtgaacacaaccactggtctttgtgatccgtaagatttttttttaaaaaaaattctgttcttattgttctgcatttgccttcttgaaaatataaacacaatgcttacaaggtgaattttctgaactttgattagatacaagtatcagataactccaaatacaactggctgcgggggtgctgacacatgggctgattttgggagcactgaagagatgttctgtccagccggttactactgtccaacaccaacaaaaaaggaaccttgtagcgaagggtactgatccaatcatactccttgtatgacttatttgacatatattacaaagattatttgattttaaacactaggtgactgatgattcttgtttttttcctccccttcaggcactattgcagactgggttccaccactcaagacagtaagcatcattaaaatagattgatacttcattttcttattgaatcatgcagttatagtatctaccatccagcaagctgaatttattcaaaatctgcagaatgtatcataaagggatcctgcaaggagaagacagagaatgaaaacattgtcattcttggtggttgtttagtggtaaattccatcaacaaagtcatcatttcactatcttgctagcttgatggttgcctcttt

SEQ ID NO: 47847 - DNA, 549 bp, Oryza sativa
cgtatataagatctatcttttcatacaaacataataatgaagaacgaaggtgaaattttctgttataaaaaattgaaaaggacaaatgtgtttgatagaacaacatttaaaattttcaaataaattgcaatgacatttcaaaagggggaattgcaactatattttattcttcttctccttagaaacaaatttaaatatttttttaatacacatcaaacaaaattcaagatattttcatggaaagagagaaaggtgaaattgcctctaaaattttcatcaaacttcatttcaaattttatcttctcttttaacactggtggctagatcagttgattggtgcatgtgcgtgcctagtgttcgaatcttcttcctggcaatgtttttctcttgataataaataaaattgggttggactgattgggacatggggtggagacattaaggagttcttccagaattatttcagaaattattcgaccaaaacagattccaataagggaatatcttaaaaacctacattattaaaaaaataatgttttaataaaaact

SEQ ID NO: 47848 - DNA, 3572 bp, Oryza sativa
tcattggtggtggtggtgttggggtgggggaattctaaaggtggggtcggcgtcggtcggggtggggtggctggtggtggggcaaggaccgatttatataccgcggtgatggccgttttctcttctcctgggcctactgggccttgtgggctggttcggttggactgtctgggccttttctaccgttgtacttgtttggaaaaggtacaccaaaggtccctcaacttatcatcgggataaaaaaacgtcctcaaaccgcaaaacgagatatacggagtcctttaactatacaaaaccggtcacccgaggtcctttggtggttttgaccccagttttggtctacgtggcggctgagtcagcgtgggatccatgcagaccccacatgtcagcttgccacatcatcaccctctcccctcctctccctttctcctctctctctctctcactcttctcttatctaccctataagagcacccgcaatggtaaagtaatgtgctatctataaaacatgtacatctcaacaatagactagattaatagtaaactatctcaatagtatgtctacatgggtatctatagctctttaatacattgtctcgtttttctctatagactatctccaggttagtaaatagctttgctctctctcttcatttaatatcttccaagtaggaaaatatactgacatggatcttttatagagagcctatagataaccattgcgggtgccctaatgcaccaactcattttactcatctttcactcctacactattacatttatcactcaacggttcagatcgtccagtgtaaaatcgaaggatcgagatcaatcctacctccacctccctgaattgcgcactccccccctctctttctcgccttccagatcctcatcccacacgcacatccctctccccgtctctttctctcgcactgccccatctccagtgtgtcgccgccgacgaatctcctcaccccgccgtcgccccttccctttcccccaccgccgatgaaactcctcgccccgccgtcgccccttcccttcccttcccccccaccgttcatcggcgacgatcccaccttcggacctaccggatccctctccaccaacggtagagaccctcatgccctaccggattgatttgataattacaagctccatccacacccagtgctccactcaggtttgatcctaattcgctgcctgctccactcctttgatccctgttccccccttttgtccagataatcgcacacttgggcaaactcaaccaaatttcgattttcagatatattgtcatatagtgttacacaatgagaattcctgctcacaactaaatagctggacgtgctcctattttcttgcaatgctatatgttagttttgagatgcagcggctaagcgagtagaatttgtgagctatctaagtaggatatgatttaattggtgcaaggttaatcgcaatagcagacattttgtagattattattctctaccctctgagtaaaaaactgaaaatagatgtcttagcaaattcttcagaagttcagcagaccagtgtgcgtgaccccgctgattggaaacctcctgtgcgcatatcctgctgtttccagtccatgtcctcagttcatgacctgaattgaaggtaaaagcagtttaccaatatttttactccttaaaaaacaaaggtttttactctgccaattgatttattccgtgatataaatcagcctctattgaaacctatagtgctgaagttatgctttatgaatcagtactattttctaccgccaaccattgcaagtattcattatggtctttatcatggtttatggtttattatgaccactagcaatgcagcgtgcacaatatatatatatatatatatatatatatatatatatatacacacacaccccaaatatatatactgattcctttagttgtctctcatatacaattaatggatatatctaaaaactgaacagtacggggcacaatgcagcaggaaaagggctttgaatgaaaagtatgaacataaatttatatcatgccaaaagcatatattcaagcctagctttcattaaaatacaaaagtactttcctctagaaaaatacgaaagtccttggatataacaatacacgtgcggtgtgtgtgaattaacatggtagatgtcatatcaattaactcatgtgtaatgtgttgcgatttaaaaaagccacttctgcatggttgtagcttttgtgatcttatatgcaaagagaaaggtaaaatgaaaatatcaaccttgctcacattattcatgtttgtgttgattctttttctaagtgtattttaatttgatctttgtttcaggctataggaaacaccgtacctcttatgaacagttatgctacagaagtcctttttgggaatttgggttcaatcacacttggaattaatatagaaatttattttgctataaaatatgaacattgcggccacaaagagtgttaattttcttccagttgattaaaggaaattctccatgaacccaagtttaaccactttgttcctttgctatagggtacagttctttaatttatcaggtgaaaccccgcgcattgttgcgggaattagtatgataacaataaaaaaataacgtgtaagatagctaaataacatcagattaagtaaattaatatgatttatgataatttaaatttaaatagtatgcagaatggtgattcaaacgtaaaaagtaaggtgatatgactttatggaagaagaaaagtagggagatagtttggaccgtagattaatcatctaaattctaaaaacaattgatgtgatatgacttaattagaggaaaaactaaaaaatataattcgaaccatagattaatcatttaagcaattactaagtgaggatgagctatataagtatatatgatatcataaaacataatgaagatatacattggaacattatgtgaattatgttagatgataatttaacatgtttgtatttgaaaagctcttaaattataaaaactataaagatatagcatgtttgcttgatgtttaaatgtgatgaagatatagcatgtttgcttgatgtttaaatgtgatgattgttagtggatgatgatgtgccatcttgttagtggatgatgatgtgacatctttgcatgttaagcttaaggagttagtgggggataactttatagtaagataggattagtgtatagtgaatgatactgtgtaaatgtttcatctttacatgagctaatttgtgtgtgtttttaaatgcatgcagcgtcttgtctcttcttgtacaatggtgaccacaaggttatatctatactaatataaaaaggaagagttgtacctctccaatcctactggtgaaatcacccggatcaatctctaccgtccatccgccatctgatctaatctcatacgtccgttatcctcctaactgtgcacagcgatgagcgattccacctattcagaaatcacgcgatgactacgccgcacaaatccccaccgtcttctccggcccctcgcttcttcccgccgggacaactt

SEQ ID NO: 47849 - DNA, 738 bp, Oryza sativa
ccactcgcgggatccgccgccggtggacgccatcgccgcccctgctcacccctgctcacggccgccggcacatgctcttggagaggagagaaagagagagagacaggggaggagagaaagagagagaggggagagtaaaataatagagggggagagatagaggagatgggttgcaaaaaaaaatttgaaatcgtgggagggaaaagagagtggagggagataaaaaaaaatagggtggcatttttgcatgcggtcctcttaaggggccgcatgcaaaaatatgagaaatttgaatcgaattttatggtactaaatcacaattcatgtgaaaaaattgtcaaaaacaaagttatagaattcattgagatctaccaattttcttttggttatttctccatccgagattgattgaactatctaaaatttaaattttaaaatataagaaatttaaacaattttttgggtagtaaatgatttcaaatgaaaaaattatcaataacaaagttgtataacttatcaagatctacaactttcgttttgaacatttttctatatgactctgtttcaacaatttgaatttgaatttcaaattaggactacttcaaacaagattttgaaataataaatgatttcagctgaaaaagtcatcaacaacaaagttatataactcatcaagatctttaacttttattttagtcatttcttcatccgacaaagtgataataacatagttcacaa

SEQ ID NO: 47850 - DNA, 593 bp, Oryza sativa
cgcaattcgcaatagctcaagttataacgtttcacacatatcatatcagtgaactatatctatcacaatagctctagtattggcagtattagcttctatttgctcagaattacattattttcctaatggcttcatagactaccaaatattttgcacaataattttactgggtatttacattttacaaaaaggtgctgtccatcgtttgtggcactcaaggcctctaaaacatatgtgcaaacattcaatattctcatgtaacactgcagtttaggcaacacgaaactagcagcaacccacatttcagcatatatgaagttggaaagaaaatagcttttgtgataattaattatctaacatttcatataattctgatgctcattaatcatcatcgttcattctcatatcagcattctaattattatagtactttattataaaaaagaaaattgctgaatcataacatcatttattacaaatggcaccactttctctgtaatctacaaatagaaaaaatagagaacatgcataccttataatgcaattagccttgacagagttaaattgccctagtagacaggatcaacattttg

SEQ ID NO: 47851 - DNA, 1174 bp, Oryza sativa
cacaatgccgaaccatttctcttttgaccacgtcccattttgtgcatcacagccaccggaacgcgaccacgccgacgacgccctggagcacgcaccggagcgccgccgcttcaaccatcgtcgtcgtccggccattcttgaccacctcggagcaagccgttgtgccatcgtcatcgcctcaatctcctcttcaatacgcctcaagaaccccagccggagatttgaaggactcggagaacgcatcttttcttcaccggcgccgatctagaatcgcctccgccgtcatcgtcgattaccgctgcctcggtgagccattgttcgattcctcgcgcatacaccatctccttgacctcacaaacctcgtgcatgcttgcttgtagcagctcatcgtcccgttcgagccgtcgtcgttcacccgaggaggagcaccgtcgccgagccgttccacaagtcaccgctgccgccaagacctcgaaaaccctagctcgacccacggtgagcatcctgaaggctagaagaccacatgcatgcatcgttcggaatcgatttccatgcacacatgagctttcaccccaagaaccaccgccgctcacactcgccatcggcgctactccgatgtcctctgaccaagaaaactagaggaatggaatcgcaagaacatgctcttcattttatcttttaaccccaactccaaccgagccaccaatcgccgccggtgaacccgggatcgagctcagccatggctgctctgcctctgtgcgtgtgaaaaaggagtcagggacttcagtttgagaatttaaataactataaggttcattacgtaatgttcccaatcaatgacatatggacctaggactgcgggttgatttcctgaaaatcctaggggcctttttgcatattggcctgatactgacaggtggaccccatgagtttaaaatctgaaaatgtaaaaagataatactaaaagctttatattttcaacaggaaaacatgtaaacttataaaatccataaaaaattgaaaacaactcattttagagtaaatcaaatttctgtgaactcaccaaatcaagaactttagagttattgcataaaactagacattcactgtacaaactttgtctctaaaattggtctaagataaatcatacataaaccatacacaaatttataaa

SEQ ID NO: 47852 - DNA, 590 bp, Oryza sativa
atagaaccagcaaatagtgagcttcaacatagtaaaataaaatattgcaccttttgaacatattatagctctaatctttaaatagataacctaggagttaatcacctagtaatggttaagcaaaatatatgtgtaaggtagttaaaaaaatgcattctagctatgaataaaccaaaataaaacttgttagaccagagaggccatagttccatccccatccactaaaacttagaagaacttagctcatataacaatttctaggttaatataatatattgctagtttagtttatagcatctctagtttataaaatatgaaccatagtagtaaagaccataaacatgtgaactaaaaatgttttagttaaccaaattattccttttattcaacttaaacaggaagtagcatgttctgaacctacaacttgagagtcatgcacatataaaacactatatgcctaaaacacgttgtaacttgtaaaatctataagaaaatcattgtaactccaaaaattgtgaaaccaaatgagttagtcttataaaacacatctctacacccctgtgaagtctaatctagtaaaaatcacttta

SEQ ID NO: 47853 - DNA, 587 bp, Oryza sativa
aatatatataagtccgtcgatcgtgtcagccatcgccggcgccggcgttgatcaggaccatcaccatgcatccaccatactgaaatctctgtggaataatcctatatatcgcccaaggtatgttactactcccttaattcccttcgtgttcttttgtttcgaactaagtagcatcatatatttagaggaggagtggtatgctttagctatatggacttcaaaattaaccatagctgatgtacttgttcttctgcacaaaattaattaacctaacctcgtgaaattgcctagtaagcacaaaccaagatgatttagcaatctccattccatatgagcacacgcatgacatgagagagcaaattaagtcagcgcaaacgccgtagtgcgctgctatgctgaatagcaattaaggttccagcttgcactggttctggatcaaggccaattcttcattaggctactaactaaggggatttaatttctgggtccgaatttagcaagatttgttatattggattatccgagcagcaattgatcgagcttctttctgcgagtttgttaatactagattaatctgatgttttatt

SEQ ID NO: 47854 - DNA, 545 bp, Oryza sativa
acgaacgaagaggccattttgcgtgcaccacatggagtaagcatcttatgctaccgcgatgaagcgtactggatgacacgaaaaatactggtgtacgacatattcttcgaggggtataatgttcaaagggtaatgcgtcaaatgggattgtaccaacaagtcccagttcctgttgggcttcaccttctaccagatgtgcacacgtatgttgttatttcaatcctgtctaatttctgtgctctccaaaattgtcagatataactaacaactaattgttgtatttttgttgcagggaaaagaggcaagctgacaacaggtatcatcgatctatgcactcaaggatgatcccatggatagaggcgtggtcacaggccttgaatgatgtcgtccaggagaccaaggcatacgaccacaacacttacgaacaatacatggcctagtactcatcgcagactcgcattcggctgcttgcacccgaggatcccgacgagcgaagttcaccaacaattgatcaaatatatgatatgcagctagcacccccccgt

SEQ ID NO: 47855 - DNA, 609 bp, Oryza sativa
ctatagggcgaattcgagctcggtacccgtgacatttgttctggcacaatgtaccaacaattttgatagtgaataactgagtacaatttaaaagatgaactttcaagatgattgttttgacggattctggatgacctcttatatataaactaggccactttgtaggatctgattacttgcaatttcaaacgttccccatttctccatttactaaccatgagcatccattttacatccaggaattttaataaagaagtaactatgaaatataaggaagttactccccaatgccttgaaccacgtggcccatgctgttggcctgttgtttgtgtaggcagagttctgttgtatgcgtagattaggagttctggtcgagtataattgctggatcttagactaggttcatggcaaatttgcaatgtgctacacgggactgtattcgtatgtggtgatttgatccatttaggcaatcaatcttcgttatggcgaactggtgtctgtttagttagtattgcaaagtcgcaaactggctaccattggatgactttctttatgatttcctttttaaaatcaaaatttccatggtaaatttgatttaactaggaaaaa

SEQ ID NO: 47856 - DNA, 1851 bp, Oryza sativa
gtgtcgacactacgccatctgattgaaagagatccggtaaggcatgcaaacaggattctccttatacaatatttctgatcaagtgctggccatggttaacaccattttcatgatcgtgatattagttcttatttttctcgtgtgaattttcgttgcaacgtactcccgccgtccacaaatataacatatttaagtactgctgtagagattaaggataaggagaaaaggctatggtgcccttcattaagggcctatttgggggagcttctgacagctgtagattcttccagaatcagaagctcccccaaacagtctagattgtcctccagattttgaaaaactatagttgtagaatactaaaaatgaactagaagccagaagctgtgaaacccggcttctccagattctcagaagttgactaccaaccagctatttttcagaatcttaagctccctcaaactgcgttagaggagtagttggggtaagatgggaagaaatttgaatgagatgtgattgatggggcaagtagtacttaaaaatcacttgtatttgtggacaatggagagggttaaaataccttgtattcatggacagagggagtacataataagggaatgatgatttttctttttctgaatgccatatttcaaatgcatattgtttggtacatgcggaactttcaaggagtaacattttttctgttaacaactatgcatcctagaatgtaggctggttgggtagcaggtcagaggccagccattactttttgtcctttttccctttgtggaatgtttggttgatcttcagtttatgttgtggataatgcttagttgatttctgtatatgtttggcaaatgcacaccataatgtgttttgcttgttttatcttagttttttttctctctttaatgggtcattgacccagatccattggattacattctgcatattgaactagtgttctgaagaacctttatccagatttttgaggcatctgtgagtctcccgtggtcctattccatgacccagtgtcccagtcaacgtgggaacctggctagttatcattgtttttaaggcatcgctaaggcgtcgccatagcgtcgcgaaggcgtcatggcactctgctggctccagggcgtcctgacgccataccagccagtgtatggcaaccccaatctcatgccaggagagaatagggggattatggcgaccccaatcccatgccaggagagaagaggaggggggttatggtgacccaaaacatcaccaaaagaaagaaagagagagggagagaggattccatcttatctggaaccctaccagcagcgacgacgtctcagtatccacgactcccataaccatcagctctggttgcggcagatctctttccctcacctccctgctgccatcctcactgctccattcacctcttccttcctctgctcagcttggctcctgtttccttcctcttttcttcgcttggttttctcatgtggcggcggctgtggacatctgatgcacgatgcttttagggtatagatgtttgacctaataggttattgggctttgtgggccggtatgagggttggtttgatgggctgttttgccattttttatattttccataccagattattccctatttctcctctgatcgctagcagagttattcttagggcatcgccacgccataccgctataccgtaatagcgttgaggcgggtgtgcagcgccttagctcgccataccgccttaataaccatgctagttatataggccacattggccaagtctaagactgtcttggagccctacagttgggactgagtcccattttgtgcatgagggtgca

SEQ ID NO: 47857 - DNA, 1875 bp, Oryza sativa
ggttggtttgatgggctgtttgcccattttttatattttccataccagattattccctatttctcctctgatcgctagcagagttattcttagggcatcgccacgccataccgctataccgtaatagcgttaaggcgggtgtgcagcgccttagctcgccataccgccttaataaccatgctagttatataggccacattggccaagtctaagactgtcttggagccctacagttgggactgagtcccattttgtgcatgagggtgcacatgagtgcatgtgttatttgtgttattatttttgcaatcaccctgattacttgatgcacactgtcctcgcctcctcggttctcctctaacctgctatagaatacctatttataacataagtatcagtttttaaaccctaaacccttatctgttgccaattttttcaaagctagaaactgctgcttgtttcactgcaactaaaatacattgccaagtgccaacatctttgtttgtcttgaagagcatttagatcagttggcttacatcacatctgttaaacatatctggatttagcaatttcttggtataaacgatgaaatcttgtgtggctcaaaattcagtaacagtctgtgggtcatcactcactagtcagtagtcatcactatgctattttgtgtcaataactttctatacaaatatatggattgatatacaacaatatttgggttcttatgacaaatgttatgtgggctctgttttttaatatacttttgacagttagatggtttgttaattaattaattaattagtggccttccaattgtatctgatggctgatatctagtatgtactacgatccaacagttgtgacattttttatgatgtgtctccatgtaatcgtagccaatggggctacttatataggaatagtagataagtcttctacttgaataaaattgagcaaacatctttcttcacagcagttttctaacatatttaaagcaaaaagttctaatgtgatttttagccagaattctgttctggcataattccacacaatttaatgcatatacttctttgcttctgaatctttttgtcaggctgctatgatcaatcagaacattgaagagaatctgttcagcatgcttgatgaggaaactgactctgagtatgttttttttttctgcatatttgatttatactgcactaggcaaaatattctatttccctaaataatcaattagtttcctaggatagggattagtcagttggtatcctatctattagtaggaatgttatatggtaattagtaagtgatgtatgctcttggatggttgccaaaattttggccggccaaaactccttggtcattttccatgcattttgttggctaactttggccaaatgtgggcaaccaaaagtccaaaattatggacagttttatccgttgaaattttggtggaccaaatatggtcatgaaccaaagacactcaactattgttcattttacatacatggaaatttatatgtggaaaaggaatacatgatggatttacacaacagagacatttagtcttggcaacaaaacataatagtggactgggagcacaagagcaccagtccttctgggagctttagagttgttctctagactcaggtgcagaacactattctttgccttgcagtagtgcagttccatctcgtgttctggtaatacgtatatcggcacattgctaatttacatgtagctcacgccctcctatttagttctctggctatagcggaactggctatgcacaaaagtgctgctaagcagtataatttttttggtactattatgaactcaggttcataacattgtctgctatccatatggtactattta

SEQ ID NO: 47858 - DNA, 1393 bp, Oryza sativa
ctctatatgcgggttaaataaacctaacattttttttctaatatcgcctccttcaagcatccactctagtccggtctccaaaaaaggatcatattgcatgcctacaaaaggttgagtgggtcttgctccttgcaccaatgcatgtttgcttcgcccacttccagtagtgaatatagaaaatgtttagagcttagacaaataaattaaagttagtattgctatagggattctatcttctatcctcctaataacataaaattttaatggagcatccgctgacaagtccgaatggctgcctaggactgccaggtcttgaatccgcctatgctcactcatctttccccgttgccgtcatccacttgcagcaacccttgcctaggttgttagcatctcctctccataatttcgcaatggtagagcggctggtatcggatccgtttaaatatcgtcttgtgtatgattgactatatatttctggttcttgcttcttgttcctatgacaaaatcataatttctaaaatttccgatgatgttgcttaattagtttttgggttttgtttctggatattctgatgatgttttctatttttctccctttttttattgagatgagttatctaatccttccctttacaaacatcacagaggaacccaagatttgattatgatcttatatatatgccaccttcaaaatccagtcagaaattttacttctcaaggctttgctcaattgctccccttttctcaatattaggcctaaagatgatcaataaactctcaggtgtaacatatatttatgctctcacgcaccgtacgtgctgatatcagggatgacgtatgtatatattcatgtacatacacgtacggactgttatttttaattgtccactagctagtagtttagtactacactccagtaattttatatcccatcagcgcggtgatctgtaggaaacttaatcagggacggcatcgtgatcagtacggacacaaacgcgagacgataagctatcgccatcacattcaattcatgtaatgtcaactccttcagtacggaaactaataataacgacgattcttggatgttacatataggcttaaaataagctgatctactatcgggtcattggtaacagtataattaaacatttgtacatatattatagtactgacgacacagctcgagaaaatgtttgcaagaataataataattgatctgatcggtagtgcattggtgtgtacatgctgcccatcagctatcagacgggccacacatgttcaatgacagaaaccatgtggtggaacatggatcccaacaatgatcagtgcaatcagatcacaacttgtcctaaggttaattagttagatggtgtatatgtgtatatacatatag

SEQ ID NO: 47859 - DNA, 716 bp, Oryza sativa
aagagcatacatcactacttaattaccatataccattcctactaatagataggataccaactgactaatccctatcttaggaaactaattgattatttagggaaatagaatattttgcttagtgcagtataaatcaaatatgcagaaaaaaaaaacatactcagagtcagtttcctcatcaagcatgctgaacagattctcttcaatgttctgattgatcatagcagcctgacaaaaagattcagaagcaaagaagtatatgcattaaattgtgtggaattatgccagaacagaattctggctaaaaatcacattagaactttttgctttaaatatgttagaaaactgctgtgaagaaagatgtttgctcaattttattcaagtagaagacttatctactattcctatataagtagccccattggctacgattacatggagacacatcataaaaaatgtcacaactgttggatcgtagtacatactagatatcagccatcagatacaattggaaggccactaattaattaattaattaacaaaccatctaactgtcaaaagtatattaaaaaacagagcccacataacatttgtcataagaacccaaatattgttgtatatcaatccatatatttgtatagaaagttattgacacaaaatagcatagtgatgactactgactagtgagtgatgacccacagactgttgaattttga

SEQ ID NO: 47860 - DNA, 1144 bp, Oryza sativa
gttacaatgttagctaaaatgagtcgctacagaacaccgatgccaaaatatgtataaaaaaatcccacaccgttgtacaaattaccgtaaatttaccgtttacggcaattttcaattgtatcaagaaaattttctttggtagggacggaaacaaaagtagtgcacctattacactttaaaagttaaaaaaataaaggtaaaatcatgtaaaatatactaattaatccttatagttaggaagattgtgattctgccattgttctttttttttggatattgtgccccatttttctttaaaggtgaccatatttggactggttttattctctcttttttggactggttttattctcctttttttggaatggttttattctccttttttggacttttcatatgtcatacaatttaatgtctctagaaaatgtctctaccattttatagacattttataaaatatcttttcgtttatagaggcaattcaccataagacacttattagacatttttttaaaatgcctttatagtattgtaaaggtatttgaaaagcatatctatagttataaaaaagtctctataaagcatttttcttgtagtgttatatcaacacgtatatatacttgtatttgtgattaattatttttttaagtaatagatgatgtacctaaataacgatgtatctgtgatctgtgatgaagtttaatattaagatacaatctttccattgtgtttattggagttatgcatgtactgatgtgtgtttttataatcatgagtatgcgtattaacttaacatttgtgtgaaggaattttctatacatttgtcgacaaattttcttttagaaatttaacaaatgtaattatagtacaattgcgatataattacactgtaactttccatctaactataatacaacttgtatgtaactttcaaaagtctctatgtaacatgctatatttcggcgaaatgggggttgtgggaacaaatcctctcacacgtgtgcgagcacttttttccttccgcacttgcacaaatcttgaaacaaatctaacagttcaaaattacgtgaaagttacatacaagttaaatattgtagttacatgtaagttatagcgtaataatatgtaagtttcaatctaatta

SEQ ID NO: 47861 - DNA, 670 bp, Oryza sativa
gcttgctgtggaactattgtttgattctggcagcaaagatgaattcttttgaatatgagattgtataatttattaggttgaatctgagatgaactattgtttgaattttgttgtattctgattgtatctgttattatttggatctgagatggtatttgtcattaggtttgaatctaagatgttatgagaaatttgattgaatttggtgggctcaaatttaatgggcttgtttagtgggctttgatctgatagttgggttgacaaaatgggctagttttgaaatgggcctagttctgaaatggacctattttaaaatgggacagttaaaaaaaattgatgggccgtcaaaaaaataatgggccatataaaaaaattgctgatgtcagatgccacatcatcagtgacacatcattgcacacgtgtcaaaatgaccacgtcacttgccatgttggttgctaggtggcaaccatctgtgacgtttatttttgtcacaaaggttgggcctcggctagaactacactggcccataagcgttttatgacggttaaaaaacgtcatagattgtgctgatccgtgacaatttccgagaaaacgtcagacagatttaatctgtgaccctcaatagatgacgataagtataatcggcacagacatttcctgtgacgaattt

SEQ ID NO: 47862 - DNA, 1687 bp, Oryza sativa
tgaatttggtttattttttgttacaccaaaaatgtttcatctagtgtactcacagtacttcattatgtatagatctaatgttgcagtgaatgaaacattccattgcaacaaaaaaacccatatattttggaaaccccctattaagggaatttggtttattttttgttccaccgaaaaatgttttacctagtgtactcacaatgtttcactatgtatagatctaatgttgcagtgaactgaaacattctttagctatttgctgaaacattgtttttatataaggtgaaacaacacccaatttaaacgagtggaacattttcgatctacttagtgagacaattccgatatacctggtggaacatcgtacaacatttaaaaaaatcaataataagctaaatttttttttcattggaatatatccatgtgtggtcttgttttgaagatttaattgcaatgaatttaatggtgcaatcggatcatgatttggataaataatttaagagaaaaatcagtttaaagtagttttacatgtaaatcggacgctgacgttagcatgacgtctccaaatcgtcgggcgcccgagctgtagggagccccgtaaaaaggcgatcaaaaaacaaaaaatacccttgaaaacggcgaaaaaaagtctgattctttagtattttttttctttccttttttctcttttttttcccgttgtttccttttttccgttagtccattctttttcgttgtttttccccgtccttttctttatcttcgccttttttcgtccgcttttttatggaggatgctacgcgtcggacgttcgatattttgcaaatatcggacgcccgaccctgcactgccgcgcacctacacatgcatgtatacctgtgttctattatttctactctagttgattagcacgtgtaaaaagcctatatgcttgtgcatgcatgactgctgttcatactctagttgattagcacgtgtaagaagcctatatgcttgtgcttgtctcaagctactttttatttctttaaattaaatttccttttaaattaattatccgatttatgattcgatttcaccattaaactccttgcaattaaatctttacaataagatctcagacggttatattttgatgagaaaaaataaatgttgtttcaccacttgtaaaaaattgtttcaccacttggtcaaatgttccaactcagtctataaaatatttcagacaaatgcaacattcaagaaatactaaatgcaataccgataatgaatgtatgaaacattgagtctccatgagtgagacataaaaatcttggtcaaatgttccaatttagtctataaaaatgtttctgagaaatgcaacatttagaaaatactaactgcaacaccaataatcgttgtatgatacattgagtctcaatgagtgagaaaaaaaacttggtcaaatgttctaacttagtctataaaatgtttcaaagaaatgcaacatttacgaaatactaattataataccaataatcactgcatgaaacattgagtctcaatgagtgagacgtaaaaataaaaaggcaaaattggttatatagcatcgaaagttcacgtttttggttttatagccccgaaagttactggttcactttaatagcacccaaagttcaccatgttcccatttttaacacttccgtcaatt

SEQ ID NO: 47863 - DNA, 2197 bp, Oryza sativa
tgtggccagatcaataacgatcaagacagacgaaaaaattgacggaagtgctaaaaatgggaacagggtgaactttggatgctattaaagtgaaccggtaactttcggtgctataaaaccaaaaacgtgaactttcgatgctatataaccaattttttcaaataaaaaaaacgaatgacataaaaacccatatgaaagatataatatatttgcaaatatgaaatattattaaaatattttcatgtaatgtataaaacattaagttattacatctgaaacattataaaatacaaattggaacattgaaaaaacaatatgtgcaacatttacagatgtattagtgaaacatagcgtactagtactagttgacacatttaaaagaataaaaaatattttttcatcagaatatagtcatgtgtgattttgttctaaagatttaattgcaacaagtttaatagtgtaatcggattgtaaattggagaagtgatttaagaaaaaagatcatttaaatataaaaatgtatacgtgcatcggtgatctggtaaagtgctctacatagagcaagggagtagtaaagtgctttgcatggaggcaaggcagtggatagaagcatacatgtgatgagataatgttatgtccgatatttcgctggagcgtcggacagccgacgcgaagcattttcccttttttatcttcggcttttttcggttttttccatctgctggttttttactctctttttccagtttttttatcctcttttttttcgttgccatccttttttttttcgcacgcagaagggtatgcgtggggtaaggatttgttttttttatatgccatgttttttcttgcgcggccaaagcctagcgtgtccccatgcgttccctccaattgattgtaaaaatcgattccccacagctcccttgccattttcccccataattttcccttctaattccactttaattcatcaaatttaatctccatttaaaagccatcgtttttatcctgagttttgcaaattcgctccgattttgataaaaacagaaaaaggagatcaagtgtataaaaggagatcaaccaattttaaaacatcgagaataattcgaccgaatttgatgagaatgattcattcaaccagatttgatgagtaggattcgaccggatttgattggaatgatcggttttggcatcatacggacactacaagaatctatttaatctgtgatgaaatttgacgaaatttccatgatgttttcataaatcgtcacggatatgcaactatggatacaaggcccataataccgtgatagtttatcgatttcgtcataaaccggcccacaacctgtgacgttatagcaatttcgtcacgatttaaatacttcaaaaccatataagagaaatgtaaattttgtgaacaatgttactatcactttatcggttgaagaaatgactaaaataaaagttcggttgaaaatgttgtttgcaggttgtcataatttgaaattcaaattcaaattattgaaacagagtaatataccaaaatgaccaaaacaaaagttgtagatactgatgatttatacaactttgttgttgatgacttttttagttgaaatcatttagtatttgaaaatattgtttgaaattgtcataatttgaaattcaaattcaaattattgaagcagagtcatatagcaaaatgaccaaaacaaaagttatagatcttgatgagttatacaactttgatattgatgaccttccagttgaaatcatttagtatttggaaatgttgtttgaagttgtcataattttaaattaaaattcaaattattgaaacagagtcatatagcaaaatgaccaaaataaaagttgtagatattgatgatttatataactttgttgttgatgactttttctgttgaaatcatttattatttgaaaatgttgtttgaatttgacataatttgaaattcaaattcaaattattgaaatagagtcatatagaaaaatgatcaacacaaaagttgtagatattgatgatttatacaattttgttcatgatgactttttcagttgaaatcgtttagtatttgaaaattttgtttgaagttgtcatattttgaaattcaaattttatataggtcaattaaactcggatggagaaataaccaaaataaaatttgtagacctaaataat

SEQ ID NO: 47864 - DNA, 1988 bp, Oryza sativa
aatgattctgatcccttccattgcatgtgttttgctgtatgtgcagattaagacaggtccaaccgtgcaaggtgatctagtcactacaagaagctcaagtagctctgatagacaaaaaccactactgcaggaaagatcataggtgccagttcgaagaccctcataggtgctggtttcgagcccggtaccaattacccaagacattggtgccgattactgaaccgacacctatgggcattataggaacgaaccggcacctatagtgatctcggggatgacctggatgctttataggtgctggttattgataggaaccagcacctataataccatataggtgccaattctatggtttttttttgctggcacctacaatgccacatgggtgccggaatcggcacctatattcctcaagaaaaaaaaatccttaaatacagaatattaatttcctgaaacaaagaatattacatattcacataaaatgcataatcacacgttagaaaaatacatcctgacgccgcagatatatgtagtccaaatgaactggaaatcctatgtcctaattaagtgggtaacacctacagacctactccttggttaagtgctacaaatgactggtggatttatggggatccctctcccactggtggatttatggggatccctctcccataaaagcttttcccttggccttttcttttggagccagaatggaaaaaagaaagtgcactgtagaaggtggcacaacagtgttgcatgatcaatgcacacttttagtggatgaagcaagctagctagctaggtgagttggggccaatattaatgcatgcagggtttgcctggttggttctccatcatctggggtatatggtatttgcataattgggttggaaagggatgctggctctggaaaggggtttaggcccattcagggaataacatgatgagcttgggttgaagggacagcaagctccctcaggagcttcagtggggacacataaatattcattattttttttctttttctttttatttttccaccgggagggtatgcgtttttgcaatcgaagagtctatgaataaaatcctcatcaaaacttagagaagcaccactagtggtagtcatgggtgcatgcctctaggatttaaatgttggtgctcaggattatcatgaacttgcaaatgcatttttaggaatttagtgagtgtagtgaattgctgcttttttcagtctttataagcacgtgttaggggtgtgtgcatttgtgttttccgtgtaatggtaagaaaaaaaaatcttccgaccatcatataccaggcaatcaaatcacttcatgccctctggtctagctagccctatcatgtaaaaatgtcattacgagctaacctccgtaagaccatctctatatgccggttcaaataaacctaaacattttctctctaatatcgcctccttcaagcatccactctagtgcggtctccaaaaaaggatcatattgcatgcctacaaaaggttgagtgggtcttgctccttgcaccaatgcatgtttgcttcgcccacttccagtagtggatatagaaaatgtttagagcttagacaaataaattaaagttagtattgctatagggattctatcttctatcctcctaattacataaaattttaatggagcatccgctgacaagtccgaatggctgcctaggactgccaggtcttgaatccgcctatgctcactcatctttccccgttgccgtcatccacttgcagcaacccttgcctaggttgttagcatctcctctccataatttcgcaatggtagagcggctggtatcggatccgtttaaatatcgtcttgtgtatgattgactatatatttctggttcttgcttcttgttcctatgacaaaatcataatttctaaaatttccgatgatgttgcttaattagtttttgggttttgtttctggatattctgatgatgttttcta

SEQ ID NO: 47865 - DNA, 3871 bp, Oryza sativa
ttggacggtaggagaattatatatatggatctaatttatgatattgatatatatgatgttgacatagctagctagatttgttcattgagttacatgcattttttttcttttttcctgtctattggttttccagcactatatatttgtatttttctcctcctgtatcagtacatgaaactcccaccgtcttgtgaggttcgttttttaaaaaaaaatctccaaacaactaggaaattgcatatcaccaaatttacttcatccgtcccaaattatatggcctatatttttttacacggtcttcaataatatattttgaccagcattttatgtcattctattatcccaacaaatatgaaattagcaccacatgaaagtacttcaaaatataaatctagtgatataacatgcataatacttagtatagatatagttagtatgattattagtcaaaaactatcaaatttgattttccttaaaaagtgggcaccctataatttgggacggagggagtactatatattgacctttttcaatagtgtgttttaattattatttttcaaatagaatgatacgtttgcagaaacattaacttcaagataattttgattttatccaaaaaaaatccattttacatccctgaaatttcaaagaaattttaaaactcatacctaaacttaaaaatcagacaatattcattcatccctgaacttttcataaagttcaattttcatccttcgacaagatccaaagtgggtgttgtgatttaaggcacaaaaaaagttgaatttgaaaattagtacaattcaacaaaacctttgaaaatatcacttatttcacatggtatgtacatactacattattttttgtgagctccataaataattatttgcttgcagaatatagtttatagttatgtatatcatttttgcttggaacaacctttatttaggaacgatatatttcacttaggttcaatataaacaaacatgcaactgaaaattgttctagatttttaatgtaaattttaaatttccaaattcaagtgcaatttctgtttgtgggttatgcgcttgaatttttaaaattagtaactgaatcaaaaatattatgcaaaaaattatagctagaaattggacaagttagaacttaaaataaatttgattcaatgtggaattttaattatctcttaaaatacaattttattcagattcatgcactactttatttagtaaaactattcaacatatttttttcttgaaaaaagattatttgggttttaaatgcaccgtggaagttgtgataatttttgaaaatgttttaggttatctattaataaatttctttaattaatgtatatttttcagcgcattatattgccacatcagcagttgtcatccaaaactagtttttatcttgtcaaaggatgaaaattaaaaggtgtgtagagctagccgatgaatagtactacctctgtctcaaaataagtgcaaccgtgggaatccgtgtccaacatttgaccatccgtcttatttgaaaaatttataaaaagaaattaaaaaaatagtcacatataaagtactattcatgctttgtcatctaataacaataaaaatactaatcataaaaaatttcaaataatacgaacggtcaaatgtggaatatgaacaacacaaaactgcacttattttaggacgaagggagtatctactttcaaagttcatgaataggctttaggctttcatggaagttagatgtaaaatataggtttcctaatttgaatagcaaagccttttgaaattcttcaaaatacaaccctttttataacaaatccaaattaagatactaatgaatagttgggccctctttagttcccacacaaaaattttacaccctatcacattgaacgtttgaacacctgaagtattaaatataggctaaaaaaataactaattgcacagattgtgactaatttgcgagatggatcttttaagcctaattgctccatgatttgataatgtggtgttacagtaaatatttgctaatgacggattaattaggcttaataaaatcgtatcgctgtttactaacggattctataattagttttttattagtgctcgaacaccccatgcgacaccctatataatacccgacgtgactcgctaaaactttatacccctggatctaaacacccccttgtaatttaatcatctcctcagattagatttatgatttggtggcgcaagcaaatgcaactgacactgttacctgcattttgaccaggtgcaatgcactaagctgttcgtacccatgtgtatggcgtccatacatatgcatccatgtacaatgcatacatatgcatatttcaataattttacctgctggatcaggtttggcaatgtgatgggcatgtcatatagtaaaaaatacagcaggtccaaatctaattgagatagttgttgcagacatatatgaatatataccttgattatactaattgtttaatatctagatatgtttatgacgaactacgcgattgtttaatagtatttgcttagacgccctttttgtccactaattaatttccttaacttccgtaccgttttcgtccgtacgtgctgtgagtacagtgcacttgattttgggtgattctagaatccaaggttgacacgttcatgcatttatataaatatttttttgcccttgtaatagtgtgctgttctagtagattggttgtctggttgatcttgattgtgtggggatctaatctcaaagccggtcgagatcatgcatgctgagatctactttctctatactaaaattaatcaatctcgtactagatatgacacatttcagtacgatgtatctatccaaatttatcgtcctaggctgtgtcacaggataatttattatacaaggatacgtgacattcggtacgatgttggtttattttggaacgaaagaagtaatagctagatcactacaggtatggcttaaaggatgatcatctagcgttgtttggtttaatactccctccatttcaaaatatacgacatctttaattttgtacataacctttgaccattcatcttatttaaaaattatataaaatttattttttagttgttttatcatcaaataaaatataatattaacttatactttacataattatattatatttttttaataagatgaatggtcaaatattatgtgaaaaatcaacaccgtcatatatttacatatatttaaaaaagaggtagcatttgaaaaattattgtttgactaacttaactgcaaactaattaactggatattatggtggaataccgtgcacatgaccactacgtgtctacggccggtatatataggaaaaagtatgaataacctctctcgaactatcgtggtcgaccgaattaccccccgaaccacaaaaccgaacatccttcacccccaactatacaaaccggacaaataaccccctggctcaaataacggcggtgttgatcctacgtggcagtccagtcagcaattcattaataaaaaaataggtggccccacctgttagtttcttactatctctctactctctctctttcccaatctctcagtctctctctttcccaatctcttgcggcgacggaggaggcgagcccggtagcggaggaggctgcaacagcgggggatggtatctctctctttctctcgagcgcaaggccacagagcagtgcggggaccgagggcggcgacgcgaggacggtgggtggcgggcggcagcgcgtggaggtgcagcggcggtcggcatgcacggtggcgcgcgggaaggtggaggagagagggggaatggaggtggatggggaaaatgaggaga

SEQ ID NO: 47866 - DNA, 1072 bp, Oryza sativa
aacaaaaattcctaaattgcatatagggaatggaataaagaagctgttggtggtgctctaacatttttttttaaccaattatgaccctccactatttaatttcccatctactttcacttatcatctaatcataacatgctctctcatttaattatacctacttttcataataacatgttcatcctaaaattttttatattttaaaacaagggtagtagtatattacaactgaattgattaggttccatgatctaaccgtttgcgtttggtatttgatttggtatttgtacggttaaaaaaatactccccgttctattttaagtgcagcaataagtttccgtgttcaactttaatagttcgtcttaattattttttttttaaaaaaaaaaatataagctattcatatttcatcatctaataacaataaaaatactaatcataaaaaaatttaaatttaaataaaatagacgatcaaagttgaacacaaaactttatggctccacttataatgggacggatggagtatactgcttcggacaaacaactcgatcggtctagctacgtacgtataaaaggccctgtattttctagacgggcaataaaagtatttaacgaactcaccacgcatctcgccgaccagtctctcgtgatcgatgctgacttgatattgtccacttgtggttaattagataattaaaccagttgattgtacatggttgtggccgtacaaagaagtacggcaactgatctaatccagataagttctttctcaaggaaaatgtataataaaattgtcgtttctggcgctgaattttctgatagtgcaaaccatgtgctagctagctgttacgctgccgttgaacatgttagttatatcttgtatcgaggagaaaaatattactctctaaattaattaatcacagagctaatcacaacaaaaattgagtaggcgacttattaacatgctcacatctgcacgcccattccggccccaaccggccgttaaatgctaaatgttcgtcatgacagttcgagcgtctaagaggtatatagaatcgaagccaggtcttca

SEQ ID NO: 47867 - DNA, 1025 bp, Oryza sativa
atgtctggttttgtggttcaggagggtaattcgtactttttcccatattatttgtaacaaaccaagacatgcaacggccaaaatctttgcttagtttggctttgcaagcaaatcaaggtctcctttagaatgtatcctaaaatacaacaacttctccactaaaagcatcacaaacagcttcccaaaattatatcttaaaaattttggttataggaatcctaaacagatattaaaggtgttaaaattttcatcccaccacaagattgggtaaattagctttctaaaaaaaactaaaagtaggacccacgagaaaacttccaacggaaaaatcgtttctagttccctctctctctccccgctagatcaggccgcgagcgtgacccttgccggtcggccctcgccatgaccgcgtgcaaaagagcgacgtgagaagtattgggaacgaaaccgagccactagaagtggagaacgaaatatccaaagttgagaactcgattaattgggaacacttctgttgtatccgatttttgaacaaaaattcctaaattgcatatagggaatggaataaagaagctgttggtggtgctctaacatttttttttaaccaattatgaccctccactatttaatttcccatctactttcacttatcatctaatcataacatgctctctcatttaattatacctacttttcataataacatgttcatcctaaaattttttatattttaaaacaagggtagtagtatattacaactgaattgattaggttccatgatctaaccgtttgcgtttggtatttgatttggtatttgtacggttaaaaaaatactccccgttctattttaagtgcagcaataagtttccgtgttcaactttaatagttcgtcttaattattttttttttaaaaaaaaaaaatataagctatttatatttcatcatctaataccattaaattctaatcataaaaaaatttaaattaaataaaatagacgatcaaagttgaacacaaaactttatgg

SEQ ID NO: 47868 - DNA, 2402 bp, Oryza sativa
agaggtatatagaatcgaagccaggtcttcaggcaaaaaaaaaaaaaaaaaggtagtagaagccagtcatatggtatactcgtatttcattaaaaaatggtaatgatttgaaaacaatattttattaaaaaatcagattgtttagctactcattgtagacaactattcccaacagtttcacgttggctgtgtttagattccaaaatattttggccaaaaacgtcacatcaaatatttggatacatgcatggagcattaaatatggacggaaaaaaacaattgcacagttagtatgtaaattgcgagacgaatcttttgagcctaattgcgccatgatttaataatgtggtgctacagtaaacatttgctaaattaggcttaataaattcgtctcgcagtctacatgcgaaatctataatttgttttgttattaatctatatttaatacttcaaatgtatgtccgtatatgtaaaaaaaaattggctaacgaactaaacacagccattgttgcaagttaggatcataggtctgacacatatttgtaaaatttgtgccaacagttttttaagactcgacattgatggcataaatatcattaccgatttttctagaaaactatttgagttagtgtcggactttttaaaaaccgacactgatatattaggagcccacgaagtctactgtttagattcagagacttaactttagtctctatatttagacactaatttaaagtattaaatatagactacttacaaaactaattatataaatgaaagctaattcacgatataaattttttaagcctaattaatccataattagagaatgtttactatagcatcacataggctaatcatagattaattaagctcaatagattcgtctcacgaattagtccaagattatgatgggttttattaatagtttatatttaatatttataattagtgtccaaatatccaatgtgatagggactaaaaagttttagtcccatctaaacagggtcgggaaaccaatatcggtgatgggtttgatcgaacaggtactatactaatgtgttgttctatgtagtaatgggaacataatgattagtctattgcagaggtagaacatatatttattcattcaattattccgagacttctaaaggttaaaatagaaaaattgtaatgtttcaaaaaccaaacgaaaaacatatgaaagtaaaaaatgcataggacacacaagagggagatccatttctttgttcacccttaaaagatatacttggtcccaccggttttcaacatacgagcttgttgaaattagacaaatgttttactattcctcttactggaaacattttgtaattattatttatttttctatgatttgttttatcatcattgatactttaaacatgttttatattttttatatttacataaaaatttaaataagacaaattaatagttaaaatgtatccaatagttaaaagtgttgtaaaatgaaaactggaggaagttatattttaacaaaaaaaatatagtctttaaagacattgtcctagtgtagtcgggtgtacgtcagagcatccaggattaaatttgccgataaaactaaattaatttagcaggctgtcagcatgtcacagtcagtaaatttaaatacggagtactccactagactgttcgggaagggaactttaattactcccggttagcaaccctttctagtcccggttgtctaaccgggatactcaatctggaactaaagatgtttatttttctgcaatcgagacgtccgatccgggactaaagattttcatcttttgtgcaaccaggactaaaaatacatacctagtaaaaaaaacccagtcttcatgcgcgttaacatcccatctactacacacatttgacttggatagatatgctttctttttaaactaaccctggaggcatctttagtctgggttggatggtaatgttgacaaagatgattatggagcatatctgtagagattattgtggattgaatagtgtatcaccttgcattacttacgccattatatttctagctaggttgtattgattcgagtagatgttttacagcaaacaagatcaaagaagatagtgaaattaattgtgaaagaatccgtcgtgattgtaatggttgcacagcgacaagcagccactgtgtgaagatttcaaaaaaataggacacgtggcattggcgttgtggtgatggaggatgtacgggctatggtgcacttacaaggtattcgacgcttagttcattggcgcaaaaaaaaaggtgacaattaatggaggggggaggggatatgaacgccattgccaaatcggcaggtaaaataaaaccttgactaaatcatgttatttgccagatccataaaaatcct

SEQ ID NO: 47869 - DNA, 4660 bp, Oryza sativa
tgtgtgtttttataatcatgagtatgcgtattaacttaacatttgtgtgaaggaattttctatacatttgtcgacaaattttcttttagaaatttaacaaatgtaattatagtacaattgcgatataattacactgtaactttccatctaactataatacaacttgtatgtaactttcaaaagtctctatgtaacatgctatatttcggcgaaatgggggttgtgggaacaaatcctctcacacgtgtgcgagcacttttttccttccgcacttgcacaaatcttgaaacaaatctaacagttcaaaattacgtgaaagttacatacaagttaaatattgtagttacatgtaagttatagcgtaataatatgtaagtttcaatctaattatattatgattatgctataattacatctgtcaaatttttaggagaatatctatcaacaaatatatagcaaaattggtttgtaataatgtatttctgaaaaacatacgccctccgtactagtaaagaaagccatttagaacaatgtttaagttaaaccttggaaatataaatcatgaataacttagtttgaaaatgtaaaaattatatgaataaatttgtcttgaaaaatacgtttataaatcatacatatatcacttttcaataaatatttttatagaaaaaatttaaaattgtgttatgaagaccgtgtcgctgtccaaaacgcctcctttaggagtacgtgtgtacgtacgcacgtgtacgcaacgacgcgcgccacaccacccaccgcccgcgtggccccgcacgtcagaggccgctgctgcacagtcgcgcaccgccacgctgccacgtaggcgcgggtggagtacggaccccagtccccagaagagacgtctcaaaagtcaaaagccgtacgataggggagccgccttgtcagcgtcgtacacatccaaaggacgccgctgctgccgtcaacacggggactgttcaaaccgcaggaaggactgcaggagacgctggtggttgagggcccccacgtgtcagacctccggtcaaacgctcgtctataaaagatttttctttcttacaacggtcactggtcttcatgtctagtagttgggatagtttggactgagttcctagctccattcccttatttctcacgtgcatatttttcaatatatatgctaaatggtgtaccttctgcaaaaaatttgaaagttgttttaaaaatcatatttatctcattttattttttaagctaacatttaattaattatacgataataaacttttttttccgtgctagaagggaaggtttctaaccgacacaaacgaacgcatctatgtgtatttagtactgaatttacagcttaattaagaaaatctatttttataggaattaaccaaatcttgtaacacaatggtcaccttgaaagaaaaacggggcaggatatcccaaagaaagaacaatggcagaaccaccatcttcctaagtctaaggattaaatagtctattttacatgactttacctttatttttttaaaacttttaaagtgtaataggtgcactacttctgtttccatccctaccaaagaaaattcacttgatacgattgaaaattgttgtaaatggtaatttgtacgacgatgtgggattctttttatacatattttggcatcagtgttccgtagtgactcaatttagctaacattgtgaccctgctaggatttttatggatctagcaaataacatgatttagtctgggttctgagcctttttggttgccattcctgcgacaaagctgtggctgcaacgcttgtgttgtgtggttgcagctgtgctgtttgttgcttcagctagctgccgtgcagctgtagaaaatgccagccgaacagaccctttaacatcactggctgatttggccaatggcgttcatatctctgatctccactaattgtcaccttttttttttgcaccgatggcctaagccttgaacatcttataagtgtaccatagccagtgccatatgtcctttttttgaaatcctcacgcactggtggcttgtcgttatgcaaccattacaatcgctatgttacaaaatccattacgccggattcttttgcaaataattccactatcttctttgatattgtacgatgtaaaacatctactcgaatcaatacaacctagctggaaatataatgccgtaagtaatgcaaggcgacacgctattcaacccacaataatctctgcagatatgctccataatcatctttgtcaacattatcacccatccataaacactacaatgcatattgtttgcctactcttctttgagcgcaaaatgaccatcttctcctctaccaaacatgggctgagttcgtttattagagctcctagctccactcccttatattttcacgtgtatgtttttaaatatatatctgctatatggtgtgctttttttaaaaaaaaactttgaaaagttgttttaaaaaatcatattaatctattttaaaagttttttttgctaacattttattaattatacgctaatgaactgttctgttttctgtgctagaagggaaggttcccaataggcacaaacaaacgcattccgtatgtgtttagtactgaacttacagcttaattaagaaaatctctttttttaaggaatttaccaaatcttgtaacaaaatggtcaccttgaaagaaaaatggggcaggatatcccaaagaaagaaaaatggtagaaccacaatcttcctaagtctaaggattaattagtatattttacatgattttagctttattttttaacttttaaagtgtaataggtgcactacttctgtttccatcccaaccaaagaaaattctcttgatacaattgaaaattgccgtcaacggcaatttgcgacgacgtgggatttttttatacatattttgcaatgggtgttccgtagtgactcattttagttaacattgtgactgtgagaatattcatggatttagcaaataacatgatttagtcagggttttattttacggccgatttggccaaaggcgttcatatcccccctccattaattgtcaccctttttttcttttgcaccaatggcctaagccccgaataccttataatgtagcccgtacataatcgatcaccacaacgccaatgccatgtgtcctttttttcgaaatcttcacgcagtggcggcttgtcgctatgcaaccattacaatcgctatgctacaaaatccattacgccggattcttttgcaattaattccgcaatcttctttgatattgtacgctgtaaaacatctactcaaatcaatacaacctagctggaaatataatgccgtaagtaatgcaaggcgacacgctattcaatccataataatctctgcagatatgctccataatcacctttgtcaacattatcacccatccataaacactacaatgcataatgaccatcttctcccctaccaaacatgggttgagttcgtttattagagctcctagctccactcccttatattttcacgtgtatgtttttaaatatatctgctatatggtgtgctttttaaaaaaaaaactttgaaaagttgttttaaaaatcatattaatctattttaaaagtttttttgctaacattttattaattatacgctaatgaactgttccgttttctgtgctagaagggaaggttcccaataggcacaaacaaacgcatcccgtatgtgtttagtactgaacttacagcttaattaagaaaatctcttttttttataggaatttagcaaatattgtaacaaaatggtcaccttaaaagaaaaatggggcaggatatcccaaagaaagaaaaatggtagaaccacaatcttcctaagtctaaggattaattagtatattttacatgattttagctttattttttaacttttaaagtgtaataggtgcactacttctgtttccgtcccgaccaaagaaaattctcttgatacaattgaaaattgccgtaaacggcaatttgcgacgacatgggattttttttatacatattttggcatgggtgttccgtagtgactcattttagttaacattgtgactatgaggatattcatagatttggcaaataacatgatttagtcagggttttattttacggccaatttggccaaaggcattcatatcccccctctagtcacccttttttcttttgcactaatggcctaagccccgaataccttataatgtagcccgtacataatcgatcaccacaacgccaatgccatgtgtccttttttttcgaaatcttcatgtagtggcggcttgtcgctgtaaaacatctactcgaatcaatacaacctagctggaaatataatgccgtaagtaatgcaaggcgacacgctattcaatccgcaataatctccgcagatatactccataatcatctttgtcaacattatcatccatccataaacaccacaatgaatttttttcacctactcttctttaagcagcaaaatgacgctcttctcctctatgaaaacataggtagcgaaatgaccgagaggggtagtatagtactatcacccttaaccccctcccccctctctctctctagcatcacattctctctcacccctttgacattttc

SEQ ID NO: 47870 - DNA, 1989 bp, Oryza sativa
cacagtgcttggtccctccttagccttcgccggtacgagcgcgagaagactcgtagccgccggcgcaaccagggactaagagagatagagggagggaagaggggaaagagagagtaaagagaatatgccaaacgggtcccatgattcttttttgaaaaaaaatactgactagactgcctcgtaggatgaaaaccacgtcggattgatgcaggtgagttatttgtctcgtttgaataattgaggatatgtaatgtctggtatttaagtttagggggtaatcgatcggccgtaatagtttatggggtaagtcacactttttttcttattatttttataaatttgaacgtaaatgtctagatccttaattagaagtatttatatttgaaaatgaaagatattccaaatatagacccctaaagggatttattgaacaaattgggggaaaagctcaatgccaaagtccttggcgtcggggtcaaatgtttcaacactaaccttgttggtgttgagcctcagcgctagttataatcggaaaagctagctcatgcgtgcgttggcggcgcacatttttttcgaaagagttagcgtaactaatggtattagtttagataatgacagtaattaaggtaagattttcccttttcttgaaggtttttttactagcagattgaaaagaaatttgtacgtgaaagaaatttctaaactcaatttttttagatattcaacacgaaatttgaactttcaagttaaatttgaaatctttcgactcaagatttaaactttgaagtcaaattttgaaaacttttcaactcaaactttgaaaactatcaactcaaaatttaaatttgtaatttttttttgaaaaatttgaactcagatttaaaagttttcgacttagatttgaaaacattcggctcgagatttgaaaactttcaactcaaaattttaaaacttacaactctagatttaaaacattcttcagatttgaaaactttttgactcaaatattttgaaaacacgtgcactaactattaaaaaaaggggaaaaaaggggaaaacacgtgagtggaggggttgcgcaaaaagcaaaacagaaggcgaaaaaaagaaaacatgaaaaagatggcaaaaaaaaagagagaaaacgagtgggggcgccagctagcgcacgccaaatagcaacacccagttttaattgcgttgacatccttcattcgacttcccggctgtcttaataagaaaacaaattataggaatataaaccggaagatgttagtttatcaaatgtctcacctttgttgacagcaaatcactagaatttaggggtgggggaggagggacccacgtcctccttccaaattatgttttctttctaaataaaaaccaattggtgaaaacgaattaaaaattgataacaaatcgataagattaagagaaaccagactgactagcaccgaagtttgagttttgatgctagtttatttggctctgagatattcaacctcgacattgatctgggtatacatatgtaataaggttttgattgttttttataaaatatgtttcctgaatgacttaaatgtgaaaaatccagtaggcaccgttaaaaaaaaaaagaagcagcagcagcagcaaggcaccctataaataaataatcggttcccgcacatttcaaaactacaaaagattactatggttacttactagttttatggcattgggcattatataggttaactcctcttttaatttgtctcaaacagtgatatgtacatacgctgatcgtttgcttgttggcttccaattagccaaagttgaaattcttaaacttaattttgagttattctagatgttgttggcttttaagccgtagtcaaaatttaaattcctaaacataagtttaagttattcttgatattaatttcactggtagagaaaccatctttggtcgggtcgccaaaatacacaatagtcccggttgcaataaaa

SEQ ID NO: 47871 - DNA, 2064 bp, Oryza sativa
ttgtgtgtgatgtgaatgtgatgtatctgtgttgaattttgtaaaatttgtgatgtatcgatttggggagttgaggatttgaggatttggggataatttatttgggattttgggatggggatggggtgaaatcgatatattaaaaacaatgaagaaaagaaaataataatggagtaaccggatctagctagcctagctctatctttaatcccggttggtaaaaaaatgttctatctttagtcccggttggtgttaccaaccggggctaaaaaggttctatcttaccaaccgggactaaaaatggatttttactcccggttttttcacccggtcccggatgggggttacgaaccgtccgggggttacgaaccgggagtaaagcccctttctccaccagtgtttggtcggtttctcagccttcacctttaaaccacgaagaatatatagaaataaaatcctatcctaaaattattgtttaggcttcgtgcctcgtatataccagatgatcgtcccgcgctttacgcgggatatatgttagataatagagaaatgatttacattgaaatattatgaaaatgattcgagaatgataatttagcatgtgtatgtttagttttagaataaaataaattctaacatataattactatatgcttacatattgagctgtgtatgtatgttttatgagtgctaataatacattaatactatactacaagtatattgagttgtaggtgtctatagcaaagggtagtagtaccactatcataccggtgagcacgataaattaacagcgctgcagctggtgcgaagaaccaaaggctcggttctgcgtatgcatgcatacatgcctttcggcaaggtcaacagccacgttccagaccacagtttgtcgccaacatggttgatgccgccctcactcctggaaacatttctacactccttcaaaaaaaagtctctaattatactatggtgacagtaaatctacagtttttatttttaatattgttcttttagtttcaacaaattgcctcataatatttttaaatattatgggatagttcaacattagtttcaaacaagtaaaaagcagataatcaaataagtaaataagttatactaagatatttaattaaaaaatatattttgctatgatatattgtgatttttttcttctacccatagcaaattaaagcttgaacattttgctagtacgacatacatgcatatggtcagtgaaaataaaggttaatacagctctgactataaaagcctctgcgggaaaatccatcagatagccaatgtgccgggacctaggagacagcaatgacctggatagatagatggtgaagcaaaaaccgcacattcattcaatcatgcatgcatccacatccaacccaccctactcaggtcttggctagtcaagtggtaactggctacccaaattggatctaaaatatgtactctctccgtcccaaaaaaaataaatttaaaactacatgtggcacattctagtagaatggatctgtacagaggtatgtccagattcatattactaggatgtgttgcatccagtactaggttggttttttatgagacggaggaagtatagcttagcgacattctccaatctccacctctggttcgaaacatttctgacacaaatttttctccattctgtaatttcattcgggtgatgtgaacaatttctgtctacattggatttaaagtataggtagccacattattcacctccaatctggaactctctgacaaaatttctctcgattcaacttcatttaggtgacctgaacactctttctaccagaaatttgtgtctccaatacaataaaacttgtttcgttcatgccaaatgccgccacagccttcagccaacaaaatgacaccgttcggagtcaggccaggcagaaggtatacatacgagccaatggaacaaaaaaagcaaaatggaaagacacaactcaaataaacaaccaaatacttagataaatgtgtgcagacatggattacaagcaagtaaatattagctatgcagaaggccaa

SEQ ID NO: 47872 - DNA, 2902 bp, Oryza sativa
ctatagggcgaattcgagctcggtacccttccaacaataacttcggtcaacggtgcggatcgggactagactcagggagaagttgagatccatatggttaaagataccggatgacaaagttggatacgagatggcacacggtggatagacatcgtgtgagtgagatctttgcagcgggcttcacgaggtttgcatgcagacgtcggtgttcgcgaaggagattggaagaaattgaggaggggtatatatggtgctacagtgcttcgggttactgtgtagcatgcatatatgtatgtgtactgtggctagcagtatatattgtatcgcggcttgcgtgcatgcatgtatgcgtgatatacatgtgtgcggctcgatggttatgcttgctggtgccgatgcatgcatgtgcagtcggcatggcaggcgacagcagcggctcggttggtgggcaaagccgagtcggctcagggagcagcagcgagcagtgaaggctcacgcgcgaggagatcgagtccgactcggtgtggtgcggctgcaggttttggtaaattgtaaagggtttgaaaattaagggattgagttctactgtgaatagaagttctacatctactttgactagtaaattttaggtataaatagatgagggttagggctaggagatatcgactttttggaaaataaaagttagggtttacttcgaggtttcaatcctagttcgtgagttgagagaggagttctctagatgcactttgtaaacacatattgatgcaataaagttgatatactttcaagtgtttcgtcgatacgtgtttttctagatcccgacggtttgaccgaaggcgagtcggcggtctaaccacacgggggcggtttaattgacgataaggcggtggttagaccggcagcgtgcgagctgtctgaccggcggcgacaggactacgtcaagatctccatcgatttaagggtaacttttatttccgctaaaagtttttgggtttttggttttctctactattcacccctctctctggtaggtttgtttggttttttgcgatcctataacattgatatatatatctatgtttacatattattaaaatacagaaaattaaggaacttttgcaaggaaatagcaatataacactgagtgctagcgcagctgacttccataacaattttctgcacttctctcttatagataattccagttgacgaatggattaagcatacacaagtgtaagactataaatagtacacaaatcacaatttaatagctcaagttactcttgataatttgcatcaacaataacagcagcggcactaccactggacaatctaaaaaagcgatagtacctgtcgtgatcagaaaataaggaacgcatgcagatgaagcgaacaccaaaagtgtagacggctccagcgacgggcgacggcgtcgtcagatctggtctccccgcttggccggggtgaccggcgacgggctcggtcgacgccgacgcagctccacggacctggcaggggggtggctagcagcggcgatggtggcggatgtggcggcgacgaagttggcgacgacggcggtggactgcggcgcgtgccgcgacgccagccctcgtcaagaaccttgctgccacgagggaggcgcggcgccctcgtcaatgctccggcggtgaacaccgtgcccgtgacgccttccttcatgtgccggcgacccgcgctttgcgctgcacctccgatccgcgccaccccggtcggatctagatggctggcgtctggcgacgctggctagcgacggtggcggctggacgggggtgtccgtggcggtggcggtggcgatgatggctgacggtggcggctggtgacggtggtggctgtggcaatggcggtggcggctgtcgacgatggtacctatagcggcgatggttgaaggccatcatccggctgacggtgcgtcgtcgtcagcggtggtatgtggaggcggggaaagggtctggtagcggggaaggaggagtccgggtgcgggcgcgccatcgacggcgggaacaattgtgggcggtggccttggccgaatcgctgaagggacaatgttgttgaccgacgacgatccttcttgtgcggattggtggtgtgggtttggacagggaatcgcgggcgaaagccttgccgagccatttggccggctgacaatggcgacgccgtttggcgttgttcccctccttggaggtgttgttttagcgtacccctttcctttccctaccatattctctgggtgaaaaccttgcttcggttccgaacgagcggtggcggcgatccacgtcgcatcctccttgggggcaccgctttggagaaacctcttcgtgcaaggatattatcattggtctatgcactggcttcgaacttcagtcctaggcctggacgaggccttctagctccatattttgttttgcttttctcagtttgggtcctctcttctcttgtttggtgtgttcaacttgtcttggactacactctcttatggagtggatctttgtaataattggttgtagttctttttaagtaaaagccaggatattatattctattatctaaaaaaatcacggggagtcagcgaaacaaaggaaaagaggtgctccgtgcttcgatggccgttggttctatgcccggcggtggagggcggcggatgaagggcagcggcgagctttgccgtctccagatttgtttctttatttggaaatcgcgaatatacaaaatacgtatacatggcagtaaaaaaaatcaaagttggcatgtttctttatcgtgtccgaatcggtttcctcctgcaagatttttttttgaaacattatttccgcaagatttttggaaacaatttaacgagtatttaacaatcctatcctcctca

SEQ ID NO: 47873 - DNA, 3505 bp, Oryza sativa
caaccccgaggtgctgaacgcgctgaacgggcgacggacgaggccgcggcggaggtgccggcggaggacgcgcggcagagcggcgtcgagggaaagatcacggaggccatggcggcggggaggcggcggttctggcgggacgccgccaacgtcgaggcgctcggggaggcggaactgccggtgttcgaaagggcgctccataagctcaggggcgccgtcgtgcgccgccgccgccgcctcgccgcagcaagaagaagctcctgaattagacattacaccgtgaatgcttgttaattaggtgccactgattaatcaattgcaaacgggtttagggctgccatttaatttgctccgtttttgtttagagatcgagcagctgcaataatgttaaacttaagcatgatggtatgttaagagcttttaattatgcgacggaagaaatgcctttcttgcttgatgctgtcaataatgttttgatcacaagaaattattaatgcatttgtgcgtctacttgttacataaaaatctacttggtacgtaaaaactagatgataccttgcacgttgccacagtataatttgtaatatacatttgtatgtcattgcaaataataccttggggaacattatatataacgattgaattattcaaaatgaaacctcagcaagtttttactgaaaagagaattcaagcaattgtaaaatacaacctgcaaattgtcatagcttatgaatctagttatttagtagtagcagatagtagctttagttatctatactaatataaaaagcatgagttcatcgaatacctatctttcctgacccttagatctattcatccaacggcttatatcaaaagttgaatcaacctatgcaattagccatccccacgttcgattagcagcagttatagcgatacagcgatcgatcacgagaaagaagcggaaaagaaaaaaaaaaacttctcttccgtgccttagcccgtcgccgcctcctggagccgctcgccgcctcctcgcacgcgcccgccggaccgccgggcaccgccgccagctccgagcgcacacccgccggagccgcccccctaccccgccaccacctcgcgcgcgcccgacgctcgccctaccccgccgctgccgcctcctcgcggccgccggtgagccgggttcaccgtcggctggcgccttctccaccaccgccgctgcctcctcgcacgcggcctctggagttctggggtcaccgtcggccggctcctcctcgcgtgcgcccgccggggagctgtggtgggttacggcactacgcagtacagactccaggttaaggtgatgtcctctcttcctaaatcctcaaacaacaaagattttgtgcttttattattttggggtcataaaattgtttacataaggtttgggcagggttgcttatgatacggggccccaaatgtttagtcaattggttctctcgtctcgctatgttatttgctcttgtttaggagataattttacttgctatgaattctgcttgctaagcatctcacaagtatcatatcagtcatgcttcctcaggaaatgtctaaaaacatggtggactgccgatcacacaaatttattctacaaagcaattatcagttaatacctaaggacttggctgactgccgattaccgattatagtgtaaacggtaagcatcagttgtggcagtgcacataattgaataaacaaaatgcccaatgcccctaattaatctgaaagcaatccatcagtttaataaattaagttgtgggatgcaggttgcaattagtgtttggccgtcaggcatctggcattaattagcattcggccatcaggcgtcttgcattctgtctgcttgctttgcctatttgattgggttggatcaggggtccaatgtgatttggtctgggggtcccacactaaaattatacatagcctataggttccacaatatcgttaaccaaagcactcgcccttcccatattcaagtggatccccattgatctaggttggcaaatcttactacactatttcgttacctcgtaagtactaagttcttttatggaacatattttcagatttaattccaatgataggcttgaagatattatgcagttttttacttattggagttgatgtgatggagctaacatcagctggaagtcaccttgaaaatggcacattttgtgtcttgcccattaactgtcaagtatggcacaattattagtgtgttttcccctttctgcggtgcagggagacgcatattacatatgtatccctctattctctggatcaaagagtgcagaggtccttcaattgcattctacggggatagggttcataattgaattgtttagtgatgtttgcaatctcacaaactcaaatgtcgttagcctctcttgaagacaagaaccattagtctcataaattatcaggtttggattttagcagttttaggttagattataattccagattaaagtgaaaatgatgaaagttatacattaaagattttgagtgaaaatattaccagattttttttctccaatggaatgttaattgttaagtgcaatatatattcttaattaaagttgtgtgcatagatgacctgccaacaatactatcccgtattgttcagtccattgatgattgaactggatgtcaactccatgtcctcattgtcttgataggcacagggaggcaacaatccaatccaggagagatgggataggatcccagctcaagggagccctggtggcagctacggttgggaggacctaagccctacaggcaagctctataatcaacccccttttgcttaccggcttccagtgatgcaggtactgatcccctcctccagtgatgtaggtactgatcccctcctccctccctctccctccctctttatcacgacattagctgattgatcaccagctttttattccgattgctccagtgaactttgttcacaaaatagtgtttttttcattttctgatgcttgtgtctatcgtgtgactcctccgccgacatgtacattgatatctgcccaactgattgatgaaatgatcgtttacattttttttgttcagtcaatagtttctgatcagcttggagtggtctgtgccatgttgctgtgataatgctacaggttaatcctcctggctctctgtacttaaacaatttctctggatctctttcccttttgttttggacgttatacaatctgttggctaataatggcattcatgaataatagatcatgttaaagctgtttgcatggtctgctgttgtcaaatagttttatgcagtcacaactcttattaaatgatcaggttgacttcaagcattgggctaaaaactaagaatatgtaagttaaataacatatatgccatcatcttcaatttaagtgatattgtgtcaatcttctgatcaactgttcacatcttcggattatatagattcatgtcacctgtgtatgtcttcggaattatcta

SEQ ID NO: 47874 - DNA, 926 bp, Oryza sativa
aactcagccctaagggatcaaaattgaacttattctgtgcggagtgtacatgcggcccataatgcagccaattgtgtggagagccacagccatctgatctgatcttcggtcccggttgatctggatctatataaaagttcggcagcccaaaccctaaccctaaaatcatttcccctccccctctctcttaaaacgacagcgtcaacggcgcctcttcccgtccgttgtagcggcgctgctccccctctccctcccacagtggcaggcagcggcaagtggtgacgccctcccttttgggaggagcagaggtagcgagcagggtggtgccctcccctccgctagatctagcgggaggggaggcagcggcggccccgtgtcccagcgatggcccggcgtcccagcagcggcgcctctctctctctctctcaaaacgacggcgccagcgacactgttcccctccccctctcccaccggcggtgacgccgctccccctccccctccacggtggcgggcaggggcagcgccctcccctccgccagatctagtgggaggggaggcagcgtcagcctgacatccctgcgatgacggcggcggttctatggcgacggcagcaccctccccttccggcctcggtgtttgagcttatgatgtgtcttgtgttgtcgttgttgttgatgaaatatgttcttgtgttcttatagtattgttttctccaggagttgggtccaaatttgatgcggactcgcattaagtgttaaattgaatcggactttctcttgtttttttgtttgtatgtttttataacccttttttcgtaattacggcgatggaaacgttttcaattttttaagtagtagagatagagattacgattaagatatatcgcttcagaagtgtttttaattaattattatacaataaaaaat

SEQ ID NO: 47875 - DNA, 668 bp, Oryza sativa
gactccggcttcttaaactttggtgggtgtgttggcgatgagatgcaatgccctttgcctctccctaagggtcccttttatactagaaaatacctcaactctcaagcaatacttagaaatatataaaccaacaccatatattagatattttaccttttccaaataaaacttcaacaattccttaacttcataaaagaatattccttaacttaaaacaaattcctaacaacctataccaaaaccatccacatatataaaaatataccttatccatatattccataactcatcaaaataaaaaatataccttatccctaaccctaacacatcccaattccaacacacaacaaatcatctaaagttcccatcaaataacacttcaccttcaattaccattaagaattccaacagaaaatttcaattcccaaactaaaaaataaatactcaaattatatttttattatcaaaattcacaattaaactcttaaaatttaaaatattaaaaattaatttattttttcactaattataaataatttttttaaaaataaatccaaccatataattattttcacacttattttacttttaaattaatttaattatacacctaccaacttaaaaaaatccaactttttaaaaaaatttgtatttcaattaattacata

SEQ ID NO: 47876 - DNA, 690 bp, Oryza sativa
tttctttccttgcctatccaagtcttctcgctttcattgtccatcaagccttctcataccaactcttttaccaaatcaaagtaaatttaccattccaactgacctagcatatttaatatatacttatgcccttacaacatcgtacctcctataaaaacgaatctccacatttatcctcgatccattcaagaacttctttcactcgtgaccttaattagttatatagagttgggtgggtgggaaacgaaaacctcctataaaaacgaatctccacattatcgtcgatccattctagaacttctttcactcgtgaccttaattagttatatagagttgggtgggaaacgaaatggtcttcaatgacatatccttaaactcaacatgtgtaccaacgtaaggtttcatcactctaccaccatagtaaacatgaacaattctatccatctacaccaaagaataaaatgtggctttacaactaaaattacatcttccttcctaaacgtagttcaaactaacatattataaccaatgcataacttagattgtcccaaagctactacttcacgaaaaatatttaatccacatccaaaagtaccaacaactttactagtgcattaaacatcaaaatattacaaatactccatcatacaacccaacttagttctaattaactttaataaatttctataa

SEQ ID NO: 47877 - DNA, 573 bp, Oryza sativa
attcttagaccacctcaattgtgtcgttcactgggtgccgtttagaaaatgggcatcaatggatgtttcccaacaggtatctatagttgttcttgtacaagtgggtacttgtgtgtagtaccgtgtaacatgcatagtgattgctactagagagaattaagagatggtacctgtctatactacatgtagcgtggaacactgttgttctcattttcacggacctatgcttgaaaccaaggtatcatgtcctaaacctatgtgtactatatatatcggcacaatgatcccgcggctctatgcgtttccaataagattcgcctcggcgatgttaaatttcgagcaaaataaggtcagaggtgtttctgatgacaatagcacttcaggtcacacgttggctgagtactatacctcagttttcgcgagcactctttctaatcaaaagctgctaaacttaattaataatgggcagcatttattaaaataaatgtaaaatttattttccaaattaataatatataatacttaatttatcatgagtcaattagccgttgaaaagtgtgcctggttaataag

SEQ ID NO: 47878 - DNA, 567 bp, Oryza sativa
catgggcgactgcctccagatgtacgacaacatgaaatccaacctgaactcggcggcctcggcgctcaagaagggggacaagaacacggcgcacaccatgctagactccgcgcgcactaacgtcgacacctgcgaggacggcttcagcgagcgggaggggctcaatccgatcatgggcgacctcgacaagatcctcgccgagctctccagcaacaccatcgccattgcctccgccataattgagtgactcatctcattttctctctgtctttctccctctgaccgtcttgaacaaacaactgaagtgtatgtagtatgtaccgagtgtttcaaaagctgaaactgcattatgtatctgtaccattatgattgattattatgacttgtgaaattgtgaattgtgattatgacatccatccccttttttaatcttgggattcttggttaatcagattagttaacttgtcaatggggaggaatttcctataggcgccaacattaatcagcaaacaaagtttcacacacacacacaaattttgttcagaatttgtttctttcaacagggga

SEQ ID NO: 47879 - DNA, 615 bp, Oryza sativa
tatgacctccttgcccacaaggttgggttcaactaggctggagctttctattggtgtccatgctgaaccactttcattatgatgtctgcggttgagttttaaaaatacctcatcctttgaaatgtaatcgatctttttgttcaggcttctaatttttacagcaacttcatgacgtatacgaatattagaaaagcaggatgaaagtgaaaggccactgcaagcagttgatttccttgacgatgacataggatagtcaggcagtaggacacttcctttaaatctagccaaatcaataatatcatcaacatcatacataacatctcttagctggtcaagccatttttcaactactaaatcttccatcctccttgcctcagcatcctgaagagaagatcttatgacgtttgttcttcgttgcagttcttcaagctcatcttttacccctaaaatgagtattgtcttgtctgtaatgatcgcttgcaacttattgatgcatgatccacccaatgtgtctactattgttgccatccgacaaactcaaaaggggtaatccaccatatataattgatcaatgtaaaaaatgcagcctgacatgtaaccaaacttgtgttaaca

SEQ ID NO: 47880 - DNA, 913 bp, Oryza sativa
tggggtgaaatcaatatatttaaaaataatgaagaaaataaaataatgaagaggaaccggaaagagcaaccggattagcctctttagtcccggttggtaacaccaaccgggactaaaaatggatttttactcccggtttttttacccgggactaaagatagcgatctttagtcccggattcgaagtcccggttcgaaaaccgggactataggggggttacgaaccggtagtaataaccctttctccaccagtgtgaaaagaataaataattatttaaattttttaaataagacgaatggtcaaatacgtactaaaaagtcaacgatgtcaaacatttttaaacagagggagtacaagctagccgtcatgcccttaatttgggctatagctagaatatttgcttacatttatgcgcgttgttgcatttgtaagtgtagtgtgttcttcgtccccaccctctcgttgattggagcagttgtttttttttcttttaccgagttgtagcctttgttttttcgttttttcttctcaccctttggcataggcttatatggcggattgtgttgtgtaaaaaaaaacccttttccttctaatatattgacgtgcaattattctgtgcattcgcgaaaagcattgtaaccttatactatatccatgcaaccacaatataagatgtaaaacatttctattatctaaaaagttttgagtctttttatttatctttctccgactcactcattgattgtgtgtagggctgtcaacgagccgagctcgagcgagctcgtctgcctaggcttgagctcggctaccgagcttgaatcttaagtaaaacaatatatatttcaaagataatctttaaaaaaataattaatttctagttcatcatattaatagaagaggaaaaaagaataaa

SEQ ID NO: 47881 - DNA, 513 bp, Oryza sativa
tttggctttagcttattcattttaggactaccgatggaactctatcatgtaccatactaccatgcaacatgaatggagatttggtcgacggaagagaatcttgcaaagataatcagacataattcagcgatgcaggaagactgaaactggaataacaattgcaagtcgatggatatgaacagcccaacgggctacaggaacttaacaacagtggtaaaagacaaggtcaatccaacatggtaaactcatcagttctgctcatagccagcgacataaccaacatcatccttctttcactttttacattcagaaaaacctccagatccttaactaacaactgaaagatcccacttaagttctaacccaacaagcattggaaacagtacgcgatattagccaccatatgagtctgactaccacaactgatactgcagcgaggaatttctggtgctaattaagcggaactttgaggaattccacctcatagatcgcacctgatctacgcgctttgcc

SEQ ID NO: 47882 - DNA, 538 bp, Oryza sativa
tttgattcatagcataggaaaaaaagcggtaccaacaaatagcacaagaatttttcgctttcgatcaaaagcacaggccaccgttttttcttcgccccatagcacttccgtcaggtttggagctaacagagttaggttgaagtatataaaaattttgttggacccatttgtccttcgtcttcctcgctgtaatctcccatcctgtgtcatctcgtcctctcgggttagtgcccacgacgacggcgtcggcaccgtcgccaatcagtgacgcagcgacgatccccgtccccaggcgcgccaccgccgtccccatccccaaccgcactgccaagccgaaccacacatcttcaccattctctgtccctgccggctcccgtggcgatgactgcagcagctgtaggagccctagctggtttccatcgggccctaccaccgcggccgagacgagctccgtgccacaaagcaacacaagtggcgcttcctccgccgtttcctccagcgagcaccaaccgtcccgctctcttacttcgtggacgcg

SEQ ID NO: 47883 - DNA, 1116 bp, Oryza sativa
gtttttaggtcggggtgaggcagttgctggtcaacgagggaagctcaagttgccgaaccaatgtcgttcagcctcgagttctacttttgctgaacatggcaagaaggctagctagcggatggagggaccgagaaggcctaggccaactcttaggggaggagtggtaggataaagcgagctggtggtagggtactacggcaagttcggaagtcggccaacgaagggacgccggtgcagtatggtggagactacgcacggccaatgggcctgttggggatggggagcagccggatcagaaccagactggagtcggtgtctgcatgcctataaactaaggctgtgtttagatccaaaatttggatccaaacttcagtccttttccatcatatcaacctgtcatacacacacaacttttcagtcacatcatcttcaatttcaaccaaaatccaaacttccccctcaactaaacacagcctaaacagagtcgggctcgcccgacgcgactgcattgattttggactagattttcacttttggagctaatttgggttacagggacaagagagattgggatttggagtaacgtcaacctaaatgagtacgtcttgcacaaagctctctttcgacaatatttgccttttcccattcataagtattatagacttggtgtggtttttctaaaaaatgaaaatgatttacatcttcattatatatctaccaacagacacacaattagggctgtcaaaaagcttgaggctcgcgagctgctcgagctcggctcgagctccagacgagccgagcttgagcttccaacgagcttagtaatatatgatttttgttgttatttaataaattagaaggtcaaatatgttatttgtatatcttatattgacatcatatatttattttattcttttttcctcttctattaatatgatgaactagaaattaattatttttttaaagattatctttgaaatatatattgttttacttaagattcaagctcggtagccgagctcaagcctaggcagacgagctcgctcgagctcggctcgttgacagccctacacacaatcaatgagtgagtcggagaaagataaataaaaagactca

SEQ ID NO: 47884 - DNA, 1116 bp, Oryza sativa
ttttttcccggttgatgttatcaaccgggactacaaatagatctttagtctcggttggtaacaccaaccggtactaaagattgaaaagtatcctgtaacttttaaaccgggactaaagatatttttagtcccggtttttaatacaaccgggactattgtaaaatctggttgaccgaccaaagatggtttctccaccagtgtcatatcatttgattcattgttaaatatactttcatgtacacatatagttttacatattttacaaatttttttaaataagataaacggtcaaatatatgctaaaaagtcaacggtgtcaaacattttgaaacggagggagtagcatggatcagctgccggagggcgatcgacgaacgatataaccctatatccgtctggctctagcgacgacgtacgcacgacggcgacggccagccgcgccggcgtcgaggatccggcccaggtgatcgccgccgacgtcgtcgatgcgacggagcacgcgatccgccaccaccaacggaactccggtggtagtagcagcagcgcgacctgcgccggggaagaagtactcgcgaaggtcgccgccgtggcggtggcggtggtggtgcggcaaccgacggcggcgctgccgtttctcgccgcggacgtcgccgtcgtcgtcatggaacctgctaattaagctgcagtgcccgtaccgtacgtcgtcgccggtgagaatcaattctagtagtctagaggtagcttgttaatttgtgtctataatattctttggagcttgtgttttaattacaatttatgatccgataatcgtggatccgagtcttaatttgatagtttgttagtgtaggactccgaatcgacgatgatatcgactccgactgcgtacgtatatactgaccgatgactggaccagctggaaggcttatcaaaaggaaaaagtacaccgaaggtccctcaacttgtcatcgagttacaaaatagtccttgaaccgcaaaaccggatacaacacgtccctcaacttacaaaaccaatgcaaattactaggtccctcggcggtttttgactccggttttatctgacgtgacagttgactcagtgtgggacccacgtgggtc

SEQ ID NO: 47885 - DNA, 665 bp, Oryza sativa
tgttacacaacgcaatgcaaccgcccaggcgggcaagcccgaggcaaaggaacaagagaattgaaaaaaccaaagactgctagtgtaaagagagcgttgctcctgtatagaggagaagttttccggtatttgcattccagaaatagtaaaaatccaacgctccataataaaaggtatcatacaaaaagtatttaagtattaatataggtacttaggtagaaagggtaaaatgataatttgctagaagatgaaaaatggtagaattgtctatagtattagttgtaggtacataggtaccgcatcagtagttcatcaccaaatatgcggtaagtcatctccatcgcctctaattttccattatattatttgcattgtatttttttatatttgcatattgtcgtgcccttttcccgtggctgtctctaccagttttaattttttttcttagtagcgacaaaataatgaaaatgtagatgagcctatactatgtaaatcttcgcatgaaactggttatcaatttatcgcttgaattcgatatcttttcacgtgctgacatctggttcgatccatcttttctgactgaaccaaatgcatatagcagaactagatagaaccctcttatctgaatatcagttaattctgcaagagatcaagttacgatcgaa

SEQ ID NO: 47886 - DNA, 533 bp, Oryza sativa
gagctcggtacccgatcaaggagtgcttcaagaagagcagtatatatgggattactcagatgaagcatatttttccttcctagtagatctcatctcatcaatcagaaagcagacagaaatggacgcaactgatcctgttgaaaatccgtgccctgcagtcaagatgagcatttacggattaacttaaggaaataaaggaagtaaattcagctatatgtattgagcttacccacagccggtagaaatgcagtgtaagaatgcgacacagtggaacaaagcaacagtactgcaggaggctagggagtgatttaggaaaggtggtaaggccttacatatattgtatagctgaacattcagactagctagacaactgctgaaccactcttcttttcttttatctttcccatggtactatccctgacaaaattttaagttattggccacatgtctatgctccacaacccaacattttgtgtatattcatcagaagaattggaccggcttagtctctccctggcagtttgatcttgttt

SEQ ID NO: 47887 - DNA, 1179 bp, Oryza sativa
cctttttttttttacttctcaagacttgttgtaatgactatcatttctagtaagagaaatgggggcgctatcgccctaattctaaaaaaaaaatttgtgtatattcatgaaccgtctaggtagctatggctactccttttcttattcatatccccaatcatcactaaatggtaattgatttcctgcacactagcgctgaagcaattgttctagtaacaccatggaaacgcaatggtctttgtcaaaacgttaggtttgttagaatgcaaatggtgaggctcctgagagagtacttaattcctactaatagaccttacagattagtagggaactttgcgttttccttttcgtacttctattagctacactcacatattctagggcactgatcaacagctgcaatagtatattgcaacgattagctggcgcctgggctctggcgatgtgattagtttacagtttatttcgatgtgattaatttagagtttgcttccaagattccatgatgtgaaaccagctgcgtgctttattgccgttacaaaggggtgagcatacacatgcttgagttttgtttcctccgtcacgggctcaatggcatctcatactcattgtttgtcgtcttatccctcgatttgactagtaaacatataccaattcatggcataatgcaaagctctattgcctttacatgcagcataatagtagcattaattacaattaatttacatgtcactccctccatctgtgattgcagctggggttgcagcacacgaagataagtgtcatgccttcctttcccctcgctgtgcctgcatgcaacaacaaaatcattttcagcattcagatttcagtagtttctatgtaattctgaactctgaacaaactgcttggtttggctctgatcgacaatcctgacctggaagaaggcagcttccccgtggctgcatgaagcgcactggacgtacttggtgatgtgattataattagtttacgtgaatattatagtccatggtgttaaagcaggcgcgcactttgattagaaaagaaaaagaaagacgtgcacatgattaagttttgtttcctccatcatggaatcatactactgcacatgctttcagattgatgaccatgtcaaagaaggaacatacctgatctgaaagactgaaaccatagagttca

SEQ ID NO: 47888 - DNA, 554 bp, Oryza sativa
ccaggggaccaggacctagtcgacggcggaggaagtagatggtagaggagatccggcatccggcagcgtggtgagcttaagcgacagcggcgccacgagcccgccggctatggcagcgagacagattcccccgagcggcgatggagacagtggcggacctctccctggagcaacgtgagcgaaggtggatgccgaggccggcgtagaggggatagaccggcgggagtccgcggtggtcagcgtggaggagtcagggacgcggaggatggcgcggcggcaactcggcaggaccggcaagtgtggtggccaggcagtcatcgggcaccggctgacggtctagggacgttgaggtcgaccggcccggggacgtgcgccacacctggggcgaggccgccccgacgtcgcggctggagtccagccatcgccgagttcccgttgatcacatgatcacctttgccaccgcgccgtcaccttgggcagcctccgccgcgccgctccctgtcagcgctgacccgccttcgcggtcatcttcgccaccagcactggggatcgac

SEQ ID NO: 47889 - DNA, 638 bp, Oryza sativa
cataggattctcacatagatatgcctttgctcttgaagttctttcttcctgaagttctgtttcgtcacagacatgagtaaaagggcgtaagagttatttccagctggcctctagtgtgaacatgcctattcggttttgagaaatttcacaggaatttttaaggaattgaactatttcctacgaaaatcttgtaaaattcatgtattccgaaggaggcttcaacattctagggatggccaagaagtaagcaatacaagttctgctaaccatcatgacatggattgattatccaatatacaccgacaggtatgcaaactaaaccaatcgtgaatcgtctttcctaacatagagttgcaagtttgtattcgtacttctcacttctttttccttctgaagtgagtttcttttttttttcttcttaagtgagttatatctgttggtgatgctcttatggtcaatcttaggattgtaacctatatgttggtgatgctcttatggtcaatcttccagtctagatgttttttttccctggggatttcagtgctaacttgaagtttcctcccatccttagaaggtatataccttcttaccacctatatatggtagttatattttcagctcaagctagctttgcataa

SEQ ID NO: 47890 - DNA, 661 bp, Oryza sativa
  unsure (1)..(661): unsure at all n locations
tggcactgaatttcctttacctacttgtctatctcaattcgcaacataactctcaactctgggggtctggtcaagcttaaatagttctgaatcagatgtttccaacagagcaataagactggatgagtctccaaaagtgtttccataactattccatcattgaaaatgaaattaatctgataaaagtgtggaaatatcccaacgatctactatgtggatggagagcatcatttcaaccaacatctatacaagatgttcccctcctttttccggccttgggaccggctatgtcatttactaaacctaggatgacatagccggagttacctacccccctacaataaaaaaaaatttaaaaaagaaacacacacctaataaaacacggcaatgtattttacaagagcttaagaaaatttaaccatttttttggcattttcccattttttgatatttttacttttttaaatttttcatttttttaatttttttaatattttaaagaccagtaactaggtaaagacaaaaatatagattacaggtgacttgcacccaaatccttcaaaattaaccttcaatacanataagcccacacaattaaatcatggatgtatatacatacccaatttggtaattaaataacttaatttaggaaaaagaaaat

SEQ ID NO: 47891 - DNA, 529 bp, Oryza sativa
cacaccaccacgcctggctaatttttgttgtatttttttagtagagacagggtttcaccatgctagccaggatggtcttaatctcctgacctcgtgatctgcccacctctgcatcccaaagtgctgggattacaggtgtgagccaccgcgccttgcctcctgcattccttttttaacttgttggtgttctacatttgattgcatttaaggaagggtttctgctgctcaaacattttgacagctggtggcctagatagtctctcctgctcagtgagtctgaaagctgaccacccgcagcctgcttcgccagctgagaattgggcccaagcacagccaactttgatgagtggagatagatcactcagactatgtgatcaaatcaaaaaaagaatttcgggcttaacaaaatttattgcaatttgtagaattgaaggcagcacatgaatggctaaagaaaaatggtctattccaaatccatattaactactgtgctaccaggtccatgaccggcacgggctgagggaggggg

SEQ ID NO: 47892 - DNA, 588 bp, Oryza sativa
gctatgaaaattaatcaatgcaggcctttgcctctaccagttgtagagcacgtcagcaaaaaagaataacgagaaggtgtacagtcagggtttccaaggctgcaataattcaccctccatgtaatgcgatgaaaagctgatgtatcattaatataaagcggtggtgtccttatgaccccaacaggcaattccacactgtgtcctcttctggttggggagagagaggccaccaaagagaagcacagctggaagagatccatcagggaagagatagggtgtggtaccaagcagggaggggccagggccccatcacagcagctgtgatagagaggtgaccagagtggaccatgaagccagacagcctggcttcatgtcccatctcctccacttactagtgacatgactcagttgtcccacctgtaaaatgggaccaaaaatggtaggataagggtaggaaatgaaaatagctgttgggagaattaaagaagttcagtaagacacatatcaagtgcccaggagatgttagtggccaaccacctgttagaactggaagcattaagacatggtgagtctgtctgagtctgaatt

SEQ ID NO: 47893 - DNA, 535 bp, Oryza sativa
ctagtaaaaaaaccggaccggcccagcggttgaatcgtaaaaccagaaccatgcctctcaccggttcggtttagtagaacggacggctcatgcatttgacccggtaagaaccgagtgaaccggatggtttttagtgaaaaccggcgaaccgggctaataagaaccggcggttcattgtaagttgggctaacgcttgggctagccttgtaaggcccatcatcctacaccacgggccatttatattttatgcaaaatataagagaaagcatgtgtgggaagtgatttgaacccgtgacttgcggattgagacattgggcctgttcactttgatgccattttcaaccttaccaaattttggtaaagttgcaaaaaaagtggctacgggcctgttcactttgatgccatttttaaccttaccaaatttttggtgaagttatcaaaaaagtggctacatttagtttgctgccaaattttggtaactatataagaaattctgccaaaattttggcaagttgtcaaaattttggtaactatg

SEQ ID NO: 47894 - DNA, 704 bp, Oryza sativa
aaataatatatttgatctcataatttattaaataacaacaaaaatcatatattactaagctcgttggaagctcgagctcggctcgacaaagctcacgagcttagagagaggctcgggctcggctcgtcaggagctcgagctgagctcgaatcgagcctaggacgagccgagctcgagcagctcgcgagccttgagctttttttgacagccctaatgtgaatatcagcagcgagcgagctagaagtctagaactgtacattaacgcatatagtttttcatttgctgtcccctttggagagattgaataatgtttaaaacttgctacgacgattaattagccagatatttttcaagtgacttaattacctatgatttttcttacattttagtccttttaaaaaatattttctaaatagatccctaaaaatgtactccaaatatacgctcttcttggcaccacttaccctggctctgaggtccagcatgtcggcacgaatgacgctggtgatgagatgttgaacctcggcacaaataaccttggcgtcgagaaaatgatccaatttcaaaataagtctttttttagaaatctatttataaaataaatttttaaaaagagctaaaatgtagaaactataacttagggcctgtttgttacagctccaactcctaaatttaactccaggagttgggtctggaatagagtt

SEQ ID NO: 47895 - DNA, 1668 bp, Oryza sativa
caacactaatataagagtcaagtatttcctattgtgatcagcaaaagcaaaaatcctaatctgatgatttttaatgaattcatataacataggcatgttcaactagaaattagaacgattaatactagtactatcttaaggttggtaattatttataaaagtaacacaacaagaagtgtgccagtaagtgccgaacatgcaagagtattatggatttcattaacaaaaaatatgaacctaacacatgtaagggaatatatcaaacaaaagcagaaataaaatgaagagacaactgaaacagaggaaacagatttatgcagaagatatttagatataaactgcaaaaaaaaagaacaggaaatgaagggcataaaaatgaaagcttcaatttatataaaattgaagatgctgacagaaaaaagtttactcaactccaaaaactagaacaaaatatgaagtccaacgattttctgatttattctttacagtgtacaatgtaccaattttttgtcctgttttattttcatgttctgttcccttctcatatttttgttaccatctgctacatggcttgtgatgctgggatatttaaccaattaacccaaacgaatcaagaaaaccagtagagatttggaaaactcatcgaactatgtaagaagaaaaataaaagccaataaggaaaactgagaaacaaatcttggtgggtggtaaaatttactgaaccacatatatagctcgacaaccaaattaattagcatcagatattgagtggaacagaagtaaaccactacggaattctgatgaacatccaagaaacaggaaatcctcccaatttgaccaccaacaaccaaacctcaactcctcaactacctgtctacctcaggaacagtgttaactattattgaccaaagtaagtaaaataaatgcaaatctttcctgatcaattcttgaccagaacacatgtacaatcgacaaaatgatgcagaatttgcgaacaaatcaactacaaaaaagaaatcaccattcatcctcattctcaaattgcaatttcatgatttggagaagcagagcagtatgagagaggttaattacctcgagcacggcaatggcgcgggcgacgccggcgcgggagaggcgcctcatcgcggcggcctcgtcggcgtcctccagcatcatctccaccgcctccctgatcgcctcaccttcacctttccttccaccggcacctctcctccgccgcctccaagaatctcccgaccaccctgcactcccttcgcaccctctacaccttcgacacctacaggatcacgcccttggacaccagcctgatccgcagcgcctccaccgacggaggcggaggtcgtggacgcggcatcagaggcagaggcggcggctggcactcggagacggacgacagacgcgcggaggaacacgccgacgccgacgcggcggcgccggcatacgcagtcgcgtcgtcgacaggggagacgcgggcgggcgagcgcatgcggcgtgacagcggcggcgccgcggtggcggcgtgcttgcttcgccgacggcgatgaagaggacgagcaggcagcgtcgtaccagcagctctgcagtggacggcggagaacgggtcgagggccaaagagcagcaccagggctggcgcggcgctgggccct

SEQ ID NO: 47896 - DNA, 1404 bp, Oryza sativa
ttttgtacataaatagcttataaaattattataagcagagacttacagtcagaatttaaaaaatgctatattcaaaatccgacaacatgacatgcatatagtaaaattatataaattggtgtttcatgataaattattcaagtttagtatagtcacactaaatctgtacacacctattcaaatatataaaacaaatcaaatttgctaaaacatatgtatcacacatgttggataattggaatatgagaggagaacaaagaggtaggtggtggccaaaagtccacatattatattctcagcgcattttattgtaactcctattattattttttatcatatgctccactttttaattaaaatatttataaaactaaaagcattacattcagatcttatactttttaattactttacactattagctgaactaatagcattacacacacactatgcttcatagtaattttttttccaaaacgtcttaacgctttacaactttttacaataaattatattttcgctttttcaataaattatattttcatatacataacatataataggatgtttagagccgcgcgaatgtgcgactacgtaacctagttttcaagtgataggtccttgatcaggaaaaaaacgaaaatagtttcttgccgtgcaccgcgagggcccacctgggggcagagagcccactgcccacagcatggcttgcaacttgcaagcagcagcacctagatcgaggcccaagaggcccatgctcgcttgctgacttaaatacgcaccggcagacgtctaaaaaagggaataccgtatcagaagtggcttgacgggagaaaaattgtataaataaggtgagtatcgaatcacctttagtttttataataggtaaagatagtttttataatagaaaatttctacaactttatttcataggattcatagggctcttttgattcataggattgacaaagaattttcatattattcaaattcctatgaattttttttgctatatgtccctcttattcataggagagaaaggaaacttttgcttcacgtttcttaggaaaatagcaagaggtgtgatctcttggtgaacttttctttattttccccatggcagtatcaaagaactcctattgtctttcatgtatttgttgatttctgtaggatttgaggaacataatacttcaaattctgcgtttttcatatcctgcaagacatataaaaaggaatgaagtacatgtgacatagtaaacctttactttttccattccttttatttagaaatcatgcgaaccgaataagccctaaagaaaaatacatttttaagcatttagagagcaagctgtatgtacagtgatactcgataccctatcaaaataagaattttgtcattttaat

SEQ ID NO: 47897 - DNA, 3791 bp, Oryza sativa
tttaatagatgacatcattaccttttggacacacgtttcaccattcatcttactcaaaaattttgtatatataacatacaaatcatgcttaaagtacttttagtgataaaacaacttgcaacaaagtaaatgataataacttatatcttttgaataagataaatggtaaaactggtgtctaaaatgccatctattaaaaacggatgtagtatgccatattgcaacgaatccaggtttgaatttttttattactatttatcaattgaaatgcgctcttatgtttaggccaatgtttatgcctaatcctctgaagatgagacatgaaaaggttataaaaaacgatcctagctatttcgcaggtgagattggacgtgtcaaatagtcataataaagaacaaattggctgggagaacgacaataccatccatagattttttttctctaattaattaacatctgacaattaattacctttcggtgttggattattcataaaaataccatcatcgtgcatgtaaaaacaaaaacaatcaaacaaactctggtccaaaggtgtgtccacatggctcatgcagaagcaaagaaggcgaaatatctgatttgtcatttttataaccgtccaaacgcaaaggatccgaatccatgccgtcagtcctctttcaaacacgtattatattgggccaattgcttatttgaccctgttttaaaagctaactaccaatttgaccctatttttttcagtttgcttatttgaccctgcttttcaaaatcgaagaggaaagctgaccctattccattaagacaagttaacaccgttaactaaggggtaaaatgatgaaaatgcccctaatacatccatctatcctctaccactcattcttatgtactctctctctctctccagagcactgcggagaagcggcggctcagcggcgcgacgcgaaagagcggcggcagctcggcgaccaggcgctggtggcggaggagcggcgactgcggaggagcggcggctcggcgacgaggagggcggcgggaggagcggcggctcgacggcgcgacgcggagggccaccgctggcggcggatgcggagggctgcggaggaacggcggtggctcggcgacaaggcggccctccgctggcggtggctgcgaaggagcggtagctcggcgacgaggaatacgaccggcgacgaggcggccctccgctggcggcggaggagcggcggctcggcgacgaggaaaacgaccgacgacggcggcgccggcacggattcccccacggctgccaccgccgtttcctccgctcctccctccgtgagccagctctgccgccacagcacctcgcggtcgccgccacacctcgcggtcactggcgctctccctccacaagccatcgccgccgcacctcgcggtttccgccgctctccctccacgagtcgctgccgccgccagcactcagagagagagagagagagacggaatacggggagagacgtagatatggatagggtttggtcaagggtattttggtcattacaaaaaataattgcatttctttcttttttaaaaaatgaaaacttaacagtgttaaaaaacagggccaaacggagggttcgttttaaaaaagtagggtcaaataagcaaattagaaaaagtagggtcatattgatagttaagcttcgaaacagggtcaaataagcaaatgccctatcatgttatatactcggaattaatgtgcggcatccgacctccagtacgtcttcggaggagcaaggcgtaatagctgtatgaactggatcaagaggctcttctactttcgaagggtgcgatcgtttcagctttttaggattagattctcctcgttttctgtttgcacgttttttaaactatattaaacggtatatttcgtgcaaaaactttctataaagaagttgttaaaaaaatccaacaaatttattcataaaaaaattatatattaatacttaattaatcatatgctaatcgtatttctcgttttacgtgcggctaaacagtccactgccaccgctgaaacgatcgcaccctatgtcacgtaactttattacagatatgtgtggtaaatcctgaacccatatatcaatgataaaaatacattgactttgaatggagacgatctcaattcgtttgtgctaatgttttttccaatgatttttctatacgattgtttgacgtgtatatatacgacagcggaacatatcgacttatgtcgatttccttgttactgtaaaacaaattaagtaaaaggtccaaaatatatgacgtttaacgattttttgttagttacatatcaaaatgcgtatatggtccttaattaaaatactgcatgttaagccagtaactttttgttttttagaggagagaaaaaaatagagccaaccttatagtcaacctattatatatgcaagttctaatataagctaatatccctagttagttctactattaaacttactagatcacttggagttaagattatcttgttctccatgaaaaatcttgcgaattaaaagggaacggagagagagagtacacgaaaattcaaaatggaacccaaccacacatgaccaaacacaatgacaagaacagatcaatacaatcatggtgagatcgatttgattatgttgttagtgtgatcagaagagcaattaaagcaaggcaacagatggcttcatctctgcttcagctttttcccaacagatggcacacacaaataataacacgtacaattcacaatactgtagtctgtggacgcatcggtggctagctcgtatcaccaatcattgcataatactagtcatggaattatctcctaatgatcgaggttatcattgaacatcacttaattgtgttctcgtcgttaattttctttccctaaattactgagcatctctagctagctgatgttgattccaaaagtaaaccttcttctttagtttacctttcgagcgtcgcaatggcctcttgatcagagcacttgacaaaacaccagataaacatatatactccctataagaaggtatattaaacacagatccagataaagtgttaaacatcaagataaatggtccgtaaaatacagattgagcctatatcagttttcttacattttcagataaaatttcaagaaggttcttgacgctagagttttgcaatcttgattgcacacatgaccaaaacaacgtgtatttgactattagtgactgcgtaagacttgtcgtgttcgctattgatttttcaactatctggtcaacaaatgccttgttactatgccggtgtttagtttacttcaaacttcaaaaaattctatcacatcaaatgtttagatatatgtatagagtattaaatgtgaaaaaaaaaaaccagttgcacgatttgcatgtaaattgcgagacgaatcttttaagcccaattacgccatgatttgacaatgtgatgctacagtaaacaattgctaatgataaattaattaggcttaataaattcatcttgcagtttacaggcggaatctgtaatttgttttgttattattctatgtttaatactttaaatgtatgtccgtatacttaaaaaaaaattgatacgcgaactaaacacggtctatatgaaatttcaaaatggaaccctgtcgaaacatgaattcggcaataataaaaggggtagcgcacgagacctaaaagtggatggatgcggagacaaggatttagacaggttcaggccctctcaatgagaggtaataccctacttcctgtttg

SEQ ID NO: 47898 - DNA, 3571 bp, Oryza sativa
ccaatacccaaatcatccggtctacgagtatcactcgtcgacagctgtaatatgcttgactcgggaggagcgcccgtaatcagtgccccaagaatgtaggctaaacctcgtaaacaaatatcgtgtcttagtgtcgtcttcatgtttagatctcttatggcgtttcttccgcgtttggtttttggtgtgctatcaaggcctgttttataactttttttttgaaaaaaaaagtccaaactaccccccatttaagtaccaaacattttatacctcaaactgtttaaaccgaataaactacctcataagcattgttttaggggtagttttgggaacatggattttaatctctcgggtggacatccacccgttttttccatgtcaactaaatggttatgaaatttttttcaaaaaaatacaagatagattaatatgtaatatatcacttcaaaaacatgcaagttcaaatttgacttatacaatttgtaacaaaattaacaaattaaactctaaatagtacatgtatattcacagtctaatttgctatttttgttacaacttgtagagctcgaaattgaacttgcatttttgtgaagtgatatattacatattaacctatcttatcatttttttttaaaaaaattcatagttatttaggtgacatgcaagaaacggaacactaaggtggcaatccaattaaataaataataaggtcccacctgtcatctctcttctctttcctctctctctagctgccttctcccatttcctttctctctcaacccaagctctacagcctcttcacccgaagtttgtcgatgcatgcagcatagaggcatatagaacagtctttattagtggtctctctattgctatgcaagtaaaggaggcaagagaaatatggttgttatgcatgacaacgccttacagtcaactcttagcttttattagagtaaattttgttgcatggtggtgaaagaaaggaaagaaaagtaagaaaaaaaaatattttgatacattaatggtagagagcatattgtctccaactgttatatagaacgttagtatctatatagcgtagagttcatgtatatctaagtttgtacatgcccggcgcgcggagctagccggggcttgcgcggagatgcccaccgaggctggggagctggataatcttgtgcagagacggccacaacggtcggtggagctagagcattaatttgtatacaacatatcagggataactttctgtatacaaataggtacatgatatttccggtggaggcaagtacaagtataggtacaagtacaagtacaaaaatatataagtataagtacaagtatagggtttagggtgtacttgtacttatatttgtatatttttgtatacttatatttttatacttgtatttttatatataacactgacaaaaatattgtttggcaagttataccgaccatagtatttagggactaacgtacggctgataccatggtatacgcgagtatgaaataaagaaagcatgtacaagaaatctattgatttattaaagtaacaaaataacgaaggatccgcattcgctctcacggcctagaaattctcatattaattggagaaaaagaaaaggtgagtttatatagaaatacaatttagaagtaactgaaattcaaaattaaaaagatgagaacattaaaagtagaggttagagtacatgtagaaatacaatataaaactagcggaaattcggaattaaaaaataaggaatattggaagaggaaaatagagtccatatatgaattcggaactaaaaataaaaaaactaaaagtggatgttaaagttcatatagaaatacaatttagaaataactaaaatttaaattaaaagaataaggaatactagaagaagagtctgagtccatatagaagtccatatataatataatttagaaataattgaaatttggaattagaaaaataaggagtattgaaagaatataaatacaatttagaaataatggaaattcaaaatttttaaaaaaagaaatattgaaataagaaatattggaagaagagtctagagtctatataggaatacaacttagactgataattgaaatctctacctctactattaaaaaaataaaattgaagatggttccgccataattttagtacgtcatccgtgttttaatcagcttcaattttatctttctgtcgaatcctttcttttttttccttacaccagagggtccctcttatctaagaagtacacgaattaattgtgcccacactgtttcacgcgccccttacccttaccgcaagtagcaaatcgggcctgcgcaggagtccgctttccacaaacgcctttacgtgccgctgcgattgggctcacaacgccctcgcacgtgtgattttccgcatgcccgattggatccgcgacgccctcgtgcctgtgatttgcgcttgccgcatctccgattgggattgcgtggctctcgcccacgatttaaaaattgaagatgtttttgtgaaaactatggtacgtcgtccatattcgattcccgtcacacttaacattcattgtgaagttacaacttgcatgtggactgcgaaacagagtccatgtgatgtggattccaagcgaataaatctcgcagagtccgtgtcgatatcacgtacgtcgctgcgtagatcatgttagcatgatttcaaatcagtctccatacatgctcgtatgtactactagagataccgttacaataatccgtaagaatcagttttactttcagaaaaaaaaacatgccacccggaataaaggatgatcaaagttgttgattccgtccgtcatcaattcctaccagacttgataaagctagatgaccaatccagctcaagtttgaaggcctcattgtttggcttatgccttttcctataagccaaattttaaattttagaattaattttgaattcaactttttggttttttatcgtactttattttacagcatttgcttttgagtcgctaagaacatgtatataaaagatttgcaattaaatagtcttttatttggtaataagtggttcggataagcacatgaataaacaaaataatgggttgtgactatttacccaccgacacatatgtacaaattaaattggctctacccattgcaacgcacagactccttttctagttatatttaaaaataaagaatattaaaagataagtttggagtccatatagaaatacaattagataacataaattcataattaaaaaataaggaatattggaagaagtgtctagagtctatatatgaatttaaaactaattggaagtcaaaattttttaaaaaaacaagaaaactgaaagtagagtttagagtccatatagaaataaaatttagaaataaattaaagtcgaaattaataaaaataaggaagattaggagaagagtatagattctatatatgaatacaatttaaaataactaaaatacaaaattaaaaattaaggaatattggaagaagagtcgaataaaatttagaaataagcaattaaaaaaataaaaa

SEQ ID NO: 47899 - DNA, 853 bp, Oryza sativa
tcgcaagccagacaaagagtggcagccggtgaaggggatatggtggatggagatggctgctggggagtgtggcggtggtgagtgccaccactacgaggccacgaagtctcaggcgagttagtgataggaaaagccaagccagaggtgacgaccagccctcaagcgactgctggtattttctacactcacaaataaatcggtaagcgcaaggatatcgctatagcatttcccccatgagtattatcaagggtatcatatttatatttccgcagggaaggcgacagtctgctttaatcaatatataattaattcaccatagtctaaacaggggttaaaataacactccctccatcccaaataaacaagtctaagattgtatgggatgttttctagtacaacaaatttggacagaagcttgtccagattcgttttactaggaaatttctcatccagtactaggttggttttttgtgggacaaagggagtaattgatgaggtagtagacatacacgagattcacctctataagaatatccagtagaaaatagcctaaggaaactacgaatcatctatacttctattctaatcttgtctagaataaacttaacatatacatgcttacaacctaggcacctaggtattatcaagagaccactccctgctagcatggttatggtatttacgcactcttacgtcatacccgaacgtgaaggaatacaaaggacggatagggctgtcaccacctgctgcctacctcatttttcactagagcacacccacatccaatgacatttatctagcctaagcaccatgcttatgcaataaataatatcactgactccctcgggactct

SEQ ID NO: 47900 - DNA, 836 bp, Oryza sativa
actttagtctataattcctgcatctaagttaattctccaatcataatacaactacattattttattattgatatacgtgtaagaaatgctaattttccctttatttatgcaagttggtggtcaaaattggtacttagcgaccgtcaacaacacccccaagtaaagataaaatttagaatgttgatcaggagttgctaccaatattttatttcacaatagtactatgtctacaacatatccttctacttagaatttgaataagttggcaataatagttttacatttattaccttagtcctcatggggcttgtagcttctccttgccttgggtagttgcggaacagaatggatcattgagcaccaatcactctctaactttcattctgctggttttcaaaaatttttacaattaaaacaaagttcatcaaatgatactctcggtcactcagggcatagtgttgcatcttttattattctacctctaaaaggtttatatgtggagctcatggtaggggtaaaatatatatagtaaagtaaatttgtttggtgctccatggtgcccgggtaccatgattgaaattgagtatatacccaattcaaatgagtatgaaacttttttaaatgtttaggtattaacattaactactttactaacgagttcaaaccaagtttgaactgaatttggacttgtttttgttagattttggttctaggtatatagcatccaaacatataattagttagttatgtaatcatggatttgtgaaataaagttaaatttgagatgttttgttgataggtataggtatgaatcgaattcttataactaggtatat

SEQ ID NO: 47901 - DNA, 653 bp, Oryza sativa
  unsure (1)..(653): unsure at all n locations
aaccagtttcggccagttccctcagttcgacgcactaccataaaaggtaccactccatagttgttggtttatttgaaatcgacacctattaccgtttctcatctctataaagaaaagtatagaaaaaaaagttaaaaactgatgccggtgtgagtttcatttaagaaatgacctatatttatattataggtgttagttctagataaaaactgatactacctataataaactaaaggtgttggtttttaaaaaaccgttacccgagccaagccgaaacaagcgagtgccggccccaatccccacccttatcccctggcccacacccggcctcgtctctctctcacatacacctctccaccggcatnctccctttctcttctcctctgcatncgacttccttcttttcctctagagccggctgtagcggtggaagaagctcggccggccctcttttttccgatggcccctccttcttttcggtcacccctccctcttcttcttcagatcccgtgatggaggcagtggtagaaaaagcccgtgtgggccaagtggcggtcggtggatatgctccatcagctggttttttttattaatttattgaatgctataagtactagttgggggttaagaacttgcacctataatctctacag

SEQ ID NO: 47902 - DNA, 749 bp, Oryza sativa
atcacaacacctgtagagattataggtgccagttcttaacccacaactagtacctatagcattcaataaaataataaaaaaaaacagctgatggagcatatccaccgaccgccacctcgcccacaccggccttctctaccactgcctccatcaccggatctggaggagaagaggggagggtggacggagaggagggagggccatcgggaaagagaggggccggcgagcctcctccaccgctacagccggctctagaggaaaaggagggaggcggatgcagaggaggagaggaagggaggatgccggtggagaggtgtatgtgagagagagacgaggccgggtgtgggccaggggataagggtggggattggggccggcactcgcttgtttcggcttggctcgggtaacggttttttaaaaaccaacacctttagtttattataggtagtatcagtttttatctagaactaacacctataatataaatataggtcatttcttaaatgaaactcacaccggcatcagtttttaacttttttttctatacttttctttatagagatacgtcttgcacaatcccaaatccttcaatgatatttcattcgagtgcttgaagaatttgtttggtggagttatagctttatcggccaggtaagcgaatggcaatgactcagagatgagattaacccccacaggtggattggtaaaaaattaacgttgttcccctctaggtgacaaggaagggatct

SEQ ID NO: 47903 - DNA, 847 bp, Oryza sativa
aaagaagccgatcgatcgaggcattctgatagctattccaacatcgtcgtggcatgctgcatagagaaacacccaggagtcttccgtctaactttgggctagacgaactaggtttgaaacctcaccccttctaattatttgatattagtttctttcctaatattcgtgttttttttatgctacatgcatgtaggtagttccaggctttccaaagttgctgttagttagatcgatcaatataatgcaactttaattagtttgttgccttttattcttctcctccggtctcctcctttttccgtgcatttgcgtgtgtcttaatcaaatccttcgataggtcacgctaaatctagacgcatcctttttatgtctaaaatcaaaattaattagaagttggtttttataagatgaagggttatgtaatgtgcacggcctactcctacttgataagccgtgtggcaaatggtcaaattgataataattggtaggaattatcaatctgatgacgcgcagatgtttttgatgcttgattaggaaaagtttgattaaacttgtcaaattttggccatcaattttatattagagtatatgcataaatataatatatttgtgatactatgatgattcttttcaagccaaatatatatatatatattctttaaaaacaacttaaaatgtgagaaataagtgatggtcataatttcaaaagtttaattaaatcataaatatctataaccagaagagcatgcactaatatatatatttggcgatcgaaattaaatggagctgatgcatgatacattgagacgtgccggccaactcgatcgattattgcatcatatattat

SEQ ID NO: 47904 - DNA, 631 bp, Oryza sativa
ctttgttacctgcggagaggcttcaatgcgctaccagcgagaagaaaccggcgcatgtccgccatgaatgatggcaagctagtagagtagatagatgggacggacaggtcggaaggagatggagctgacaagtgggtcccacatgtcggtgacccgagcatagaggtaggccgctcaggttcgcgatggctcgataggcatcctgtcttactataaagttatcccccactaactccttaagcttaacatgcaaagatgccacatcatcatccactgacaagatgccacatcatcattcactaattaacaagatgccacatcatcatccactaacaatcatcacatttaaacatcatgcaaacatgctatatcttcatagtttttataatttaaaagcttttcaaatataaacatattaaattatcatccaacataattcacataatgttttaatgtatatctttattatattttatgatatcctatatacttatataagtcatcctcacttagttagtgcttaaatgaataatctatgggccaaattatctctctcctttttttctctaattaagtcatatcacatcaattatttttagccttttagatgattaatctgcggtccaaacta

SEQ ID NO: 47905 - DNA, 1519 bp, Oryza sativa
gcgcccggtccacgcgggggcgatcgcgccacgtggaagatcgaacggctcgggtggcgcgtcctccacgtggcagtattttactgggcggcgcggcgagcttgacgtggagcgagagcgagggggtggtctctgccgtccgatgcggggaacttggggttcggagggctgggatcccgtgcgtgcctgaagggccgaacacgtggcgggatatgattggtgcgtggccggaacatcgacgtcgatgaggctctggatgtgctacaaagttcggtgcgggcgtgcttagtggatgaagtaattagctcaaggtggggccagaaagtataacgtgcgggtccgggccccacctgtcagtcaacggctgttgacctatgactggtcagcccgtgctttggacgctattttctcgctgggcttttcacattgttgggcctcacaagcttcgaaactcaggactaaatggacagtgaagtgtactatgcatctgcagttctgcacagcaatcaaaagacgtaactacacagctaatggtaactggtttgtctaccacttcatctataagaggcatcatccacctatacttcaaatacaattttcttttaaactactcatccgatctacgatccgattacaccgttgtgttcgtaacaattaaatctttacaacaatatctcacataattatattttgatgaaaaatcgcaaattacttttatgatatgtctaaattacttttagatttcactaagttacttcctagatacataaaagtaaattcaataaaacctaaaagtaagttacatatattatagaagtaacttagaacaaaacgaaggtaactttagcatgtcatttaaagtaaatccgttgtagagataaaatcatgactatatctagaaattaaattaaccagcacaaattatggaattaactaaaataataataaaagtaatcacctcatagcattatgaatgcataggaagtattttaatcaaatataaaagtaactatatataattaaagggactttcttttttataagttatttatacaatatatatgtaaattagttttaggctttactgaatttacttttatatgtataagaagtaacttagtgaaatctaaaagtaatttagacatatcataaaagtaatttgtgatttttcatcaaaatataatcatgtgagatcttgttgtaaagatttaattattacgaacacaacggtgtaatcggattgtaaatcggatgagtaatttaagagaaaattttatttgaagcatagatgatagggatatttccactacttgctcaatggattaatagcaacaaaaacttctaaagtactagcacgtgggtgtctctggttaagaataattggagaggcctctccaattagatttaccgcaatcaaaagcctgaagattgtgatgaaaagttcataagaaatagttccagtaaatgcaacaagcttttgagtatagaactgctacccatttggacacatgaattttgt

SEQ ID NO: 47906 - DNA, 584 bp, Oryza sativa
agctcggtaccccacatcgcattaacaaatatatttcaagccatgggatccttcctctgtatcttgttctaactagacccctttgagaattgaatccgtgttcggttgttgaaactatagctgaacagttgatctgatgctgatcaggtttgtcgcgtttgcagtacataaatggccggtgcactagcaaccgaacatataaggccgattactatattcgcactgatggatttgacctaaaccatactccaacacgcgtgcattgcattgcatatattgcatatatctactggtgatttgatttggatactgtcgacgccaacggagagatgcatgagcttactttcattttgggttgatggcttgatgcatgaaccctgccatcaagaacattactgtacacagcaactcgtgtccaactgaagcagaaaccggaacaggacatcaccgaagcataagtattattcatcttcttctacccttttgtactacttgacattggcaaatctagtactagtttctaatctccataagtactccattggtctcataaaaaaagaacgaattggatataacacattcta

SEQ ID NO: 47907 - DNA, 1192 bp, Oryza sativa
  unsure (1)..(1192): unsure at all n locations
ccacaacttgtaaagatatgcacgatttgaatcaaataagttaagaagttatgcaacactttatttatttggagcacttttttatacatatttattttttaagtacttattttgacaatatactaacgtggatttgtatataagcatatttatatttttattataataactaataactaaaagtcaattaaactggatgtaaaaattattatatttcggttgagatttgggaaggtgaagaaaacaaaaaatctttanagttaattggatgtaaattggatatgtagtataattcttaaagattaaattcaatattataaggtaatatcggtaggattactatataatggcatacttatatatgcttagctaagttgatgcaccaaaatactaaattgtcaagttcttgtactagaacgcacccacttgtcaagttgtcgtacttgaatgttcaattctcaagttcttgcacgatatcgcatcgacccgccaaatttatgtattgtgggtgcaatttactcttaaaagtttatatacccgattcaaatttaaatttggatttaaatattttatatatagaatatttctatacataaagtttatgcgtgcattattttcctcttttagtaagtttatacacctaaagtttacacatctaatgtttatccacctaaattttgtagagcaaatgtttataagtcaaaagtttatatattcgattcaaattcaaattcaaattcaaatattatatatatatatagaatatttctatacataaagtttatgcgtgcaaagtttatgatataaagtctatgcacatgaatgaaagtattagatttttttctattttttactaactttgttttttttttgaaatttatgatgaaaggagagaagggagaagagtatggggggaggggcgctctcccccatacccaatgatacccaccacgtggcgcaagccgctttcgcgtgacgtaaattgtgaacagtgaggcggcgacgacaataacagagacgcccaggacgatctgcgcagtacgcggcttgggcgcgtagacgacacacacctaggcacagcgagcgaagaggaccaaacaagcgcaacggggaccgggcaaacgcgagcagcggcagggaggcgaaacgtagcaggagcggaggagtgcgcgcctgcaacctcaccgcccgc

SEQ ID NO: 47908 - DNA, 1079 bp, Oryza sativa
  unsure (1)..(1079): unsure at all n locations
cttcttcaccgccnngcctcgagtccggtgagcggcaagaagcactttgcaacacgccgctcctccctttccgcnngaagcagcggcgcacngctcctcnatgtcccgccggcaccgccgctcgcttcatgtcgtccccggatggcaactcctcgtcgtggccgacaagaccacgcccctcgattggtcgcacccggcactgcgctgctcatgcagactgacctggcgagcttcgggttccgcttcgtcgccttcctcctcgtgcatggccacgcccgcaaggccgctgcctacctcttcgcagtgctcgctatcgagccgcccaaccggggcaccgccaccgccacaacgcttgacaactcttctcccctccctctcctatccttctcgctcgcatggatctctaacacattgcgtcttctgctgctgctcaattcttcaggacaaagccattggcatgtgacccgacgagcttgcccaagctcccgccgagcaaggagtacaacgccaagctccgcggcaaggaggccatcaggcaaaacacgacagccatcggaggtaagggctccatgtccgtcaagccggggaggaacgagccgtcgaaggcggcgccggcgcaggacgccattggaggaggagatcaccagcgcgtgtctggtgcacctgaagagcgtgagccaccactacagctcgctgcgccgctgactctccgtcgtgcctggagagaggagagagagatgaatagaggggagatggggagaggaggaggaggaagaaaagggatgagaatgacatgtggggccaacattggccccaccatttttttaaatttgtgtgaaactgacatgtgggtcccacgaggtttatcaggatcgaatagccacgtcagatcgagactgagtcaaattagccacgtaagcgccgcgtcaaccaaaaccgccatcgaaacggttgagggatctaatctgtaccggttttgatagttgagggacccattatatctggtcttgtggttgaaggacganaatcggattcgttgaccagtgatgngctntgtcagtcagtcatcaatttccact

SEQ ID NO: 47909 - DNA, 822 bp, Oryza sativa
cagacagccatgaggatgatgatgatgctaaacaagttgtgccctgacgcgtagtcagtcctcaccatcatcacctcatcggcacgtagttcatcaaggtcactggagctcgagaagaagcttaatagagcatggatcatgaaacagatctgattttttgtcgaatgtacgttagcagaggatggtgaggacgggtggtcggtgaggcacaacagcggcgccgaagtcgtgagcatggagaagggcagtgggcagattcggcattggaggcaaaggacgtcatgtgtctaggaggcggctcaggtgggggcggcgacagcggatccagtggtgcagctcaccagacatagggtaggggaggtggggcaggggaagcttgccagagttactgaagagggcgatgtgatcaacatgtaggaggagcaggagaagggagggacacagagagtgtgtgtggcgggattctcacccagccaatggtgatgctggtcagttggtcaggcagcgaaggcggcacggattggcgatgggccaatgggcaggaggagaggagaggagatagggttatgtgatttgcatgaatcttgatgagatcttggccattcaaaaatcagctgagggatggagaaatatcaagtaactgattacggcccattttcttaattaaatattacagcaaatatggtgttcctatatgatggagactagaggagaaaacccacgcagctgactgtgtatggtctttattaccacccttcttggatgccgaaattatgtggtgtccacacaaatagaaataactgaagcagaatcaaggtaatt

SEQ ID NO: 47910 - DNA, 711 bp, Oryza sativa
aaattctaaaattgattattaataaatgccgagttctactatatttaaaatcttagttaatttagtaattctgaaactaatgcatatcaaatcgtacttggtttggagtctcaattatagatttgagtgatttgataattgaaatttaataattaatcgaaagttagaggttatatgtttcgagtttatatactttgatgtcttgaattataataaagtaaaaaactattgactccatatgttttccttttggtgtgttttacttaacacaaatttgatttgagcacgtgcgaatcttttttaatttttggattagatcgtagaattcgtaggtgcatggaaattataaggaatacctatgtgaattgcaacagttgcaacacaatcctggatcttcttaattagatacaaatgaacctttcttgtcgatgaaggtgtcaacacccgaagtagttagctaatttactcctggtagtgtggtttcaatgtggaacaattaattaatcaaattataaaccaatcttgtttgagaaatagaataaaataataatcttgattgtgaagaaaatgtacctgaccagcaaatttaggatcttcaggttccatgcatcggccaatcgggattcatgaaggcatctcctgctgttttttaaagagtgtagcccctgtacgcatgcaaccatttgatggtggtgtgagaaatcaagattg

SEQ ID NO: 47911 - DNA, 2030 bp, Oryza sativa
acgcaaatctagagcgtctcccgtggctttgcctgcggcgatcgatccctatcggttttttttgttttgcagatagaaaaagtatacgactctcgttattttaattagataatgcaatctcccaaatattcgatgggcttttaaatggcccacaatattagttaagcgcagttttttcgacctacgattgctatagtatagtctattaaattaacggacggatgtttctagttaacatgagagctcgtaggaaccctatcgattttacattttgcagatagaaaaaggtatacgactctcgttattttaattagatagatgcatctcccaaatattagatgggcttttacatggcccacaatattagctaaccgtagttttttcgatctatggttgctatagtatgatctattaaattaacggacatatgtttctagttaatgtgaaagctcgtagaaagtgtcaaattagtataggtatagatagatatacttttctactattttcagtcaagatgatctatctgtctttgagaggtaccgggggtaccatattactaaattaattcatataaaaaataggtacatatcaagtataataattagttctttgtatcctgtgagattagaaagaatgagcgtcttctcaggctgaaatgggcccaaaacaggggtatctatttggcacgcgccagcaaggaaactagtgcgtgccagctgtccctcccccacacgttttcttttttttttttcaccatttttcatgttttcattttctacctatctttttcgctattttttctttttcttgcttcccctcccttcgctagtttttcctttttttatgttttttttttcgattttaatcgttagcatacatgttttcaaaatatttgagtcgaaagttttcaaatttaacttgaaagttttctaatctaatgaaagtttcaactcatatttgaaaactttaaactcagattttaaaactttaaactcagatttaaaaattttcaactcgagatttgaaaattttcaagccaagttttgaaaattttcaaatcggcttgaaaattttcaaatctcgagttgtaaatttttaaatctgagttgaaagtttcaaatttgagttgatagttttttaaatctgagtttaaagttttcaaatatgagttgaaatttataaaattttgtgttgaaagtttttaaaatttgacttaaaagtttaaatatcgagtcaaaagttttcaaatttaacttgaaaattcaaatttgaagtcaaaaatttttaaaaagtaagtttagagtttcaaattttgagttgaaaattttaaattttatgtatggcttttaaattttcagtagaaagtttaaaatcaatcggataaaaagcaaaagagtaaattgcattgatggtacacaaacttgttaggtgggtgcaatttagtacataaacttgtaaaatgcttgttttggtacacgaacttgtctagttcgtgtgaacgaggaccaaaatagcttgcaatgttaattttacaaagctgatgttgattatgtgacgtgcatatgtgtaatgagtacgcataaggcatacaatatttataattttggtctctactttttccttcatcatggaaatgacgaatgtcatatatctctaacccttatatcatttctcattttttcatatatttttctatgttcactatatcccaatatttttattgaagaggtgtatggctaatagcaaccttctcaaatatatgtttacatagtatcctaatcagcccccctaaatcaataagattatccatgtaatgttcttttcgcctttctttgcacgcaccaaacaagctcatgcaccaaaacgagcgttttacaagtttgtacactaaattgcacccacctgactagttcgtgtaccttggatgcattttactcaaaggaaaatcttatcttaactatcgtcattatctaaactaatatgggtagttacacacttaatctagcttctcccggaaaatcctcgtgacg

SEQ ID NO: 47912 - DNA, 1688 bp, Oryza sativa
aattattatcgccgattatctgctccacgtctataagaatatgttttctcaacacactttcttatatgtaatagtttggaccaattataatttatttctcaaaatatttaatgaatcaagataattaagtagataatctatagtaataatacggtgattaatatgtctcaattgggccatataatatcagtatgactaattatgggctaggggtgaacacggattgaatattatccgatccattccactccgaatccatccaaattgaagacatggtaaaggtttttagatatccgtgtgatatggatgcaggatgtagatatggagtcaaatgtggtatcggtggtatccaacggatgctgattatctgatagtttaaacgaattatccagtatagagtttggcgcggatagtccgcacatttctcaggctatacaaccactcaatttgaccaattttacatcaggcagcccatctctttgttaacctaatctcctacctctcattctcactctcgtgctcttttttttcaaacggtcaggctgttgccgactttttatataaagaaaaaggtgtcccattttaaggagaaaacgggaccaaaaccttacaatgcacagttaattaggggaaactgcacgaaaaccacaaccacaacactctaactaacctaagctaacaagaccgtaaaaatggcggagctcaaaatagccatcgataaaaagcttgttgtaagcgacacaaaggcttcgacttcgcgaggcgagtgttatcattgccgagcttgtcgcctagcgacacaacaatttcgactccacggctatcacattattgttgccaaaaacatcgtagaaacaagcaagacaccgactcgtgctctcacagtcccgtgtgcacataggtggcggagcgagcaggccgatttgtgcacaaactcaaggaatctctgtaccctgtctccacgcgttgctgacaaggaatcatattatgaagttgtgttgtgcagcaaaaagtcacacaccacatgccaaatgacacgtggaagtcactgtcttatattgacttgctcgggaaacttgtctcgttcgtcatatgcggtctatgatttgcgaaaaaagttatgcacatgaattattgtatcgcatatctctatctagagacgaagttaattaaatttgttctatgcacatgcgcatgaaaacaaatacaacaaaactccaaccgctgacgtgatatataattgcaattatcgcaatctatatttgtttctttatcgtaatctatatttttttattcttgtgttaagttaaatttgaccttatatggatgtgaagacataagagagacgtaactatattatctttttatctgaattttttataattatttgaatcttgtgcgtgataatacctgcaacaacgagttaaaataatttttatagaaaaatatgagcccactctttctttattagaataaactttctaaaaatatattttctataaaacaaactctctgcacgaattatggatataaactttcactagaatgtaagaaatttcgacatgaaactgaaaaactttgatgtactaaataaagtgcatcttttgaagatcgtaactttctcttcaaaataatttctctacctagaaattgataaatgatattaagatctcacatgaggtatatga

SEQ ID NO: 47913 - DNA, 989 bp, Oryza sativa
ccatgtcattctttttttccttttgagtgtggttttgtatgttcggttgtgtgcatcttagttacgcagagactgaaagtgttctcaagataattgtatcaccttaatgtaattgactgagttcaatcaaagcttccattatctaaaaaataccgtaagtacgtcccccataggcaccaatcaaaatgttaatcttcgtgatatttttattatttttggaaattttaatattaaaagtgaaatttatgttttcaaatgttaaattttgcaatatatttatatttcatttataataatattagtgttgaatatgtgcaaaccaaaaactctaagacactatataaatcaaagtagatcatactgaaaaatactgacagtttctttcactgtttgcgacaacattgatgagtcacctattttccatccagctggtcaaatttgttataaatgacaccaatttttattaattcagttattccaatgtaccccaaaattgtttctctgattatcattgcaaagatgcacgagatggagtaggacattgagccaaggtcacctgtgtcttcctcagattggatgttattttctaatctatatattttcattgtgttgctattgaattattttcgatttttattgtaagtatacgtggttgttgaagcatgtgcttcatccaaataggaatcctagttgcccccacctctcttcccccgccaaacacggggaggagaggtggagcaagggaagcttggcggagttgtttaggagggcgacgtcaccaacgtagacgaggagtatgagaagggagagaggttgagagtgtgtggtcggtgagtcttacctcgctggcggcgatgctggtgacatggatggaggcgcttgcgatggattgggtgtgattggcagcgccagaatggatcaggagaagaagaggtagggttacctgatttccgctaatcttgatgagatcttgttcattaaaaaatcga

SEQ ID NO: 47914 - DNA, 939 bp, Oryza sativa
tcatcagtcttacctcgcaaggatgatgctggtgatgcagaggaggaggcatgaatggtggtctgacaagctcgattgggcgtgattggtggatctagagaagagattggattacctgatttgcatgaatcttgatgagatctcgacagctcaaaaatcgagagatagaaaaatatcaaacaaataattaataggtggcccattttcctaattaaatataactacagcagcaaatatattgttcttgtatcgtggagagtagaggagcaaacaacaggggctagttgtgtatagcccttttttttaccaatatgtgtggcacatattagatgcacaccaaaattatgtggtggacacacaaatagtgggggactaaagaggaattagggtaattaagtatgtgactaactatattaagtatgtgatggattcacataatgttagtgtgacggactcacagtttatatacacacgtcggcgtttcattcttggaattcttgatccggaaggcacttgatgaagacgaacaagggtaacgagtcaccaccgacatcagtcggcgcgatagaggtggccaccacaaggagaaaggaggagccactaaaggaggagggcaaaaggcaaagggagagcaagaagatcggcccaaatgaagccaagcctggagatgccatccgcaagcttttaaacgccgccgccagccttctcattgtcagccgtcggtcgccgctagcaagcttctacccgcaaggccgtccgcacgcctgtccccgcagtctcttacactgggttgagatgggaaaagaggggatataggtggaagaaactgggttactaatatgtgaggtttatgtgggttgcatgctgacttggccaccatgttagctaaaacttggagcagtactacttgtgaccacccagttttggaagattattgca

SEQ ID NO: 47915 - DNA, 1264 bp, Oryza sativa
acccgagcgtagtttgtgcttgggaagaaaagagaagagaaaagagggcgctgacaagcgggtctcacatatattttgtgttctcactttttaatttccctgtggtgtctaggatgccacgccagtggaactagacatctatactaccatgggacctaaattatatagtttttacaatttagggctgaagatttctactattagagataatggatgttaaacaaaactcaacataaagttcaaggacggcaactggatttattccttttgatattcccgttgctgcccaagctatagactactccatatctttatcatatcttatctcatcttataaaccaatttcagggatggaaatgtggtatatgattgggccacatggctcattgagaatttagggttagctcctccaaatatcagcaacgtgcccatgcaatctctgattccattagagtgtcagtcatgcattgttccttgcaatcgccattgaactttcagataaatctatgagtaaaaccatcgactaaaagaaaatacgaagcagtaaatatagaaaaacaccagtatgcgtagtagattatagaggtttctgaaaaattcttcttccttcgtcatcaaaatcaaggaaaaaaaattaagcaagagattccagaggttgaaaaagaacattggatctgtccctttgctactaaagaaattccttctctcaatcatgaacaaaaaacaataaaggtcaaagtggaaaaatagaaaaaaagccataattaagttacttcgcctacaaaggcacctagcacaatcgccatcttccgcttcctgttggttgttacccccatagccatgtcgacgagccacgtgacattttgagtaccgccggcatcttccaaattatttttatatatgcaattttgtaaaataaaatggcagttgaataaggtgaaaagtattaggccaagtttggttgtttgccaactttatgcccaggtgggcaaactaggttgttgctaacgtcgcccatgttgctttaccgagctgtttaggctgagttcgttcgaaactaatatctcgcgcacattaaaaaaaatagaaaaatagagtaaattattagcgcatgattaattaagtattagttattttttaaaaataaattaatagaattttctaaagcaacttccgtaaaaaaaaataaattgcaaaaagtacatcgtttagcaatttgaaaaatgtgagtgtggaaaccaaagaaagtgagttgggaaagtga

SEQ ID NO: 47916 - DNA, 6129 bp, Oryza sativa
cagatggttcaagtaagactggaattatgggtggaaagggttcataggatatggtcccacttgaattgttttttctttttaaggatggtttaataactgccattttaattctccgcatttttagatggcaccaatggcttgatccgtgcatttggaatggcacgttatcaatcacatggtagtaagttttaaaatgagtacatagtttatccaaatactctcaacttagcaaacggtttattgccgacaaaatacatttgcttgtatcctagttaggaggataattcgtgcaagaaatattcaattgtttctcgtagcagtttaatacgtgtgaacttttcgttattgtgcagatttgaacacggtaacaaaaaaagggggagaaaaagcatgcacgatcatcttaagttacggaactacctttggattgttatgaaacatttgtgtgaagttttgacacaagggcattagaaaacaacaagcattatttagtccactaaatcctaagcttaacatgaaaagatgtcacatcatcatacactaacaaatattacatttaaacatcatcatgcaacaatgttatattatctttaattttatagttcattaaattctatagctttttaactacaagcatattaaggttctattcggctacactctttttcactgtgttgcagccaacagccacagtgttttctttgtgcagctgctaaacaaagcagccgaataggccctaaatcatcatctcacataattcacataatatttcaatatgtctcatattttttatacctatatagttcatcctaactaatatgttctctttcttctctcattaagccatatcacatcaattattttgtccttagatgattatgtatggtccaaattgttttcatccttttcttctcttatgaagtcatatcacctcaattgtttttagctcttaaatgattaatctatgatccaaactatctccatcattttcttctatcataaagccacatcaacttacataagtttatattgtctagctatcttacacattatttttacctagtgctatcataataaactctcgcagtaatgcgcggggtttcacctagttacaaatattgacaatgacaaaatttgacaatatgtagtatgtcatcttaaatcattatatataataaaaataagaaaaatacaaagtcaccgtgttttacattttagagcgttattaagtcaacatgtgtcatgttttaaaaattaaaaaaatacctaaaatttaaacaaaaaattaaaacgtctaaccatcgggttttcacttaaatcgatgacctattaatattattttcaaccacaaaatctgcttttagaaaactcttaaatcgtgacatgtcacttcttaaaaattagaaaagaaaatcctcaaaacctgaggggaaaaaaatctaattatcggtattcatttaaatcatctagataaattagaaaaagaaagtcccaaccaccttcccatctcattgttggtatttcttaacggcatgactaaaaatattcattcccagcaggaatagtcctggtatatttatggttacagaagtaatccgctcgtgcacggattaccattgtagcatttcacccggaagtattacaatgtatcatatttatttaatcccaagggaagattgtgaaagagataaccacgctaataaatacacatatatatcacttgcctttatcaaagcctaaacaagggttaatttaatataaggatagagtgacacgaagcgaagcttatagattcctcatataaataattctaactaagtggaagaaaagatagaaataactcatttcctatacttctaatatacactcaactttactctgcacttgctagtatacaatcatgtgcccaataccccctagcaatgccctcctgatatttcgagagaccaccccgagtagtcgagtttcttatgacaacttgtcatagccgtccaaccgaggctaaatacggaggaatacccttcccaagaatttgtcttaggaatatatactaacgtggaggaatacccgtactgagctatcaccatcagcggcccacctctactgtctcgtagcatatatgcccaaataatgatacttactaatctaagcaccatgcttacattaataaatactactctacacctctgcagatgatataaagcaaccgataaatcgggcattaaacttacaccattgcacctctctagtaggctacccacacaattatactgacgcaaatataaagtaagagcagtactcatactaagtagaataccgagaatatatacagaagagaataaaaaagctactagagccataccgaaactcttccggaagctccgaggactccgagaattattctatactacttccacttagcactaaactactaaataaagtatgaaaaggaatcttgagcttgcttgagcgtgttgagagagtgaatgagcttctccttttatagggtcggtatgacacttactgccatgcgaaatgtccattttacccctgtaaccgtcaacagtaagctatcctggacatccatgtgtaaggccagctggagccgcaactagcctgggccagcccagcaggactccaagtttggcagggtggctggcaggtgggtcctattgacggttgtggcagttaaggcggttacacctatcttgtgggccctccctatccgtttgcttgcttaggagtgaggtttattcactttctctttattttatttgataaagtcctacaacatattatttattattctctaagtacaagtggaactatattattctgaaataaatatgcattgcaagcacagttaattctccattattttagttacattgatgatcgaaatttatctgtaacgaccgtcaatactcatgcacatagcactacacacccctccctccgactcgagttctatgctcttcgttaatctcctcctccctattttttagccgtgaaacttaaatacaaaaaatcaataattataaacagtacgtctgatttcttatctacctattgctcaaattacaatcaaatcaacaatgcaagattcatatgtttatattttgctatataagaaatatgacattttggcacagtcaacctatcacttatataagtatctcaaacacaacctacgatgcacacacgcgtgaatgcgagggttaccttcttagtaaaataataataacactggccttttgcacatttcaaatttctagtcacaaatattgttttgtgttgcgtattaacacaaatgtgtagaactatatcttttttctcatgttcaattgctagttataaaatatcatttttgtgctatgaactgaattctctcaagaaaaatctaggttgaatgcacgacgtttctcacacatccatcgacgtcacatgtaccatctaaccctattaattctacaaaacgctactcccaaaccatcgccaccatcgtctccttttgctcaggccatcatagatggtcctcatgtccccatcttggatcataacttgtttcatgccatagcctttttttcccttgttccataactcctaggcaccctcccaatccaattatggtgtcaaaggtttgtccgtgtctttgcccgtcctgtctttctaaccttcaggacatcaaaaatcctaagccgtcacagtcctacgtaaattcctaaacttataggggtacatctgaaaaaggtaacaaactaaaaatcacaggggtatccgcgtaaaagttgcacagttcgactttgatctcacattctcacccacctgtgacctgacgcaggtgcgaacccgaaaaaaaaaagaaaaaaaaaacggtgtaatggaagggacggcctcctcatcacggggccacccgcacgcaaatgacgtgtggggcccacggggaggccaccccggtgaggccgaggtgtcagtgccatgctgacgtggccaagcccagcccgcccggagatcgggaaaggcagcgtgttcggctacgcgcacccgagggagctcggtcggtgagtctcccactaacgcgtgggccccacctaccacgtcagcgtttattgggtagcttttcctgtgcgaaataacaaaagaggcatgagttaatttgttcgaccagataagaacccagcttaggtgacgtgcgcgtaggccatagagccttatgggcccgcatgtcagtgagggttttacaagtgagacgggtaggtgagaaatcgtttggatctggaaggatggagggatggggggtttggggtggggcccacaggaccaggctttggaattccaaagctcctttgatccttggaattgtgttagcggcagctcctgggttgtgtttgcgaggggaaaaaaaaaagagaagaccaagaaggcatgcataattaatgagtcattagcgtatgattaattaaatgttttttctctatcattaaatatttgacgctgttgacttttttaaatatttttgaccgttcatcttattaaaaaattttgtgaacattattcaaaaactttagtactagtatatttaacaatgaatcaaatgataggaaaataattaataagtacttaaaaaaattttttgaataagacgaacggtcaaacatatttaaaagagtcaacggcgtcaaatatctagggacagagggaataattattttaaatttaaaaatagattaatataattcttttaaagctatttgtattttttgtttttttaaaaaacacatgtttagcattgaaaagcatgcatgtagaaaatgaggtatttttctctcctttgtccatcaaacgaaaacgcaccctatgtctacccttggcaggagtttaaagcatcattccttgctgaaatcattcttccatcaaggaaaaagaggagaaaaggaccttaataaatgagacacttatcagcttgatattcttcatactcctcctttctatgtgtgtgaatgtgagtgttgtgttcatttcatgcatgagacaattgcaaagcaaaggaacacatgggatgggatggtgacagggatgtgatgtgaatagcttgcacatctcaaatgctcaaacaacttttatgatgggtgtgctgccattgtatagttacttcctacttctatccacagatataagcattccaagcatttacattttgtctgtaaataaaaccatattagagtactacgtctcttatccatcatctcttactcaaatttcttgtcatcttagccctcgccccctcctacccctttccatcccttctttaattagggccgaaagtattttctcctcgaacttaatttctactttaaaaaaattctagaaatatttatatttgtgggttgacggtgtaagagttatttgagcaaggatctaactaggctaatcgcctactatattttgtgatggcttttggattagtgtttcccttttggtatggtttggcagggtgtactttgatggttggttctcaattggatatattagcagggcatcctgaacatagagtgttgcgacatgtgaaagaagagttgcagaatcatgatatatagcgtctcaccaatattttcaagcaatgatctgactgatctaattaaactatatccgttcaaaattcatatcaatctgttcctgcatttgattcatatttgcatccatgaatattcaaattcgattagtctttcttttaagataatggttcgattagtctttgtatagaaaatatggaagtccactattcaattagcattcgacctgttgacacccatagatggtatgtttaatatgccatttagttataactaagcacatggcactatttttttttaaaaaaacacaaactcagatgatgtgttatatgctttccatgcaccattttagatattgtttgatgggcagtgacaaccaaatccatttgcatgggttggcacttttcgtcctattggtaaagactgagcacaattttagaagtgactacggtgggggtaggcatctagatcatcagctcattgtcagtgccctggaccatagttcccacttcaactttcatgagaccaaaaaacaaaacattcgagaaaaaaatga

SEQ ID NO: 47917 - DNA, 3104 bp, Oryza sativa
aactattttcatggacagtgcaagctcctgaatcctacctaatatatagtattccagggttgtctgtcagcacagggaagttggattggattaactttctgcctctctttttgattttttcttcagcgtcgccatccttaccatcgtttttctacactaggatggtgcaggatccacggctgttgctgtaagtcttccttttccatttagtgtttgacatctccgagtcgataaagcttaagatacctgtttaatcatgcattcctatttcacagcaagttcttttgttggagtgttcgcaaaaaagttcttttgttgggatggccgaatttattaagaatgagagaaacatattgcactaggaaagacaaacaaaaaagagaactgctgcctcaaagttacttaagtcatactacacgatgggtcagttttgaagcagctggaaagtaccccgtttgatttatattattgagcggattattgcaaggattatctactcaattataggaataaattcaatattctgatattaagcttaataacagttctaaaaaagtggtttaagaaatgctctagaggaaagttttttgagaaaacatatttttttaaagtgtcgagcaattattccgttttaatgatctaatgaataatccaaaaagaacctggcagatcatccagcagaatgccctgagaatccttgcgttgccatccttacagatgattcaaaagttcagaactgtatgagtttgcttaagtcatcattgttgacattgggtgtgcaattttttttctccatatgatttgctcacttatgagttatgacttatgagcttacacacacacattgatatcacgatactggcatataccttaaaaagatatcagtgtaaaatagtatttggacacagaattaggctaatttcgttttaataaactcttacacggacccttctggattcactcaaggcatggtgtccatgttactgactagcataaacaaagaagtctctatgcctagcacagactaagtcttcatctgcatggtgtttatgtggttgaaggtattcacgagtcaatcccctgtatgtttcaatctaaatgttcaccataacaactattctcatgtgattttccaatatattccattcagattgcattcttttttcagctgagcagtttcattggtttatgaaatacagtatcttgctatgctgatgtagcctgactgcccatatttttgtcatatgcccatttgcactgtaatccgtttctttctgtttttttttcaggtgattccaagaggcaacttcgaaaatacccaagcaagttgagtacatgtgtcctgtaggaattacaataagccatttttatgcgtaacaatatgcctgttcattctcatttcataagcataacaagaatcagaagagggttcaaaggaaggaattataacagccattatatatgtttcatatatattttcttgtgtactcagcagtgccaggtcggagaacatgctgccttcaccaacttgctgaacctgatagacatcagatgcatgaactggatgggcgtgtttaatttcatgcttctattcggtggcggatctagaaaattgattcgttggtgctagaacgtctctatcggtgttacagtatattaattatacttaaatcatggtgttatagcatatggataagcagtttcgctatagttttttgctgaaagtcgtcggtgtcgcctgacaccggtccttctactgtacatctgcccctgcttctattggaattaggggtgtagtacaagcctaaacgggatgtctctttcatcaacacacagtttggtttgacctcataaaatagaaatggaaaaatggaatagaacaaagtgagtcatgtagctatattaagggcctaggcttaggcttttaagccaatttttttgcttgtatatttcataagccagtgactttgaagccttaggtgtattgatgcagtcataccttcactttaaataagctgaaaaatttactccgacttaccttttagcaatagtgtaagaatagcttatggctttcaaaaacaggaaaaaaacagttgcttgtttgtttatcataggctttttggcttataagttactacatccgttttgtagtatgacattgttgactttttacataacgtttgaccattcgttttattcataaatatataaagtataagcatgtgaaattacaagttaagattatagtttttttattacagtataaaataagttataatatatattttgaataagatgaatgatcaacgtcaaagtcagcgaagtcattacttttgaaaacggaggtagtactactagcttatacaaacatggattaaggctgtgtttggcaatgatagttaggaactaatcccccgcaatagagtgactcattagcggccgttcagttttggagcgtggtttcattgaggtggctcctcttcccctccctgaccacgtcatgtgccttgtggggaggccgacgcacgctgacatgttagtggatcccacaatatattttaggaacaaatgggtcccacatattttttttctaattctaatgccatgtaagcgccatgtcaccatcacgttggatgaagccaaggtcaacacctccacataggcgtcccatcatcgaaaccgtcctcaaccaccgagggagtcaaattgcaccgatagtattagttaggagatcgagatatctggtattgtgattcaaaaatacgaatcatattcgaccactagttaagggagtaagagtggacttactccgtacaatatcaaccccccacccaccttcatgggccggaattgagcccaaccaactaaaccaaccgaacgaggcctcaaccgtcacacctacttgctgttgttacccagagggtgttggttacttgcgtacctgtcgtgctggaggcgcacagctcatggaggaggcgcccagtacaaattacaaacaacaacgacaaatctccaaaactgaatctctctctccctctcccctccattccattcgattcgacccaccaccgccacataaaccaaaaaaaaaaaaaaaaaaaccg

SEQ ID NO: 47918 - DNA, 1064 bp, Oryza sativa
atcgttcatctggtatgtactactactcacacatttgtatgctaaacacttgtatcacaacctttttattcagttgttccatgatatgttggaatgttagaactcttgtttgtctaaagctttttctattagattgcacgatgcatgcacactgccttttcttccgtgaatatatatttatcctttttatgtatgtgatcagtttattgataatgagactacataagcttttgagttcaatcataaaagtgcatagtaaagcatggaattatgatttgttgcatacatggtattccctgctgcaatctttgcactcttttgagtggcatttgcttgcaacacagacttctgattttctttattgttatatttgaagacttcaacttatttgtaaatcaacaccatcctatcctgtcatggagaattctgttcctcatttcattagacaatgaattctttgtttttatttcaggttgatatgagaagagcaaacaattgcgagatcatgcttactaaaattaaaatgcctcttcctgatatgattgtaagtatctttcttgattgagccgctcccttataatagaaagagattggacatcagtttcctcatgcagaatattgataacaagttattttttgctctgttgataacctttatttatttatcttgaatacctgaagtttctgtgtttcctgggtatgtatatttctaggttttcacagttttgatttaggtatggatagggagacagagagtacatatgatgagctacagcaatggtttagagcctagcatagctaagttaagagataattgagcctgccatgatgttgttaggttgatgggtggtgagggcccatattgactatcatgagatcttttcttgttagcgatacactcatcctttcttatctctatgatctgatcgattgcataagacccgcgatagcaatagaacggggaagtatcacttggctacatccgccccttatccagctaaaggattttctaatttaatacacagttattatttttttctcaaccagacacattttcaaagatt

SEQ ID NO: 47919 - DNA, 712 bp, Oryza sativa
aagccacttcaaattggtgaatctttttccactggtcaaggacagtcgcaaccattgaacatcggtggtgagatcaaatcaaagactaatgaaagcaatgaagttaacatcgagcaagctaatcagccggtgccagttcagcaggatcagtctcaagtgaataacagtagtggaagggagcagcaggtatgtttcaactgttacaagccaggccactttgcaagagagtgtccgaagccgaagcatcagcagccgcaaggtcaggtcaataacattgttgtcacaggagccaatgcagtgccagttgcgtcttcaagagttgtgtcttcaagtgttacaactcagccaccagtttcaaggcagcagtagttttctttaaagccttagaataattatcgcagttatggaataagatagactgcagtttacctatgcctttttctttctagccattccgaatctcgggacgagattctttgtaaggggggtagtttgtcacatcctgattttcgtttcaggatttataaattatttaataaattaataatagaatttatattaaatgttttttaatttacaagtgaagttaaatgtgggaaataaaatttcttaaatctaaagcatggatggatttaatttttattaaattctccatgattaagtcaactctctgaaattttctcggatttttcagagctcaattcttaaataa

SEQ ID NO: 47920 - DNA, 1573 bp, Oryza sativa
acaagaattaggatggactatatataaatagttcttttgaaattatgaataaacatattttatccacataactaaacaaaagaaatatttaacatgtagtagatgctatcaatattaatatcccgtgcagcgcacgggtcgacggctagtatataagaatcagtcatacatcaatccatctttatcactgtcgtttttttccagaacgtaaagacgatgaaaagtggcactggggcagtgatcaatagttacaccggataagtatcacgctgtccaaaatgacattgtgttcttactatgaatattcatattctctatgtgtttaaattcatgacactgttaactttattaattaagtgaaacttcaaaacttttaccatcaataactcttaaaataactttattccttccaatcccataggatacaatgaactaattactatacttgagatatacctattttttatataatttagtaacatttcctaataccacatatactaaagacatcaaattttataatagaaattttctatgcacccaggtacctctcaaagacagcaagatcatcctgactaaaaacagtagaaaagtatacatgaatcaatctgtatcactgtcaacttttctataacctaaagaaaaggaaaagtgacaatgatcaatggttacaccggataagaccaagttgcatgcgaatttttatcattattaattaatcacatattcacccatggaaacatttaagtcgaaactatatgacactattatgtattatcctactaatcatacgttgagagtatttttcatatttataaaaatgaaaaatatatatttcaaaataattatttgtaatattttttctactgtccaaatgcgtgagaaatcacatttgggaacataaccttttatatgaaaatattgggaactacactagacctcctttttaaaaaagcagccttttatgtaaacttattgtttgaacatctacttcccatgaaagaatttatgtgtttttttatactttttctttagttggattggcagcccaaccgtcgggttaagtggaccacagggggataatcgattatccgtaagatcaaataataccaatcacacggaaacaaaaaaaaagaacaaaaaaatcgaaaaaataaaaaaaaccacgccggcgtcgctcgtcgtcgcggccgccgtcgccttcccaggctcaccgctcctggatccggggcggcaccgcctcgtcgtcgtcgtcgttgtgccccccgccgcgagaaccacgctgccaccgcccgagctcgccgctccagcaggatccgcgcctgcaccgcccggtcgtcgtcgcgcccgccgcggccccgccgagctcaccgctcctggatccagggcgacgccgcctcgtcgtcgtcgtcgtcgcgccccgcacagcgtctactagtcggcgtcgggcctcgtcgtcctcgttcgctcgcggagccgccgccgtgcctccgccaacagccgtcgcgccgcctcccgcgccgtcggcggcgggggcagcggcgctcaatcggtggggaggggaggagaggaa

SEQ ID NO: 47921 - DNA, 672 bp, Oryza sativa
  unsure (1)..(672): unsure at all n locations
agtataagtttacataatttgatgcgatttaaatttaaatagtatgtagaatgatgattcaaatgtaaaactaagatgatgtggctttatgaaagaagaaaagaatgaagataatttataccatacatctaagggctaaaaaaattgagatgatatggcttaatgagagaagaaaaaaaaagagataatttgaaccatagattaatcatctaaggactaaaaacaattgatgtgatatgacttaatgagagaaaagaaaaatagcatgaactaagtgagattgaactatattggtatataggatattataaaaaatgatggagagatatattgaaatattatgtgaattatatggaataatttaacatgcttacattttaaatctctaaaatttaatgaattattaaattataaataatatagcatgcctgcattatgcttaaatgtaataattgctagtgggtgatgatgtggcatctttgcatgttaagctttaggaattagtggctataactttgtaagagaggatttacaaccatggaaaacctgtttgactgactgacatgttagaataattgggctaggcccaacttataatattaaatctcaaaggcccataatanatgttgaggataataataccacctctggatttaagcgagaaatatctca

SEQ ID NO: 47922 - DNA, 790 bp, Oryza sativa
caagaagggaaggggggggggaaaaagactttttagggtttttctttttataaaatcattttaactttgtttatttcttaataattatatttgtgctctgaaaattccactaaaatttgagggctccttttagaccaagaggaatttaacaaaaattctccgggccacatttgaatttttcttgtacgtattttagtgtttgccaatttcttttcgaattttaattaattctattattccttttagaaaatgatttttatttcgggatgaatttatcaggacgtgacaaatccaccccccttacaagaatctcgtccccgagattcgaggaggctagcatgaagataggttgggcggtcttctcttcttgtctgacttcttccgctccgtcttctataacaaacttgcctaacaaaacttctccactctggactgcttggctcgatctcctgttgcaggtggaatcttctcttcacccgacttgtccctggttgaacctttagctgacttcgactgggttgcggcacttgaagatggggcttcagttccagaacttctcataattcatatctttggagtcaacctcattgaagttaccaacttcatgtcatgcgtcgacaccagcttgtcattactaggataccatgcttgtcatcatgagattaccatgcttgtcatttacttttaacttgccaccaactgcctcatattagctttcctgctctccgggtgctaactacttctgctattcgatgcaagggtcgataactttgcctttgaattatgtttc

SEQ ID NO: 47923 - DNA, 1161 bp, Oryza sativa
taagcaggcggtcgctttgcttgtagcagacattaagaagagcaagatcaagaagaggagctagctaggtggtctgatcattgggtagaaagaattgtgaacaaattaaggacccaggtgtgtgatccaattattttccccatttatgccagcttgatattttttgagtatcagataatagtactacaattatcaacagaaactgtttttccaattgtacccaaagtctgcatatttcagtcttctgtgttcttcgtcaattttataatgtagtagtaagcttagaaaaatttcaaactgtgcctgttgtcttacatgttgctttcaccacaactaatagaacttcctgagaaattatgtgcctatttgagatagaattgtatttaatacaattatacttttagttgtacaggcagactgcatgttgcagccttttgtgttgttcaactttatactagacaagtaatgtttgaacaaaatttcaaaattgtgcttgttgtcttacatgtagctttaaccaaaactagtcaaatttccttctaaatcatatgcctatttgagatagaattgtatttaataaaaccatatctttagttcctataggctatactctcacaaaacaaagttcctgtccatttttagttatggatctataatatagacccgccctaatttctagactttatttaaaaaaaatagtagatacataggtgatagatttgccttgaaccactagatacagtaaatgtagctttggcatggtgcatctctcccgacatggaactcttttttattttataaaggaagcttttattaatctcagacgattacatcaagttgatagaaccatactaagaaaattcccggcctctgcataactaggatgcacacagccaaaacatacaaacccacaaaagagtttgtaacaagagaaggaaagcagtaaaaatcagggagcaccaatcttcaggctagaccgccacccatgtccctggtaaaacattccctgaccacctgctccaaaaatcttaacgtttagtttgattttgtttgcggttatgatcatacagcagtgctcaattggctatggaccaagtccgtggaatatttgagggagcagctggtcttgctgcttaagacaatgccgtccgggaattattt

SEQ ID NO: 47924 - DNA, 771 bp, Oryza sativa
gaacccgggactaaaggggggttacaaccgggacttacaaaaggtttcctccaccagtgtcagtagcaaatttgtagatgccccaaaactaaaagttgaatattaaatctacctttttgcttgtaaaacatacatcgtgcaaaacaacaaattaaatttataatcccaggtctcctttgaaacaaagaaaaaagggaagaatatctggtgggatttgtaaagtaagaaaaaaaatcctatgaaatcctttggcataaaggattgatccctatatattatttcgcaatttctctactgccttccgtgtcccctcctgtatagggataaattaaatccttccatttccactatagggattaattaatttggatggaaatcttccgtttctcttcctcccaccgcgtgcaacacgctcacaagcgtaagtatgcatatgcatcagatccaatgttttgtccctattacacttattataaaaaggtatctatatttatatttgtctaatccgtacatggcatgttactggtagtttataataagccaatccataaaaagttttattaaaaagaatgaggttatgccttagttcctgcctgttttttctaatgtatcattcaaacattagtttggaaacttttctatggtttggtttctgtaacactccgtaattcaacacgcataacattttattggtacatttcgattatgttccagtgttgaatcatgcattctaaagatgtttttagaatttgcggatgagagatgtgatag

SEQ ID NO: 47925 - DNA, 863 bp, Oryza sativa
tttgatacgactactataggcgaattcagctcggacccttaagtggagcatgcgcaggaacttcaacactataattcttcgtcatcaaggattgtcgggtatttccctcttgggtcatgacactcttatattgaaaaggtttgactcggcattgaagctgactagtgagttgtatatatggatttaaatagacaactctatgtggcatattatctcatctttctttttttgctatacctctattgattgctttggtcatcaacccttccttttgagcagttcattgtcgacctgcaacatggacttctaaacttagacgactccataaataaaacataataatgctaatttatccttttacgtcttggcttttgacactacaaggaaagacaaacagatctaatattatgaatgacaacaatactagtaatttacccgtgctaacgctatgacaatatttgttaatgcaaaccaaacaattacaaaataatttaactagaataatagataaatttgttaaacattgctagaaattgtttcagatattgctagataaatttgccagtattgctctaatttcggagtagtagaaattgttacatgcagtaactttggatgattcacgaaggttaatattttcctgtcacaaagttaaacccatgtacagaaagatactaggttgatttgtatttattcaaaaagggaagaatcagtaataaaaatcctcattatcaaccaaacaaagtcatagaaaactcctaatctagtgcagttcactatcaactccatggtgcattcaatagactgaactatatatcttttattttttgaatgcgacagaaccaaattgggataacacaatt

SEQ ID NO: 47926 - DNA, 681 bp, Oryza sativa
attggatgagtagtggagataggcggaaaacatgaatggtggaaagttataattggttgggaagagaatgttggtggagaagttgctatattttagcaaatcctgatggctaaaagttgttatattttaggatggagggagtaccaattatgagatttggtcgagtctacaagtactccctccgtttcaaaatgtttgacactgttgactttttaagtacgtgtttgaccattcgtcttattcaaaaaatttaagtaattatttattcttttcatatcatttgattcattgttaaatatactttcatgtacacatatagttttacatattttataaatttttttaataagacaaacagtcaaatatgtgctaaaaagtcaacggcgtcaaatattttgaaacggagggagtacaacacaatttatgataaggaaggagagcacttctagcacggcaatttgctgtgagcttaataataagtcgtacaaaaaaatatcaaaaagttaatgagattactctatgatagatggagataaccagttttaacaaaaaaaaaagagctatcaagtgtggttccctagcacgtaccaatcgtgatatcttttgaaagcctgtattatctccatcagcttggggcaatcatttatataaacctgactttatttcagagacagatttacc

SEQ ID NO: 47927 - DNA, 854 bp, Oryza sativa
atttagaaatagagtatcttttaaaaaaaaactcaggttttagggaatgcataatgtaaaaccacatgataacaacatttagaaatagagtattttaaaaataaaaaaaactcaggttttagggaaggcggaatgtaaaacctcattttttgaggcaaaatgtttcaacgtagatgtttcatattgtgaatatagacctatccatcagattcatactaataggtgatattctagtataggttgctatatttttgaataaaagcacattaaacttaacatctatgtttctccctcccattaattcatgttctacatatccaacatatatctgccttgcttaataggactttctcccaccacatagtatcttaagagcaagttttatattacatctaatcttgtccatgtcatttccgtaccaaacccaacacccatattaactttattttattgttttcttgacaaaaaccggttctaccgtttccgttttcacttttttttaaatcaaaatcaaaatagtcaacgccaaatacaaaaacagagttaaatattatcgaatacgaaaacgaaacaaatacggatcagaacaaatatttgtcggaataaaaaacaactagaactgagcttctcagatcaacagagaggaatatttatcggctcattattttttctaaaataataaatcggcatttatagcaacaaacatcaaaagagaggaaatcacatcaacgccacaccattatcaatattggtaccacactgtatgatgattacacgaaacacataatagcagcaaaccactgcaaagcactgattctctcacagaacgccaactcctggccaaagcattcgct

SEQ ID NO: 47928 - DNA, 675 bp, Oryza sativa
aaaatatttgacgccgttgactttttagcacatatttgactgtttgtcttattaaaaaaatttataaaatatgtaaaactatatgtgtacatgaaagtatatttaacaatgaatcaaatgatatgaaaagaataaataattacttaaattttttgaataagacgaatggtcaaacacgtacttaaaaagtcaacagtgtcaaacattttgaaacggagggagtacttgtagactcgaccaaatctcataattggtactccctccatcctaaaatataacaacttttagccatcaggatttgctaaaatatagcaacttctccaccaacattctcttcccaaccaattataactttccaccattcatgttttccgcctatctccactactcatccaatcacaatcctccaccagttacttctacctacttttttaataaccgtgtccaaccctaaaacttcttagaggcttctccggtccagcgttctgtacctcgaggtacatgtaacgtgaggtaccgattacaatccaaccgttgatctctagaggggtacgatgggtagtgaacgaagagaaactcaacgacgcgcataggctgggcaccgacaccaacagggcgaaagggacgggtggcaatcaaccagggccagcctggtctgggcttccgacgcctcgg

SEQ ID NO: 47929 - DNA, 1029 bp, Oryza sativa
tcctattgtcgagccaactttccctattttctaacggacacatcatgtgtcaataataatgatcggatagttaatgatcatgactctcaaagatacatgcattattctcaacatatttgcattacgatgagttatttacaattaaatacataattcatgatccatttacccatattcactatatgaaatcttgataacgcatctgttctgactacaaatgttcgagtctaaattccagattcaatcaccaccaaagagcttggaaccatgatacatactctgggcctaaactcaacggaggcggaggtgcaagatattattaggttgagtacattagatgggtttgggagctaatctctcccacacacgtaaaacgaagcagctcattacattagaatattattaattaaatattaattatttattttataaaatggatttatatgttttttaaagtaatttttctatagaaaacttttagaaaaaagcacggcttagttgtttggaaagcgtgcgcacgaaaaacaagggagctaagttgggaaaggagtgggaagaacacaaccttagtgaggtggacaccgatcgaagcactagcatcgactttccatgactttcttagcctaatagcacgctacatgattatgtgaagcacaaaggactgagatgagggccggagggagacgttccgcatctccgacaagtactagaaaacagtgtcatttctatcgctgaggagttcaaaattaaattcagaaaaatagcaatttgattaaaattctcattcaaaaatttagaaaacccaataaaactataaaaaatgtataacaagattccatgtagaatatgaaatatcaacagtccatataaaaatataagttataaatatctgaaatttggaataataaaataactattaaaaaatgagtccaaatacaacacgatacgaaattaagtataaattaaaatccttaaaaagaaaaatctagaataaaacaataatttgatttgaaacaaattcgaaattag

SEQ ID NO: 47930 - DNA, 730 bp, Oryza sativa
  unsure (1)..(730): unsure at all n locations
ctagaatggtccacaacggaaatagctgatgaacaattacagatgacagaggagcagattgaattgttacctcattggaatcttgagcatttgataataaagaattacctaggtcaatcttgccccagctggctccagccagactgcctgaaagtgctgacttcacttgaactttatgggtgcaggaacattcagagcctatcattctttgacccactcttttctgatttagaagagtcaaacagcatttatcaccttgaggtgttggatgtccaccagtgtcctaacattgattggcaaggtttggtggctttaccctcttctcttagaagggttacccttggcaactttggccattcgacagatcactttgtgagttgctttcgtggcctctccctcctgacacatctggaaatacattgctggttcttaacatctattcccctgcaagtttggatgagtaatctttcatccttggagaatttgcgtattgataattgtggctccctcacatncatctgggtctctgaggcaagcaacatacacactgttggagtattttcatccctttcaacagtcaccatttcgttttgcaatgcactgttgagtcttgatgagttctttatgcccgcttatatgcctttcgtgaagacattgatgtgttatttgcaaggaattagcattacttgccagtcatgagctccccttttttctcgcttggagagctatt

SEQ ID NO: 47931 - DNA, 730 bp, Oryza sativa
ctttctagctcctgcatcagaaacttctaagtttgttcatgggatattgtaatgatatggttatcctcatggaactaattaaaattagattactatgtgtgcatgtatattgccaggtcaacatgaaagtatgcttttcatgattggttgcgtacataagttaattaatgttgttcctttttacttgcagcaaaaaaaggtgctccatgtaagggactttgggggtactctcatggcatttggtttagagatttgaaaggatttgtgcttgcctaggtgtgagcaattggttggatttggctgttaactgggttataaattttgtgttgtattggatgtttgtcgggttgtgttggatgctaattgggctgtaacctttgtgctatatgggttgttattgtgtttgattgttgggcctatatgggcttaacccacttgttatttgatactaatgtaaatgaatataataagattggctgaaaatggtgtggtataatgtttgggcctatatgggcttttgcaatggacttggtacatttattatttgatattaaagcaaatgaatataatagaattaggctgaaaatatgccacatcatagatgggctaggctaaaatctaatcgggcttggcattgggctaagcccataaacagggtgttcaatacatggattttaatgggccatcagatattttatgacgttttttatgttagatatgaacgtcacaa

SEQ ID NO: 47932 - DNA, 616 bp, Oryza sativa
caaagatgcctttgtagattgtgtacaaagtttaaaattccacaacttgatcttgctgaattacctgtattgatccatctgtagctatgttgcgagctatatacgacaccacaagaacttcttaacactcttaggcgttgtttagttcgcgaaaagaaaatctttagggtgtcacatcggccgtttgaccgaatggtggaagggattttcgaacacgaatgaaaaaattaatttcataactcgcctggaaaccacgagacgaatttattaagcctaattaatccgtcattagcaaatatttaccgcagcaccacatgatcaaatcatgacgcaattagactcaaaagatcgtctcgcaatttacatgcaaattatacaattagttttttttcgtccatatttaatgtttcatatatatatctaaacatttgatgtgtctaaacatttaatgtaacagaatttttagaagtttgaagagaactgaacacagcctaaataaagccttattttgcaacagatgtgcgtccgtctagttactcgtctactacttttgtttggttttctttcctgaccagctgagctcagcaccccgtaatactgagaatactgtagtatt

SEQ ID NO: 47933 - DNA, 1093 bp, Oryza sativa
atagttttacacatttcaacaaaaatttctgaataagacgaacggtcgaacatgttttaaaaagtcaacggcgttaaatatttagagacagagggactatataacagtctaacaccaagctagcttaattccctgtggcttgacaccaccatctgatgatctgaacatgcatgaagtgcaaatatatgcggcaatatctgactttttttttgagaacgagcaatatatcttaacttgctgtgataataagtacgtacttacatgtctggatgagaatttttcttatttttcagacttttataaattcaaaattttaaaatcaactctcacaaatttattcttttttaaaaaaaggaaccttccagtcacgccataatagcaagaaaatgttgccacaccatgaacagtggtttatttctttctggcgtggaaaaaatcattttaaaatcaagttttgggagggtttatgtgtttgaaacaatctaataaagtggtttaaataataaaaataatatctccggatgaactggggaaaaaaatgaagtagcaatgtgtcctagtagttatatatttgacacactgcatggggcaactaatatatataaacactctatttttttattaaataagtcatttaatttggatattgatgtgggagccagctagcttgggcattttcacggctgcagtttgtaaacaatagactgtagccaaagatatagccagcaaataaataattttaagataaaacctttacagttgtatttttagtgtccaaaagccaattaatgagatgcgcatatatatgcatgtatgttattgtgtatttaagatgacagtgttgactgcccgtgtatatttttatggatccatatctattcacatatacagtaaatcattcgtactaaaatataaaatttatcatcagataggacatattttagaagtacgaatctaaacatgatcatgtttagattcatagtcctatgatatattctatccaatatgattctaggtttttatattttagtactgtcggagaatgaactcctccaccagagaattgtgaggcccattttgtaagttcggccaa

SEQ ID NO: 47934 - DNA, 1639 bp, Oryza sativa
gggccgtcggctcattactttttattaattatttttgtctgactaagatgttgatcccattgagatttttttaataaaaaactcttctagtgccatccaagcgccacgtagccattaaatgggatgaaaaccaagttaacatataatgtaggatgctttgtacctaatcctatcttactataaacttatcctcgactaacttcttaagcttaacatgcaaagatgccacatcatcatcccccgccaaaatgccatattatcatccactaattaacaagatgtcacatcatcatccactaacaatcatcacatttaaacatcatgcaaacatgcgactccctccgtcccaaaatataagggattttgagtttttgattgcaacgtttgaccactcgtcttattcaaatcttttttgcaaatataaaaaacgaaaagttgtgcttaaagtactgtagacaataaagtaagtcacaaataaaataaataataatttcaaaaaaatttgaataagacgagtggtcaaacgctgcaaacaaaaactcaaaatcccttatattatgggacgagggagtatatctttatatttttataatttaagagcttttcaaatacaaacatgttaaattatcatccaatataattcacataatatttcaatgtatatctttattatgttttatgatatcctatatatttatatagttcattcttacttagtgcttaaatgattaatctatggttcaaattatctttctctttttttcctctaattaagtcatatcacatcaattgtttttagcatttagatgattaatctacggtccaaactatctccctactttttttcttccataaagtcataccaccttactttttacgtttgaatcaccattctacatactatttaaatttaaattatcataaaccatattaatttacttaatctgatgttatataactattttaaacgttatttttttattgttatcatactaaattctcgcagcaatacgcggggttttacctagtaataaatagatgatgtggcttaaccataactcagaaaaatcctaataaccatatcaattaagtgggaatcactttagtattataggattacggttgagtgatgcatgcgaataaaactcccaacaatagttgagctgagcgaccaaagatggacttttctcgttgctaaaggtaggtcaaattttctcttttgggcttctcaccgtggatgggcctaatcagcttgggccgggttttaatcatgcactcgttcacaccggccctattgggataattttttttctttactcaaatcgcagacgaaattctgctctctgcatccgggtggagtgcgactggatctaaaaaaattgcacgaagtttttttacgaaaaactttcagatgtaattatagtataactgaactgtaattacattgtaactactctataactgcacttgtattcaactgtggttttgttgtttagcaataagatcttatgcgtgacatgtgcgaaaatttctttatagtaattttttctcttcatgcacaaatctcaaggcaatccgatggctacaaatctaaaagtttcgaggacaaaaacttgtgaaagttttctagcaattccgt

SEQ ID NO: 47935 - DNA, 861 bp, Oryza sativa
tcacgaaaaataaaatcgtgcgcatattatttagaaaatcacaaaaaaaaatattcatggtgattcgacttcccacggcgcaggaaaaaaaagcgaaaaagggaaaaagcaatggggaaaaaaacaccaaaaaccaaaaaaaaattgttggtgggcgacggcgcgcgtgtcgcgcgtgggccgggtgggccggagtgcgtgcctgcggcgcgtatgcgcgaattagcaaactccggtgagggatcttgtgtactttttccttggaataagttcactttaggtccctctatttgtcgcccagtctgattttcatccctgcagcacaaaaccggatacaacgcatcccccaacttacaaaaccgtgcaaagaaggtcccttggcggtatagtcgctggttttggttgacgtggcgcctatgtggcgcttctttgactaggtcttcgttcaatgtggcattgacgtgacaatttgatataaaaaatcaaacccgtgggacccacatgtcagttacataaataataaaaaatggtggggcccacagtcacaattggcctcatctattatctctatcctctctctaaacacatgccaactcgccagagcaaggcggacaggcgaggcgacggcgggcgaagctcgccggcaggagggcggagcggcggcggccggcggagccaagcgggcggcgacgcgcgaagccgataggaggaggttgagcagcggctggagcgggctacgagcggggcgcagcggccggccggcggagcaggttgggcagtggccggagcgggctacgagtaggacggcgcctcgtcgccgtcgttcgcggcccgcacaaagcgttaggtacatcgcggaat

SEQ ID NO: 47936 - DNA, 1494 bp, Oryza sativa
aacgagtggtgggccacggccggagctgagggcggagcagctacgggccgcgggaagctcctctcctccagccggtcagcgccccgcgcccctccgttcatggccgcgacttctcccccgccggccggccgctccgtccctctgctccggccacgatgcaccgccggtcctcttctccacgggcgccgaccagccgctccgcccacaagttgtgggccacaacacgccgccgctccggccaccgacccgccgctgcccgcctcgcttcgcctctcgcctccgccctctgctctgccgctgctccagccgccgcccaccccgctccgccggttggagagagagatgagggtagtgaggatgacgtgtgggccccaccactttttattatttttgtaaaactaacatgtgggtcccacaggttttattattttttttgggatcggattgccacgtaggtgccacgttggatgaagacctactcaaatgagcgcctcgtaggcgccaagtcagccaaaactagcgactatactgccgagcgaccttgtttgcatggtttcttaagttggaggatgcgttgtatccggttttgtactgtagggatgaaaatcgaactgagcgacaaatagagggacctgaagtgaacttattcctttttgttttgcaaggacaaataacgtagcctgggccatgttgagaaaagcccttccatgggatcagaccccacaccattatttaaactgggcccaatttacatttatgggccataggcccgtagcctctcaaaaaggtccaacgtgatatgggctggttgaccatctcggctggaccatatcgcgtttgatgcctaaacttttaaatgtttatctgtgaccgcactggggagcgacatcttgaacattaattagttccaagcttaattgtatccatttcaataactatgtcctctcggccattatttataaattcaaaaaaaacacttttaccataatggaataaagaaggaatttataaaaactaggcagacatgtcatactcacccccctttgctcaatacatattacgtggcaatgcataattagctgccatggacgttgacagatatattaatgattctttttaaaggaaatatcgatcattctttctacaatatgcacaatcagccagctagagtatttgtgtactcgattaataataattaatctcttgtttgcttgtactcgcatgctattttctcactcggccattattttacccacgttcgccaattattatcaccgaatactgtttatatttaatatttaagctttgactcttcttttttaaaaaaaaagatatcgtgcataaacatttgaaaatatgttaaattattgaagcgtgttgtatcctgaaatataaaaattaagatttcgttaataagctttctttaatattaaatattagtataatcatttaaaaattattagccgtggaagttaaaaccatactttaccagac

SEQ ID NO: 47937 - DNA, 689 bp, Oryza sativa
gacggcgtggtgtcaaataggctgggcagcgacaaggcggtggcgaggatgttcaaccggctggcgaaaaacgcagtgctggaccggcggagcccgctacgcggcgtgcaggggcaggtgaacgaccaccgggagaacgcgtggaacgagtggtgggccacggccggagctgagggcggagcagctacgggccgcgggaagctcctctcctccagccggtcagcgccccgcgcccctccgttcatggccgcgacttctcccccgccggccggccgctccgtccctctgctccggccacgatgcaccgccggtcctcttctccacgggcgccgaccagccgctccgcccacaagttgtgggccacaacacgccgccgctccggccaccgacccgccgctgcccgcctcgcttcgcctctcgcctccgccctctgctctgccgctgctccagccgccgcccaccccgctccgccggttggagagagagatgagggtagtgaggatgacgtgtgggccccaccactttttattatttttgtaaaactaacatgtgggtcccacaggttttattattttttttgggatcggattggcacgtaggtgccacgttggatgaagacctactcaaatgagcgcctcgtaggcgccaagtcagccaaaactagcgactttcctgcgagcgaccttgtt

SEQ ID NO: 47938 - DNA, 646 bp, Oryza sativa
taatggctaaaagttgttatattttagggcggagagaatatacccctagataataaaggtggatctagtattatccgcaggtgaatccattgtctatccataaacacattcattatatattcatcatctttacaatagcgaaaaagattgagaatgacgatttatgtatacaataattttatcatctttaagaaaaaggtataccatgagattccatattttctaatgttaaacttggtatctccatgtaataataagtatctcgaggtaccgagttatttttggtgctacaagtactttaaaaaggaactctctgaattttctcatatgtatatatattgcaaatagaagcttatatacgacctatttatgcaagaactatatatgcatgcacaataatttgccactgacaagcgctagattctacgatttgtcatcgataaaaatatacaacttctaggtacaataatatgtactatcatacaagtgttattttaccatttttaccattagtatagttaacctccgttatcaatctttcattttttttacgatgccgaaaaaccacgccttgggaggtttgcaatatctactactatttcaatgccattttcaaataattcaattaattaagagcaaattttat

SEQ ID NO: 47939 - DNA, 1058 bp, Oryza sativa
atatttattgctaattaccataattagccctaatttactataattagtattgattaggtaattagcctagaaggaagcggccgcgtgcgcgctgcttctgtggctcggcgcgcacgcgccgagtaggaacaccctccctcatcttatcatccagttacgaaattgtcccctaaccacaaaaccagatatattatatccttcaacttacaaaaccgttcactttaggtctttcggtgattttgatcctagttttgtctaacgtgacagctgagtcagcgtgaggcccacgtatcatgatgccacgtcatcaccctctcccttcttcttctctctttctcacacacttttctcctctaggcaagctggccggcggatggggaggaggtcaccaggggtgaggcgggagaggaggaggtccggcggtcggcgacgaggtggcggtggctgcaacgcgggagcagggcgctgtgcctgggtcggatgtccggggcgaagacgactgcggcggcggcgaccggaggatcgaggaccctctcctctagtcatctcgaggagcacagccggtaggagaggagtgctggcacggtgggggaggagggctgacgaacccatccatggcgatttgacggtgagacggcggatggcttgagttgttcgttcagacttcagagtgccttgagcataatatctctccgatgctggtggtggtgaaggcgaggccctcttttaggttgagcaccttgaccacaccgtcctctgccaggaacgccaagggcatggtccttcccaagccagaaattcagaaatgccgctccttgtcctgattttcttcctagtcctcggtgtactttgccccgcggcagcggccaaagagcagttaatcttaaacgagttcaccagcacaaaccttcatcttcgacggcatggtgatgggctgctcgatcatgctgaccaacaacgtacacaaaacaagcaagggccatgtcttgtactggtgcctgccacaagatgcccaatagcacgggggatgcttgcagtcctttctccaattaattatg

SEQ ID NO: 47940 - DNA, 736 bp, Oryza sativa
ctataggccgaattcgagctcggtacccgttgtggacttagacgtgtggatgcgatacatttcttaggtgatgttcccatcaatattgaatgtaatgttgtctgaacgtgctcttcaaagtgataaaatgaaagctctcctatcatgttactctatttcttagatctacatgcttctgttgcacatattgtagctaagtttccttctaaataatatattaactagccagcctagtgccaattatccagggaatcatctatgaaaagttattcaagggtagtaccatcttggaatttattttttgtaatattgtgtgtgagttatgtactgacaggtcttttgaggagatgaaacattctgggctcagcatctggttctcatgttcttttgttcttttatttgcctgtgtgacctgtactgatataattgttcttgttcctttgttcatatgatctgtactaataaaactgttgagctggaagaattaggtacaaatacacctatacctaaccaactaaaccattaggggaataataatggaatatagttaatagtttagtcctttggggtttggacaacctgttgctttctttgaattcatacttgatgatttgttaagaatttattttcatttcatagccagatagatgcaatcagacatgcttgacttttaaagcttgaaaggtgcaacttgcagcttcttatcttctatttaggattctttcattgtcattga

SEQ ID NO: 47941 - DNA, 575 bp, Oryza sativa
tatagggcgaattcgagctcggtaccccgtcccaaaatataagcatttttagcttccaatctagacaactgtttgtctagattcatagccaaaaattactatattttgtgacggagttagtagccaaaaattaaagttcaatatttaatttggattttgaaattgtttttttttcatcgtagtaattgcttgataagcataaacataaacagcgaaacgttgcacatcacatgaagagaaaacaattcatgataagcatatactctcttcgtctaagaaaaaacttaacgtagaagtaggaggacgaatttgaactcctacgagagtcacatcctcttctaggttgaattttttctcaatggaaaaacgaaaaaacctcactgacttcctcgaatgaaccacggctggcggaccatgtatcgttccaggaattgcgatacgcgatatagtcccagttggattcatcgtcgtcctgcgaccgcatcatctcttcgtatgctttgtcctgctactcgatgttctttcttaccctcgacttccattcctgccgggtctctatcctcatgggtctcgac

SEQ ID NO: 47942 - DNA, 1330 bp, Oryza sativa
gaaagaaataaaccactgttcatggtgtggcaacattttcttgctattatggcgtgactggaaggttcctttttttaaaaaagaataaatttgtgagagttgattttaaaattttgaatttataaaagtctgaaaaataagaaaaattctcatccagacatgtaagtacgtacttattatcacagcaagttaagatatattgctcgttctcaaaaaaaaagtcagatattgccgcatatatttgcacttcatgcatgttcagatcatcagatggtggtgtcaagccacagggaattaagctagcttggtgttagactgttatatagtccctctgtctctaaatatttaacgccgttgactttttaaaacatgttcgaccgttcgtcttattcagaaatttttgttgaaatgtgtaaaactatatgtatacataaaagtatatttaacaaagaatcaaatgataggaaaagaattaataattatttaaatttttttgaataagacgaacgttcaaacatgtgtaaaaaagtcaacggcttcaaatatttagggaaagagggagtatattaagtgtggttggtattatctaaataagaaaataagtgtggttggtgaggaaaaaaaactgtgtagtcggattatggtccagggatgtactacgtgcacaattcgcctcttctcagagagaaaacgacgtctgaattacgcatgcacattgattaattaaacgaccggtcgtctcgtctctctcacaccccccggccagccggctaccatttctaaaacgtggaaaagtatatctattctgctaattaacaagctagctacttcaattataacacatgttttgtgtgcatgctgatatgatgatcaataaatcaattgattgattattacaacgcggtatacgtactggcctgcatgggaacatatacagcagctgatcgatatcgatcgtcgcatagttttcgatcagtttttaactgtgcaaaacttaagttaagctgtacttttttttctgtgtggttattattattattatttttgtaaatgtgcatacttaattaattactgtacgtatactatatcgatcgtagcaaaagttaattactgtacgtatccggcggcggctaagggctggctgctagctaggtcgttcgtctcatcgactgatataaacgtacgtacgtacggtgaaattataaatttggattgatccatgacgacgatgactttttggttgctgtgaggaataatattctatctatacgtatgcatacgtacatgcatacatagcactgttcctatcgaagagcgctcagcccggcag

SEQ ID NO: 47943 - DNA, 5406 bp, Oryza sativa
tattctgctaattaacaagctagctacttcaattataacacatgttttgtgtgcatgctgatatgatgatcaataaatcaattgattgattattacaacgcggtatacgtactggcctgcatgggaacatatacagcagctgatcgatatcgatcgtcgcatagttttcgatcagtttttaactgtgcaaaacttaagttaagctgtacttttttttctgtgtggttattattattattatttttgtaaatgtgcatacttaattaattactgtacgtatactatatcgatcgtagcaaaagttaattactgtacgtatccggcggcggctaagggctggctgctagctaggtcgttcgtctcatcgactgatataaacgtacgtacgtacggtgaaattataaatttggattgatccatgacgacgatgactttttggttgctgtgaggaataatattctatctatacgtatgcatacgtacatgcatacatagcactgttccctatcgaagagcgctcaggcccggcagctaacacgtaacgtaaaagcacaccgtcaatcagtttgttgcatgcatgtatatacaataatgtaaattatatactcccctccgttccgtttcatattataagtcgtttaacattttttctaaataaatttctttgagtttgaccaaatttacagaaaaatatagtagtattttcaacacaaaataaacatattaagagctcccctaccgtcgccctactgtcgcgctactgctccaccgccctactccctcgagctcccctgccgccgccgcgctgctgtcgcggctgccaccgccgcgctctgcgacgtgcttcatggcggtctcccagtgggtcccggtgggccactgccgccgctccagcccccatccgccgccgccgctgctctggcccctgtccggcaccgccgacaacccgacccttgcccgtcgccgatgctcccgtgaagagaaacgggggagaaagagatgatggagagagagagggaggaggaagatatggccctgccgccgccctgaccgccatcgaccactccctcgaccaccgccgtcgccgccctagtgtcacctgcctgtcgctgccgcttgccctagtgtcgcctacctgcctcccttgactccctcgatcgccgccgcttgtgaagggaagagaaagagggagaggatgacatgtgggcggccccacatgtcagtgggtcctacaatatatttttgtgtgtgaatgacaaatggatcccacataattttttttatttctaatgccacctaagcaccacgtcgatcaatgccatgtggaaagaagaccgagtcaatactaccatgtagacgccacgtcagcgaaaccgtcctccaaaaccatctagctagggagttaaattgcaccggttttaagagttgtggtgtcgagatatccggttttgtagtttagggtcatggattatatttcaatcacttttgagtgtcacaaagtgaacttattccaattatatgtgctacccaaatttgggtacagtttcccatctaaatatatattaattacttcaaacgatcttatacatgcagacaaagtatcacgtacctgccaagcatagaagccttggagaataacatgggaatatacggggaaatatagagaagataataaattaaagagatcaatttctatactggacagtttaattagggtgtaaaataaagtaaaacccagaaccggcatacacaattttctaggcaattgtcaagctagttgaattgaccgtctaaataatttcttcatccagccatttcgttccgttgaagcctttatacgtccattcttgtgagtgcgtcatacatacgtacatgcatgcatctaaaatttgcagtcaagtctacctatatctaattaagcttgcaaactttagtttccgcggcgcaaagtgcaaacgatattatattatcaatctgattaactaattaactatctccgtttcacaatgtaacactttctagcattatccacatttatatatatgctaatgaatctagaaagtcttacattgtgaaacggagggagtaattaaataattaatagtactctcctccatcccacgaaatagcaatttagtacccgatgttaacccatcataatactacaaatttagacatagattattctgtccagattcatatactccatccggccgtctaaaaaaacctagcatgtctagatttatttattgtattagattatatcccatccaagtttcagttgtggttttttttttttttgaacgatataagtttcagttggggatttttttttttaaacggatggagtacgtatcaatccaattgaccagtaggaacgcgtgcacggcagcatcagatcaggattctgtttctccatcgatcataatcgatcaggtgcacgcgtcaaaccggagccgcacgggtgtttcggttgcaatgttttttcaattttctgcagtgaaattttcggcttgttcagttgaccggcaatagctagcaatcgtactgtctacgggaagatccaacaaataaaacgtttgcgtttacccggcatttatgcgcatatattgtgattcacgcatgtgcatatatgtatcagcgtatgcatgtgcttatatgtcaagctagctagaattaatagtctataatttcttcaacgatatgttttttgcttttcattttgtaggtattgtatatattgcggaatataatgcacaattctagaaacggaattttgggaagttctataaatttcggaccgaattgaactaagttaaaatttgaacaaattttggttaaatttgaataaaattaattttattaattgaaaaagtgtatgtttctatcgaaataatatcctaccaggggagatccatggacccgtaattattaattgtaccaatggcgccatagacaatatcaaattattaattgtacaaaaacattggctaattctatcataaagcacatgcatcttcattttgtcatatactcctggtcgtcaaagttagataaatttagcttataacaaaactaaaatactttagaataccggacgagtatcatatagtataatatataccatcggttgggcaatgtcatgataattgaatgaaatcatcagttcgtcactagttatatacgtgttactggtgtaatgttcagtttatgcaggaaacctattgggcgggatgttgcttggtcagctagcatatactagtatataacaataacgaccataacaatattataattccaacatgtcaggaatcgagacattagtttcatttgacaagtagtagtatattaatttacgcgttacgatggatactacgtacccccgtcccaaaataagtgcagtcgtgaggaaccgtgtccagcgtttgaccgtttgtcttatttgaaaaatttataaaaaaaattaaaaaaatagacacccataaagtattattcatgttttatcatctaataataataaaaatactaatcacaaaaaaatttcaaataaaacgaacggtcaaacgttggacataaatagcgcaaaactatacttattttaggatggagggagtaattaactagtacagtggacacatgtttattacaatatgatctcgtctcaaggatgacaaaaggaaaaaaaagaacagaataaggcgacttgctaattaaacagaagctaacagtaaccaagctttcagtaagaggttcaatctgtcagcaaatttctgagctgttaggaagatttcatctgtcggtaaaaggtgatccatgcatgtaaatgccgtcactttatatgtcggctaatgatttgcaaagtcttcaatggcctctagcgcactcagtgaagaaattacatatcatgagcaaattaagatgcactaactgagtccttgtatggggctttggacgacggataggattgtttggggaaatccactacgtgcaataatgtgctagcctgcaacattcatcgatggttgcaaaatcctccatttacaatttgcattgcatagtaattttttgacatgatggactgacggactgtgcaatagctaacaactcatagagtctaaacatatttttcccgtgagctaagtgcctgtcaggaatataatctatattcgtcggtgaaaccgagaccgttggattaaaaagagtttgcacgcgacagcaacaccaggacttgtcacaacatttcaggtacatatacatacgtatatatctgcaaattaaataagaggaagaaaaataagaagcaaaaaagatgatacaagtttattaatttcattttctggacccagtcaagtcgccgtgcagacaggaggagagtatacttttcgattcagaggaggtctccaaaactcgtcatgcaatatgaaaaaaaatgccgtttgttgttttactgcttcttggtcatacctaccaacaaatgcaaggtcgatgttgatgatcctagtataactgaaaacgacgacgacttctgccatgaaatgccgtacactttctgctacctttgttcagcttctctctctctagaactgtttacgcaagctaatctgtacgtaaactagctatagaatagaatgacgcatgtgttgaacttggttggtgaatatgaactctagcttttcggctagctttcctctctctcttgatcgatctgtttgagtaattaattaaagcatataggagtatatagtatatggtatagtacatgaaactggtaatggaatgaccaatatgtctggaactgaacgttaattatatattgtcttgacttttgaccgggcattcattcacgcgcaaagataaaaaaggtaaaaaatctcttgcgactttgccttctagctaccaacctagaatagcttatgaatatatagtaatttcgatttgatcgggttaattaatttaattttgtcctggtagaacatattcctcaagctaaccatacattttattacctccccgttctatacttgtgggtcgatgtgttgtctggtaaagtatggttttaacttccacggctaataatttttaaatgattatactaatatttaatattaaagaaagcttattaacgaaatcttaatttttatatttcaggatacaacacgcttcaataatttaacatattttcaaatgtttatgcacgatatctttttttttaaaaaagaagagtcaaagcttaaatattaaatataaacagtattcggtgataataattggcgaacgtgggtaaaataatggccgagtgagaaaatagcatgcgagtacaagcaaacaagagattaattattattaatcgagtacacaaatactctagctggctgattgtgcatattgtagaaagaatgatcgata

SEQ ID NO: 47944 - DNA, 2222 bp, Oryza sativa
ccggtgctcggcggaggcggtggcagcgtcccgtggaggaggctccggtggcagacgtcaatcgggtgtagcgccagggcgtcgccggtgatcagaggtgggtctcgcgtcatcgacacgaatcagagcaccatgtcgttgatgacatcatccgtctgtccatcacacggatcaaatcaaatcggttcttcgatgattcttgatttcttgattgattggtcgattccgcgatgtacctaacgctttgtgcgggccgcgaacgacggcgacgaggcgccgtcctactcgtagcccgctccggccactgcccaacctgctccgccggccggccgctgcgccccgctcgtagcccgctccagccgctgctcaacctcctcctatcggcttcgcgcgtcgccgccgcttggctccgccggccgccgccgttccgccctcctgccggcgagcttcgcccgccgtcgcctcgcctgtccgccttgctctgcgagttggcatgtgtttagagagaggatagagataatagatgaggccaattgtgactgtgggccccaccattttttattatttatgtaactgacatgtgggtcccacgggtttgattttttatatcaaattgtcacgtcaatgccacattgaacgaagacctagtcaaagaagcgccacataggcgccacgtcaaccaaatccagcgactataccgccaagggacattctttgcacggttttgtaagttgggggatgcgttgtatccggttttgtgctgcagggatgaaaatcagactgggcgccaaatagagggacctaaagtgaacttattccaaggaaaaagtacacaagatccctcaccggagtttgctaattcgcgcatacgcgccgcaggcacgcactccggcccacccggcccacgcgcgacacgcgcgccgtcgcccaccaacaatttttttttggtttttggtgtttttttccccattgctttttccctttttcgcttttttttcctgcgccgtgggaagtcgaatcaccatgaatatttttttttgtgattttctaaataatatgcgcacgattttatttttcgtgattttttcacatgttttgttgtgaattttttaaaccacatgcgcacgtttcaatcaaaagtttttaaaattttaataaaaagtttttgaattataagtttgaaagtttttataatttaagttgtatgattttaattttgagatgaaagttttcaaatacgagttaaaagtttcaaatctttagtcgaaagtttttaaatttgagttgaaagtttttaaattttgaattgaaaattttaaactttcaacactaatttaaaaactttcaactctaaatttaaatttttaactcagattgaaactattcaaattaaaaatttgaaaaaaaaataaaatcaaaaattaaaaactttcaacacaattttgaaaactttcatttcaaaatttgaaaactttgaactcaaatttgaaaactttcatctcaaaatttaaaaactttcaactcaaatttgaaaactttcatcttaaatctgaaaactttcaactcaaaatttgaaaactttcaatccaaaattcaaaaactttcaattgaaaaataaaaagctttcaactcaaatttaaaattttcaactattctttttaaaacttttaactaaatatttatgttttttaaatatttattgctaattaccataattagccctaatttactataattagtattgattaggtaattagcctagaaggaagcggccgcgtgcgcgctgcttctgtggctcggcgcgcacgcgccgagtaggaacaccctccctcatcttatcatccagttacgaaattgtcccctaaccacaaaaccagatatattatatccttcaacttacaaaaccgttcactttaggtctttcggtgattttgatcctagttttgtctaacgtgacagctgagtcagcgtgaggcccacgtatcatgatgccacgtcatcaccctctcccttcttcttctctctttctcacacacttttctcctctaggcaagctggccggcggatggggaggaggtcaccaggggtgaggccggagaggaggaagtcccgctgtccgcgacgaggtggcggtggctgcaacgcgggagcagggcgctttgccttggtcggatgtccgggcgaagactactgcggcggggcgaccggaggatcgaggaccc

SEQ ID NO: 47945 - DNA, 560 bp, Oryza sativa
tcaacgatgaattcctgagcatttctaagccgcatgtgcccatcattgccagataggatgccatgctttgcagaaaggtacatgacatatttagatagttctctgcttggacctctggatggagagctgcagcctagctcatcttcatggaagaaggatatgtccgtcgcaatatgccaagcaaggacagcagacatgaaaccggcacgctgaatgctatcgctgatcagcacctgcagccgagctcttgatgaactttcaatgtgcagtttgctcctcatgagctccaactttgcccattggccggtgaatttgctgatgtccccacacatcatctggatgcaatctgcttccaacctgtagtagcttatcaaggacgagcttcttcagctcatgagagatgtcgacatgagtcatagtgctgggctggatgccgatcacacgcttcatgcatttcagtaaacaactgccagctgctgctctcttctgctttatacatccgatgatgaggttgtactgtgccaacttttgggaccattgtggtttgctctctggatgga

SEQ ID NO: 47946 - DNA, 1098 bp, Oryza sativa
tctttagctagtgttacttgttttggggatttcttgggagtgtagcgtggctctgcccccctcccgctgtttggagttgcgtttttaaccgtcgtagtagttcctagcttcaagtcccccctttaggcataagccagtctagctgattactttgtgtaacaaaaactcttttcctgctaatatattgacgtgcaattcttttacgtgttcacaagaatatatgatttgattcgtcatgtggatgtgttgttctgaaatgatattcatgtggatgcagagtgtttgaaaaaacagaaaacgagaaaatcgaggagatacgtaaaacgagacaagctattaacgtgcgattaattgagtattaactattttaaacttgaaaaatggatgatatgatttttaaacaacttttctatagaatttttttaaaaaaggcattaccatttaatagtttgaaaaacacacgaaaaataaaaataagagactttttccctctgtctagaacgtatatataattcggctcggaattttaggaagaagcaatcactatcactcgaaccaaatcctaataatttcatttcagaatagaattctattgatcgaaacaaccccatgagactttgatttggctggagaaattcctgcgtctgtcactgtattactctttctgaagatggcaccaataatactaccaaaccagtcttacacttccattaattagctaaatcagtagtatatggttaatcagtacaaagatgcctttgtagattgtgtacaaagtttaaaattccacaacttgatcttgctgaattacctgtattgatccatctgtagctatgttgcgagctatatacgacaccacaagaacttcttaacactcttaggcgttgtttagttcgcgaaaagaaaatctttagggtgtcacatcggccgtttgaccgaatggtggaagggattttcgaacacgaatgaaaaaattaatttcataactcgcctggaaaccacgagacgaatttattaagcctaattaatccgtcattagcaaatatttaccgcagcaccacatgatcaaatcatgacgcaattagactcaaaagatcg

SEQ ID NO: 47947 - DNA, 633 bp, Oryza sativa
ttgtaggtcctcgaaacagcacggacgtactacgtaatactactatagttcgttgtagtaattagattccctgataccggcatgtatgtcgtgatctcgtggccctacgcattacttcatcggtcacataaaaaatcattctaatataaatttaaaaatatattttttttagattcgtcgtatattagaatgtgtcacatttagtcctatttttttataggacggagggaataggactaagctgctaaacagtatatgtcactacttatctcaagttttatggagtactatatgactaggctcctctccgttcatgaagactctgtttttggatttctgtattcaacgtttaaccatttgtcttatctgaatctttttaaaaaaattagtcatgcataaagtattatttatgttttatcatctaataacaataaaaatattgaatcacagaaaagttttaaataagaggagttaaatgttatatccaaaagctgaaaaataaagtctttgtgagacagaggaagtacactttctttgtttcaacatatataagtgtacttttaaaagtgaaagagaaaaataaaaggaagaaaagatcacctaagtgacccatattaattattaaacgagagg

SEQ ID NO: 47948 - DNA, 849 bp, Oryza sativa
aagcacaaaattaaagatgatggatatgtatggattgacttggacacgcgcttttgccttttactaatgactttttcaaggcagttgactctgttgacttaaaaaggatatctcaattaaaagtaaaatattctcaaatattttaagttagtgccttaggcaaagtactgtcacttttagtggatattggttgaaatggttaagcagagtgctagtgtgctttactaatctttggacatccatcaagctcattatccattaattaaccacctcttaaattaaatgtcacgtactaattacaataataatatatttaattataatggtaagaacattcacggctactgctaaaatattcacggagtagtaaggtacagagtttcgtaggatggaagaaagaaaacccataagttcgaaccagaacaaaatttaccataagttcaatacataatctaattgttgactgactaccaactaacatggtataaatcaagttaggattagataatctaaccaggtgaacaccactgagctccgaggaacatcactctccctatcagcttgttgcttatcaaccgtagctaacatttatatttaataacttattttaaaatttaggtttttgtttgtcttagtttgtttttcattgagttttaaaccgctaatgataatataagaatacatatttttactaccaattttgttttggttacttcatcattattatagagcttatcaaccgtggaccaaccaatcaaacactggaattttctacaaagaagaaaaatcttaaaaatcttaaaagattctaaggaggaaatatgtagggcctggcagtagaatccataa

SEQ ID NO: 47949 - DNA, 716 bp, Oryza sativa
gatagcttaaaactatcataatttttttatggaagttcttccttggttgcagcatgtgaaacgtgtgctttatatataattaattgattttcattaaatttccattttgatcaatctatatacttgatctcggattagaaaaaacaactagtaggactgtaaacaactggctcgttggtcgatcgctactcaagcacagccactagaataagcaaagcatcttggatcaaatataatttttcccttgtgtttaatttgctcaaggaaaatgaactggtcacatcaaagtataagtggcactctacagataaattcatggattaatttcttcttccagaataggaggacttttcccacacttttgttattatgaaatcagcatgagaagaggccaggaaacggtcaggaattgtttttcctttgggttaatcactagggagttattgtatgaaaattgagaggcaaaaattcattcacgtgcgatcgttaactgtcaggaaatagtttatgacaataatgtcctatttaatttcattgtaatatatggtttactcctaagttaattaatatgttaatttgtattctatccgaagagctgaactttttgtgaaacttaaattaccagcgtttatgtatattagctagttcatgcatataggattcgtataaacagtataaacatataatgcacagtttctatgtcttgccctactata

SEQ ID NO: 47950 - DNA, 659 bp, Oryza sativa
gtgaaactctgaagaaatctgcagcagggcggagagcaagggtagaatggagtgaactgaaacaggagtttggtggggttcagacttcagaggggcacaacaagatctgtttgactgttttttgcaaagagaacacttcaaaaccatcaaagatcagtactagccagcagtatcctacactacatatactacctctgctccataggaccataataataagttcatttttggctcaaaaaaaatcatttttaaagtaacctttgtattgtagtttgtgaaagtagagaataattgtattggaagtagataaagtaagaaataattacatggggatttgataaagtagagatattttaatcttttaggttttgtatcagtatgtgtgggatgggtgaaagatgaacttattttggaatggaggtagtaatatacatgagctcatatttgaagatttgacattcgttaatttcaaccaacatgtaagctaagtagtaagtacgtctagattgctgtgatcagtgtagattctcggttcatctcacgtcttgtttgtgaggagtaacatattcctttttccccgaaaaataaaatgtagattctcggttgggtttgtccatcgttgcccatgagcacgattgtcgaaaccattaaacggtgtt

SEQ ID NO: 47951 - DNA, 973 bp, Oryza sativa
ccatcaaataatgatggtgagaggttctcatcctcttatcccagccggagtgggttctcccgctctggtcaaagctaggctcccgtttcccgatgtaatagaagcccagaagtcttcacccattaatggtgaggaacatgggcgccccccgtgtcaagcggcatggtgtggtaggccccacgaccaaggcgacgtgtatacggcttccaagttaaggaacaagacatgcatttaaggcaaagatggtaatacttcttgaggaagttaggttgttgggcctatttagtatccccttgaactataaaagaaggaccttgcccaccgagaaaaaagaggacgactctaagaaaacctgaactctaggagaagtagggcgaaaaagctctctggagggaaggaatccttgtaacactcatccataatcccaaacacaggagtagggtattacgcttctcagctgcccgaacctgtataaaccccttttgtctcatcgtctttgggggatctaaccccctcaagaccacacagttttgctcaccaaatcctcgaatctcacccgctacctttggccgaacttacaaaatgggcctcacaattctctggtggaggagttcattctccgacagtactaaaatataaaaacctagaatcatattggatagaatatatcataggactatgaatctaaacatgatcatgtttagattcgtacttctaaaatatgtcctatctgatgataaattttatattttagtacgaatgatttactgtatatgtgaatagatatggatccataaaaatatacacgggcaggcaacactgtcatcttaaatacacaataacatacatgcatatatatgcgcatctcattaattggcttttggacactaaaaatacaactgtaaaggttttatcttaaaattatttatttgctggctatatctttggctacagtctattgttacaaactgca

SEQ ID NO: 47952 - DNA, 548 bp, Oryza sativa
caaaactaatttaatgttcttgattatgtaattttttttataaatttggtcaaatttaaagaactttgactaaaagaaaagtcaaagccttataatatagtatgaaatggaggagtacttcctagtatcatgcaagaattgtttgttttctccatcgacaatagttctaattgctactccatattttgttttctccattcacaacatggttgttaaggctaaaaggcgtcctaaggcgaccccggactgccatagcggtaaggcgtaaggcgaggcgacgccttaggcactccataccaattagatgacaaataaaataatctaatatgatagcaaatcaaagatgcattttaagagcagtacaacacacacacacatatatatatatagatggttgtaataattacttaaccagatatcaatttattaactaaaagagcaccatcttataaatacagagtgagggtgcatgggggaaagagcaaacaaggtaaatatgtgctaagtactaactacaatacaaagtgagggtgcatggggaaagagca

SEQ ID NO: 47953 - DNA, 679 bp, Oryza sativa
agttattaccgtagaccatttcacttctcatagcaagaaaaaaatgacagaaagtacagttcattcctctaagatgtggtagtactaattgtacacttctccatcaaatctaagcctttgaccagctactcacgcaagatcagattcttattaggaattgtggtaacagtacaccaagagataaataatatgagaacgatttggccttatgcatctatatacttatgtcccatgtcaaaagagtcaaacgccgcaactgtgccaacgttgtcctatttttttgaaaacttcctctcttttttttttaaaaaaaagggcaacgttgtcccagatgcatacccctttcatccaaaaaaaaaacgtaatcctacctatgaacttggacatatgtgtgtccagattcgtagctaggatttgtctcttttttttctttttaacagagtagtatgcatgaacttgtgtgtgtgatacctcaataagggttatattcttgtgtgacaagtatatgccctagcttgggatcagcaaataaataaatgagattaactaggtcaatattggactagatagttcacattcacctaaagttacagtggtttcctttatatgcattcatctgtaaatatatgtagtacagtacgtagaaccgatcgttgcttgatcaattcaatggtaaaaa

SEQ ID NO: 47954 - DNA, 677 bp, Oryza sativa
atcgcaatgttgtcttccaccgcacaagggacacctgccaaaccctcactgaacaggtttctgacctttttctttacttaacattccattgatctgtttaattacctccaacatgcagctgtccgcctttcctaatttaatttcataaccgtgcaagcatgcatataacatgcagtctttgtacctacagtttctccttgtcgttttcaattctgtcaatggcctcatttattgacactctggaaaatagcctgttacgcatggtgatcagatataattgcttcctgaaaattaccatgtcctttatgctacgtgtgatttctgtttattatgctgctcatattagtgtcttcttttactccagttccatgattattcatttgtggcattaattccatacaatgcaggaacgaaatttagtgctggtagggcccacccgtgctgttgtgttgtcaatgccggatcctctgatcatcgatgttgaaatgaaagtgaagggcaccactgaatctgaggacaagcgcttgagcttactagctgtgccactcttatgtgctggtaagtattactcacacgtgcttaaatctggttcttacacaagcaagctaagcacactggagttcagacttggctacatcgtgtcatctgtggaggccacaatatctgtgcgtgtcatt

SEQ ID NO: 47955 - DNA, 714 bp, Oryza sativa
atcgttgatgaaaatttctcaatgaacctaacattatttttatagaggtggtaccgtttctacaatttctaattttagacaagtgtatatataattaaaatttgagttttctagtttttttcagtgtgagttttctagtttctttctgccatggattgcagtcaccactaaataagtaaattgataaatatataaattctcaactaatcgagaattttccaaagaaatagtaatgatagatacagtttccaactatttacattcctaaataaagtgatttttaataaagcgctttaagaagtcgagtgtgtgtacggcttgtttcgtggagctgcttctggctgctatagcttctcctaaaatcaaaagctccactaaacagtccaacatttcgatcagattctgcgaaattatagttgtaaaaattaaaaaataaactagaagttagaaacttggataccagcttcttcagattctcagaaaatggttaccaatcagctgctttttaaaattttaaattcctcaaatagactctaaattaaggtgacaatcgcttcactactattggtactggatgtcctacgtacccgttgcagcaggattttaaagttctttcctgggaaacattaatcttggtactcctagctgatatctcactgacatgactaaatatgacagcttctttataacaattaatgtcgttactagtgacta

SEQ ID NO: 47956 - DNA, 736 bp, Oryza sativa
taacaaattaaagtgaaaataattattgcacattcacaactatatttgttatttttgttacaacttgtagaagctgaatttaaacctgcatatttgtggagtgatatatttcatattaatatatgttgctaacttcttttgtattcttttagtgaatattcaggtggcatatacgaaacgagagggtatcggatgaaatcaatttccctgtataatgttaggcagtctgttcgtgtgaccatgaccggccgatggctgcgaccgacgacgaaatgaggagtgtcaaactgtgaaacttgctgacatgggtgcatgcggcgatcgattaatataagtcagggggtgcctgggctgggctttcgatcgtatatcaaacataatgcggggataattgattgcttggccagtttatcagtttctgcatgtatggttcaggggcgcagccatgcatgcctgccttcatctgcggtacgtactccctcctccgtacgttgtttacagcatcaacagtctctataatgatacttaattgttttcttatgatatttcaaaaaatatatattccctccgtttcaaaatgtttgacactgttgactttttagcacatgtttgaccgttcgtcttattaaaaaaaaattgtaaaatatgtaaaactatatgtgtacattaaagtatatttaacaatgaatcaaatgatatgaaaagaataaataattacttaaatttttttaataag

SEQ ID NO: 47957 - DNA, 531 bp, Oryza sativa
tattcacggagtagtaaggtacagagtttcgtaggatggaagaaagaaaacccataagttcggaccagaacaaaatttaccataaggtcaatacataatctaattgttgactgactaccaactaacatggtataaatcaagttaggattagataatctaaccaggtgaacaccactgagctccgaggaacatcactctccctatcagcttgttgcttatcaaccgtagctaacatttatatttaataacttattttaaaatttaggtttttgtttgtcttagtttgtttttcattgagttttaaaccgctaatgataatataagaatacatatttttactaccaattttgttttggttacttcatcattattatagagcttatcaaccgtggaccaaccaatcaaacactggaattttctacaaagaagaaaaatcttaaaaatcttaaaagattctaaggaggaaatatgtagggcctggcagtagaatccaataatcaagatggaacaaaacgctgcagaagaaggggc

SEQ ID NO: 47958 - DNA, 646 bp, Oryza sativa
tcatctgtcggtaaaaggtgatccatgcatgtaaatgccgtcactttatatgtcggctaatgatttgcaaagtcttcaatggcctctagcgcactcagtgaagaaattacatatcatgagcaaattaagatgcactaactgagtccttgtatggggctttggacgacggataggattgtttggggaaatccactacgtgcaataatgtgctagcctgcaacattcatcgatggttgcaaaatcctccatttacaatttgcattgcatagtaattttttgacatgatggactgacggactgtgcaatagctaacaactcatagagtctaaacatatttttcccgtgagctaagtgcctgtcaggaatataatctatattcgtcggtgaaaccgagaccgttggattaaaaagagtttgcacgcgacagcaacaccaggacttgtcacaacatttcaggtacatatacatacgtatatatctgcaaattaaataagaggaagaaaaataagaaggcaaaaagatgatacaaggttattaatttcattttctggacccagtcaagtcgccgtgcagacaggaggagagtatacttttcgattcagaggaggtcttcaaaaactcgtcatgcaatatgaaaaaaaatgcc

SEQ ID NO: 47959 - DNA, 1382 bp, Oryza sativa
tcagcatggggggcacaatatacctcatctttctctagaacaagttgctgcattgttcaagacaaagcagccagtggttgagccgattcagcaaattcctatagggcaaccatcatttattccacagcagcagtagatggggatgtcttaggctcctggtacttagttcatccctgaacaatccatccatttggcacatcaatctccccaacatcatatgggaggtaatgtaaacatccttattcaccttaggtacaatatcggccaagaggatcacctcaaccccaatacctgcctcaatacaatcagttacatcagatgcagcagcaattgggagggacacctcgacagcaaccttgggttgatatgatagccaatgtgatgagggaacaatttggtcttaagcccaaggacggtggtaatttgtattggcatccgtacccagagtactttgaaagggttccattgccaaaccgatacaaggttccagatttttcaaaattctcaggacaagacaatgtgtccacttatgagcatgttagccgattctccgttcagtgtggagaagcatcggctaatgatgcgttaaaagttaggttgtttcctttgattttgtctggatcaacatttacatggttttcatctttgccaaataattctatacaaagttggcaagatctagagaagcaatttcacaagtatttctcaagtggagtgcatgagatgaagttgtctgatttgacagcaatcaggcagaagccaaaggagtctgtcctagattatattcaatgatttagggatatgaggaatggatgctgtatcttggctttgacagattctcagttagccaatcttactttccaaggcttattgacaccaattaaagagatatttttagttcaagccttcgagagtatagctcatctagcccaaaaagtatcagcacataagcaaagattccatgaggctaggaaggcataagaaaagatcaataatgttgatcaatatgcttctgagtctgatgaagatgatcccgaagtagctgcaactgagtgggctaggaacaagaagattgttacttgtcaatgggttaggaattctggaagggaagtgaagtttgattttgacattactaaagctgataggatttttgatttgttgctttgagaaaaacatattcaacttcccgctggtcatgtaatcccatcggctaatgaattggggaagaggaaatattgcaagtggcataacacaggatctcatttcactaatgattgcatttcagacaacagatttaatcggctattgaacaaggaaggataaagtttgatgatccaaagaagccgatgaagattgatggtaatccgtttactgtcaacatg

SEQ ID NO: 47960 - DNA, 707 bp, Oryza sativa
gattaggataaaatacccaaccatttgctccgattcttgaggggaaagatagaggaggatgagaggataaaaacccttcaaaaatcgaaagaatcggggtcggattgggtgcggatttgagggcacaaggtggcgcggtagggcggctcgggctcggcttggccggcggctggagaagaaagatgggtccgacatgtgggtcccacatgtcggtgacccgaggagaagggggcgggcggcgtcggctgggccggcttgggccggttcgaccgcgcggggaagagaagagttgggccgaaatcggcccaacgacttaggggaggattttaaaaacttttccaattaaaataattcgtgaaatgatgtttcatttattaaaatacttcccttgctcaaacaattcctagaaaattctagaaaatagaggaacaagcaaagtatttaataaaattttatctagctcatttttatattgagatttaacaaattaaaattaggtcttatcttttaagcttttaaaattatttctaataattccttttaaacaacaatttataatttaaggattttaaacaagaaaagaacttaacaattataattagatcattattgatcaaataattactgaactgttctttgtatcatttaggaattgagctccgaaaaatccgagaaaattccagagagtataattaaccatggagaat

SEQ ID NO: 47961 - DNA, 571 bp, Oryza sativa
actagtttcatcttcatcttcagcatcctcctcctgaaacgaatcttgatgagttggacccaatctctggtgaacaggcaactttttctgcacttgccgatcctctctccttgcatgtgatcgacttgaactcccaacatatctccttctagagccaccacatcctgggcaatccttctattgacggcaatctcatcccctcattctagcagaacctgaaaaactcgcaactccaatgaggatcaaaattgcaatcatcttcataatatttttcttcttgcatctcatgcttcctctggtattttgtcgcgtcccaaatcgactctaaaatacatccctcaaattgtgcatagaataagtaaaatccatgtgaaagcctccaacaattaaaatgtgcaaagctaaaagtcaaataaggcttggaggatttttggatatttcctaaaagcctaaaatgcgtaaaaaaaatttagtggaattttcagagcccaaattataatttagaagaaataaaccaagttaaaatggttttataaaaaaaaaaatccctaaaaagtctttttcccccctt

SEQ ID NO: 47962 - DNA, 963 bp, Oryza sativa
caatagaaaaattagtcacacataaagtactattcatattttatcatccagtaacaataaaaatactaatcataaaaaaatttcaaataaaacgaatggtcaacgttggatatgaacagtgtaaaaccacaccttttttgggacaaagggagtattatacaagaattagggttttttttactagattcaccaaagaaagcatatatagtttgatctgagattcataagatcgttctcatccaatggactatataacccgatggatttttggtctattgtgagtttataattctcaaattcctcttatatacaattaatctctaaatttataggtagcagcaagttttgctagccaaattgcatttcttccttaatttcttatattcaaattgcttgtcaaacctccaatataattgtcgacagactcaaactgtggtttaatttccttttagtgacgtggattccacggacacattaaatagtatagtgtcttactatataaagttgatgcccactaactaccaaaactcaacatataagtgagttacatcatcacccactggcaattattatgattattttaaatcacatacaagtctgccacatgatcatccactaccaatgattatcttgagtattttaaataccatacaaatatgacatatcatttataattttattgtatttttaagaactcaatatgcaagcaatgtcgaatcattatcttattattttcacattatttaagcatatacatctatcatttctataactaggaaggtagcccgcgcattcgcacggacatgtattgcacgggcattcatgtggatttgtattttttaaaaaaaacttatagtgatagaatgtatatcaactggatgacacctaccacactttaaaaatactaattttttattaaattgggataaatgttgaacctagtgttagcctttaaccattaaa

SEQ ID NO: 47963 - DNA, 1911 bp, Oryza sativa
caaaacgtattcaacatagtgcatatactttaatggttgtagaacaaatataacttttaagccatcaacttgctttcgctgcgcagattatatatgctataatatatgaaagccctcctaatgtcgcggtatattgtacataatagattgaactatcatattagtatgtaaacgctttaagctggttctgtcaatacaataggcatttttttcccatttaagtgaaaaatcaaagcattttaattcattagtatatatttttatccaattattggttcaatctagttaattttcttgacgagacatacaaattctctcattggtagtatgggctttaaactatttatctacttataaataaattaaacaacagtccaaacaacagaaaagtagatataacgtaagaattatgatcagttgttattgtttctatattaatataatagttaaaataagaggggaggaaggaattgaatgagagaagagagaagaggaggggagagtatgtgtgcatataactacgaaaagagagaatataaggcactggaagaaggacgaccagatgggatatgaggggcggggatttttttttatagattcaagggtttgttggaaccatgccaccctaattttgcaaaatttgagatatgtcacccgtatctcaatgacatgtaggacccacatgagtcaatgacatgtgggtcagggtggcatatcacaaattttgtggcatgtttcaaattttccctagatttggtttggtggaacttggattattaagatctaatgatacaaaataataggtccactgcattaaatggattttggtagaaaaactattataaatatatatttttgccagttacaaatttgatttgtttcagttactattaccttattagctgaaaatagaatgatagttttattaattaataagatctatatttactcattgtttcctatagtatattagtagtagatactaaaaccctgaattatagtagtttatgactaacctaataatgttattttgacttacaataatttcataatgagggaagtattttttttggaacaatcacttacagttaggtccattttactttcattattatcatagacctaatttaattgttgtgaacttgcataggacgataaaaatctatatcattgttttttcatttttttttcacaattggttgagtggcaccgcaactcaacaaacataaccaaaagtaacatatttctttctttcgaatgttaacatatatggaaaataagctttaagtataaatttagtaataaataatatgacaaataagtggataaaaatagttgtatatttttgttttagagttttcttaattttttatcacaaaatttgctttcgaaagtatagcaaaaaaaaatgggataggtacatgatttagagagagcgagtgaataactggggaataacaggggaggggcggatgatgggagtaagcatgtccgcatccacatataggccagggtggtgtttgggatattggttgaaactaatgggtttatcatattaaataaaaattaatagctagatgttttatttttttcatagaattcgtagaaatctctcataatttcttaaagcgtcacatggcggtgcaggaattctccacggatatgaaatcatgtgactaaaaaaccatatttttttacaaggttattaatgtttatgcggcggcttagtctactaatttaaaattatgtagcaaattcttacagtataataatatctattttaagttaaagtacaagtcaatatgggttttaaattatcagtttagttgtaaatataatgttgagtatataaaaaaatgtgatgtacttcctccatctcagaatataccaacttttagctacggacctttt

SEQ ID NO: 47964 - DNA, 1888 bp, Oryza sativa
  unsure (1)..(1888): unsure at all n locations
agcgcgacctgaactgantgcgagatcttacagngacacattataatacttaagcgagggaggaagacgacctctctgagctccatgaagagagacggcagcgatggagcatggaattctcgccaccccaatcatgtcgagcttgccgctaaccccatctttcccgagcttggcaaagggggcgggctccatgtcctcatcagtggagggaggaaggaggagaggggtagcacaatgttatggtggacagtgggcggcacaacgagttttgtggctagccgccactcagagaaggggctgctcggtgaagagagcagctcaaggaggaggagcaaggcggatggtggtggtgtcaccattaaaatccgcgtcctttagcatcccctagtttcttcactcctgagccttgatcagcttgggcagtagtgaaggcgctttggcgagctccatctctctagctaggtagtcgacaatgagctcctcgccccttcactacttctagctgttgttgctgccaaagaggactagcaccagatttgtgccaccacgacatcgtcaccaacctttccattctgttctccagcattattggaccttctctccgtcgtggctacaggaccccctccacgactgtgcgtcaccacctttacctcatccactgaccgccgcatatcttcacccaccattgccatatgccgtggagcaatgccaatctacggcgcgaaagcagagggagaaagctcataggggtggagagagtgagagctatggaggccgggatggagagagctcgccagtaccttcaactactccgccgagcttattagagatgaaggaaagagagagagagacagagggggagaagaagagagggtaaggctgataggtgggacccccctcctctctgtgctaacatgcatggattatttgtagagatggcatctagctttgggtaaagtgtccggttttagtagtttgggattgttaaatacccagttttcatgtttaaagacgaattttagaccaagcgaagagttgaagtgcgtaaaatggagtttttccaaggtaaaaatggcttgtaagagtgggaaatagttaattattctgtaaaggaataagttcaccggaggtccctcaacttaacagcaagattttttgacgtcccttaaccacaaaaccagaaatctccacccctaatctatacaaaaccgttcactcaaggtccctaggcagtatatatgcgtggttatcgctgacgtggcatcctagtcagcaaaaataaataaaattaatatgtggggcccacatgtaagtgagacaatggtgtgggtcccacatttctccttttttttctttttctcttctcctctccgggttctctcgagtaggcgcggcgacagagggtgagagaggtggccggcggcggagcgtggacggcggcggcaggagagggagagagaggtagtcagcgtgacgacagcggcgggaaaggaggagatgtggtggccggcgcgatggcgagctcgggcgcggagatgttcgaacgcgccaggtgctcaacctcgggccctgccgccggcgagcggcgcgctttccccgtcgaccctttctccctccctcgccttctcgtcctacaccgccatcctctccgcgcactcccgccacggccgcctccgggaggccctctccctcttctccacctccgcggtcgtctgccctgacatcgcctcttttctctcctctcttctcttcttcttcaatgagggaggccaacggccagcgggcggagccgcgacgggcccgcggtggtcgagcgcgctagggcggcgaggagcaacgaaaaaggcaagtgagtcgggcggcgaccttgctcccgttcacgtgcggg

SEQ ID NO: 47965 - DNA, 2182 bp, Oryza sativa
  unsure (1)..(2182): unsure at all n locations
cgggccttgaatggcatatcagatcgtacagnagctcatcaaggagaagaagaagagaagagagaagagagaagagagaagagaaggagaagagaagagaagagaagggaatgaaatgtgcagctgacatgtgggccccacatacttttttatttttttttgactaggatgccacatcagcaaaaccacccatatatactacctagggacgttgagtaaacggttttgtatagtttaggggtgaagatttctggttttgtggttaaggacgttaaaaatctcgctattaaattgagggacctctggtgaacttattccttccgtaaaaaggaccttgatgactaagtgggctccgattctagggccatacccaaaacccagcccaagattcgttttctgcgttgtgatttagcccataaagaccacaggcagacaggctcccactaccactaacgagaagctaccctcgagtccgacggagaaggggagggctaccgccttctgcgccgccgccgccgccgccgcggcaggttggccgcctccgatcgagtcccgctggggtgaggtgagctcagcactgtacttcttgtgcagtatttttggtttcctagatttgcccggttctcgcttggctcaaactcgttctatccctagcttgccccggcgcccgccgcttgttcgacaaaatggctgaccggaagaagtgcaaggcggcggcggtcgccaccacggatggcggtggcgaggaccgcatcagcgcccttccggacgaggtcctccagcgggcgctctccttcctgccctcccgcgacgtggtgcggacgtgcgtgctctcccgccgctggcgccaccagtggaagtccgtgcccgccctgcgcatctacgcgttcgatgattgccgggacgtccagcacctgagtgatttcgtcaccaactttctgctccggcgcaaccggttggctctacatgaatgcgacatcacatgctttgacgagggagacggttgtgaggtgttcggggagaacgccagacagtggatccggtatgctgtatcgtgccaagttcgggtgcttcgtgtttctgttgaagcgcacacccgtctatttggtgcgcctctcaaagcccagcgtttgaagagattagaacttttcagcgtggagttgggggccttctcccttgatttctctagctgcagggagttggaggagttggagctgggaggttgcatcatcaaagacaaagtaaagcagatcttatcagaatcattaagacgtctgagaatcgaaggatgtgattttttccgaaatcgcactcgcatttcttgcccaaatctcatttccttggagattaccgattttaccttgtacactccagtgctcatgagcatgccttccttggcatcggcatttatcaggtttggtgaacactgtgctgattcttgtgactgctactattacggcgaatttggtcccgattatactggatgccatcacagtacagttaagggcaatggcactgtgcttctcaatggtttatcagatgccatccaattagagttgataagtggtgccggagtggtacgcttgagccgccctataagaactcctagtgttttttgttgtcagctacatcttgttgacttttcttatccatccaagagaacattaagctttctacaaaacaagctatctaagtgtattgcctgtttgttgccaattaacaattgcggattatcattatattaacatgtaaacatcctttacagttgtttctgacatcatactatattaaactgtgactagcagagcttaactagttatccatgttaattttcaatacctggtatatcatgttcttgtttactatgtcttgttcatcagaagatagcaaaaccaagtacaggttataaatctctgcatcttcttctacctaataattacttgaaatataaaaaaacccctacacacagctcctgttcaatccagtatttccaaatctgctattatgaagttagaccttgaatttattctcatcaatttgtgcattgtccagttcattttcagaagggattttagatgttgccctacatttaacaagctgaaaacactgttgctcaatgaatggtgtatggctgatgaagtacttgcagtaggnggcgtgtcaatcgatnntcaatgcccgg

SEQ ID NO: 47966 - DNA, 788 bp, Oryza sativa
  unsure (1)..(788): unsure at all n locations
cgcctacgagtagatcgaccntgcgcngagcncanantccgcagccctggagctatacctcggtcagatcaaagaaggcactcaatacatgaaggattgaaagtttgggaaatttggtcgaagaacggccatttggggaatttggggaatattaacaaatactttatttctcttatactacttccaactgatgagataatcgtttggcggcttgcatgtttctaatttatatttaagaccatctgtttccgggtttttcgaatttattttatatcgaacgctaggctgaaaccgccttttcaaaattggtattaagccatcaggaattctgttgagtgagcttgatcatgtgtgtgccatctccttatatgcacatcaccggtcttattcacactctgttacgatttactaggtcatgagaaccatttaaacttgttccgctcgcctgttcttgcttatacccaagccaaacaagagcagactatgcgttgttgggggcgctgtcttccaactcaggggaacactaagacaaaaatatctcttcatgcccttcaggaccttaaacaaaagctggcacgccaactggttctatgttcaaaattctcaatagaccttcctcgaaactcttgtcgtctcttcaatctaccaagaaacaagggttttcattgcttacgtgagatgattcggaccatgcctggaaccgatggtaccgctgataaagctgaaataccaagtttgcttgacaccagttgactcgtcacttcattaaaagcctggtagctaattaa

SEQ ID NO: 47967 - DNA, 792 bp, Oryza sativa
  unsure (1)..(792): unsure at all n locations
ccgcggcattgaaactgaatgactcgcgccttactgcagnacnncatcattgcatttgcatggatagaaattaagctgaccatttcaatcaacactatagtattaagaccatactacaaaggcatgatcgatgtaattgtgtacctgagccagctgccttgaacatgaataaaaactactccctccttcccataacccataatataaggaattttcagtttttgcttgcaacgtttgaccactcatcttatttaatttttttttacaaatataaaaaacgaaaagttatgcttaaagtactatagataataaagtaagtcacaaataaaataattaataatttcaaaaaaatttaaataagacaagtgatcaaacgttgcaagaaaaaaaacttaaaatccccttatattataggacggagggagtatcactggttggctgtggttggctgcagtactcgcaccaacatgggtatcctgccctttcccatgatgatcgtcagatatatcctgcggacgagtgaaagccagcttgcccatcttctttgtgtccattcttttggtgctcatcaaacttgcagtaaactaaaggagtccttgctctgcatgctacaaaatcagtgccaccaaatggcttaagtaagcggcacaanacggttatgtgctcagtgctattttaaccccagaaatgctaccactagaattgttcagtggcggcaacaaattacaacaatgtcaacaataattgcaatntggccaaagaacgaaaattattatccaacccttgttctag

SEQ ID NO: 47968 - DNA, 556 bp, Oryza sativa
ttgttagagtctgttttatttccgttttttgtggcttggttgttacagttcgagtcacgtcctgtaaagccggattcgtgcaagttcacgattaggcgtagtgtagcgagtcgtacgctcacgttctccgccgtgtgggatggcacatgcgcaaatggaggaagtgggagtgcacagagccggagacacgatctacacgattgcatgatctcgttttcgctttccataaaaggagatgaaatatacagaaaagctgcgtaagtttagcggcacaaaaaacttctcgcgtgtgttcttctcttccactgttcatcgtcaagcattgtcgatttccagggattcgtgtgtagtttgatcctgagtttttgccaacaagatcaagatgatgatccaaagtgaatccacaaattgctacctttggtgtaggtagtaatcattcgtgaatcgtgatgaaccccatgaaggggtgttttcaggagggagaggcgccgggaagctttcacgtttttagacaaatccacgaggtaagtaacttattattagaaatttagaatgg

SEQ ID NO: 47969 - DNA, 720 bp, Oryza sativa
tgttttctgttgcctcgctagcttgcagtctctcgttggccgttagctttataaacgctaagttgtcgatgagaattatactttagttaaatctgcactattatcagcatatcctcactacaataattggtaatgaacatgctaacattctaaggatttcttcattcaaaagcaggtcggtaaaatggctctctcggtaataaggtgtgccagtatccagggttagaatagttgctacttctacacacagattattagtgcacagttggactgtaatgaaggtgtaatttcccatacataagaaacataaatcatcacgggtgattgaatccttgtcatctagtgtaaggcatctttcttttatttttgttagcaaaagtatacagtaatataacttttaagacatgatagagtagagtagctagttaggataatggacttaaaatgcacagcttgttgattcaggagttctcacatttgagaaaaatattatgctatatgccgatgcccatgcttcatttctcaagttctttaatatgattcctaattcacaatatgttttatttgaataatgaattaggaaaagcaggtgccaatcattggactggtgatgaatgatagaggttttatctctcgagtgctctgccccaaatttggaggataccttacttttggctctcttgaaaaagaaaaagaatctgcgcctgctcagcccacata

SEQ ID NO: 47970 - DNA, 826 bp, Oryza sativa
tttcgctgctggctagaggacataatatggtccagtttagagactagccaaaagttattttaagagctactttttagtaaaggaaatagtcctccaataaaatagtcctaagttgtttggatccaagggttattttgagagctatttggtttttaatataccttcccatgtagagttcgccacaactgctttatatagagttggaagcattgactgatcttaagtatagatggccatgtgggttgctcggcacggcacggcccaagcccgacagtgcctaggccgaggcttgtcgggccggcacggcccaaccaacacaccaggccgagccgtgccagcccatgggtggcgtacacggcctaggtacggcccaatactactcgggccgtgctgggctggcctgaaggcacgatggctcatcgtgcttccttacagaaaaagtctatttttgattcctcaactccgtgggctgtgtttaaatggctggaaaataagtctattttgtatacctcttgtcttgggccttaccttatataattatttaagtctattttgcatctctatattttttttctttgatcgggccgggctggcacgggcatgatcccagtcgggccgtgctgttcttgggccgggccaaaattgtgagcttcgggccgggccgtgagcctcaggccatatcaccatctataatcttaagtagtcggtatggaagctccatcaataaatacctcagtgcagcggtggatctagaacctaggcaagcttaacgatgaacaacaaacacgagtagaaattgttctcgtaactaaggtttatgataggg

SEQ ID NO: 47971 - DNA, 1975 bp, Oryza sativa
accactgctgccacaggataaagaaatctaaaagaggaagtagctgtaaccggtggagtgttaaatgccgttttttttcggttttcttaaacttgtagggttgtgtcatataggtccctaaactctcaaaatgcatatccaagtcctagtacttgtcaaagtgtatcatttagatcccaaattgacacatcccctctaggatcctacgtggcgctgatgtggcaatgccacatagacgtgacgtgtcctttttttttcttcttttctttttcgttttcttctcattcttctttttttttctttttttctgcacgggtcacagagaaaggagaagaaagggaaaaaaagagaagaaaaaaagaaaaaggaaaaaaattaaatgggtcccatttatcagtcaaaataatgccatatcatgtccgtgtggcatgccacatcaacgccacataggatcctgaaggggttgtggcgatttgggacctagatgacacactatgataggttctgggacttggatatgtattttgagagtttagcgatctagatgacatacccatataagtttaaggaccgcgcgtacactttactcaagagaaaaaaaacagggaaacgctaggattgtgccacgtatacgggagcactgatcggagcacgccctgggagcaggcaagcagcgtccgtaagggcctgtttggcacaactccagctccagctccacccctcctggagctggagctcagccaaacagtttcagctccaccaaaaataagagtggagctgggtggagttctctcacaaaatgaactagagttgtagagctgggtttagacagctccacaatttcactttagatcaactcctgaagctaaatttaagatgtgaagctgtaacaaacaggccaagtatggtcgtatggatatcgctctatactgcgtggtgggccttcccgtcccaaggcaaacctggcccgtatgcgtccatcaagaggttgttctgtttgtttgtttcgatcgtatgacacatacagtcatcgatgcctcagccgatggatggccaggtacttcgctgagccggcaacagcacaacgctccattctgatcccccgctagttgcagcgctgatacaaatgcaagctagtgatttcgctgctggctagaggacataatatggtccagtttagagactagccaaaagttactttaagagctactttttagtaaaggaaatagtcctccaataaaatagtcctaagttgtttggatccaagggttattttgagagctatttggtttttaatataccttcccatgtagagttcgccacaactgctttatatagagttggaagcattgactgatcttaagtatagatggccatgtgggttgctcggcacggcacggcccaagcccgacagtgcctaggccgaggcttgtcgggccggcacggcccaaccaacacaccaggccgagccgtgccagcccatgggtggcgtacacggcctaggtacggcccaatactactcgggccgtgctgggctggcctgaaggcacgatggctcatcgtgcttccttacagaaaagtctatttttgattcctcaactccgtgggctgtgtttaaatggctggaaaataagtctattttgtatacctcttgtcttgggccttaccttatataattatttaagtctattttgcatctctatattttttttctttgatcgggccgggctggcacgggcatgatcccagtcgggccgtgctgttcttgggccgggccaaaattgtgagcttcgggccgggccgtgagcctcaggccatatcaccatctataatcttaagtagtcggtatggaagctccatcaataaatacctcagtgcagcggtggatctagaacctaggcaagcttaacgatgaacaacaaacacgagtagaaattgttctcgtaactaaggtttatgataggtaaaagacaaa

SEQ ID NO: 47972 - DNA, 652 bp, Oryza sativa
  unsure (1)..(652): unsure at all n locations
aatgttgttgggtgatcctcgcttctgcagttttttttcttcaggtgttaagatccttttggttaattttggttttgaaatgcagctcaaaagatcaagtcattgtggattgcagaatgagagggtcacgtttgaagtaactgcagtcagcatgaagctattgtgtagtactagatactggtgttggattgagagggctgcattttgaagttacattggttggcatgaagctattgtgcagatactgtatactgtttttttttaaacaaagttggatactggagttcctgtgactaattgaaaatcatagctctcttggattgagccttccaagctttgacaagttagatttgagcgtgtttgcatatttcgtacgagtacaggaaaatatgcattacatttccatgatactagaatatgaagtaatctggaattagatgggttacgaagaatgtggtgatattttagtgctaaataattttatcttttctctctttttctttatattaatctttaatctatctcgnggattagcaacagaaaacaaaaaaaaaactttttatatgtgtgtctttagcgattaaaaagggcattcctgtaaataaactacgacaaaatacaaacaaattcaacttcaaaataaagttttgaa

SEQ ID NO: 47973 - DNA, 656 bp, Oryza sativa
tattcacctatttgtaagtagtaaccatgccatcacaattcattagaaatatgagatatgtcgttccctatactgtaaacgtcattggacacatgtatatgccactatatttttataacccaaaatgcccctatgtacatttatgtgggcctcatgtgtcataacctttatcaatcttcgagcgaggagtaaccttgctggcgatgtcatcggtctactccttagcatgtgactctcatagcttgtcgtacaccgttcgcagctggttttctttcatgattcagaggcgagtgagcaatcaaactgcgtcgcaacaaaagctggagaactgaaaaaaatgagggaaatcggcaaatggtagcgtgacataagaacatggggttagaaaagaagagccgccactgccaccgttggggacgactaccgccatcgagcgtccatcatgcgcttatcatcgacaggttcttctcgtttctgtctcgtacgtgcatgggtcgatgatgaccagatctgctcctatccctgaccaccacccagatctgtctcgtctctgttcttgccttcgctagccagatctaacgcactccaaaatgataaaagaaaaataaaaatagcctgataacgctagaaggagcatatggggcatatgattagaa

SEQ ID NO: 47974 - DNA, 4289 bp, Oryza sativa
tgcatcgaacagtgtacggtgtgagaaggaagaagcagagctcctgaaacagagctccatagtaccagcttatatcatcaagtctaacagatctctgtgtttggaaccagcctgattggaggggagcaaggcgtgcagaacgatctccctaagcccgcccagaatgcaatgcgaccaacttgtttcttgttttgcatagagtgctgcatccgaaaggtcagacctcatattgatattgtgattgttcatcagtagaccaagacaccaaacttttttctcctattctggatcggcatcgtggtatcattgcaaagagaaaaggatgtgttgcaagctttttcactggaaaatgaaaaatccgaccttgcaagaaattgagaatccgaaactagattcatacacgtgtgcctcaaatgtgctggccattaattgttacgccaaaagtatgtagaactgcattcctacactcctgtctgttcagaacgaaagttgactggcacattcaggatcgctcgtccaaatccaaaaccacagcaatacacatcattcttcctaatgagcttctgattaactgaagtacgtactactgctcctgatccattgtagtacagctaaaaacagcagataaaccgaaaatatgaagagaaaaaaaaaacagcaagaacgagaagggagactcccccccccccccccccccactcattgggttaattaggccgatcgatccatctccctcaaaagaggcattgctgaaagtgcagtaactaattcatcctccctcgaaaaactgttctgatccatcaagctactttgacacttagattgctcgcttggcttgcaaaagtgagatctctttgtactacttacttacagtcactgctgttgctgcgcaggctgttgcaggttagcgaacacgtcttgtctgtaaaggatgagcagcaactcaccatctggttcgcccgcaacatgatttgcagcatagatgccgatccggcgaagtttgtcaagctcggtctgaagatatcctccgatgccatcctgctcccggctccagcaatgtaatgcaaatccagaaatcaggtcccagctcgtgattctcttccttgtaatgaggcttgtgatcgttccattcatatataggtccatttggtgagaaacgagcgctctgactgatctcaggcgtgcagcttcacaaaacatcactgctaagcgtgcaattgctctcctttggacatgaagaagtgggtggtcacgcggaagaccattgttgaagttcagtagtctgtagtatgaatcaagtacagacggtggccccactgtaacctcatccctgcaaaattgcaatgtttcaagtcattactaacttcttgtagatcagaaacaaagatattaataattttcttgtagaaagtacaagtttttcttggggcggtactcccaagtcattcgaggccatctgttctagaagaaccaatggttgagtatagtaggtagtaatatatgccatcacttactactcaagggtaattaagccttttgacaccatatccatatgaaataaatgttaaattatcattccatttattataattgcccttactacagaatattctgactgaccatatctttaggaagatgagctttgatcttttactgatattcccttaaaacaaatgaagcattaagaaccaaataatattttggaaaattaaatatagtagaacataaattttgtgaattttaaaatccaaataatttagattagaaaaataagaaataccccaatgaacttaatgtcgaacctagaggaaaaattgataagcaaacttgaattttcaacgctcccagtataaattaaaaatcctgaacaaaaaaactcagatcgtaccaatcaaattcaatatttgaaagcaagagtttgtattttctatttctattatataaatgtacatatatattcttaaacttcagtttgataatttgatattgatcttgaatgtgccctattatcattacctgcgtcaatgcaatcctgattcaaattaatagaatcatttgtagaacagcttattcatttacaaatgataaataaaagtgtacaaatgaataagccgttctacaaatgattctataaatgattctacaaatgattcaattatcctgatacagattcacacttttatttatcatgatacatgtacagtgactaactaagcgagctacacacaaggagggaacatgccataagaattaataggacgtatatgcgtacacgttcacaggtttgccaacatcatttatcatgttgctttttttttaagctcaaaccacagccactatgaataacacactaaacacaattacaattttgtttaccagccgactgcccctatagagtgctaggattagcctcttgaagggtaaaaggagcacattgaaaaaaacataaaatacaactaggaaagctacacttaccagtcctgaagaaggtgaccatagtctgctttcaggtacaagataggttgggcattgaaaatgtcaggggctggtgtgtcagagaagttgaaccactgaccggcaccatttcggatggcaatcaaatatgcatttctttggtcaatgagtatctgaacagatggtgactcaggcatgtcaagagatattatgtgccacccctcctcattgcttgttataggaacattcctgaagttgtggtgtgccctccgctgaaaacggcctccaatatcgtccatcagcttgttgtagctcagagcagacaaatcaaccacgctgatgtggagaattggtattccctgcaagaagaaggatccatccagtgcatgagcagctgcaaggatattcagtttctgcacttgcacttgtccaaaaatcaaaacgatgtcatttcatttgaattcttcaatctttatgtgcacttgggaaaatgcgatacagtttatctacagtgaatagaacaagaaattgtttcacaataaaatattgcagaattggctggctcccccaagaggttggcctgtgcagcaattctttcagtctataattaaataggcaacaaggcacttgcctttcttaagaaaaaaaaagtgcatagctgaatataagacatagagtaccattcacatgtgctacttgtcatatgttttattctcagtggtgtatctaaaattattttttgtttcggagattctcggaacaatgaatcatgcaacttcatttagttttggcaaaggatttcatgttcagctgcacatttggatatgttaagggcttgtttggttagttcctataaggaagagattggaggggattgagggggtattaattccaaactcaatagggttgtggaattaatcatctcaaatcctcttcaattcccatggggagggattgaccgaacaagccctaagggagttcggccacattagcaagtcaagaaaactagggattaattttctttttcaaacaacaaattttacttacattttttagtaacataatggtctctaattattattctcgtcacgacaaatatgttttgttactactgaaattgctaaagtacatgtactaaacaccatttaacacatttgctaccgtaaaaaaagttaacaaggttacatacttccattggtgagcaacttgaattgtgtgctctcttcacctgcaaaatagaacttttctaagcaaacaaatgatacattttgaaaaaaggagtaatagttatgttatttctttctttatctttatatatcatgtatcttaaaccggttggtctttcctgataaattgggatgggagagtggcctatgctgaaaaatggtgactcatgtactactattattaagatttgccaaaggagtcctatatatgtagtaatgatcctattaggcttaccgttccaacttgcgtcgggagactaactagtaggcagttaggcacattacgcaaggccctgtgaatgtgaacagccatactgagtagtgcttaaaatgcaagagaatctcatctgaggcaggtagaaggaattacggcatgaaaaagaatcacaatgcactactttctcttggttcttgatgccttggatgcattgatgaaaacatattatcaacacatacatacatacatacatacatatatatatatatatatatatatatatatatatatatatatatatatatatatatatatatatatatatatatgagattccccttaaagaaaggagatgtgacaattaaggattttttattgggcccacatgctat

SEQ ID NO: 47975 - DNA, 2054 bp, Oryza sativa
acaattaaggattttttattgggcccacatgctatagatcataagttacaaataattaaacgccacattttaagagtggcaaatagttaaatgtcccgagaaaaagtatgtatgtgagatggcttgattacagatcaggtgcaaaatattacctatacaagatgttaatatggtttaattacagagatgcgaaatattaactatacaacatgttaaatatggcttaattactttctaaaaatggcttaattacggagtattcttgatgcgcgcggggttagtagttgcggcaagcttataattagccgcggtggggtgcaccgtgcagacgagcgcgcgctagcggaaactacggaggagacggcggcgctccccctgcgtgcagagcgtgcgcgcgcgtgagggaaagcttagctagcggaaatgagggagggaggggaggcgaagtgagtaggagagagcggaaggtcgtggaggcaggcctcacctctgcgcccgtggcggatcgccggcggcgagcggcgagggtttcttccccgcggcggcggcggtggagtcgaatcgcgcggcgtctctccttcgcccaggtgcgcggattcggaatcggggtgtctcgggagtcgggatgacgaagcttatgtccgaagcttccctccgagccgtcggatcagatccaacggctccagatgcgttcaggcgcgaaacgggattcccccgttgcccacggcctactgtccttatggaattttccgtttttttttcgattttgctatatctcacttgaaagattttttcttatctatcactcgattttctctctcaattttacattgcattttcttgtaagttacagtgtaatttatgaaacttacactgtaatgcaaattttaaattttgtattggatttggtctttttcttgaggatatggtaatttagtgtccattatggtgtttcttaattatcttttgctttttattatatctatcggattttaatccaaagattaaaaatctgtgtgatacgattataaaaatctttcgaaagatgtataggtactcccttttttttttaaaccgggaatttccgttgtgctcgatagagggaggcctggcagggccgtcttaggccgtgcgggccgtgtgaccgctcgtggcccatacttcttatggcccagtccactttgactcctttaatagttggccgaatctaatttatatgcctcaaccagaaatccggataggacgactccccaaactccaatgatattggactccctcatcagttttgaaggacggttttgctaatatggtgatgttgacatgatctttatcccatgtagcgcttatgtgatattagaattaaaaaaatatatgtgaggctcatttgtcattcacatacaaaaatatatattgtgggactcactgacatatggagcccacatatcatcatctctctctcaaacccttcttccacctccctctctcccttatctctctattttctttcccccttcggtcttggcgatgacaggcaggacgacgctggcgagcggacgagggccgaagcggcagcggcggggagctgattcccatccctttccttggctccccagaaaccctaatccatgtgccgcatttcgcctctccctgcgcaagaccgcatcacatgccgccgacgtctactcacattgctcatagattactggccgtgctagccatgggacatgtcgggaactcaaggttggccgcactcgagggcgaggaacgggtaatccgtgcgctagagccggcgccacacctaggtcatcctgcaaaaggaggggagcacaagcaccaagagaggagaagcaccaccgtccaaagaaatgggatgatcggtcgcaatccggagaggaagtggtcagaggcaccggtggtggtggcagaagaagagggggatccacctgtggcggaggaagaagacgaggaagaaggcgtcgacttcatcagcgacctcccagacgcccatcctcggcgagatcattgtccgtctccccaccaaagaagccaacatc

SEQ ID NO: 47976 - DNA, 649 bp, Oryza sativa
aacgatttacattaaggcgccgttacggatagtcgaatggagaccttcgaagtcgcagacagagctcctaaccaaccgagcacggtattggcattcactttattgccaaaacaaattaatattgaattttgaagtacttatacactaaccacacccccacttacattcacttacacaacacttacactataattacatatgtaatttattcacttacacggcacttatacaacacttacactataattacatatgtaatttaggaacttataatgtaaatacatgctgactattttttggtgaaaaatatggggccataaatatagctactccctttattttttgtttttaagggggaatcggatatagagttggatttttttagagacagaatcggacatattcttttttttttattttcttcctttttacccggtgtcggattcgtacagatccgattttttttcctttttttcgcccatttttttggtcggacaggtttaagttttttttttcatccgaatttttctggatcggatagatttggttttttcgccctttataatcggacagggtttgtttttttcttttattccgcctgggtttttttttgaaaattttggtttttttttcataaggtttttttgac

SEQ ID NO: 47977 - DNA, 673 bp, Oryza sativa
cttactttttgccaacgaacggtacacatctttctcaaactatggagaattcattggatagctgtacgctgaaatttcctggttcaacataacaacagagtgatgatggggacataatgcattagttcccaacccatatatatttttggtgcctgcattgtcaggtttcaggcttggagatttgtccttctatttatatttttggtgcctgcaaacaaatataatgttacatggtagccgatttgttagcaatttacttatctgtcactgaatcagaaccatgagcttcttgagattgctaaacctgttacaatgaaagttctttttggttagatatgtagtgcacacgttaccggtgtccgcatccattgtctgctggaggtccttgtatatgctcttcatcgttggatccattcgcttcttgggtttcttcgtgccggttcttgttttcttggcattgctttgctcatggaggttcatgttttgttgatgcattggcatggtgggggatgctgcatcttagccttttgcatgattaatttcagattgtgcttttctttctagtgcagtgctggtgctagcatcttacaaagtcattaaactgtatgatggggggattggttcaattaagtatctcgttgattctcagagttattttttatatggaaaaaaa

SEQ ID NO: 47978 - DNA, 717 bp, Oryza sativa
aaataatattttggaaaattaaatatagtagaacataaattttgtgaattttaaaatccaaataatttagattagaaaaataagaaataccccaatgaacttaatgtcgaacctagaggaaaaattgataagcaaacttgaattttcaacgctcccagtataaattaaaaatcctgaacaaaaaaactcagatcgtaccaatcaaattcaatatttgaaagcaagagtttgtattttctatttctattatataaatgtacatatatattcttaaacttcagtttgataatttgatattgatcttgaatgtgccctattatcattacctgcgtcaatgcaatcctgattcaaattaatagaatcatttgtagaacagcttattcatttacaaatgataaataaaagtgtacaaatgaataagccgttctacaaatgattctataaatgattctacaaatgattcaattatcctgatacagattcacacttttatttatcatgatacatgtacagtgactaactaagcgagctacacacaaggagggaacatgccataagaattaataggacgtatatgcgtacacgttcacaggtttgccaacatcatttatcatgtggcttttttttaagctcaaaccacagccactttgataacacactaaacacaattacaattttgttaccagccgactgcccctatagagtgctaggattagc

SEQ ID NO: 47979 - DNA, 700 bp, Oryza sativa
tgtggaagcttatgaatatccaaatgaaggatctggttattgacgatttcatggtcagtaaatttgagctcaataatacttggatcaaagatccatttgttactgccactagaactgacagtctcacttgcagctgaactattcaaattaccaacatcctacccttgattgtaatttagaaactcagatccatttatatactatggaggaatcaattaagtgtgaccacctaggaccgcactctacttggtgttattacctgagtttctgaactatgtctccatgtcattagacaaactgattcagttattcatatccagatattcacttatgtccttatgtcgttaaataatgtaatacctttctaaatttgtagcaaagtctagagaaaaacagaacagaagtgcataacttaactttcttttggcttaacctgatgcagaatctgaacgtctgggttttccttagtgttcttcccctcctgtatgcccacaacccttcaagtaattgccaccagcagacctctatgcaggctgcagcacgccagcaggtatttttttattttggatatttgaatttttgtgcagatgtgaaggaatcagtggatagatctagcttgaatgtttgactatctgtcattagatttacacagaaatgagaaacacatgtagcctttgatgtatatgatgttcataggtca

SEQ ID NO: 47980 - DNA, 750 bp, Oryza sativa
ctgcaatgcccttttgtgagattcagatataatacaatccgactcaacacacctgtaatagcagtgccaaggctccttacatgctgctgaacctcacatagataaaaaatggcaaaagtgaacctagaaacaatggattgtcacatgtgacagcagtaattgtaaatcattaatgctctctaaaagtctaggcctgtagattgtaccgatcagatgagactttttcatgaaggcacctaaattgtagtgctaaaaatgctttttctttgggaatgtatttcaaaccacccacggacctaggcgctacctagctggctatcccaaaagctaaatgtaaaggttattcttcaattttagaaggcacactgaattatatgaactcaagcagtttgagttatttttggcatgccaaccctatagatgcctcagaggagatgatgatgcaagcataaacaacagatgtacacactacagctgacagaaaaaaaatgaggaggtactatgagatcataagaaagcctggatagtagatgatttacccatatttttcatagtgttggttttacagtgttaattaatgatcacaagtcgtgccccaaatttctccaggagggatggtttgattcctgggattcctgtacacgaagaaaccatgtagatcaaatatgtaatgctgtcatgctgtgctgatacgttaaaccaaacaatgcaacatttggtcttacctgctaacctcgacgaaagaaaata

SEQ ID NO: 47981 - DNA, 1044 bp, Oryza sativa
tgatgcatcagttgaatagaaaagtcgttcctttcttgttacaagtgtagactaatattttcatgtgcatcttggtggacctggagtctcctgcttcatgggatgtcacatgtatacctaggtttcaacacgtgaaaccataggtgattgaaaagtttggcatccttgtgtattgtccatgctaagttatttctaaccgtagaccagataagttctgttcaccagagatttacaagtgctggttgcttcctagggggctaatgtcaaaagtcagtgataattcatgttttgtgctgtagatatattggctttgagagcttaattatgttaatttttttattgttttccagcttcttgtcagtgaggttagcgagcatttagattcacaaatgagcctagttgccaatctactctccttttttattgctcatccagtaggagcactttttttttgtgaggacagtgggagcatccagtagaaaaaaaacttgaagtaatctgtttaacaaagggtctgaatgtatatttgtcgcattgcaatcttgtgttcaagcactcaaaagttttgagcgaactagcatttgtttgagcaaagtaaaaattgttagtttgatgtcatatgttcatactttccagtttccactgtagtaccctcatcatcttctgtgcatatgaatattccagttacaccagcaatttgttgatgtgcatttcaggtgactaatgtaatttcgagacggagctcagtttccttcaacagccagagaataagttttatgtccattcgttcaaggccaagtcagcttcgttttaagatttgctgctcggtatgctaaggttttctcctattagcaattgttctaccaatgtattgagtttatttgcacatttttctgttatgcacatgtgttcttcaaaaccttcataggtgtctggagcaattgtttacctattcaaactagtttagattttggaatatctagtgaatcagcagtaaatagatattaaataggagttcatcttgagttcttggcatgggtcttt

SEQ ID NO: 47982 - DNA, 682 bp, Oryza sativa
caatcatatactttcttttaccaggtctatccaatggtcctaattattgcagctaacatcgctcatcctcctttcaaaagctgctttggctgtgtttttttttttggaggggttgcccctcccctctgcacgtaaaatgatggagtgatagattaacgtatgattaattaagttttacattgtgaaacggagggagtagctataaaaaaattaaaaatgtattaatatgattttctaaaacaactttcctatataaacttcttgcgaaacttaaaaaacaagaaagataagttgggaactcatgagaaagacagccgtacacttgtctgtctgtaaaatgtgcctcaaggacaaatgtgccaacagtatgaagagttgcattcctacacttgtctgtctgttcagaacgaaagtacgttgattggcacattcaggatcgctcttccaaattcagaagcgccgcattacacatcattcttcctaaggagctcctgatcattgtagtacagctaaaaacgtactgcagagaaaccgaaaacgggaggagaaaaaaacagcaagtacgagaagggaggttcccccacttgagtaagtgacattggattaggccgatccttctccctcacaagagacattgttgaaagtacaggaagtaaaaggtcatcctctcccttcaaagact

SEQ ID NO: 47983 - DNA, 1179 bp, Oryza sativa
cgacattttctacactctaaacgtagttggtctcaaatataggccactgcattttttttatatcatccaaaatgcccttatgtacattaggtgggccctacacgtcatcccctccatctctcttggagcaaggagtcgttgttcaccttgttggtgacgccgtcgttttgctccctcgcatgtcgctgactcgctcgtcttgcgccattggcggctagctttcttgattcaaaagcgagtaagcaatcaaacttcgccgcaacaaagagctactccctccgtcccaaaatattgtcctctaggcaaaggatagcgacaaccttagttggatgagggaggacgcgcgtaggggcgcagcgtccacagcaactggcgatatggggcgtgctccgggcggcaatggacgtcgctggtgaggggcggagtcaaattcaaatttgaatcgggtatgtaaactttgacttataaactttgggtctataaactttaggtgtataaactttagatgtatagaaatactatatataaaaaatatttgaattcaaattcaaatttgaatcggatatataaacttttgatttataaactttaggtctataaaatttagatgtgtaaacttaagatgtacaaactttaggtgcataaatttactaaaataggaaagtaatgcggtgccaaaaaaggaaaccaggtggaggaggggggagggggcgcccaggggcgatcgatcgctccttagcatttccggagaccggtatggtatgtatgttaattagaggctatcacgttacaacagttaagacaatacggtctctaaccattaatataccaaaatactttattactagtcatctttcctttattagactcaatacaatgaaaaatttcctaataaatgctaagagttgactctatgccgttgttatgcgtaacaaccatatttctctttccttcttcctctctcttccacgtcaccaaatatgcttgcatgataataaagagagatcgctaataaagaccattgcacatgtcctaagaaatgtttgaatcaggttattttctaccattccattttttatttgcatgcattcatttctaaatgaagtacagtgaattacgttccatggatcatacaaaaaaaatcatgccccttaattatgttgaatcaattgctttgga

SEQ ID NO: 47984 - DNA, 1009 bp, Oryza sativa
aggtcccacacacggacgtcacgcgatgccgcgatctcatcggatgattttctctgatcacgcgatcacagagccgcgccgccgcgggcccacgccacgcgcgagcgcctgcgcgacccggcgcccccatgccgcacgcccagtcccacgccgccacgcgcgacccggcgtcaccggtcatccacaagcttcatcgcaacaacatcatcatcggtcgcccatgagattcgttgttgctgctaccgcttgtctgcgaggttcttcgccgccaccggtggtcgtcggcgtggttcatgggtaatttagtgcaatctattcttatatatgactcgtactaattaagttttaccattttgcaggttaaaaaaagactaggcacatgagttctctgcttttagagacctttggtctataagcctcctgatgtcttgattcatctaatggtggttttcactgtcacatatgagcatgatgatccaatcatatactttcttttaccaggtctatccaatggtcctaattattgcagctaacatcgctcatcctcctttcaaaagctgctttggctgtgtttttttttttggaggggttgcccctcccctctgcacgtaaaatgatggagtgatagattaacgtatgattaattaagttttacattgtgaaacggagggagtagctataaaaaaattaaaaatgtattaatatgattttctaaaacaactttcctatataaacttcttgcgaaacttaaaaaacaagaaagataagttgggaactcatgagaaagacagccgtacacttgtctgtctgtaaaatgtgcctcaaggacaaatgtgccaacagtatgaagagttgcattcctacacttgtctgtctgttcagaacgaaagtacgttgattggcacattcaggatcgctcttccaaattcagaagcgccgcattacacatcattcttcttaaggagctcctgatcattgtagtacagctaaaaacgtactgcagagaaac

SEQ ID NO: 47985 - DNA, 577 bp, Oryza sativa
atacccacacccgtgcgggtaatgggtactcatacctatataattgacctgtaacatttataattttgtactctaattagccatattagatctgtaaaccatcaatatttttcctaacaacaatgctattaacattagcgttcaaaggcgagtaaaaaaactttacaatcacattacataatcaagaaatcaaataataatttcatataactagactagaacaatgcttaagatgcgaaataagttttatgctatgatttaatagtcgttgagacttatattactcatagttttatgcttaatttacgggtttttcaaccaagggttgatgggtacgggtgggtaaagaatggacctatacccacatactcaatgggtaagagttctcgtccgttagtagacccataaataaagagttagaacatgattagcttctaataaaataaaagctcatagggtgtcgggtcataggtcccattaccatctctagtcatgcctccccgtcatcgtcgttggcagctcaattggccattcggcggcttgatgccccgatgaggaatctgctggaatgagaatg

SEQ ID NO: 47986 - DNA, 561 bp, Oryza sativa
ttacgaggatgttgatacttagttatgtttgctgattttggttttgctgtggctctgtggatccagtcctggcctattctggtgctgtttgacttcgtcaagcatcaaaactgtctgttttcgtttcctcttaaagacttaatgtgatgtgcaagacttttgcatgttcttgcaaaagctttggacggcatatcttggtattaatgcttggaaacatcctgaagctatggtttgatcagaactcaagatgtggctcagctgtgttcctggtctttgttttcacaggacagggaaacactctagctaactaccattgagcattgtctgctttactcatcagatgacaatattactagactctcatcaaacaatacactagccaatgcattggatattggcattgtttgtacatcacagagtaatgctttgtgttggcatttagagaggtttatgttttctagtatcccaatgcaatgtcaactaggatcaaagaaggtcctgatcatttgacatatgccttacaaacagagttagcatatagaacagttacttcaatggatt

SEQ ID NO: 47987 - DNA, 845 bp, Oryza sativa
tattgatatcgtaaaaaactcaattaattatgtactaatagctttcttgtttttgtgtaccgtatttaacaattatattcatcactaccggtgtggcacgaattcgatgtggcatgtgacaacaaagcacaccagatccaacgtgggataggagaggttgacacgtcagatgatgacattgtgagagcatgtttaccatagtaccataataggctcatgtatcatagaggtgtgaaaaccattacattcacattgttgacttattgtaagacaagataactgattttataaagataacgcttctagctaggtttgaatgtgtcgatttttattagatttgtagtatttttctattattaactttgagagtaaaactttcatgatggattgtttttagaaatatctctgttggtggctgtttatattcgtagaactacagccgcctaatgcttaccttgaagggaaagaggcgggctatgattttcttatccaattaaccccacagccaagctaagctatttttgtaacctgttactaccttcatcctgaaatatgagtaattgacctataaatcaatcatgcatccaaatcttatcaccgtcatagccatcgaagccaatctgataaagactacgccacactagtaagggaatattcaatatggggcatccacgaaggttgtgacatctaggatgatgtcattgcattccatcctgaactaggttttacgtggagagctcaccttgagacacaaaggtgatagagagggtgaacaacatctgaaagaaaagtatgtgccatctatagacgtcacgaatttggtgctccactagcgtggcaccctt

SEQ ID NO: 47988 - DNA, 696 bp, Oryza sativa
attttgtactctaattagccatattagatctgtaaaccatcaatatttttcctaacaacaatgctattaacattagcgttcaaaggcgagtaaaaaaactttacaatcacattacataatcaagaaatcaaataataatttcatataactagactagaacaatgcttaagatgcgaaataagttttatgctatgatttaatagtcgttgagacttatattactcatagttttatgcttaatttacgggtttttcaaccaagggttgatgggtacgggtgggtaaagaatggacctatacccacatactcaatgggtaagagttctcgtccgttagtagacccataaataaagagttagaacatgattagcttctaataaaataaaagctcatagggtgtcgggtcataggtcccattaccatctctagtcatgcctccccgtcatcgtcgttgcagctccattggccattcgccggcttgatgccccgatgaggaatctgctggaatgagaatggaaagaggagaagaccgtacttgttgcggggaagacgagatgcccgtttagaactcctccaatacccataaaacggagcaaatccattttcacatgattaattaaatattaactaaattaaagttaaaaataaattaatatattatttaaaatagtagaaaaggttttataaaaaaatacat

SEQ ID NO: 47989 - DNA, 724 bp, Oryza sativa
  unsure (1)..(724): unsure at all n locations
atttttaatctttggattaaaatccgatagatataataaaaagcaaaagataattaagaaacaccataatggacactaaattaccatatcctcaagaaaaagaccaaatccaatacaaaatttaaaatttgcattacagtgtaagtttcataaattacactgtaacttacaagaaaatgcaatgtaaaattgagagagaaaatcgagtgatagataagaaaaaatctttcaagtgagatatagcaaaatcgaaaaaaaaacggaaaattccataaggacagtaggccgtgggcaacgggggaatcccgtttcgcgcctgaacgcatctggagccgttggatctgatccgacggctcggagggaagcttcggacataagcttcgtcatcccgactcccgagacaccccgattccgaatccgcgcacctgggcgaaggagagacgccgcgcgattcgacttcaaccgccgccgcgcggngaagaaaccctcgccgctcgccgccggcgatcccgcacgggcgcagaggtgaggccttgcttcacgaaccttcgctctttcctactcacttcgcgctncccttcttcncttaatttnncgctagctaagctttccttcacgcgcgcgcacgctcttgacgcagggggagcgccngcgtctncttcgtagtttccgctagcgcgcgctcgtctgacggtgcaccccaacgcgcttaatataagcttgc

SEQ ID NO: 47990 - DNA, 1208 bp, Oryza sativa
ccgtattcgagctatccatattcgttttcctatccggtaaaaaatatgaaaacgaatatggtatgagcattatccgttcgtatccgctccgttttcatccctagcgctagagactcgaagcatcccagagatagagaagcagagcaacaacttgtgaagcagaagttctccctgaagacctctagcatggcatccatcaacactgcaaaactaaaaaatagattcaacctaatttttttttacggggagattcaacctaatttgatttaaggttcaacccatcccatctatcaaaccaaacacacgattacatctcactaatttcttttacttttttccctcttttttcccctcttatcattttcccattcttttcttgtgccccaccccgagttttcatcatgaagggtgtctggctaggagcaagaagggggacatacaagggcagaataaaaaggacaggaccagacacgtggatgaaagggagagaagaggactgcttgacaaggataaaaggaaaaagaaggagaaaaaggaggaaaaaggagacaaagaggtgatgccatattgcatttagaatggtgcataggggtgtgttcgatagcacaggttaccaacccgggcacacagtacgcgcggaaaacggagcggtctattaacgtgtgattaattaagtattagctattttttcaaaaatggatattttgatttttttaagcactttcgtatataaacttttttttaaaaaaacgcaccgtttagtagtttgaaaaacgtgcgcgtgaaaaacgaggtagatgggttgaaaaaagaggtgccgaacacacccgggcgtgttctatacttctcctttttcaaattttactttctcatttttcacatgcacgctttctgactaaacgatgcgttttttttccaaatatgttctataagaaagttgttttaaaaattcatattaatcactttaaagttttttaagttaatacttaattaattaggcgcaaatgaatcgctccattttccgtgtgcaggggagaaatttccaaacggtacattcaaacacagctttagggttaacacagtctaaaaatgcattttttgagtttatcgatcaaatgtcacccgtaaaataagtttaagaaccattagcgtattttactcaaaatcgcatgtgactgttgcaagtacttacaagttacaattacatg

SEQ ID NO: 47991 - DNA, 707 bp, Oryza sativa
gggtgtgtttagtacacgctaaaatgggaagtttggttgaaattgaaacgatgtgatgcaaaagttaaaagtttacatgtgtaggaaagttttgatgtgatgaaaaaattagaagtttgaagaaaaagtttggattttaacaagggctttattttgataggagtgattttcaggatttacaggaggtaccatattttttttccgtgaaattttaccatccttaaaaagtacccatgttttttagtgtaaaatttggtacctctatatactaagtagcttgatgtataaaaaaatttagtatgaaatttaggtacctcgaggtatttttttaaggaccataaaatttctctattttttaatataaaatttgatacctcttaatatctctgatggtaagacataccaaatttgcaccaaaaattttggtatctctcgatatgtctcaagtattgttgaatttgtgttttgatagataatcatcagatcaaattttgttgttgaatgatgatgatactctttcttgttgcagtgttaattagagttattcaagacgcaaatgaaggtgatgagggcggaattaaattcgatgactccatgtacagatcgattcaaattggaggatagcaaagaatttgcatgaatttgatatggtcttgcgccaatgcatgaatgcagatataagccccctgcttggtacactgaaactg

SEQ ID NO: 47992 - DNA, 585 bp, Oryza sativa
gttgatttttgagccacttgatattctcctatattcgtgcaggtgcggtacgggtacattgtaaatacatgctgactattttttggtaaaaaatatggcgccataaatatagctgctcccttgattaaagtagaacaaacatgcatggccgtgggtccgtacgtggcacaagctaactgtgagcgatcgctgcatgaatattagtagtacgagacaaaagaatgttactcctttctcagtactgccaatgcagtgaatctagttgattcatttcttttaacaggaagctagtgagtagggaacaaatactcccaaattatagtgtatatacttgagttacatctcaattataatataattatatcctacttacatattaattacatagtgttaactaagatataattacaccgtaagtaggatgtaattacaaaaataggataagaataagtaaacaactgatgtgcacgttaatgatccaccaagattgattaaattaccgctggggaagagctttacttctagttagcaaccttttttagttttggttgtgcaaccggatgccaatccgaaactaaagatgta

SEQ ID NO: 47993 - DNA, 642 bp, Oryza sativa
ttagtcttgattatttcaaccgagactaaagatagatatttttagtcattttaaccaggactaaagatatacatctttagtttcggattggcatccggttgcacaaccaaaactaaaaaaggttgctaactagaagtaaagctcttccccagcggtaatttaatcaatcttggtggatcattaacgtgcacatcagttgtttacttattcttatcctatttttgtaattacatcctacttacggtgtaattatatcttagttaacactatgtaattaatatgtaagtaggatataattatattataattgagatgtaactcaagtatatacactataatttgggagtatttgttccctactcactagcttcctgttaaaagaaatgaatcaactagattcactgcattggcagtactgagaaaggagtaacattcttttgtctcgtactactaatattcatgcagcgatcgctcacagttagcttgtgccacgtacggacccacagccatgcatgtttgttctactttaatcaagggagcagctatatttatggcgccctattttttaccaaaaaatagtcagcatgtatttacaatgtacccgtaccgcacctgcacgaatataggagaatatcaagtggc

SEQ ID NO: 47994 - DNA, 683 bp, Oryza sativa
atgttggcatgatgcttttttggttcagtataaaaaatcaacacttcctcaatcctcatgcatatgaacattgtgcatggatcacatctctataacttaatacaattgatattaatacttgtatggctttagataatagaaacgtttgcatctccagctttggtcattaagcacagaaccagtaagttttaatcaatttgataaaacaaaagacatactgacgtgtaattcttctgcgcgttcgtggaaataaaaaaaagacataagaagctgagacaaatccagccacaacatcttataaatgataacttgctgaattaacgataattttttttatagatgccatgtaaagtggaataaaagattataataattgtttgattgattgtataagacaatgaagttgatgcgggctaccattagagaatatatcctatgcacacaagcttcccgtgcacactccgtgcacaccaactatcaaatggcatagaaaattctaaaaaaaaattgaacacacacttccaatagtattgcacctacgtgtgaaatgctatcttaaaattcattatattttagctgtaacaaaaaaagataaaattttgacagatttttacccttaaaactattagatttttcactttttttgatagggataaaatacaataaatttgaatatgacttta

SEQ ID NO: 47995 - DNA, 625 bp, Oryza sativa
tgaccaaagtaaaaaagactaataatcagttttattttgaccaaagtaaaaacgacttataatctgtaaaagatcatagaaggactaggttttgctttgtgtgatttgatttgcttatgttttttgtgttactttcctaccaatacacatttgtggttttccatcttagaattatgtccccaatcgccttaacaacaagggctgtttgttacaaggtccctatcttgtccactccaagaactgcatgccccaactgaaaaaactatgatttctcccaaccacccccatgacaccagaatttctgttctgttatgcttcatgctgctgttaataggatttacaatccggtggaaaccggaccaaatttcgtaaaatacagacttttcggatcgggttgaaaccatagacactcgatttgatggtcatgtttatttttgcgaacgagtaaaagaattgcacgtcaatatattagagggaaaagagtttttgttacacaatgcaatcaggcagagcggcttataccgagggaaggaataaaaagcaaaacaaaaattgttgctaagaagaaaaaaatacggtggctatacacaactccgattggaggaaggggcaaaaccacagtaca

SEQ ID NO: 47996 - DNA, 1121 bp, Oryza sativa
acttcattcataatttgttttttttggctgtgtttagttccttccaaagttggaagtttgggttaaaattggtacgatgtgactgaaaagttgtgtgtgtatgacaggttgatgtgatggaaaaagttggaagtttggatccaaagtttgtatctaaacacagcctttgtttcggagtaagatttcattcactcagaatttgagagtgtatagtatactctctcacagcattttttggccgcatatgcgccgtcgtcatatccttccttggtggcggcggctggcggccaagttgctcctccacgcggcggcggcgccgccgccctttcctcttgtcccgccgtttgcggtttgtcatgcgtgatctcaggagcgtacacctgccggatatagtggccggcggcgaggtctcgccggagcactcctcccttgagtgtctcaagaatctgcaatgccttgctgatgtacgaacaggatattgttcccatctcaaatctggcatgtagcagccaaatcttggtatgatcacggcaacatcgtcaaggaaattcccaatatctattcttcgtggtttgccatagactttttcataaagtttctactatgttggcatggcctctgtgtcccaaaataagatttttttttaaacgacccacacaagtatagatggtaataaggcccgagagccaacagttgagccgtgtctggaccgatgccttggtacggtgggccgtcccggcacggcacggttaatggaaaatagtagagggactaaatagacttaatgcagccatataagcaaaggtaagccccaaagaagaggaatacaaaatagacttgctccagccatataagacacacccaaagagttcagggacgaaaaatagacttattattatatggagaagtgtgattggttgtcatgccttattagtcacacacaataaatttatatactccatcgatatacttcataaatttaactgtcaactaacgaaagagatataaaagaaaggatataaactgaaatttaggggtatgaatgaaaataagtaaatctcaggatataaaagggattggacaaaatttagggttacgcaggaaattttctcttattctta

SEQ ID NO: 47997 - DNA, 1642 bp, Oryza sativa
actaaagtactaaacaaagtcccccttttatctttttctctctttttttctggaatagttttgcagaagtctatttcagccaaagtagcaaaaaaaaaggctactaatataagtacaaaaccttacatgcattgcatgcttatattaataaccttataacataacacttgttggtattgcactattgctgcatacaggttagttgcaattttttgctagcaacaacagaatagagtaatctatcactgtcagctgcaggcctgcagccatccaaaaatttggaacaacatgtcctcctgaccaccaagtgatactcatggtcaggtagtcagcattcacatttgtggatgagctgccgtgcaagtaccatcaattcaaatgacagttacagggccagacaatgcttggtatggattggaatttccatagttcgaagtatccaaatcagcaccatctcgcgcagattcaaaacaaaattcatagccaggaaacctagctaatttggccaaatgcagcacgcaccagagagcgttgcgcagcagcggcgccagcgagtaggggagcaaggaacaatcacctgtcacattaggcgagcaccggagacgaaagcgtccgggcagccgtacgccggcggaggcgccgccacccgccgcctcgtcgcctcgtcggagacggcagatgcaaaactagagaaagacaatgctttccgtaacccttaggcgaaggcggaattgagtttctgaggaaggcttccttgggccgaagcgatgccgcagagtatgtgaggcccatataggtgggcccgaacgggataggggagtacgtgtagcccagaatagttgggcctaaacggcagagtggagtattttaggcccatgtatcctggtgaacgaaaaataaaggaaaaagtacaccgaaggtccctgaacttgtcatcgagttaccaaaacgtcctcaaagcgcaaaaccagataccctgcgtcccttaactaatcaaaaccagtcacaaaaggtgcttcggtggttttgacctcggttttatcaaacgtgacggctgagtcagcgtgagacccacgtagaccccacatgtcaggatgccacgtcatctctctttttcccctcttctctcccttcctcctctctctctctctcactcgtctctcgcaggcctgccgacaggtggagaggagaccgacggggtccggcggccggcgagaccggacggcagcctgcacagccatgagccccatcccgaaagccatcagctcctccggcgacatgcggcccacatccgcgtctatcggcggccacctccccgccgcgcgctccatctctatcttctcctccctctcccgccgtgccttgtgcgcctccaccatcgcgcacaggtcgccgtacgctctagttggtgatgtagcgtgcgcaacttatggctctgactggatgcatatactccagcgtgattgattggcgattggcaccaacgagagcgtagcagccggatcaacacgcgcacagtcaagatctgcaattctgaacttctgatgaagttctgaactgatgaattaaaattataacaggggaatctctctgctactcgtagtacccatctaatggcctggttgatctctgtattaggagt

SEQ ID NO: 47998 - DNA, 719 bp, Oryza sativa
tcatttttagccatggttcaatagctgtcgggccatgtcagccccccacttaccaattcgaactaaaaattgatctttagtcttagttggtgttaccaacccagataaaagatgcttccatggttagtttcaaaagtatccaagtcatcatatgtgtgtagtagatgggatgataacgcgagtgagggctgaagtgagagatcttgagtttgagtctcacatcccacatatttttttttaacttggtatgatggacaactaatctcacatcccacatatatgtttttttttcttggtatatatctttagtcttgattatttcaaccgagactaaagatagatatttttagtcattttaaccaggactaaagatatacatctttagtttcggattggcatccggttgcacaaccaaaactaaaaaaggttgctaactagaagtaaagctcttccccagcggtaatttaatcaatcttggtggatcattaacgtgcacatcagttgtttacttattcttatcctatttttgtaattacatcctacttacggtgtaattatatcttagttaacactatgtaattaatatgtaagtaggatataattatattataattgagatgtaactcaagtatatacactataatttgggagtatttgttccctactcactagcttcctgttaaaagaaatgaatcaactagattcactgcattagcagt

SEQ ID NO: 47999 - DNA, 988 bp, Oryza sativa
gttttcatggcagtttacatcagaaaaaaaaaactctggacggatctgattctggtgggtacagaagaacaaggttttctacttttcccttcattaactaataatttgatagattttagagggatgcaattaacaatcagcattggtcattttctattccttctatgatgcctaaatatttcccctagggaacacttaatgttcagactgaaaatatcagggtagagtacataatccctcctaagtttgcaaagctacaacagtttatctagaaatacagtattgtagcaaagtaatatttcatcgatcacaccctcataaccagaaaccatatattgataaaaatgtaaactacaaccggcattaattgctcagcaatgattattcagtttatttaacatttgaccacccaatttctcaacttatactgtagatgataagttatccagcgccaagtttccagaagcgatgcatatttagtttagtatgtaacgctattagcatctagtaattctaatggtcttagcaactaataactctacacgttaacaaggatagagaatatcctacggttataaatatgatcagagcaggattacttactatttaatttatttctgcttttggcttatggagaaaaaatcagttagtggtgagatgatctcctcatacctgatagtatggagttcttttgaaaaggtaaatattgatatcatctttatggtgccttttcacccgtttctttgcaagtcatctcttatcttgaccgttcctccaaaccagctcaaattatttcagtagccacaagcccagtaaaaagggacaaaggctaagccagtgctggtgtcaaatgtgatgccgacggccacaacatcctgaatggatccatctgccaggtgaaatcagtgcaagtcacactgaacggtgagtgttctctgctctgctccattcacacgccataaaaaaatttacagtgtcacacaaggta

SEQ ID NO: 48000 - DNA, 1840 bp, Oryza sativa
tcctcctctctctctctctcactcgtctctcgcaggcctgccgacaggtggagaggagaccgacggggtccggcggccggcgagaccggacggcagcctgcacagccatgagccccatcccgaaagccatcagctcctccggcgacatgcggcccacatccgcgtctatcggcggccacctccccgccgcgcgctccatctctatcttctcctccctctcccgccgtgccttgtgcgcctccaccatcgcgcacaggtcgccgtacgctctagttggtgatgtagcgtgcgcaacttatggctctgactggatgcatatactccagcgtgattgattggcgattggcaccaacgagagcgtagcagccggatcaacacgcgcacagtcaagatctgcaattctgaacttctgatgaagttctgaactgatgaattaaaattataacaggggaatctctctgctactcgtagtacccatctaatggcctggttgatctctgtattaggagtatctgagtatgatgctagtacatctttccagtgatgagtgattgaatgattggctagtacacatacgcgcccatctgatctgatacggccagcagaatccatccatccagaggcagcaccacaaacaaaaggaagcccatatctttgtgttcttcatcgtcctgcacctcactcaatctccatttagatagctgaattgagtgatagacgattgctggatcatctgcagattttacaaagttgcgagtaaaattcagttgtaatctgaactagctacaatattctcctatcttagtgatgcagtttgttgtctcgtccaaattcgcaggagatcgcttcttaatctgcaaattcgtggttagcggttaatgtcttatcaacattttcttgctccccgaccatcccaccaccattcactcctcgccgcacccgcgtcgctggcgaagacaacgactcctgcaagaatcgctccaggaggcactccacataggggtggccgaaggattaggccttgccggcgggggagcaagcgcgcccgcgtaaccgccagcggcacagcagcactgcttcgccggcgcccggcggctcgtcgacctggacctcccagccgcctccggaggctgcacctcgccgacgtgtcgctcggcggccgcttcgccgatcaggtcccgtcgcggctccccgtcctggaggacctgcggctcagccgctgcgccacgggcttcgccgagattgtgtcgcggacgctgacgaggctgatcatccacggcagcggcggcgagctggccgtcacagctcctcggctctcctccctgtgcctcctctctcgctggcctccgccgtaggcctcggagccgccgtgcttccctgcttcagccgcgccgacctcctcctctcccgccgcagagaaaactgagagagagagaggaagggagagaagagggggagagatttgacgtggcatcctgacatgtggggtccacgtgggtcccacgctgactcagtcgccacgtcggataaaaccggcgccaaaaccatctaaggacctattatgaccggttttaattagttgagggacgccggatatctggttttacggttagaggacaattttgtaactcgatgacaagttgagggaccttcggtgtactttttccaaaaataaattggtattgactcaactgccaaacggtttattttttgaaccaattttctgtagaaaagttgtttcatacaatcatattaatctatttttttaaaaaaaaatagctaatgtttatttaattattttttaataagtcgatctgcgtgcggaattcccaatctaatg

SEQ ID NO: 48001 - DNA, 584 bp, Oryza sativa
atgggtcaattattaatttcagcactaaaaacaaaagtgatcactaaaaacaaaagtgatcaataattatatagcgacagggcaatcgaaaagaaagagagaaaaagaacgaacaggcgtccatgcatcctgggctcgtggccggtctctttggtcatggacactgcaaattctctttgcaattaattgatcatcaagaggcttcaggaagaaactaagaagcctgagatgatgtgattacgcgaacatatccacctactaactgccggccggccgggccggccggcaacatcacgtaccatcgatggatatgatcagcagtgggtatatgtgagacaattagtggttcataattagttggtcattttctaatcgtgtgttgctactagtagcaaccatggccagtggtaggcgtcgatcggtattcacgctagtggtaggattcgatcatctcttcccattaattctctctctgcaaaaatcaaaagggcacgcatgcaatgcatgttatcatgatcagtcgtcactcgaccggtcctgcaaagtgtaattaaagtagagtggaagggcatatagctaatggg

SEQ ID NO: 48002 - DNA, 815 bp, Oryza sativa
atacattacaacgggtgaaggctattttaattttattattgttatatgggttagttaagataaaaattactctgagaattcgcttggatatatatttttctagaaaattatgagttgcaattaggagcccaatcatctcagattagcatgcgagtttttttaaaaaaaaaattttatatgacttcttctatattttcaaaagcgaacgaacttataacttgactcagatacgaatctgtatttctaaaagcaaacgaacttaaaacccgactcatatacagataacttattaaagtaccgataaaaactatagatatgattcgtatcttagttgcggagatagacaggcgcgcggctcatgggtcaatggcgcggcacgaccacgtgtcgaagtactagaaatttccttgagcctaataattaaccacaagatcgaccaaagtcgcacactctaactagctagctagccagaaacaattaatgtgataaaattgttgccatatgccggtgaactgcgttaagaataagagaaaatttcctgcgtaaccctaaattttgtccaatcccttttatatcctgagatttacttattttcattcatacccctaaatttcagtttatatcctttcttttatatctctttcgttagttgacagttaaatttatgaagtatatcgatggagtatataaatttattgtgtgtgactaataaggcatgacaaccaatcacacttctccatataataataagtctatttttcgtccctgaactctttgggtgtgtcttatatggctggagcaagtctattttgtat

SEQ ID NO: 48003 - DNA, 705 bp, Oryza sativa
tccaaagtaattatttagttgactaaataatagatgaaaatgattagcaagtcttaatatagttttatgcattttaatgcacataaatataaaaaacaatttagagatatatcaatgctgacatcagaacctgatacctatcagtatcatattgaaaaatggattaatctgatattttagagcaactttcatatagaaagttttcgcacaaaatataccgtttagcagtttgaaaagcgtgccacgagtatccaaaatttcatctccgtcttgtcggagaaacgaacaatatggtcatcattctattggctgaatgctacaccattctgttgtaggcatccactgtaattgaggcatttagcctattccccacacatagataaagcaaaactttaacaagcctcaaaagaattacataaagaaggaagaaacaaaaatctaccaaatacaagcagatcagcccgcagcctttttagataaagcaaactttgttgtcaagttgatatgcaaaaccacttccagcttatatacgtaactagaatataatataattaatatcaacatccagccactttcagcaggaatatagagttagaaaagttatgatgaaacgtacacgatggagaatatagcgatgtccataactagtactatatatgaaaaaaaaaaagaatggagaaaggtcaatgcaaaatatgagactgt

SEQ ID NO: 48004 - DNA, 617 bp, Oryza sativa
actttgtaaaagctccacctccagttcttcatcatcaagttatgtcatgtctgagcattgtgtgaggcgccaattttccgaaaggttcctagcatgtgatgtcaaagaattatctttatcaggcaatattcaagtctttatatctaactggaaagtcttccattaggtagcgattatcagctttgggaagtgacaatggcaaggtctcttcgtccacagaatctcggtatttcaatggaacgacttcaatcgaaaacctattttggctggccgactttgaacgacttgtgggtaaagatggtccagtacctatttggaaaaatctcattagacatgatgacatagtagtatctatgaaaatgtgtaaaatgacagattgtggcatactgtcagtcatgtcctttgtcttgtggaggagaaatgtcccaaaaggatggtcacaaaaccacacagctccgtgacaatttgtgttggattttgtcgatcccaatcctgcacgtaataaactatgctatcacaaattgaggaaataaactttccataaggcattaattgttctttgaagacagccacattgtgaaagaaaattaaggtgcgttatgcaccgtaacaacatt

SEQ ID NO: 48005 - DNA, 767 bp, Oryza sativa
tttgaccgttcgtcttattaaaaacttttgcgaaatacgtaaaactatatatatacatataagtatatttaacaatgaatcaaatgataggaaaagaattaataattacttaatttttttgaataaaatgaacggtcaaacatatttaaaaaaatcaacggcgttaaatatttagtaattaacggaggtagtatatagcgagaagatatttgcatacgtacgatcatatctgtagttaaccggtatatcattggagcttcacaattgcttttttttttcctcgctacacctttcatcacttctatgacgtacccaacttgtcataaacattcggcttaatttcacacaaattcctcaattgcttaacttttctgaaaccaaaccggcagaagaactagcaattatatatatttcaataagcatgagtaaaaaccctagacagaaaggaaattagaaaaaaaaaacttcatcctatgaaaattttgagttggattaataattcttttgtgtatgaaatttcttaagtgagaaaaatccttcaatatacaacccacactttatctggattgttcaacttcattccaatttgaaaattttcttaattcaactcaacggaaaaaagaattccaactcaaaatttggtaacatcttaagcaagaatgcacactctatgaaaactgcccagtagatagtacacagttgaacaaattggaattttgcgagcacatctacactgtacttggctagcttggaaagttcatatgccg

SEQ ID NO: 48006 - DNA, 672 bp, Oryza sativa
atatctgccatcaaaataatgtagtctacaaacagttcaagacagtatattatatttgaccatttgtgtatgacactgtcctatccatcatctatgagatcatcacttccaccttctcagaatacaaacaagattacttcaacttttcaagtcatacttccaaaaatacaaaaaaggtgtgggacaaatcttaattcaagatgaactgttcattcgcattttgctttgaaactgcaataggttgcaccctttcttttcatcatttccttgcagtttcagtgtaccaagcagggggcttatatctgcattcatgcataggcgcaagaccatatcaaattcatccaaattctttgctatcctccaatttgaatcgatctgtacatggagtcatcgaatttaattccgccctcatcaccttcatttgcgtcttgaataactctaattaacactgcaacaagaaagagtatcatcatcattcaacaacaaaatttgatctgatgattatctatcaaaacacaaattcaacaatacttgagacatatcgagagataccaaaatttttggtgcaaaattggtatgtcttaccatcagagatattaagaggtatcaaaatttatattaaaaaatagagaaaagttatggtccttaaaaaaatacctcgaggtacctaaa

SEQ ID NO: 48007 - DNA, 692 bp, Oryza sativa
gataacataatgatgatacaatatatcgtgaatttgtgctgaacaacaaagatacaatctcctaaacatttaacatgagtctatagttatctctttatgtttatatgattagtatgtaccaatcattttagaaattagaacaattgtagcatacgacattgtgtttgatcactgaatgacagctactaccattttacaatttctacgtgtgcgcgtgcttttgtcaatcgtgacagcatagcgtcttgatgatgtagttatccatctccctgtcgaattttaattcttttgggttgcaaatctcattcctctttcctgcaaaccagctccatttgctcgaacgatttcagtgtttttgccaactgtgacaccgacttgtggccacatcctgatgcccagtaaaaaccattgcaagtcaagacgctgcacgatgaatggtctctggggttggttgacaaatgagaaccggtgacaacgaatgctggccgtgctcagtcagtctgctggaccccttcctacatgtgtcaccgttcttcaacacaacgtctgaagtttgaacattttttgtgttgaacattgtgcttctctgtcttcatatgttgcaggaggaaagatggagaaagtgctgagagtagccatggaggtgatgagtcggcaccatgctcccgatagaagcctgtgcttactgttac

SEQ ID NO: 48008 - DNA, 579 bp, Oryza sativa
acccgactaatatacagataacttattaaagtaccgataaaaactatagatatgattcgtatcttagttgcggagatagacaggcgcgcggctcatgggtcaatggcgcggcacgaccacgtgtcgaagtactagaaatttccttgagcctaataattaaccacaagatcgaccaaagtcgcacactctaactagctagctagccagaaacaattaatgtgataaaattgttgccatatgccggtgaactgcgttaagaataagagaaaatttcctgcgtaaccctaaattttgtccaatcccttttatatcctgagatttacttattttcattcatacccctaaatttcagtttatatcctttcttttatatctctttcgttagttgacagttaaatttatgaagtatatcgatggagtatataaatttattgtgtgtgactaataaggcatgacaaccaatcacacttcttcatataataataagtctatttttcgtcccctgaactctttgggtgggttctatatggctggagcaagactattttgatttccttttttttggggcttacccttgct

SEQ ID NO: 48009 - DNA, 682 bp, Oryza sativa
cgaatccgattgtctcaaattagcatgcaagtttttttaaacagatttcttatatgattccttctatattaccaaagtgaagatcttaaaaaccgactcaaatacagatatgtatttcaaaaaccaaacgaacttaaaaactgactcatacacgaatgacgtatcaaaaaaccagcaaaaccatcttcaatttttataatagtagagaagagatatagattaaaaccaaaaaataaaattaaaaccgactcaaacacgaatgacgaactgcgaaaacatcttcaatttttataaccgactcaaacacggatgacgaaccgcaaaaacatcttcaatttttatagtagtagagaagagatgggatgaagcattccagtctttgctcaagagctatagccaattattacaaggttcacacaaaagtaaactcacatagtgagtatgtagccaaagtaataaaaccaaacaaggtaaagatcccacgactactgaattctattggtgaatctccatccgaagttgtcaaagagctgcatgatcatcgactcaagttacgacacacatcttttattagcttgatataatcatcatgccgttttaggtgagcccattcccggagctaatgtgttgtcctgaaaagacatgcaaataaattttgaggtgatctatcaaaaacatttca

SEQ ID NO: 48010 - DNA, 657 bp, Oryza sativa
agtagatggataggatgaaggcccggactcgcagcgggatcaacggccggcgacgaaggcgccgaccggagagggcccgcgacagagttggggcgccggcggagggcgcaccggccggccacgcggatggagccggaggtgggcgttaacggcggcgccgtggatggcggacggcggtgctggagctccaggcggcaatccggcgaccacatcgctggcagccacgtcctccgccgtcgctccctacgccgggctcgtcgccgcagccacgtcctccgccgtccgtgcctcacgccacgctgaagctcgtcgccgaagtccgcgatgccgggggatcgttgggggtggccgcgtcggagctcgtcgccggcgaccgcgacctccgtcatccacacccatgccacaccggagctcgtcattgacttagttgcagcagcacgcatgagagagatgtggtagaaagaatagctagatagaagaagagtggattggttggtgtctatcctatcccgtcgggacggtataccggtgtttagcatttccgtattatttactctattgagtaaattacattgctgatacacaaatttggattcagacggcagtggcactccggaacgatctcctacgtgcgcggacagcttgaccatgacccat

SEQ ID NO: 48011 - DNA, 650 bp, Oryza sativa
ttcatgaaaaggcaacctgacaagcaaatttcgtttgcatgtaagaaagaagacttgaggtacgacatgattactggtgccgaattttttttcattaaaccaaaccagaaaccaaattaaatgaataagacacgcatccccatatctaaaaacaatttgagctctaactgtgatggcgggtaatcattttctatctagcctcctctagcagcaaccaatagaggccattgcttcatttatcagaagggtgatctcatgcaccatattcgatcagttttcatggcagtttacatcagaaaaaaaaaactctggacggatctgattctggtgggtacagaagaacaaggttttctacttttcccttcattaactaataatttgatagattttagagggatgcaattaacaatcagcattggtcattttctattccttctatgatgcctaaatatttcccctagggaacacttaatgttcagactgaaaatatcagggtagagtacataatccctcctaagtttgcaaagctacaacagtttatctagaaatacagtattgtagcaaagtaatatttcatcgatcacaccctcataaccagaaaccatatattgataaaaatgtaaactacaaccggcattaattgctcagca

SEQ ID NO: 48012 - DNA, 706 bp, Oryza sativa
atccattagcacccatggtttcatcgacttgcttgtttatttactccctcctttttatatcataaagtcaaacttctataaatttagtcaaatttgtatgaaaatatagcaactctataacatcaagttaatttcattaaatctaaccttcgatatattttgatattatgtttgtttagtgttaaaagtattactatgtttttcctataaatttgataaaacttaaagaagttgattaagggtgtgtttagattcaggggtgtaaagttttggcgtgtcacatcggatatatggatacacatttgaagcattaaacgtagtctaataataaaataaattacagaatccgcctgcaaaccacgagacgaatttattaagcctaattaatccgtcattagcaaatgtttactgtagcactacattgtcaaattaaggcgcaattaggcttaaaagatttgtctcgtaatttacacgtaatatgtgtaattagttattttttcgtctatatttaataatccatgtatgtgtccaaacattcgatgtgatgggtaggtgaaatgttttttttaactaaacaaggccaaaataatccatatatatagtccataatgcatccctatcattgatcgcatcacatgtctaggtttttctttttcttgagaacacacatgccggcctaggtcaaatattattttgtacgttgcat

SEQ ID NO: 48013 - DNA, 827 bp, Oryza sativa
ggttaccttcttgtcaccattcctaggctatcatgcgttagtgtaaacctatttgtgatcattattggtgtagaaggttcaggtgggtgctttctgtcattcttcctaggttgccttttcctacaaaatatgcatatgcgattgattaatcaagaaaaaaataataagctgtaaagatagaaaaagtaatatatttttttctttgtcccattcattgggcacttgttgcaggcaggtttttcaatccaatcacataaaaaaaacatacacaggctgtgtttagtttccttcgaacttttaacttttccgtcacatcaaatgtttgggcatagagcattaaatatagataaaaaaaccaattatacagtttgcatgtaaattgcgagacgaatcttttgagcctaattacgccatgatttgacaatgtgatgctatagtaaatatttgctaatgacagattaattagacttaatagattcatctcgcagtttacaggcggcatctataatttgttttgttattagtctacgtttaatacttcaaatgtgtgtccgtatacgtcaattttttttttgccaaaacaactaaacacggccacaatccctctgtgtttaacgattaggaaatgaactgctgcaattgccgattgaccgagcgccgttttcgtatatagggtaccgttttttattatttttaaattttgttttatcacaattttttctgcatcgtactgatatcgatactgagtagtttaataataaatatagtcgattaccgaccgatcgagcattgtttcgaaagagatgctaccgatttcgatcgttttc

SEQ ID NO: 48014 - DNA, 670 bp, Oryza sativa
tctagtgttgaaaatatttctatgttttctataaatttgatcaaatttataaatatttgactaagaaaacaaaatcaaaatatcttcactactaaagattggaaggctcccgtgtgcctacgaatattactgggtgtttctctaaacacacggtaacttaccgtgcgtagaacaataaattcgggaaccatcaagcacataccgtgtgttaggattcacgggagcaccggaatccaccgctttccatctgtgcgcgtcgagctctattggcgtgtcgaacaaaatgttaccgtgtgaccccagtgcacggtaaaccaccgttctctgttacgaccgccgttagcccgttacatcgggagtgctaccgtgaagtccgaatttttagtacactcggtaagattttcaaccatcctgtgcgttttcatgcaaactcacgggccacacggtaaaccgattaaaccaccgtgtgagcgttaccgtgagctagaactcgataacggcgttgatgtgtgtttttggctggttccgggggttttgagcacacggaagccttcccatctctagtagttagcttataatataaagcgcaagaaacataattttcttaagtggatatatttggatatctgaaatatatgaacatataacatggattatatttgtagggcat

SEQ ID NO: 48015 - DNA, 719 bp, Oryza sativa
agcttcttttgtacttggattcatcttgtccttctattgggctggaccaggggaaaaattgatgccaaggttggagactcttcactgtgacgattgatgatcattaaatccatacctgtgtaggtgacaaagttgatccatgtattagtaatagttgcagataccttcaagtcactacgagatgtactaggtgacatgaaaaaggattaaaggccattattgtatcatccttaatgtacaaatgctgaggtaagcctaaggttgatttgcatagtcctattgataaacggaggtggctgtttttataggtggttattttcaagttgctttggttactgaattttttcttgaatttatttatgcaaatattgaagtctttagttctttacattattcattctggctgaatcatcacaatccagtcactatattaaacccaattttttattgaagcattgttggtgtacctagccaagaagaattaatttggtagagtttatgagtgagcaagtagaaatattagaaccaaagcaataccaagtttaggaaggaaagatcaagaaaaggaagtagtttagattgcgaagagcagcctcaaatttaagaaaacgtacagttcactggaaaacatgttctttgtcttctgtagatgacaaaagtagtagcaggattttttagaagaggctttgtcctatacgcaccagccatttccattcatt

SEQ ID NO: 48016 - DNA, 609 bp, Oryza sativa
  unsure (1)..(609): unsure at all n locations
cttataccgagggaaggaagaaaaagcaaaacaaaaattgtagctaagaagaaaaaaatacggtggctatacacaactccgattggaggaaaggggcaaaaccacagtacactcccaagaaatctccaaaagcagcaatacccattaaaggccacagatgaccttacgagcggatggactgcagagccagtgagaccgaagagagcgcataatcgaaaaccctggagtcatgttcaaaactgaattttaaaattttgataagatttatctgaattttatcagttgttttcgccttttcggttaatcagtacacttaccatgagtganttttatccagcatcggaattatgaatagcatgctgcataccctgcctgcgttgcatgcttgccaagagtggtcagaaagcatccctgcttcagctccactcctacatacagatgaggttagcttgggaagtttatctgacttctttttgtggcagtcacctctcttgcttgtgctatggggaactagttgcttggtggcagtgtgctactgaagtgaaagcaaagaactacctggagncaaccgatgatccactgatctcggccctttatataattctccaa

SEQ ID NO: 48017 - DNA, 665 bp, Oryza sativa
tattgtgctagggaatttgaaaagttatgagccactggccttatgcatgggctcaaatctcaaaaactcaaagtatatgcatattcggatgacgcataatcataaatgctaggtaattttctatttgctgctgccagtatcggatctagttgacaattggaatttaacacaacaatcaacaattaatgtcaccggggtctaatatttgttttcaccggggtcatagctggtaaaataaagaggatatgagaggttaaaataaaatcatcggggtctactgacccccgtaattgactgtaccttcgcccctgtgtgttagattaagattaatggtcacatttttttggatggatttagagatgatgtggaaagatatactctccttgtttgttaaataaatgatgccggtaacttttaacatagcgttaaactattccgcgcattcaatatatatatatatatatatatatatatatacgtattggatgggccatcttttataatcaaaagaactgtcagtacttatactttaacatattattaatattttgcattaaatgacatgtgaaacattgacagtcaagaagcaaaaacgtattgatcgtatgacttatgaagttcatgcttaatatggtgccatctgctgaaacacactataatgaagc

SEQ ID NO: 48018 - DNA, 546 bp, Oryza sativa
ctttctggaacatttctcctccacaaaccaaaggacatgactgacagtatgccacaatctgtcattttacacattttcatagatactactatgtcatcatgtctaatgagatttttccaaataggtactggaccatctttacccacaagtcgttcaaagtcggccagccaaaataggttttcgattgaagtcgttccattgaaataccgagattctgtggacgaagagaccttgccattgtcacttcccaaagctgataatcgctacctaatggaagactttccagttagatataaagacttgaatattgcctgataaagataattcttcgacatcacatgctaggaacctttcggaaaattggcgcctcacacaatgctcagacatgacataacttgatgatgaagaactggaggtggagcttttacaaagtctatgcatatgacgaaattatctgttgataactcttttctggatgatgattgctctaatatggaggaaaacagggattgttccaaccttaaagccagttgaaacttgagagag

SEQ ID NO: 48019 - DNA, 3421 bp, Oryza sativa
atatcaaccaaactttaatttaacaatgtaggtaagtggtaaggattaatacaaaattttcatgtacataaccactttgaagtctggacaatagatggggcaatccatactgaccaagaaaatctggaagggggattcaagtagctcaacgttttaccaattcgcattcgtactatcaaggagactatgggtgaggcaatatcaggctggtggctactgcttcgccttatgtttatgtttctagctactaaagaaggtcagtgcataaatggatcgttgaaatgacaactcctgatgcctcctaggccaatatccatgcataacagcacaactcgatgcatagccatcgaaattgtgtgatctgcctttatcaagtgttcatctatccctttctcagccagtagaatttcttgttccttatctgatcttcaatttgtaaaacatttcattaatttgatgcaattattcaaccttctcattgcagttcaatgtgacacatacaatatatatgtataggccaatcatatgatgggagacaagagatatatcattgcttttttatacatcggataatgttccactcagttccccggagagcgactcctagaatgcatgaagttaaacctctaactctaaaattattcgtagattaaaaaatactagccgccaactcgtgcgttgcatgggctctatcaatataatataaataaatatataggttttaatcagatgtcgaaactttgattatttgtttttcaaaatatctctctaaaaggcaattagcaggattgccccctacaactttaccttatttatattcttgattttcccacacaactctttaataaatagatagagaataataaaaatatcaagtaatttaattatcatagaataattaaaaattttgataatagcaataaaatcttagcccacgttgaacttcgcgtgtggcaggcaatgcttgcactgcaagatttttgtaattattgaattgctaaagaagacagccttttgattatctatttaaattagtaatagaaaggtttactggtgtcgtaattttagattttttttgatcaagtaaattcaaactgtacaattaatcaatgaaaagtactggagcataaactgttctttgggtatatgatctatacttccaaattttaaaaaataataagtatcatgatgtacttgtctaaatatctattttgtacgctcaaaatttagaaaaaaaaactatattagtgagtcataactaatgtgacccatagttaacatgattatgttggtcgccaacctgtgcatcacacgtgctattatataattattataaatattaaaaagttaatatgctaaatgttacttttctaattatacctatttaaaccaaaaagggtccacatcaaggactgcatacaaattattaatttcaaacttcggaattaaactaataaaatactataaaacaggagtcaacttcatatttattcatttaaattttggaattagcatttttttaggaaaaaactgaaactaaagagtgtatgatatttattaattcaaattttggaatttttcgaaaaaaactgaaataaggagtggatgatatttatgtaatattctattgctctagaatatttcaattgaaacatattctgttgtgttttacttaaaattatacttatagtgtacagattaacaaaaactaattaatataatcgagagttaaaatactaagttatttataattcatgcaaaatcttaaattgagagttgatatttcttaatatatgcatgtttgtaaataatgacatctaattgaaactgcaatgaagttttatttatatttgcattataggtgcaacaaagttgttttattttgtggatcaatacctaaattttatattattagatgtggtgatggtgtggttgagtcctgatctcatttcagatgagaaatatgtaaataaaacaaccaagatgaaaaaaaaaagattacctcaaaatctggatggagaaaatagtctgaacctatagagtctgaggttgcgtgtatccaattgacgtcgtcagttgagcagtatatgcacacaccggcacgctgctgatcgtcatgtgcaagacaaaggaggtcgatgtggcctccatcatgccatactccagcgttgtgaagagtaagttgttggctttgtctatgagtaatggagcagctcctgctgcgggcagagattgatgaaaagtaaaatcgtaattacctgtggatgacacgatgaatataagatcctcatagttaaaaattgccccttgacatagattagttaatttaataatatcttgaaaattgaacgtgaaccatatatatatatatatatatgtcggtcctaggattaaattgcatcttgcctgacaaataaaattagtaatgaaataaccaagcaaaatggttgaagcatagccaatctttttggaatgatacaaaaggagcagtacatcataaaaagtgtggaaaaaaaagaactaaccttaaatgaatctgcatgatatgcatgacaaagatagctataacaattatagtcatcaaacttttgctctaagaaacatagcaaagtaattagcttggctaaaaacgataatatgtaactcaaagataaacatttgcatgtaccattgtttactggaaagtaatttgtaagtaccaaagtaattagctttcagttgaatctgatgcagatgccattgtcttgctgattggttaccgctgcagatctatttaatatatacgtacgaaaaataatgatatatttgtaattaccggcacatgatgttcaaagagcagcttttctatttgcatcactgttattttggctgcaagaagcaagatcatgtcatcgggcgaatttgtgtacgcaaatataccgtgcggccacttgaaccaagcaatccgtattatgaattagtaacgacagaaaataaaatcaaacagtgcaagcagttatataatcgcctctcctgatgtgctttctcttcataattgttctctctccttattgaggatctgcttgctcctgcagcagcgctgcatatatacacgcatgcgcttcttgttaaacacagataaagacggttagggaaataaaattagcattactttttacctaattttgaagcagaaagattgaagggcgatgtccatctcctcgcgtggaacgaagttgtcagtattctgggtttgatcggattaacgttgatggccagccggcgaatgcatctgcctggtttacgctctcgtcgttcccatctacgttccgctcgtataatcgactggctatttcagatgggatcgatgggggtaggcgctaccgagagatatgatatagtgcgggcaaaattggttatatggcatcgaaagttcacgttt

SEQ ID NO: 48020 - DNA, 2903 bp, Oryza sativa
tatataaccaattttgcctatagtgcgttacatatactgcaaggtggatgggctttaacgtgggccataacattaagcgtagagactggattttacattaacggttacaatggtacgatatatctaaacaatagctagatctttctggttaatatgagatcttgtagaaagttctcaattagtatatgtatagattagatttaaatatttgaaaatggaaaatacactactggaaaactgatctttactcgctcgccccaaaaccacaatagtcccggttataaaaagaaccgggactaaagatgatctttagtcccggtttaaaaccccatagccattctatgatatttagtcccggttgctaacaccaaccgggactaaagatgatctttagtcccgatgatctttagtcccggttcatcccctgtcagtcccttgtcagaggggtggggatctttagtcccggttggtgtcacaaaccgggactaaagatcaccactttagtcccggtctttactcccggttagtattaccaaccggaactaaaatcacgcctagtatataatccctattccctatcctctcccccacaaccggcctcaatctcctcaacaacaaccggcctctcctctccttagatccatctcctctcctcctccctctcctccccttccgcctcccatcccggccctctcctcccccttctcccttcccatccaatgcccagcaagggccacctcctccccctcctcccttcccgaacacgtcaggcggggccgcgcccggcggggccgcacgtggtaggcggccggcggggccgcacgcaggccgcgcacggggagcaggcggcgctaccggcatccattctttttttctttttttttacaatttgtgattcacttagatgtataattttgtgatttgttgtatggatctgagatgtataatatgtgatgtatttggtttgtgtgtatttttttaatgatttgtgatgtatttgatttgtgtgttgaagtaacttaagatttgtgatgtgaatgttttgggatattactttgatttagggtttgatttaggaatatgcatcccactcgatttgggagaaaatacagggattaaactctggctaaaaaataatgaaaagaaaagaaaaagagacctaatgggactgccgctaccctctctttagtaggactaaagataggtaccaaccgggactaaagatcgatctttagtcccggttatttcactcgagactaatggtagcgatctttagtcccggattcgtagtcccggttggataaccgggactaaagggcggttacgaatcgggagtacaaagggtttctccaccagtgatatagatctgccatggaaagtactttatgtatggtgatacatgaaaatatagagttgtgtaaacatatactttgtaaaagtaatgcatgagacatgcgctataatgcaagtgggctgacctgcgaacctacatttatgttaaataaggggtaatctatggatttccgtgtaatggctcggcttgccccgtcgtaaagatgcaagtgggtcaacctataaacccatttgtaggtcaaattagtaggtaacccacagtttacccactaattttgtctataagcgggttcgcgggttggcctactttcatccctacatttttagggttatatatatggttttggaagactttgtgaaaatatacgcgtacaacagttcaaaaatgcgcgacaggttgtttcccgtggcatggagccgcgggaccaacggccggaacaatcccgcgatgctgacgcgcggtactgcgtcggtcctgcgggcccgctggctggccacgcgcgaccgagcagtgcgcgatgcccggtctgcatgaccgtgtggtgccgcacggctggctggcgggaccgctacggtaccgctctcccgattcatgggattgttccggccgtcggtcccacatctccgtgcggcgctaaaaaatcaatcgcgcattaccaaaccgcggtacgcgtgtattttcacaaatctttgaaaacattatatataattataaaagcgtgaaaagtaatatatattttcaaattttgttcctaaactcacagccgtgcgtctcaaatccaatcaagacagaccactcaacgctgtgcatacatacgaggaagctgcgtgttgtggcagtaataacaactcaattagccaacacaagttgtagttttaattcatcgtcgtaattgatacattggtctagcacgaatgcagaatgccccatgcattcaacataaatactgcactaattaattttacgacatgggctgcatgttagatgcaaagatgcttaaattattatcagtgttgatgcaaaacaattttcttgtgatgatatgatgaagcaggtcgctctctccgtcgctgtaattaagaaaacaagttgaatgatataagttgtattttctttttcccttgtactatatgatcaatcaacatgatctaatgtaaataagtggttcttttaatttggccactaaaataaacaatcgtttaatttgttcaataaaaagttatcactacgccagatcggcccatctgtgacggcctattagtgacggaccaaagtgcctcgtcagagataacctcatctgtgacgggttacaataaatcacgtcatagatagggctcaagaaaataacccgtcacaggtaagtactcatctgtgacggatctatataaggaacccgacacacaacatctttaacgtgtctacatatagacccgtcactgatgacctcttacctgtgacgggttttaagtttgtaacccgtcacaggtgagatacctcacctcaaacgtgttggatttttatacccgtcactggtgagttaaaaaaaaag

SEQ ID NO: 48021 - DNA, 4134 bp, Oryza sativa
caccactctctcctcttcctcaactctctccctcacttcctcccgacctcccgcctccacctctcttttcttcctcccgacctcccacatctcgccgcctcccgaccgccggccgcctccatctcccacgcctcgccggcccccggccatcggacgccggatccggccgacagcgcccccccatcgactgccggactcctcccccgcctcccccaccagatccggcctccacgaggtcgggggacgtggatacgcatcccggccacctcccggccgctagcgcctcctacaccgactgccgaactcgtcccccacctcccccaccggatccggcctccacgagatcaggagacgtggatccgcgtcccggccaccagacgcggccgcctctcgaccgtcggacgccggatctggcctccgggaagccggatccggccgccagcgcttcccacaccgactgccggacgcctcccctgcctcccccaccagatcccgcctccacaaggttaggggatgtggatccgcgtcccagccgccggacgaggccgcctcccgactatcgaacgccggctctgcttcccctttgctccgcgggcggatgtgcctcccaccagagggcgctgcggcctccacctcccgaccgtccctcgccatggccgccatcctcttgttttgctttgatattatattgttgtatgtggattgagaaattcttgccatcccctttctgtgaatgtgtgctatatgacttctatgaatgtgtgctatatgagatctatcggtttgaatttcttgtgtgagcaaagcaactgtgacaacgagcaccaccatggcagcgtgcgccattttttcttttgctaggtttttcacaccagtgacgggttgcacgctatgtctttcaattttttttgttgggttaaagatatcactgacgggtcacaatataaggtccgtcacaggttaatagtcacctgtgacgggttttatatatggtccgtcacaggtgttggtcaccactgacggaccttcacccgtcaaaggtgaggacagtcatcagtgaccacttatctctgaccagggccaaatccgtcagaggtgacagtttgagcccgtcacaggtagccttgtccggtgtagtgtataactaatgtaccctttcgttatgatcttactttacacgaaccagagaaagatgtggagacttgtcttgtacatgagaaagcctgactagcattcacacagttggctccttggaacatatgaattttgcaagaatttcatagagattagttcaattttacaaaaatcctcccaattccttcgattcaatggagtcctttttgcatcaagtgagattcttcttggttcttagttcgaaccagccagacccccaatgatttgttcctaactaatgtttaggaatcgttagtagtccttgtgatgttaattaagcactgaagcaaatcattcttcagcatatataatgcaagagctgttttatcttactttgagtataactatgaattccaaatatcttctaaagccggaatttgcgagtgggatagctcaaattcttcatataagttgtatgcttcagagtctacatccctatatatatagggatgtagtatagctaaaacacacccacacccttggccttcccgcaccacccacccaccccaccacctatatatatatagggatgcgctaaaccgcaccgagggtgtggtataactaaactactcccctcacggcacccccccattaacccataagtaattgagttactaacgtctttttctttcctcccgcactcttatcagtttggttctccattggcccatgagttactgaattactggatctgttaacccattagtaagtgagttactaacgtttttttctttcctcccgcacgcactcctatctattttcctatctattttgttctctactagcccacatgagtaactggattactgagacggttaacccataagtaattgagttactaactttatttttctttccacccacactcctatcacaattggcacattagtaaaatgattactgagtatgtagtaactggattactgaggctgttcacccataagtaattaagttactaacgtttttttatttttcctccctcactcttatcgcaattggcccatcagtaaatacaacgcaacctgacgacataatgttctattttgtgtacaataggacaatattgaacaagaagaatagtatccaacattgcttctctcggtgtatggaattaatttctaattccaaatgactaacacagccacattactgctaatacaaacatcatgtagccacattattgctaacacaaacttcttgtagtaatagaggtagtagtctaatgatgcactgtctaaagaacaggaatacatatttctcttaatgttgtttcttctctgaattcatggcagggaaccttcagctggggaatgcaatatgctgagagagacccatagacgccggacagtgcaagtgccacacatcattgtcgagcccacgcagtgttgcagattccttaatcctccccgccaacatttatccatcacccatgcaagaaacattgaactgtcacttgcacttgttctacacgtgtgaaaaaaatttaaaaatacatcaaaagcatgcactcaagtactatatgtagataaaaagaaaatggtaagatcattcaaatcttcaattgtggattattcaaggctccaatcatctgaactatagtatgtcagaactcaaaccaatttgaagatatctcagacaaggtcacacaaaggctaattgcacttgcccaggttaactgaatctaaaaccagtaacaaccaatatccttttctgttaaaagatcagagagtaaataagtactcaaaacaattaatagttcagtcctttctctgcagtgggcaatgatgtattaaaacctcagcctatgtgcccagattcacatagtccacccaaatttacatggtgtattcatgagaaacataattttattaaataaacaaatttacatgtgccctttctcttggtcttaattaaagtctcttctccaaacaaacttacaactagtatgtcagaagaaaccaaaaagggcataacgatttagttcacctaaattttcttgacagcatgtacattccaagcagcgtttacttctttaaatctcatcagtgaacctgttcgcttacaaaatcatttgaagagatttttctaagcggaaatcacacacaacgaaagagagaaatcatcagagtgatgcggatttttttcagaagcaggtcgcagtaaattcaaccatagactggaaccaacacaagatacagtaaaggagaaggaacgtgagtggtgcaaagtgcaaagcatgtaggatgtggaggagatggtggtgaatctggacatagatgtcatcgtggaggcggtagactgtgccgtcaaggcatcaaccttgccggagcggtagtggctgcgcacgggccttaatctcctcctcatccggcgaacgatcaggtcagaccggcgagggatgcatgagtgcgttacctcctgctgatggcactgccctggtggtctcacgcccctttggctccttgccgcatgcgttgtcctgcacgggcgacggcgactgtcgctccttggtcaccgtcgccttcgacgattgggatccgttacctcctgcttgtcgatcctaacagccagatccggtggtggaacgaccatggaggacggccgatctgctcaacgtcgagtaagctggcggtcctccccggttatggccgtcagccgttcgccgccaggagcacctccgcctgttcagatccaaaaaaaggaaaacagatgggtggttagtcacagcatgggaacctaccgtcggagtggttgtcacagccgtggtcatgcgggatgtcgatgcccccgatgatgagggtcgaagccgtggccgacgcgaggtgctggcgggttcggcaccgcatcgaccacggccaatgtggatggccggccgaggagcagggagggccatgcatgggaagaaaggcgcgggctctcggacgtctgcgtcggtggagggcggacggtagagcctggggg

SEQ ID NO: 48022 - DNA, 2425 bp, Oryza sativa
ttttttttggttgggtatataaagagactaaataagatctaacggctcacatctattcaatcctcgggacttcgttcggactccgattactataaatttatagtctatttttcactactcggcgagctctacgcatccacggttcccgatcgcctatacgaacaatggtttaaaagttgaacttttgcgcgtttgctctaatattccgcgagatatattaatttaaaactcggggtattacagtaaccgtcgaaactttcatccaaattgccataaatgcccttagtaaatgttgatagcgaaatctaaacaatagttctgagcaaaattggggctgacagggcccaattatcaacaccagtttattttgcctccataagcggtattaacgctggtttcatccgacgtgatgcttatgtgatattacaattagaaaaatagatcatgagtcgcacatattgacgacgcactcctttatctccctatttcattcctccccattctccctcttctctccaaatgggcacgccatggagctcctcgtgtggatggacacacaaaaaaaaacttgtataattagctggttttgatgccatctaacctatatcccaagcatgcctcgtaaggctttctatttgtaaatggctttttttcaccttttaaagttccaaagctattgagttgattgaatgaacattatgcgaagcatatcatttgcaatgttctattggcatacctattcataattagaaatcctttagtttttttttcatttttaaaggtaccttattttccattgacaaaatgctagtctgttttctattcacaaacgggaagtccgtttggtttggctctgtggcattgattaagtgcaaatgtgtgcaactggaaatggaacagtggagtacaagctttcatccaaaaataccttaaatgccctcaattattaataaattgatagcccaataatttaaatagtgcctaatgaagttgtggaggaaggcgaaccaggcaagctgattatgatgttataaacatataggggtgctaactttttagcttacaaaatttgagggttcagtatagtgggctgaatttttattcattttaaaccaaaaatataggtaaggttgtaaaaagaacccatatttttgaaccaatacatgtgcaaccccttagaattggatagggagcatttcgtacaatttagtttgggtgagttttgatcggtattagagttagaataaattaactactcaatatctcacaaggtaaattggccctctttataagaaaatattgtctctatgtatgctgatgaaacataacactgaactgatgagaaacagtacatgtagtagggaggtaattttacctgtattgattatttctgaatatcggctaactgtaataagattgtgctgccttttacttctgccaaaaaaaatagctttgttgcctatagaagcgtgaataaggcattatatatcttaaaataaatatgtcaacacagcttaatgtatcacaccacatggctgactagcatttctgatccaagattatcattatcggggtttcctctctcccctgggtcgggaggcgacgacccagccgccccctctcttccacccctttcactatactggagaaccccacatctctcccggttcgcaacccctttactcccgggtagcgaaccaggagaaggaatccgggactaaagatcgcagtctttagtcccggttcagatacccgggagtaaatatttatctttaaagatagctgagccacgtccggttgatccccttttctttttttttaattgttaatttactactggcagttaatccctgtattttctcgcatcgggtgagaagcatatccccaaatcaaaccccaaatcaagtaacatcccaaatcactcacctcacaaatctaagttacacacaaatcaaatacatcacaaatccttaaataaattacacacaaaataaaaacatcacagatccatgcaatgaatcacaaattctagaaattatacatccagggaatcacaaatcacaaatcacacaaaaaatggaggacgccggccgccgcctgcgtgcgcggccccaccaagcgccctccgccgctggccgcccgccgcgcgcccgtcaccgctggccgcaggccgcctacccgctgtcgccgccgccagccgcctacccgcgccgaccgtcgcttggcccggcgctcgctcgcatcggccgtagctcggcccgccgttcgccgctcgcttgcgccggcctccgcctggcccggcgctcgcccgcgccggccgcggctcagcgcgccgctcggccgtgcagagggatgagggggagtaaaggggaggaggaagggaagaaggggaagtagaaaaggggaggggaggaggaagagatcg

SEQ ID NO: 48023 - DNA, 573 bp, Oryza sativa
ggttatttccgagcatttggtgcgcaacatccagccggatcttcagaattaccaaggggtcaatttgaactatcaatatcagccgccatcacctcaagttcaataccagcaggcagaatcggctcaacaccagtttgttccttagtacaaccaatttgagcccatgccacagcagcctcaaggaacgcctcaacatcaaccatgggccgatctaatcgcagatgtcatgaaggagcagtttgggcttaggccgaaagatgctggaaatttataccgacagccatatcctgaatggtttgagagagttcctctacctaaccggttcaaggttccagatttttcaaagttctcagggcaagatagcacatcaacttatgaacatgttagccgattcttagctcaatgtggtgaagcatcggctgtggatgccttgaaggttaggttgtttcggttgtctttgtctggatcggctttcacttggttttcttctttgccatatgggtcaattaacagttgggccgatttggagaagcattttcacagctatttctatagtggggtacatgagatgaa

SEQ ID NO: 48024 - DNA, 895 bp, Oryza sativa
ggtcgtaatcctctaaggttcgaccaggatgtcttcgcctccaattcgccattttgacaaccacatagctacataaaaggcgaacgcttgatcgacgaaaacgccaggggggcgaaacgaatcggccgaagcatcgctcgccgaacgttgaaaccgcgacagcttgtttcggaataaagataccgaacgccgttacattcaacttacgcaaaacacaagcgtttttcccaacgcaaaatgctacgagtcgaaaacggaagtcgaaagctgaaaagtcaacaaatcttttcgccaatccccaaaagggggccgaacgcatgagtttcggcgaaatccccgctaaaacaatagggaaaaggggaaagaaaaaaatacaagtcaagaatcgcgcaaagcagacaaacttggcaaaatataatcacccagtgtcataatacagcttcgccattctcgaaaggcgaacgccagtgttcatattttttctgcaggagtctaaaaagaggtttcggcaggaacatcggccgaaaggggacgcctcatgccataccgtatagtttgcacggtctcggccaaagctccttactcactcttgcccgtgaggggcttgttggaggcatgccatgaagcccttcggccggacctgccgaaactatagtaccatcaaggattcaagccaaagacgtcaaggccattcaggcgaagccctatggcgaaagccataagcgaagatggcgaaggctgaaagccgcgtcggtattccgaaaagtaaggcatctcgggcaaactacaaagacttcgccatgacgagttcggcatcaaggaggcccacaggctgcccccgccttttaggcccggttgccatagaccaagcccagcctatcagcccattaaaggc

SEQ ID NO: 48025 - DNA, 714 bp, Oryza sativa
acaggttttgtccacgccataccttccgccatagtaccaatgaggtacggcgtcaaggggtgcggccgaccaggtttcgcccacccacgccttcgccatagtaccaataacgtactgcgtcaagggctgcgggcgaacaggtttcgccacacccacgccttgcgccatagtaccaataaggtacggcgtcaagggcttgcgggcgaagaggtttcggccacccacgcccttcgccatagtgccaataaggaacggcgtcaagggctgcgggcgaacaggtttcgccaacccacgcctttcgccaaagtgccaatatggcatggcgtcaaggcctgcgggcgaagaggtttcgccacacgccatacccttcgccatagtaccaatgaggtacagcgtcaagggttgcgggcgaagaggtttcgtccacccacgcccttcgccttagtgccaataaggcacgacgtcaagggttgcgggcgaacaggtttcgcccacccgcgccctttgccacagtaccaataaggcacggcgtcaagggctgcgggcgaagaggtttcgccacacgccatacccttcgccatagtaccaatgaggtacggcgtcaagggttgcgggcgaacaaatttcgcccacccacgcccttcaccatagtgccaatatggcacggcgtcaagggctgcgggcgaagaagtttcgccacacgccatacccttc

SEQ ID NO: 48026 - DNA, 1251 bp, Oryza sativa
accaagcatctccaccttgactcattagcagcaaacaatagtattacatacgtatagtatccgtctagaagtcataatcatgaaataaactctagaagtcataatcataaatacacccccccgtaggatatccaaataaacaacccgaaaccgaaaccgacacagtgtcggccagtcagaccgcgggttgcgccggtctgaccgcgcattacacgccggtctgaccggctaccagagcccggtctgaccggtcacacaaaatgataaaatcctgcgatcacctgtaaatccaatcatcttcaaaaccactttgtgaataaattccaaataacaaaaccaataatctccaatgcccaattgttcatcacagaataataatcaaaaacacctttgattttacaatctcccccttgatgaacacattggcaaatccataaaaatgttttggtgtttgaaaaataaaaacaaaagtggtaaaaagcacacttcgtacaaacgtacacatcgtgctcgaaaaatccaaaagaaaacttctccccctttttaaaagaaagaaattcccaattgaaccaaaaacatgctcttctcaacaactctccaaaaattcatcttgcttctcccaaaaatccaaaaattttcacattacttctcccccttttgacaataatttcattaagcataggaattatgttcattaatgttcaagagcttagcatacatatagcatatcatgtcatgtggtgcaataaaaagaagatgaacccatctataacataacaagcatgcattaaagtataaccatgaaccaaagattttacaattaagcttgaatcaacaatcagaattcatgatttcatatgatttataatgcaacatcttaacaagcacataggttgaagaataaacactaaacacatatacctattgcatttatcactctttctcaaataacctttagcacaaaataaccaagagaattttttaactttttctttttcttgagcctttttgctcatatttttctcttttattccgagtacgtccctgtcgtcaagactgtttccagggattcggcacccattattttgctcacatcgaatacgtccttgtcgtcaagactgtttctaaggattcggtattcatttttttcatatttttattctctttttcacaatgagcaattaaagctatttgaggaataacaagttaataaaacatatatatatatatatatatatatatatatatata

SEQ ID NO: 48027 - DNA, 4042 bp, Oryza sativa
cccccccccccccgcgtcgggcgcttggtaccgagcattctcggataaaaaaaagagagaagagcaatgggctatagatctgtagccagctgcagcacggactcccagacgcaatgtgtgtatgacaggtgggatcatattgtatgaattggctattagattggctatagatgaattgaaactagtagtgtgctatatatatctttgtagacagacgggttaaggctctggagcttaagtcttccgtctaagaagatgtattttcacaagcggatggccatcatatccctcacccacaaccatgcaggtggctatttaggaacgaaaattcggctggccgcatagtgaaataggccttttgacagcggaaatcgtttttctaatagcgtgcctgcaatgattcattttcttcttattcgaagcaaaccatgtgtattttacctagctaaaaatataatcacctaattctttgcgattgatcagcattcagcaacgaacccactatactcatcttatataattataatgggaaaattgtaatggccaaatggctggatagaatgacataacgtcgctggctcgcagcatccaaatacaatattgcaaatgtattgacgattggtgtcagtcaacgagcggtgacggtggcagtggcagggcagccggccggcgtgacacgttcgtaacgcgagaggcggcgaccggccggccgcggtcgccgtggaggactccatttgaccgaccgacctccctctcgccggctagcttaattagctatcgatatcaaagacatgccccgtcaaaagaaagaaagatactgctgctactagtgaagcttgtagtagtatttccccttttttttttttgacaaattgatccttatagaaaacttatttcaaaactagtccctaccaaaaactatatcagaaataggccgtcggctcagcgctaatgtctttggcgctgagattgttcctatcagcaacggaactggcgctgatatcatgccagcgtggcgggcgagccgcgacgtggcgcggtctcagcgccaatatatctggcgctgaccaaatgtacacactaattaaactgacgcgctatagtttattagcaatgtacttgtggtgtagtggtaatttctttgatggtgtacccttcagccaaagttcgaatccccattaggtcatatattttcattcttttaatctgcatgcgtacatataaatgatgatctctgtttttgaaaaaaaaatagaagaatggatttaaaaaaacttgagtttttaaaaagaaaatttaaacaacattttgagaactaaggtaagttttattttaaaatgtcacgtgtttttttaaattaaaacaacacttgaacttttaaaagaaatatcacttttttaaaaaaaatatttaaaaggaataacacatttagtacatatttaaaaatataagaatggacttaaaaatacctgagctttgaaaaaattaaaaccgcaagttgagaactaagtgaaaaaaagtttagtaaaaacatataggagggggtttgaaccctggtcactgcaataccaactcacaagtacctaccacgtcgcggctcgcccgccacgctggcatgatgtcagcgccagtccctttggcgctgacaagaacaacctcagcgtcaacggttttggcgctgacccaacagcctaattcctaattcctagatatagtttttggtagagactagttttgaaataagttttctataaggatcaatttgtcaaaaaaaaaaaaaaacagtagtatttctccctgtgggtcaatatgccgtctacatacgtcgtcgcctagttgccatgcatggccacatctatcctgacgtggatcgcctctgccctgcctggcacgctgcctggcacgccacctagctcgtccctcgatctgtccctaccagcttcataaataactttccataggtggtgtttggatccaggactaactttattccctatcacatcggatgtttagatattaattttgagtattaaacatagactatttataaaactaattacataaattagagctaattcacttgacaaatttttttaagtctaattaatccataattagcacatgtttattatagcatcacataagttgttcatggattaattaggctcactacatttgtctcgcgaattaggctaatcatggattaattaggctcaatagattcgtctcgcgaattagtctagagttatggaatgggttttatcaatagtctacgtttaatacttctaattagtgtccaaacatccgatgtgacagggaccatccaaactgacggatctcccagaggcggtacaggttggagcctctgctaagagcatgtacaatagtagactataagccaactataaacacatatcgagaagataaataaggagagagatgagcagcgggctacaaatttatagtcagctgcaacacagactacaagatacaatatgtgtatgacaagtgggaccaggtataactagtgcagtatatgattatagataactattgtatgaattggctattgaattgactatagatgatttagagctagtagttggctatactattaaacttgctctaaggctgtgttcggcagtgcaggatgagaatccatccctcctgcacgtaaaatggagcagtcttttaacacatgattaattaagtattagcttttttttaaagaaaatagatcgatatgattttttaaagcaactttcatatagaaatttttttttttacaaaaaacgcaccgtttagtagtttgaaaagtatgcgtgcggaaatcaaaagaggtgggttgggaagatgaagtgctgaactcagcctaataatagtcccccactgcatctttactaaaattttctacatacatatatgagaaggtggtctagtttgttcagccccttctatttttttctgggttcgcctcggccacgatttgtgcaatggatgcagtggtcctgacctttctaacagtacatatgttttgacaatgctagctcttgctctacactttaaaacaacagcaagaatgaaaaactatattttgaaattaaccttttcaaggggatgtgaacaagtaatgattcttgtaagacgggttattttgaagctgcaacttttgtgttttatggccaaagttccataaaacaacatgtattataacatgtgacacataattaatcctgagtatttggttccaagattacataaaattacattccttgacaaattcaagaaaatgataagattttatataggcccacatttactcaaattttgatggtataaagtgtttataggattctgaattattgattaagatgacttaactctttattacttcgaaaaatattgctttagacctgttaaaattagctgaaatttagatatggctaaagtgttatggaacttttaaaccactaagccaaaggttgtgcaccacaaaatcataagaaccgttgttttctataattttgacaataaaaaaaaagattttacaaaaattactcaatcgtttttatctccttatagttatactactagtatatatgtgaatggagagaatcaaatcattttacctttagcgaagaagagaaaatgggtaccaacacaacacgagtgataatttgctctatggccacatgccatgtactatgatcgtgttctaacttttaaactgcttgtgtgggttggatcaatttaagggaattcaagagttggaggtggaaattgactgcctgaatccagggcaatcaataactgtggcataatcacctccaatgttctccaaaccaaggaaacagatttcatccacgacaatttatatagacaaattttgctaacttcgtagttttggccataggacaccgcacgaagttacttttggggaacacactctaaaaatgtggttatttgccaggagacacttcatccattaaattaatgttttcatgctgactacgcgagagcgagggtccactttttttacatg

SEQ ID NO: 48028 - DNA, 3799 bp, Oryza sativa
cctctctcccccttctttctctcttctcccgatggacggcgtggtgggaggcgtcaacattgacgttggcacccggagcgtgcggactgctccgcggtggtggcggagcctggagcacgtgcaggctgcccagtggcggcggcatacgcagcctgctcggcagcggcggtggcttggcgcgcggatcttcgccaccatggctagttcgaccagctgcagtgtgtgggtggcctggcgccggacgagcacttactactctaacgcatactttcttccctcgactcggcgacctctgaccgcagccgtcgcagctcgtcacgtccgcggtcaacgcgccagcaaagctcctccacagccgcctgcttcttccccgcctccttcttcctcgcgatgatggtgtctttcgtcgactcgacagcagacttgaacgacggttcttggccacagccagctagacctagagcagctcagcctccttgccgagcaggcatggaggagagccacgccttcaccgccagccatagggtcaccctgttgattgcaggcagccagctatatgccgacaacctcaccaaagaagagagaatggagggagagagaggaaaagagagaaacgaggggtaatttggtcaacatatgcaaaaaagtgggcctgctctcgcctagtcagcatgaaaactttaatttaatggatggagcgtctcctggcaagtaaccatgttttcagagtgtgtttccccaaaagtgacttcgtgtggtgtactacggctaaaaccacgaacccgtgatgtcctgtagcaaaatttgcctatataacttgttgtggatgaaatatgtttccttggtttggagaacattggaggtgattatgccacaattattgattgccctggattcaggcagttaatttccacctccaactcttgaattcccttaaattgatccaaaccacacaagcagtgtaatactagcacatacacatgtgacgtactcttcaaattcaaggagctcgcaattcctgaagtttgtaacactactacagaaaacacaaatttgtgccggttgagaacacctcttaggtgcaaaagttaccaagttaaaggccgtcgaattgatatttacatcgttgaaaattcagtatggctattagatgaatttattgatttgaaagatttgtttgttaattgaacggttccagctagaacattctgttctctgatttggaaccttttcaattcaatttaaaacttccgtatcctgatttgaattatatgcagaggaatgatttggaagcaggggatgaggcacagtcgcacagagggtgttaggatagcaggacatgtggaaaagggaggacgtggcagccttgcaccttgcagggtgtcaaacatcgccgttttgtctagggtacgtgacaacaaatactcaacttactttgtgttaagtacaccaaaattaaccactagaaatcatttataaactttttgccgcaacgacttccattgaaatcctatattaacaaattaagaacagaccacttgaaaaattgtgcaccaaaacacggtacacagatcgttggcattatctatgccttatgttcattagtatattttcatcttgaagttcaaggggccgcgctgttaaaaactcgataaatatcagtagaaagcagtgaggacacaacagctaacagaaagaaacatataaacatgcgaggaaatctcatgtattctccacacgattttatgcctcgcatgtttatcgaaggaggggagtggagataaaagtgccccccaccccccaaacccaaaaaaattgtgaaattgcaatagtatttacagtaacacgtgctaacgaaagttagtgatccatgcaaccaaatacattttctctcaattgcccttccaaagttatgttttgtagtcaacaattgttcccaggaattgaaacttttaggcagatttagctgaatatctccaatttgctgtccaaatatgatataagattttccatctcaaatattctacttatttgcacaaaaaagataaacctttgtatatatatttttttcattgaagtatgtcttgttggttggactttttatttcaactgtgaattcaagtttctttaggtttcataaataaattgaactatctaaatcttttttttcataaagaaaaatgatcattcatgacttcatataagcaactatagttcgtatgatttctatttgtatacgttgttggaataaatgttggcccacaattagtgctatgagattaatatcatcttggaaattcaagtggagagatgtcaagttaaataggaaactattagagagcacctattgaccggttgagatggtgggactgccacatgcgcgagcgctccaatccgatcgagaccgtgggcggggcggggctggctggctggttgctgctctctctctctctctctctcattattttgcaacggttgagaatcaccaccattacctctgcaacaaatgagagaatcaatcttgatttaatcatcgggttaattctatcgactctctctcatttttttttgcaacggttgagaatcaacaccattacctctacaacaaatgagagaaccaatcgcgatttgattattggagtaactctgttgattgctctggtaacgggcatgttgattgctccggcaacgggcagattcccctctcgcgcactatataaacccatcacctggacagccagagacacatctctcggctctgtcttctctagcgcattgtcttcttccttgatggttctttgtttcctctattcctgcgctactttctgtttccccggttctgatcacctgagcgcacgggtactcgggacgagcagccctctggaacaacatccgcttgtgtacctgcacgggtaggtgggtgatcaagtttttgaggagcgtcatccgacatgactgctctacatcaactacgtcttatgttgttctgtatcggctacgtcctttgcatcaactgtctgcgacgtctacttcctctctaatgtgatgtcttcaaccgacactttagcaggagagaacggcggtgccccaagaggaggagggaatggcggcacatgagagaacgtcaatacaaatgcctcatcatccagtggagcattctctgggtatatctccattctaatctttgtaactattagcatgatcatgtttagcactagcactagatcacttcctcccgcgatcatcatgattattatcttgttttttgggattaaaatatgctaatttatgaccaaatttccaacattccaaaaatttgataggtcttttttggtagttggttttgtggcattactaaaaccacatgctttcgatggtccaaattataaaagatggaaagcatgtgcactattgtggttgatggctgttgacggtagttatagaccaatttcgacagtcaatataactggaataaaggagaactagctatgcttgcagtgcatattttgtttagaataatctatctccacttgtacttggatttttatttgtttgcagatattgctatacaaatggaggaaaatcgacagaaaacaaccgaacgatcaatcgaaacccgttgagaggtagacttatgggtagatgagcctctaaacccattaaaataggcatattttgctacaggacatcgtgacttcgttgttttagctataggacaccgcacgaagtgacttttgggggaagacactcccaaaagatggatattggcaggtggacaccgcgaccattaaaataataa

SEQ ID NO: 48029 - DNA, 709 bp, Oryza sativa
acttcaacaaatggtgcaaaaggaagtgccaaaagatcaagcaactatactcgtaaggaggacattcaattgtgcatttcatggcagagcattagctcagatcctattattggcaatgagcaaccagggaaggcatattggcagaggatcgcagagcactaccatgctaaccgtgattttgagtctgataggaatgcaaactctcttgagcaccattggggtaacattcagaaggaagtaagcaagtttcaaggttgctacaatcaaattgagcgtcatcatccaagtggcataccacatcaagagcttgtaagttaaattgtttatttattattattaataacaatcttgtatgtatgtgaactaaaacttaaattatgttgcaggttcttgaagctgaggcattatactcgtccactgcaccaaagaatagggcatttcagtttaatcattgttggctcaagttgaggaattctccaaagtttcaaacactagaatcccacaagaggccacggtctaggaagtctttgaccccaattgagagagctggtgaagaagatgaaggagatgatgctagcaagagtacagctcctgatttatctcagccgagtgctaaaaagagaccaataggtaggaagcaagcaaaggagaagttgaagaatggaggagaagatggaccatacaaagaggcgatgaaagatttgcttga

SEQ ID NO: 48030 - DNA, 707 bp, Oryza sativa
atttttaatccgaaatacagtatatctttagcctttgtaccgactgacaagtgggaccccgggtttattcctttttctaccgaattattttctaaaggaaattggatggtgctaatgacaggtggggcccacaacctattctcttctcttttctcgttctctctatcgtcttctacctccagaccgagcgggagcagcaggggagacgcggcgcgcgcagcaaggccggccgagggcgacccgacggtgaccaggggagggagcggcaagactccggtgtcctcctgccggcagtcacggcacaggacggcgcgggggcgagaggcgccgcatggccgccatggccgggcacgggtagctaggtgctagggcgatacggagggtttccgaccaaattggtgagggcgtgagcatttatggcgcatgagggttccgtttttctagaaaaatcgaagggagagcccccgggatggcatgtccacggtgacctccttgggcggagcttcggagctcgggcttgtcacgattatggccctaatcgacgaaatagttgggggaggtagttcctagaggaataggaggagtaacaggagtgaggacttaccgagggacggcggaacgacgaagttccgcggcggcggtggagccgggaagaagctacagcacgcccacaagatgttcgacgaaatgtgtagaagggtgaagaa

SEQ ID NO: 48031 - DNA, 739 bp, Oryza sativa
gcatcgatatcggcgacgactggctactacgactacgacaacttcatctcgactacatcgactatggcacaaagggctatcatccatgttaagcactcttgccggtttcttctccagtccaagtgtccgcgctgctcacgcttggactgcggggggatgttagagtatatggtagttagagatgtattaggataggattgatttatgtggattccttccttatctgtaatccttccttatctcctccacatgtactcctatatataccggccccctgaggctcaatacaatcatccaacgtttcatagtatatctctcctatactatccaacaatggcatggcgcggtgcacggcgcggggcacagtgatgggacggcgcgcggcgacgggacgtggcacggggcttggtgtggtgcgacgcgacggacgacggcgcagcagtggcacatggcttggcggtgcgtgtctcagggcggcgacgcgacgggcaacggcgatgggacggcgggcgcgacggcaacggtacgcggcgcgggcggtgctcgaggtggtgatagcgatggcggcgacacgacgacgtgcactagtagagatcggtacatctatgatgatctacttttgtcatggaagatgcaataatcgtcgtaaaataacatctatgatgaacttatgacgaaataggattagtcatagaactcgcgtcacataagtttctctatgacaaaatggtagatttcg

SEQ ID NO: 48032 - DNA, 1050 bp, Oryza sativa
gaaaataatttttttcctagctgtcacatcatagactccccaagaccatattcacctccatcttttgtcttaaatttgatttaatctaatccatgaccagataactgatgtcatcaccaaatagataaaacaaactcaccagacatgaagaactaaatattttcttccttgtcgtcttatgaaccaagctaataaatctaacatccacgctttcccgtatccgtagactgaattcctgataatttgaaaaaattcaccattgccttgaatccccgaagaaattatcactacagtgctcgctctacttcttcagtgacgcagattccgtatacctctatcgtgcaaaccctgcatatcttggatatatcatgtactgccaaacagacccgttgacgtccttttgctcgggtccatatcccgccaactccaccgcagctccacgctctagaagccgtctgtggagattatggataccccatacctacacgacatgtatagtccgactgggtatggggtgccatgtatagatagaatatttttaaagggactcgggttaaattccaaactcgtatgtcaaggaaatacccgagatcctagtcggttacgattgtatcttatcagtaactacctattccgttagggatatggattgtgctttgtaatacggacccctttccctatataaggaggggttcgggtgcctctaggggcacgattttctcccagatcaaacgatcaataatacactcggcggatcaatccccggacaggagtagggtattacttcttgattaagaaggcctgaacctgtataaattccttgtctttcaacccatccacttttccagcttgatagccacccccttttagtattgccgaaatcttgtttcgacagttgccgcgccaggtaggggtagcatcaagttcttcgccgactagtgcgatgggtttcgtctccggcattgacgacttcgtcttcccacctgggcaggcgtttcggtttggcagcctcgacttcatcaccaacgacttcggcaagatttctctcct

SEQ ID NO: 48033 - DNA, 1340 bp, Oryza sativa
aaaccctagcgggttcgcatcaagttcaccttgggaaaaatccaaattaatctaaaaacaattcaattgtgggtgaataaattaataaccaaataaagcatttgaatttacaaatccaaaatatgttgagctacatttcaattccaaatccaacaccattttgcagattagcccttccacttttcctttttcctttccttcttttctctctttcctcctgtcggcactattcattgcccaggacgtattcgttctgggcccaagcctcttccctgtgtcacgcatgccatccctgtcaccatcgcgcgccgttgcagcgccgcacgaacgtcgccctcgcgtcgccgctcctgccgcgtcgagccccgcgtctcacgccgtcgtgtcgccatcgccttcgctcagccgcgcgctgccacgtaaatcgcccatctatgacgttttcctcatgatgttgtatattttcgtcattgaatagaccatatctatgacaaaattttctatttcgtcatggatcagtcatggcgggataggtaccaaaactctatgacgaaattaaaaatggcgtcaaggtacaatagaaaatttcgtcacaaataatgcacacctttcatttattaatacctgttggtcccacagcgcatacgtggatatccaaatttcatttattatacctgttggtcccaccgtgcatatgtggcactggtcccaccgcccgcccaaattatatgtgccactggtcctatatgtggctatcattttttttataaaaaaaaatacacctgggaatcgaacccagtccatgagcatttgcgtaaaaagctctaccaccatgatactaagatctttgagtgaaagcttgtttttttgttaattgtcctttatgcggtgaacctggagaggacgcggcggccgtggcgccaccatgtggaacacacccactcggcggtgtcgtgtttcatcatctcccacgttgggctgttccccaccaggtggtttggatctgaatccccttgaatagttgatttacgattgtgccctcattatatgtgtgttgtagtgttgtaccgatatgaacgaggggtaagtcagtccaaaccacaagaaaattcacaagaatagcagcaggtttttacttttaatgcatgaataaaattttaaagtagtttatctcactcatatgagttcgaaattagacgattcctttttcattattcatataaaaatattgtctacaatttcgagcacgtttagaatgttgtcaagtaaacagtgaagactcataaattgaaattcaaaattttgaattgtagaacaactgtgtggcttttcttttaaat

SEQ ID NO: 48034 - DNA, 511 bp, Oryza sativa
gcaagcaagcgagctaaaactccaaactaattacaatataagctagaagagaactgtaataatatcttagttaactatttatatagatgtagactattaaaggtcataaccacaaatgcaacatccaagagaattctacatacatataattctatgggaatacctcaaaaaaggtgtcaccgtaacgtgagaagttgagatccgaggactcgatacttttggcaacaagttcctgtcagtgaaaggtctttataagaattgattgcacaggataaaatacaagtaaaacatatgtatgtgaaggtcggcaagatagttttacatataaatataatgttagcttgtatgtcgatattctagcacttcaaataatgttcaacatgattacaagaataaaaaaattaaaatttactatgaagtcataattggtgtatagcatgtaatgctttggattgaatacactaagagatgaaaatgattacattattcactaaatatgttgagtacgggg

SEQ ID NO: 48035 - DNA, 787 bp, Oryza sativa
attttcttgaggtattcacaaaaattgcagtaatatttttttgcagttgaattttggcgattgatgcaaaatgtcagttatctgtgacatgagagcagtattaggttaaagtcagcgtcacttaccgtgttatagatggcattagggtggtaatagttgcctgcacaggccacataattggacggccagtcgtaagcggcgaacgaactttcacaaatcagtgaatcagatctgttgtgagtgcaaacaccaaatctaccatgttggacatttggttggccatttcctcttacctgattactccttcaattactactaccacattgagtgcaccgtcaacctgcccaatagtaccagtagataacaagttatagtgccactcatgtccttgtgtcagttgcgtagtcacagttaagtttagagtctaatctacgaccatgtgatattacatgcttcgaaactactgtggtataaacccggggaatattgcaagtatttttatgaaatgacaatataatgtcttaagttgcctctaaaatagattaaggctgtgttcactccagccggatcccaacccaaacagtgtgcacggaaaacgaagcggtccattagcacgtgattaattaagtattagctaaatttttttttcaaaaatggattaatttgatttttttaagcaactttcgcatagaaaacttttacaaaaaacgcaccgtttagcagtttgaaaagcatgtgcgcggaaaacgagggagaggggttgggaacttggggtgccgaacgcacc

SEQ ID NO: 48036 - DNA, 546 bp, Oryza sativa
aaaggagagagaagccgagcgtggcagcggctctagggctagggaaaaattcaggaaaaaaagtaggaaacggaagaggaggcccgaggcatgctatttatagccaaaggaggaggagatcggctcggatacgaggggaatcggcggcggaagggctagggttcgccagcaaaatagaagataaactccacttcgaatccacgcgatataccacgggatatactccgattcttgaggggaaagaaagaggaggataagggcaacaaatcccctcaatcaatttcggaaacgggacacaagatgcgacggatttggcggtggtagcggctgcacacacggctcggcagggagtctggaggttgggggcgacactgtagcagagggacacaatacagacttcttgccgggctttctttctcggcccgattggaagagggagacaaagcagacttcgccgcgagagacagccgctgctcgggctgaagaagagagagagagaaaggagaggagtgggccggattaggccggatttggcccggagctagg

SEQ ID NO: 48037 - DNA, 1167 bp, Oryza sativa
gtctgaatatacaacagatggatataaagttgaaaccactttctatgcatgaaacacttatttttcttctttttaggcaagtttatggaggaagctacactttgtcgtgaagatcagagtttagtttatttgcttatttccactgcgtttgtaagaattatttattatttttgaatgatgtggatctctgtatcaatttgtccgttgtgtactctggctggccctggacagagattttaatacacattctgcttgaaattcgggttagcgaatttctaggcgtgacacttgaccggcccaccagggttcggccgaactaggacaagcgccaatcgcccccaaaatttgaacactcgatctgcctactctgtcaacagtagaactgaatcattcgtgcggtagctcgttggatcgacccagttcattaaaatctctctcttgttcatctccctgtccactccaccttatccattcaagccactactctctttagctcgaatccataagtccagtccatacccaagatcttcaatggctgggaaatccttgttccgtatggtgctacatgctgaaacgcatttgatctcaatggagagccctctccggcgaatcaattggtttcgggagaaaactgggcgatggaagaagcaaatgcgatcttcatagaccccctggacaccatcgcggtggactccatgagtatgcggccgatcttttctgctcctagtttagccgaacctaggtcgggcgaaccctggtcggcctcgatcaaccccctgtttggccggtcgccagtctcgccacgctacaaaactccgactaaagtacggggtgtttcccaagcgcagaggccgacgacaggagaattgggtctactaaagcgagcacgatgactttttgaagacaaggagaaggccacatcttccgccagcgagcattatgtgggatctcttgatgtgactgtcacaccccgaagttcttctcccaagccaaaaatttaatttataagcgaccctaaaaaaaaaaccggtgcaaagcaagagtaaacccttttaaatcaatgcaaataataatcgaatctgacatgtggaattttttcttgagttctacatgtcgaaatttactaacaggatttttagtggaattttcagagccctagaaataatt

SEQ ID NO: 48038 - DNA, 649 bp, Oryza sativa
aatcatgctaagggctaaagtttcttaatctttctattgtcatcgtggtctatttaggagttaaccaacatggcatttatggtatacatatatatttggctaatcggtggtttagtctatcaaatggctatggaaggattatgactatatatgcatctatctaaatagcacggttacataccagaggttctgttgttagatggatttattattatttaattgatggaggctttactttaattatgaacatattttacttgtcacaataaattataaaaggttaataattatccatgctttgtatgttagagttgtttaggttaatcatattatggttacagattatcccatcacataattttacaatgaataatcctaatttacagttgaactataattataattatatgaggtcaagatttataactagtatttatctaatatacatgtttgtcatatactccctctaatttaatatatgcaacacgcaaattaatactataccgtacaactataatgggatgtatagtatatgtgtaagcaacaatatcttattattggatcatatatttgagtagttgctttttactgtaagctatacaatacatgttgattttaagatggctctgtttgggtaactaatggatat

SEQ ID NO: 48039 - DNA, 1085 bp, Oryza sativa
agaaaagaccaacaaaaaaaaatagtagattagtttttcgatgatcctatagaccattgtgccttttccctagttcttgttagttaaggcttgttgagttttcgattgcatcggttgtgttaatttgctggtcttagtgttaggcgattagagtttcgagttcttgccaccaccgcacatcgccaccttcatcaattttgccgtcatcaccaccgtcaccaccatcgcagtcacccaccaaatcactttctatttgtgtttgatctgttgccgatagcttttgttagttgccttgtatcctgccgccactagaaaggaaatagaaccctgattcgagtgaccttccttaaaacagtcatatctttttcatacggactcgaaattaggcttataatatatccacggacatctacaaaaaaagttacatccgattctccccgctttgtcgggttcggcaaatttaaaatcgccaaattcctcttgcaaaattctgtttttgtggcgagaagcttcgggacctattcgcatagaactttaaaaaaattctacaagcttcatactttgtccgtttaagataagattttctgtggttggttctagtgtgctcctggttgtgaaaaaaatatcaaaaaaaaagttgtgcctctctcctcagcactagagagagcaagcaaaaaaaaaaagaggatccagcgagcacaccacaccattccccctttgtcaccaccttctaccaccggttcttgttttcgttgttgtttgggtttgtgttttgtggcgtcctttgtggttaggctcgcgtctctacttcgactagcctaggaccagcactgtacactatacccttgagcgattattcaatttgctttggctaacgtggtttctagttttctcttgagcattgctttcagcccaccaacagctccaccacaaacccgactcagcttacaggtcttgttgctacagcaccgatacacctcgttccacggttgctaacttgtggtgttgctgtccccacctaagaacaaggtaagaactggtaagagcttgtgagacaagctgcgagtgaagtgagagtgagcgtc

SEQ ID NO: 48040 - DNA, 640 bp, Oryza sativa
  unsure (1)..(640): unsure at all n locations
ctacctttgttttcggtttatgcctcctggttggctgggtacgtttgggtaggagattttgcttgccagactcggttaattactgagacacctcctgcccgctgcacatgatttttttggttggatgcggcagatttggcggcactgaggagctccgcggtgtgcaggcacgcgtcgccgcgggcgtcgtggtgcgcagagaaggagaacagtgggcagcgtgacgcggcggcgaggacgacggcgcccaagcccgctcgtcccgcgggcgccgcgaagaacttcatggcgccgacgatcttcgccgccgccgacacgtngtcggccgccggaccttctcttcggcctcaccccgtcggtctcctccgggatggccggggacgagaggcggagcacagcgcaaagtgagaggccgagggaggtgcgcgttcatgacagcgcggcgaggtcgaagttggtctcgtagacggaggtcgccaggcttggccccgccaggcccgacggcgcgtaacggaagcacgcccgcattgccgtttcgcccgcggcagncttcttacttgaaaagagaaagagggagagagggaaaaagagaggagaagaaaaccaacgtgccgctgatcacatgtggggcccacgtgtt

SEQ ID NO: 48041 - DNA, 603 bp, Oryza sativa
ctaagatattttataatatgtctttttcatttgcgtaatgaaaacacgccaaccagaagttgcttgctgtacttttaaaaatgtctatacaatattatagagatagaaaaacgctggtttattgtaatgaagaaaacatagatatataaaattgagagaaggtagtactctagaattgcatttttgatatataaaatttgaatgttacaattgcatctttttcaaatgtgtgtggtggtgttggggagggatagagggagtaatacacgaataattaataattatgaataaatgaatagaacaacaacaaatagtttggggataattatatatgtgtgtgttctcaactatttaaaagctaatcttaaaaaataaaagcaatgaaaaattaaactttaaaattaactataaaattaggattaagcttgaaagtttaaattttaattgtaaccgacaaggcgacaagcaaagaatggcagacccacatatgtatgtctaaactacaggaatatgccacacgaacctaactacgggatttgcttactacgctttacaaaccacaaccaacccttccctttctaaccctatcccaccaaaaaaaaa

SEQ ID NO: 48042 - DNA, 759 bp, Oryza sativa
gagcagccgagcccctgctccatcatgtgatcagtcacacagtacagagatcgatcgaattttttgcagtaatatcgtatcttcatcgatcagcaatcaagtacagcagtacacaccgatcgagtgaattgatgaaccatatatatccatgaattaatatccatatatgagtgcatggatggctgtacaaaataaagtattagtactacttttgaaaatgatcgaactacgacactggtgtgtgtacatctcaatgctggtttgcgtcctcatgaagttcggaaacggatgtgattttctttccggcggaaaattaaacgcatgtgatcgatcgatctcatctactcctagctatagctttcagatgtgctaatctgccatccatggctagccaagccaatcaatattagctgctcacgtatgacgagggccagaagtcacaattatcaacgtgcgtgtaaacaaatcaaacgtggaaatatgtactctgaattgtatcgatcgacacgtcctgccggctgcatcatatcgttgttcgaacaaaaatagtcccagaacgtgtcccagaacggcatatgtacaaaaatttagcatcctgagaactatagtcccagggtggcatatgtacaaaaatttagcatcctgagaactatagtcccagaacgtgtaataatctaaatctcgcagggagaaattcaaagtgtagacaaattttaattgaattccaagcggttggggaacaaaaattgaccaaatttg

SEQ ID NO: 48043 - DNA, 631 bp, Oryza sativa
ctttgtacagaaagtatgtactcttgtcctaaagaaaaagagaagcccgtgattttctccggctcatgaggaccagaaaaaccacgcctctgttaaaacccagaccagcagaagaccagctcctacaaaatcactgcataataactattgagcttcattattcaccgtatcttttttttttcaggtcataatcacaaaagttcttacgtcaatgtacagagaaacacgatatgttactgacgagtggttttttaccagatgggaggaaaatgtcctggcattttcaagacggggaccatgttgccgggtcatataggaacatggtctttgacctcgtttcttatggccatggtttagatgttttagtatcatttaagatagatggtttaaaatctcactatctcggatactccggaaatttcttttgaactatacatttgtattttgttctcaaacttggttaaattctgtttgaactgcttgaaattcaactaaaatttgtttacaactcgaatttctctctgcaggatatgattgatcaactgcctaatatgcttcattcgctccattgctgtacttaatcgctgatgatgatgaagaaactactccaaaacaaaaattacatgatgga

SEQ ID NO: 48044 - DNA, 2227 bp, Oryza sativa
aaagttagattactcactccatcccagaataagttcacctagcacacgatgtgacatatgatattactatgaatatgaacatgcagatatgtcacatccatatacttattttgaaacggagggagtaaggatttgccattgtcttcatctcctttggagaactcgagggtttgtatgcaatgtacttaagtatgtgcacatctagcttatgcaccttatgcactacacctactatttggttgatgcctaaccttattatactaaacttaggcaaattactaaattagggtatgatgacgtaagtgtggctacgaaatagttgatcacaaatgtggtatggttagctataatccatctgccatccaccgattggtcgagctcggaacgtaaaccacacacgcacggcgctggcgcggggcacatggaaccatagcacgattagcccggacagccgcccatactcatcgacgaaaacttcattaaattttaatatttttgattgataataaaatttttatacaaataatagttatagtgaagtttgcctaggcaaaaatatctttctagctctaccactgtaatgaagagagaggttcactttatatctatgtgcattgtctatttatgcagtgttttttaccgtaaaaggaaatgacacagttattctcactgttctactgctgtgaaagggcaacatgatccgaaaatttgttaatagacgagttgattttacacagcccttgctttcatctgtgctaacaaatcagagcttagcaggcctctagtcaataaacctggcccatgtcatactacctttacagtttcggcccgatctaacagtctggactttaattgtctaggcccagcccatggaaaatgcgaactttttcgagtagatttctggccatgttactaacatatacaaatcgatgtttcgttccgcagaaatagattagttgcaaatcatctctaagcttcggatattttggtcaataatcttcacatcgcacgacaagtaatacatctaggatgggtttggaattgacttttttttttcgcaaggttaggaattaactttctcgacaagaatacaaatacatgccccggacatgaacggtttgacctgacggcattttaaaaggagtttgcgttttttgttttcttttcctttttttcttgagttgtacgagagatttgaattagtacaattttagtttaagttagtagccaaatggatttcaagttaccaattcaactagctaattaattaaatcgcgcattcgcgcgaccatgacatgtccttttatgtattaaaattagaactaaatattgggatgtggatttttattcctcgaggggatgtcctctcgttgcttacatatcatctagatagttattaaaaaaatttgagaaaaaaaagaaatatatcacttccaaacatagtataaggtcaaattcaattaaaatatgttgtatttacgaagggttaatttaaattgttttagctttaatatacgtgtgtagatgccacatcaaactggttaattagctggtgaaagcagcggtttttttatcgttagttggaagaaaaaaaatcagcagtagtagtgcagcagcaggaggctgccactttcttccttggagatggtgagcaggtgagtaccaccgccacattgttgccacgtgtctgtgtttgttgctctttgtttcccatctcttttcctcagtttctctcatattccgcgtgcacgcttttcaaactgctaaacgatgggttttttttaataaaatttataaacgaaagttgtttaaaaaattatattaatctatttttttttaaaaaatcgctaatacttaattaataacgtgctaattgacagctccatttttcgtgtgctgaaaatgtgttgggaaccagagaaacgatcacactcttctatatccttctcgtgcttcttagctttcgatcaatccaagccattctttcttaattcaatggctaatataatgttgtatatgtggcacaacgactgagagaataaacattctacgttcatacgatgatgatgatgttgtgttctccccgtaagaatgccgccggacttttgcccggagtagaattaacatttccaaccacactcccgttaatccttttcttttaaatttgaaataagacctaaaatctgataaactttggttagtccaaaccctctgaaccaaatgagca

SEQ ID NO: 48045 - DNA, 7099 bp, Oryza sativa
tgttggcatgcatgatgccatcatttccatagtttgttcaaccgtggatttagataacttgcattactagcacacaaacccaatggggccggaataggcagcgttagtcaagactatcactgctggttgctcaatcgaccgtgatgtccctcatagagaacaaaaaccaaaaagtaaaaggaaaaaaaaaaaggcttggcgacgatcgttgagcctttgccactgtcattgttgttgcaaagccacaactgcggtcatggttgtcgaagcgcggtcattatcgtcattgtgctacccaccaccgagacaataaacccttacgatagggagtccgggcatgctatatctaatattggggtggcaatggcacgtgttccctagtctccggcactttggagcaccagagatcgcccggcaaagaggctaatgatgacaccaatcctagccaccttgtagccaaaattgtacatggaagacatcggtcagcgaaagaggggtaagggagcaaagagcaagagcagtggtgtcgggacggagagggacaagagaagaaagtaggagcagcgactcgctacaaatataatagccagatttcccggccgagtggttgtgctctctacatgcgtagccttgacctacttgctgtcaccggcaaatgtggaggctactagatagaatggtggtatcgggtacatgtgaatatattttgaaaatggaaatatattaccattctatacttcatttttaacaaatcgacttgtttcttatcgtttaagctatggttaataagccatggaagaatgagcgaagaaaaaaaaacttatataattgtatcggcagtttaaatggcaatataaaagcttagaatacaatgaaaaacttcaaatcaactccatgattaagttgtaaaaattgaattttattggccgcggctaatgagctaaaatagacgacctgccaaattcggtcatcgcatgacactctggcgaattgcattgcattgcattgcagtcagtcagtcagtcatcagccggtcaccgggctcgcgcttcttggtgccactgggaaagaaggcgccaccgtccctcataaatgctcatgcaacttgcgagagacccgttcgaccgagcaacatcatatctcgtcgtcgtcgcgcgccgtcgcgctcgcgcaacagcagccactgggcggttcatgccaatcaatcaaaatcatgtacgccgtgacgccatgcaaggcctactccgcggggcgcgcgcgcgagataagctagcaatgcaacaacgtgcgtgcgaactcaagcaatgtgcgtactaacatcatgtgcttgcagtatagtagtaggggggggggggggtgtttggatgcaggggtgtaaagttttggcgtttcatgtctgatattacgtaggatgttgcacccggacactaataaaaaactaattacagaatctattagtaaaccacgagacgaattgattaaaccgtcattagcaaatgtttactgcagcaccacattgtcaaatcatggaacatataggctcaaaagattcgtctcgcaaaatagtcgcaatctgtacaattagttattttttaacctatatttaatactttatatatatatatattcaaacgttcgatgtaactggggaaaaaaattataggatgggatctagatagaagcctaaaacgtacgtacgcgcgcaagctaggcgacggtggcgactaccatgcgcgcggccatctggatatgtactacagcctatagctagagacgcgcgcgtcaactgtgaccaagacgtaccacccctcccgtcgcgccgtgcccgtacgtcgccggccggccaggggatcgatctacttggcccgctggccgcgcgcgcgctgcgtctagatacctcatggcgagcttgcattattgtcgtcgctcgatcgactaatcagagccatgcgcgcgcgcggggccggggagcggagcacgtacgttcgtggtcttgtgccgtcgtcgtcgatcgatcgcgatcctgtcgtcgcttgatatttggctgatctatctgcctcgatcgatcgatctaccgggaaattgtgcattattagcgatgagttcgagagacgactcacgactttgactactacgtactcctactacttattaatcgatcgatctacgtgtggtgtgtgtgcaaggcgttgacgtaggcgtgtgcatgcgcgcgcgcggccggggtcgtcgtctatccatacgtacgtggcatatgatccacgtgcatatggatatggaacatatgggcggccggatttgaaggagagccaagcaacacatgcatcgattatggcaatatatagcatgcgtgccatatatacagaacgaggggggtcgaggaaattgtcatgggagaaccgaacagactagcttaataattagctagcatgcagcccgcaacacaaaactttgttcatctagagccatccttctagagatcactggcttggactaacagtttactatcggcttccatctgtattctccatatgcattcctcttgttaactagcaaatcgtacttgactttggggtgattgctattttaattagcgcacgtgcgttctcagcacgtatttttctaaatatttcgttcaaaaaacttttattatttttcaaaaaaagttgtgagttgtgaacgcacatattatatatatatatatatatatatatatatatatatatatatatatatatatatatatatatatatatatatatatatatacacgccaaaaacatatagtctactagttataagaaccttaatagtactttaggtcctgagttcgactccccatgagagtgaactttccaggatttaacggcacagtgctgtcagtagcgagatgtctgtggtgactttgtcaatcttaaggatttgccagcccaatctttgaagatgctcatagaagcatgcactactagagaagtgatctttgctggttcaggcaagcgcctgtggtgacttcgtcaatctcaaggatttaccagcctaatcttcgaagatcctcataggagcaggcactactagagaagtgatctttgctgggtcaggcaaaaatcacaatagtcccggttcgaatagtcgaaccgggagtaaaaatatcttcactcccggtttctttgctgggtcaggcaaaaatcacaatagtcccggttcgagtaggaaccgggagtaaaaatatcttcactcccggtttctttgctgggtcaggcaaaaatcacaatgtcccggttcgagtaggaaccgggagtaaaaatatctttactcccggttttaaagcctatgggtaaagatggttcaataattgctaggcccctaagggcaagtactatgagcctctacacattgtctctaaatttgccacataagattagatgatgaggtggaggagagaagttaggagagagagaatgagccacccctcatgcaaggggcaacctctacacaatctccaagaaaagtgcaagatgatgtgagagtggactaatattggggtttgtgtattagatgtgatatattgtatgtgttgcctcttaattaatgagaagatgacatgatctaaattagatgtggcatccacctccactataaaacttgccctaatgagcccctaatgagctttaattctagttgatgttaccaaccgggagtaaagatagacggttgatcataccaaccaggagtaaccggttcaatacttgctaggcccctaatgagctttaatccaactaggagtaaagatagatctttatcccggttgatgataccaactgggagtaaatatcactaattcccccgtcatccccctctctcgctctctctctcgccttatctcctcgtatcgtgcgcactcagcctcctctttaacttctttctactcctccactccgcctcctcctctcttatccactcctctctttcttctttccttatcttctttcttactatcttctcttcgtcggcgcagtcaatggtagacgcccgggggcgcgtggggggcagcagtaggtggcgggcgcgccggagggaggcggcgagcggcgggcccgccttagggaggcagccggtggtgggcgtgcctggatgggaggggattgatgattttttttgataattttggggatgattttgtgatgtaaatttgtgaatgatttttagatgtttttgtgaatttgttgatgattttgagatgtaaatttgtagatgattttagatgtttatgtgaagttacggatgaatttgtgatttcaattcatgcatgatttttgtgatgttttttttttgtgtggatgattttgttgttgtgtttggtgcgaaatcaatattcaagtagaaaaaacaattaaaaaaagaaaaagaaaagaaggtgacagtcacatggcgctaatatttttactcccggttggtaaccctaaccaggactaaagatggacatctttagttctggattcaggatcccggtttgcaatccgggagtaaaagggttgcaaaccgagactaaagcccacttctcgagtagcgagggtttacgtgcatatattcataggggtgagtgtgcgtgtattgtactgtgtactaaaaaaattttgagtcagcgtcgtctaattggtagtaattaatttgttcgtaattctccgtaatcttcctatctgcgacttgctgaagtggatcaaaaatcctactgggcgcgctgggcgatcagggcgcgatcctccctcctccacgtggtttccttttttggcaccgcattactttcctattttagtaaatttatgcacctaaagtttgtacaccttaagtttacacatctaaagtttatacacctaaagtttagagacccaaagtttataagtcaaaagtttatatatcagatttaaatttgaatttgaattcaaatattctttatatatagtatttctatacatttaaagtttatacacctaaagtttatagaaccaaagtttataagtcaaaagtttatatacccgatttaaatttaaatttgaattatatacgattcaaatttgaacttgaattcaaatatttttttatatagtatttctatacatctaaagtttatacacctaaagtttatagaaccaaagtttataagtaaaaagtttacatatccgtttcaaatttaaatttgaattcacatattttttatatatagtattttatatacatattttttctaactttatttttattttttttaaatttatggtgcagtagaaaaagaagaagaagaggagaaagagagagagagagtagcgtatagggggatagggggtgatcgagcggtcacccgtccgttagccacacccgaagtggatacctacatcgtacaggggatcgatcgaattaagatagatttatgtggaagcggacaaatcaactaccactactaataaatttgtttgttttggcgttttgggagatccggagataacgcacccaccaaattaacctgtgttgtcccctgtcagatgccctcttgccggttaaatttgtcttttctaataggagtatctagttgaggggctaggatcgatcgacatgtcatctttatctgttagcctagtttggattatctctggtgtgctttaatagcatgtttatgagatgaacaacatggcgccaatgttaaattgttaattagacatagataagcatcccacgtatgtaaacattattctgagtaaggggatcatcccccattaaatcatgcttaaaactagtgaaattcacactttttttttgggtggggtggggtgggggggggggggttggttgtggtttgtaaagcgtagtaagcaaataccgtagttaggttcgtgtggcatattcctgtagtttagacatacatatgtgggtctgccattctttgcttgtcgccttgtcggttacaattaaaatttaaactttcaagcttaatcctaattttatagttaattttaaagtttaatttttcattgcttttattttttaagattagcttttaaatagttgagaacacacacatatataattatccacaaactatttgttgttgttctattcatttattcataattattaattattcgtgtattactccctctatccctccccaacaccaccacacacatttgaaaaagatgcaattgtaacattcaaattttatatatcaaaaatgcaattctagagtactaccttctctcaattttatatatctatgttttcttcattacaataaaccagcgtttttctatctctataatattgtatagacatttttaaaagtacagcaagcaacttctggttggcgtgttttcattacgcaaatgaaaaagacatattataaaatatcttagactatgaagtactttattgaaaatgatttaaaaacgccttcccaagaaggcctacccatatgagattattatcgtgaaattgtttgctgatgtagacgtagatattttaaacatacatattctcatactcttagaagttagaacatcagtggttgtacttatacatgtgttcattggtgtaactagactcgtcactagtagtaactatccctccatttttaagttatatgacgttgttgatttttaaacataagtgttggcgtttatttctgactaacacggactcacctaaagatttatggtgttaacggagtcgtcaaccatctcgatatagaaaactctaacctaagatgggttttgaagattaaacaagctagagaagctaatttagagatcaaaagcagcctttaggccgatttaaatcgatttggagataaccaccctgtcagggttatggataccacatacctaatagtagttgactaaatctcggcaggactgtagcgcccgttccgtcgtggcgcctagcgggaaaattatctcttaaaaaccctaattgcgaaatttgtttctttgctgttgtctagtgtctgtgccatctcagatctcaaatccccgatctatcgtcgagttcaattccgaatccaatccttccaaatcaaattcctccgcaaaagtctatttttcctccccgg

SEQ ID NO: 48046 - DNA, 1592 bp, Oryza sativa
taagtagtctatatttaatactctaaattagtgtctaaatataaagactaaagttaagtccttggattaaaacaccaccatgcttgagatgttcagagaataagaggaggttgcagtagcttgctggtgagcggatggatcgacagcttatctaaccccagtagtggtaaccactgtcaaaaagaaaaaaaaaagggaaaatggaaaattctaagccaactgaccgcgacgtgtttggacgcgacaccatcttccttgccgggttttccgtcttgagtagtgagctttaggctcgcgtcggcgcgtgacgtaggcgtgccgcactagcttccgtcatcagactctgtgttaagttgtcaacttatattatcagtagaaaaattgccagctcaaggtccatggggaggtggcttaattacaggcctaacgataacgatatacagctagcctcgacgcaattaaattggacgaagtgtttgaggtggatcggtgaatttgaaaggctctccgttggagaaatgaaaaaaaaaagaaacaaatcagttttgctctgtgctgttttgtctgagtcagaaaaatgggtttagctgatgcggtgtcctagaggaggcaagcatatgctggtgaggtctggcatcttaaaaatacaagaacaaatttaaaaactccggtctgtggatgaccggatatagattattttgagtcacgatacagccgtgctaccatcatcgcaagattcctttgaatctttgaccagcaccatccaatcaaatcatagcacacattcagttattggcaaagccggatcgatctatttgatttgttatctaaaaaaacatacagtagtttgccataaaaaaaaaacatagcagtacaatacatttgtcgtcgtacagttttcttcattttgttgtcttgctagatagaagtagcttctaaaatcccaacacaacgttttttccggattttttagtcgcgctttggttaatgaaacaggtggggggaaaatcatagccccggaacggtattgggctactggcgccaacgtgcgaataagtccattttgtcaccctcatctattgcgcttgtgtgaataacatctctcaacaggaaaactgggtataatgcctccttcttctttgaaaaccagagcaaatcaccttcctaggtggttttgctggcagtttcgtccgacgtggtgttgttgacccggttgacaagctgactcagcgtggtgggacccacatgtcagtgtgtagctctctctcccccttatttctctctcagccctcctccgccaacgccgacaccctcgtctccgcgtgcccacaactcgtcggccacctcgtccgtctcgaccgcctccactttgcccgcccggtgccccgcgccgtcgggatccgccccgtcccatcctcccacagtgtctccttcgtcggcgacccggagccgctcatcgcccgccccaccgcgaaatgcgtggtgcccagccttgttgcggccaaggaggagaatcgccgcacggcgaaggagccggcgattatcgtgccatcgaggtacaggcaggtcggaagcggctgcggtggcggcag

SEQ ID NO: 48047 - DNA, 2268 bp, Oryza sativa
gagagagaaaggccggggagagagataagatggagagagagctacacactgatatgtgggtcccaccacgctgagtcagcctgtcaaccgggtcaacaacgccacgtggacgaaaccgccagcaaaaccacctagggaggtgatttgctctggttttcagagaagaaggaggcattatacccggttttccgattaagggaagttattcacgcaagcgcaagagatgagggaggcaaaatggacttattcctcggtcggaacacttggtactcaggtattgtgtgggcctattagtgggccgaaagcctatgggcccagtggtttggaaactgctaatgcagatcgagtccaaaaggcctcgcaagatatctcaggctgtgtgtttagttcagcgcaaagtttagatttttgttaaaattagatatgatgtgactgaaaagttgtgtgtgtatgacatgttgatgtgatagaaaagaactgaagtttagatccaaacacagcctcaggctctaagcgccctgaatgtctatccattttttgacccataaacttacacgcttatgaatgtatatccatttttttttcggagctgttcgtgggtggcgctttgatctgtccgtggaaccagtataccaccacgggtgacgagacatctaaaaattctcattttaatttctccttattgtgatgtcagttatgtcaaacatttgagagtattttctgtattaacgtgtagtagaatttttctacgcaaaaaaaaaacctcctagatttttttgccccatgaataaaaaactcctaaattttctgaaaagagggcagctaacctacgggataccgtgaaaaagtgaagtcacgggacaatttttatgtgtgattaattagtgtacaacatgttataccataggtactaggtaccaccgtaccaggtatcacaagtattaagtatcaggtgtcacatgtattaggtaccaggtatcacagatactaggtgctaggtgtcacaggtatcaggtaccaggtgtcataggtatcaggtactaggtatcacaggtatcgggtaccagctgtcacaggtaccaggtaccatacaactgataccatactggtatcagctggtatcaacatagcggcggaaaagcgaacaccaatcaaaaagagaaagaaaagtaaaatctatgttacataatatcattgtgtcaattaatttacacaacatactaaatctcaatgtgtttcactcaagaaaagaaacaaagcaagaaaaggagaaaacaaaaaaattaaaaatgattgtggtttatagaagatgtaaatcaagcctacagatgtgcatgcccaaattgattcacatggcccaagtgcccaaccagtgtatctagagtccttgtgctgtaggaaggacacatacacgtggatgtgttgtggagtataggcctgccacttagtaggaaatcgtgccgcatgcatgtacaattttttttgatagaaataacatagaccttttaagtcatccccgttcctacggaatgcccgttatctaaattttctgaaaaacatatagtagaattttcttgtgccgctaattttctgcgtcgcgtgggcctaataatcggccaagagctgacgggccataacggcgtcgtcgcgcgaacgtgccgaatcggtttacttgggcccaaatgtgggcctagaaaggactgagacggtccactagggaggtgcaggcaaccttgccacattcagcccgagtggtcaagtttcatttctgcttaggaataagttcaccggagatccctcaacttaacaacgagattttttttgagatcccttaaccacaaaaccagaaatcttcacccataaactatacaaaaccattcactcaaggtccctaggcattatatatggttggtttcgctgacgtggcatcctagtcagcaaaaaaaaaattaaacaaaacacgtggggcccacatgtgatcagctgcacgtttgatttcttctcctcttctttttcctctcttccctcttctctttttcagtgaggaggctggcggcggccggagcggcgatggcggcgtgcttccgctacgcgccgtccggccctgcggggcccagcctggcgacctccgtctacgagaccaacctcgacctcgccgcgctgtcatggacgcgcacctccctcggcctctcactctgcgctgtgctccggctctcgtccccggccatccccgaggagaccgacggggtgaggcccgagaggaggtcc

SEQ ID NO: 48048 - DNA, 1774 bp, Oryza sativa
aaagaatggaaagaatattaccattaataatatttttgagttaatgattagagtctttatcgtctcaactattgtacagacacggcctctaaataatcttgtattgtttaagagaccatactcatctttaccattgaacatgcccttatgcttacaattattttaaaagaagttttttcaaggaggttaccaaattaaaccttaggttagaagaatatgacatcttgcttaatttggcagtgatatccgtgtcaccttttctcccacatgattgaaacaaagcaagacaaagatggacactaaatcaaagagctgacgacagaagaatgtgaccggagcacaacaattttcttccttaatttctcagttctcttctagaacagaaactaagtcgattcgttccaaaaaaaaaaaggaacagaaactaagcatgcacagcagttttactgtatttctcaaggaaagacatgtgattattggaaaggacgaacatatatagcaaaaattcaaggtaaatacctgagcacaaacacagcctctttcgaacctagatcttgaaagaaccgcggcgccggccgagaaggggcaagagcagcgggagaggccgacttcgtcgcgaccgcgtggggcactggggtggtccaggaagttgatttgggcccatgggacaagacagcccactagccaggccagggattaataagggagtactatgtcagaaaagatatttattagccagttgactaaagctttaattagtcaaactttaagtgttaggataatgatatcaaagattcatgcatgttttaccgtaaatagagacatctacccacttttgatgtccgttctcagtagccacataactccgatcgatatgcaaattaaataaagtccatcggtcttgttccattgtactgtgaggggctatttggttgacggctaagtttatcatatcacgtttgccgtaagtctaaggggttattttggtattcctattctagtagcgtaaactataaaaaaaaactcactagcaggctagaaaattagctaacatttggagtatagaacaagtgaatgatgaacaacaaaacgtcatttatttttttccccaaatgagtaagacgccatttaattagaaacatctctgtaaaacatgttaacatcttgttgggttataagttcaatgtcgtctctatgtttacgtgatgagcggttaatagaactaagcggagtattctgtaaatattaaaaattcaataatttactggtaatgttatttgtaacaaaatactatcaatataggtaaaaggtatttcgtggcaacccaattgcaaccgcaagtatgttaacgtctctctgcttacacaacatgatgcactagcaaagaaacctcgttagtgccgattctaaaatcctcatgtgtacaggttttggtctagcaccatgaaattaagcagcattagtttttacaaccgatgcatgtaaggtatatatattcgccggttttagttgagtgactaatctacgtgatggaacagaggtgcacttgatagtacagtggtaatataggggtcgtgtggtttcaatctcaatatcttgtgttcaatatccttaacacgttcacaatttcttcttaaaaaagtgcttgaaggggcagcggcagcgtcaagcaccccctgggcggcgtcgagcttctttcttagctccgcctcccagctcccgtattgaaggcggagggtgtcctgcgcctcgttcatcacggtggtggcaatga

SEQ ID NO: 48049 - DNA, 2055 bp, Oryza sativa
ggatacgatcgaccgagctacgcacaaacggctctatatatactacacacagctgcaggtattagctaggggccgggccggggcgtatatatgtacagtacgtgtgcgcaggtgagagagaaggaagcaacacgagcctattcgatcggaaccacacatcgcactccatcgtacagtagcagctaagctccgatcgagctagtaataattagtactcggacaactacgtacgttcctaacacacactgatgactgaccaattaaacgcccgggttctcgggatcgagagctagtgaccatgcaaccgatcgatcgatgcacgcatgatcggaaagtccggacgccacacgcaagaggatttacccgtggagaatattagagagtgactcgacttttgccgagatacgtttgtattgtatgatttttttttaaaaaaatatagtataaatgtagatacaacattcacttcgtgtgttgtactccctccgttcctaaatatttgacgtcgttgatttttttaaatatgtttgacccgttcgtcttattcaaaatttaagtaattattaattattttcctataatttgattcatcgttaaatatactactactagtcaagttcttgaataatattcataaaagtttttgaataagacgaacggtcaaacatattttaaaaaatcaacagcgtcaaatatttagagacggagagagtataatatattttctctaccgatcgatcgatcatcaactgatcgtcggggtccgtccatcggtctaaacgtcgaagacgaggaccgggtcaagtgttcgcgcgcgcaagctaagcacgaacacagatcaacttgcgcgtggcagcgtgcaagattcagctcgcggagcagcaaacgtcatgtacagagctttcaattcagtcgatcgtgcccctaccagggtttaccttatcgcttgggccggggttatcaccaccccgcggtagcgcgataaccgtgataatcgcgtgataatcgtctaaaatcgcacaaaaatcacatccaaaaattcgaattcaaaactcagcggtttcgtggtttcaccgcgataatcgcacggtttaccgcgataaccatgatattcgcacggttatcgcgggctgtatagctgaaagatgtaaatgtaaaataaatagggtaaaaaaatcaaaaatacggttgaatatgtgtagaaaactagaaattgagaataattggaagaatatgtaggatacttaaggcctaatattctcttcctttttcaatttgtaaaccatttttggttttaccctcaaatttgaatttagcttactctatttcaaaaaaattcttcacaattggcaattacaaatcaagaactacatccatgaattttttcagtttttttcaatttttttccggaattttgaattcggtcaaaattcatccaaactatatcgccggtttcccctaccgtaccccacgataagcgcgataaccacgataatcgcgcgattatcgtgcgataagtaaaacctgtcccctactccaccgtactaacaccggagtaggcgtctactctatccatccaaaaaaactcaacctagttaaagatactccctccgtttcacaatgtaagtcattctagcatttttcacattcatattgatgctaatgaatctaaatagatatatatgtatggattcattagcatcaatataaatgtgggaaatgttagaatgacttgcattgtgaaacgaaggaagtaggacatattttactataatgaatctggataacccctattcaaattcattaacgtatcacatccttaagtttttttttatggagaaatacgacgtcgagggaactgggcatgacttgattagctcgtccgctgcatgctcgcgattgacttctggcttctgcaccatactccctggctcgccatctagctagctatagctaggttaattatgctccctggctcgtacgttgactaattaatcaaggagcagagatgcataaacttagcacattgcgaatacatgctatatataaattcta

SEQ ID NO: 48050 - DNA, 604 bp, Oryza sativa
atctcgacaaatgcagagtcgtcgcgcccaacctaccaacgaagaccgacgacctatctcatcgcaccggccgtggctggactatttgagaaaaggttgttgacggataattcgtcatgaacgttgtcggcttgatcactcgatatgattgcgaacggacatccggatatgctataagtttggtatgtgagtcatgctggtcacatgagatgcacatgtaataaaccaactctagcgttctcgaaccagtacgtagcaatctcccgcaccgcaaacttccattggtgttcgagagatgattctactcgctcgctggttctcgaaccagtacatagcaatctcccgcaccgcaaacttccattggtgttcgagagatgattctactcgctcgctggttctcgaaccagtacgtagcaatctcccgcaccgcaacctccattggtgttcgagagatggttctactcgctcgctggttctcgaaccagtacgtagcaatctcccgcaccgcaacctccatgggtgttcgagagatggttctacttgctcgctggttctcgaaccagtacgtagcaatctcccgcaccgcaacctcagatggtcgagg

SEQ ID NO: 48051 - DNA, 678 bp, Oryza sativa
ataaataatttaagagaaaaatcattttgaagcttgctaaaatacatgtatgcatgtgtgtatagatgaggtggagagagagtagtagcaggtagttttaggaattttatgaaacacactaaagacgcacattgaaacatatcactatcacgtatgaaacattttattttaacagtttgaaacacatgtttttcttttgacataatataatcatatgatatcttgttgtaaagatttaattgcaacgaatacaacggtgtgatcggttcgtagatcggataagtaatttagaagaaaaaatatttaaagagaggaggaaaacatgaaaagaaacagatatgtatgtatgatgcagcgatagggtaggcgtccgatatttctgttttcataaacttctaacttttttttccaaactaccaactttcctcaaacttcttcacaatttcagaaagtaaacacagccttaatttatatttttcgacttaatatgagtgttcgtatttatggttcttttattagtatcacgatttgaatctgataaatagaattatacacccacgattttaaagcaccacacacacggatagtgcttctccgtatatagttggggggcacaatattatacttggagatggtaagatttagggaatatattcccagcaacaaaaaagatttagg

SEQ ID NO: 48052 - DNA, 752 bp, Oryza sativa
tacacccctggatctaaacaccctctaaatatgccatcttcagtcttattggcttggacaggaaacaggagagaacatcggctccacacgttggcaaaaaaactatagtagcttcagagaaggaaaagaacataagccaatccgtgtaagcacaaaaatgtgtgaatagacacagttataaagcttgagtgatcttaggattaaactttgagcaattttatagtccttgaggagataccaagtagtaccaccttttttttattgtaaatttggtatctcataggtacctcatggtacctcctaaaggatggtaaaattgctcttaaattttagtgtaaaatcatgctctcggtaccttcagtaaattttggtgtctttcaaggactgtaaaaattcttataatcttgtctcatgtcatctcaagataacattatcaaccaatcgtgtcaacacaacatcagtaagtcatcttgacttggactagaatcattcaaaagtgataaagaagcgcgagatgcatgattgccatgtcatgctcagagagttacaatattgcctaacttgataaggacgagatatggatctgctgcatattgcacaagtatgtcataaatgaaaattctttgtgccatgtcaaagtgcgaactttcgctcgaaataataaggctaatgtgacaaacctccaaaatataaatgtggggtggacatggtaatgcttcatgtgaaacatttcccttactacaagtagtaaa

SEQ ID NO: 48053 - DNA, 636 bp, Oryza sativa
  unsure (1)..(636): unsure at all n locations
ttcccaaactcccaattttccagcatatcacatcacattcaaaactttcctgctcacataaactctaatttttttttctaaactaccaacttttcccaaacttctccataattttaggaactaaacacaaccatatgtattacttctattagaaaacgttccatcggattatattgttccatcggattatattttaagactagcacaacccatttctaaatcatgagagcaagtttaatagtatagcccactgctaagtgtctaggtccaattcatttatagccaatctaataaccaatttataaaatagttgtttcctatactattagtatatggttctacctgtcatacatacattacgtctcgaagtccgtgctgcagcttgctacaaatatgtagcccactaatcttctctctcatattctatcttaataaaatatgtttatatagctagctaatagtctgctattgtatttgctctgagccactccgatgaccaaatcttgacacgtgtgacgatcccgtcggccgncgacgcttgtgctgcgcccgccttcccccacggatggacgcgtgcacctctgcctatctttccgcgctcgatgcagctcggtcaacttcgcggcttccccctga

SEQ ID NO: 48054 - DNA, 603 bp, Oryza sativa
atccacgtgacatataccagacattttcgtttttgataccacggttttcttatagaaaaaatgaaattaagcagtagagtatcaactaagatcctattcgagattctaaagaaacagattgtgagtagccaactagtcgtaatctaaaaatatagatttgttactccctccatttcataatgtaagtcattttaccatttcccacattcatatcgatgcctatctagattcattaacatcaatatgaatgtgggaaatgctaaagtaatttacattataaaacggagaaagtacattctaaccttttaatttattttctggattatatacaattacataggtttggaatctagctagatgatttaggaaaaaggctatagagctgctaaaagttcctgtttaacaggacataggagtgttggactaaacggcactttagcagtcctggcagtcgtactccatacgttttaaaataaattaaacatctttgacgagatatgtcacgtttcggtttatttttttaaaaaaatagtatgctcgtagcagtagcacaactggacttttgtggcagctcaagcgtgtgctaactagcaagcttcgagc

SEQ ID NO: 48055 - DNA, 636 bp, Oryza sativa
aatggaagctctctggtgggattggcatatggcgctatggtggcattgtgaaaattgcatcctcaagtaagaggttgccttcatattcatccaggggaggaggttcagctgatctgaaccaacaaatgctggaatttgtgcaccttctgtctgaagtctcccttgaggaatctagagttggagaatctcagcattcacttttccagcaatttgtgcttcgagttgtgcgggcattccttcaggaatggggtgaagctgagggcttgcccttagatgatatggtaggtaagttctacttattattgtataatattcgctgaccacctgatttctttagtggtgctctcaccaaacaagctgagccttgacacaaaagaaaaaaaaatgtgttaaattcctcacgctggtgattttttttttcaggtccttgaaacaatacttgaacaagcctgtaaagaattcaccattctgcttgcttcccatcgaaaccaggtacttcattgtttgtgaattacctaatagggtattttgttcaattttcaatggtagccccgccgcaagcaattgcaaaaactaataactatgtcatgattattgatcaatttttgtctatgattcagttttgggctggctgtg

SEQ ID NO: 48056 - DNA, 722 bp, Oryza sativa
tacagtagttcatcagctctttttctgaaaagggtgaaacctacaaatatccatgaattccaaccttagcatctagtgcttggatatttgtatccctgatatttcttaatcgctttttcttcagagcaaaccagttactgatggtttcaagcagtttcggataggagcctaggagggtgacacctcgccatcatcaatcagagaagaaagctagctagttgctcatcctaaagtggactgcgatatatattatgctgcagcaatgtggctagctagctaccttcatcatccatctatccaattaatttcaacacagagagcactttttatctattaggtgtcaggacaatgaatcatgcacaacatattcaactccattcctattcgatgagttccgatgaaacagcatgatagattctcctccaaatgaggacagcgcaaaaataggacagctggaccaatccattcagtcagtggtctccaatgtccacgcagatgtgctaaaaatcagggaaattgcagtccatttctctgaacttttgaagtgatgatattataatttcacaactgaagctggcagtaacttaaccctacctgcagtgtgttggcagtttgcatgcaagatcaacctatctcctcacaaatatcagtacagcaatctccatgtagatgcatgacagaatgagaatctgagttcatgagctggggaagattaatcattc

SEQ ID NO: 48057 - DNA, 599 bp, Oryza sativa
tgacgtcgtggatgatgatgatgcctgatcgagatggatggtccaggatggatcagtgatcagtagtgactagtgacatgcattttaattttttggggggcttaaacttggggacaggttgagctcactcgatcgatcgagacctgcgtgcttatatatattcagatacagatgcagcttttgacaaatatatacttcagtaaaattgatatgcagcgtttgtaaacgttgtgcgaaacacggcggtagaaatttggacacctttttgcaccaacttcttcaactgctcctcatttttttgcctgctatgatcgctttatatgcatgaaggattttaatttttttttagttctaaacgtcaactagagaaaatagagtatgctgctggacccctggacgcatgcatctcgtcgactatatttatagaagagaaaaaatatatatatgggactataataagaatcatcagactttatagtcagaaacaaaacgaatatgtatgtaatgtacttacgtatgtacaacacattggcacgcctagttcaacagctgcgtaggttaattgtatacgagttctagctgatcccgtcttaagtgat

SEQ ID NO: 48058 - DNA, 679 bp, Oryza sativa
aaatccgtgagtacaattcttactcgtgttgacgtggacgaatcttcaatgtcttttttttatccaacggaagtttccaagtttgcactatatatgtgatttctatcacatattttgcccatatatggctcggcttattggttttagatagaaagcgcaaaggtttgcaacaagcaccatgcaaccataggtgtttgagatagggtgtgtttagttcatgtcaaaattagaagtttgattgaaattggaacgatgtgacggaaaagttgaaagtttgtgtgtgtaggaaagttttgatgtgatgaaaaagttaaaagtatgaaaataaaaatttgaaactaaacttggcaagcagcccatgtaaaacgaaaaattaattagaaaataatcaaaggttttaattatttcaacttaaaatagtggatccaattcatattttagaacaacttttatataaaaaattttcacacgaaacgtatcataccttttagcagtttataaaacgtgctaatgaaatccaagacggaatatatgtgcatcgcccgttgttccttctttttcttctttccttatattttatctccacatgttccatgtttttgtttctacgtcggtttatgctccgtgatatatatctgttcatatgttgaggtctggccacaaacgttgtttctgcaat

SEQ ID NO: 48059 - DNA, 1130 bp, Oryza sativa
gcagaagaggtcaacggccggattccccgaccatgaatgatcaagtgggttaatttatggttgcaacggaagaatattcaagcaagcctgtacttctgaaattggaaagtaaacgccacgggtcatcgcctgaaccagtcaagcagtgttgctgcagcctgcagatcagtttacccatgaatatatacagcgcaacgacagccgtactatagtttgtccacagtacgctggattttttttttctaatctttagttttaaagataaatatatccaaaacttatttataagatctgcaccttttgaccgaactagcgtgctaaaacaatattatatcatactagtttgattggcatggcagtattatttgaccacgccaatataaccggcgtgactaaaagagtttagatttttaaaattagttttatgagggtttatttttaaaataaaaaagtttcagacaataaaaaaaacattccagtatgctgaaggttgacgtttttcaaattttcgggtgtacccatggtttctggtagtaggatgtatgttcaaattaaatttaaattcaaattctgtgaaaatatgtccagaattgaactgttcaaactatccaaaatttgggtcccccgatattagaatttatatatagcatgtattcgcaatgtgctaagtttatgcatctctgctccttgattaattagtcaacgtacgagccagggagcataattaacctagctatagctagctagatggcgagccagggagtatggtgcagaagccagaagtcaatcgcgagcatgcagcggacgagctaatcaagtcatgcccagttccctcgacgtcgtatttctccataaaaaaaaacttaaggatgtgatacgttaatgaatttgaataggggttatccagattcattatagtaaaatatgtcctacttccttcgtttcacaatgcaagtcattctaacatttcccacatttatattgatgctaatgaatccatacatatatatctatttagattcattagcatcaatatgaatgtgaaaaatgctagaatgacttacattgtgaaacggagggagtatctttaactaggttgagtttttttggatggatagagtagacgccta

SEQ ID NO: 48060 - DNA, 1656 bp, Oryza sativa
tatactatatttttttaaaaaaaaatcatacaatacaaacgtatctcggcaaaagtcgagtcactctctaatattctccacgggtaaatcctcttgcgtgtggcgtccggactttccgatcatgcgtgcatcgatcgatcggttgcatggtcactagctctcgatcccgagaacccgggcgtttaattggtcagtcatcagtgtgtgttaggaacgtacgtagttgtccgagtactaattattactagctcgatcggagcttagctgctactgtacgatggagtgcgatgtgtggttccgatcgaataggctcgtgttgcttccttctctctcacctgcgcacacgtactgtacatatatacgccccggcccggcccctagctaatacctgcagctgtgtgtagtatatatagagccgtttgtgcgtagctcggtcgatcgtatccatcacgattcacaaggcagttaatttgatcttggtttttcgagctctaaaactgctgatcgattcaatactcagtagctagctagctatagccacctaattcatcgccacgtacaaacggacatctgctttctgaaactgtttctgttgatagccggtgatcataacagcgcagataaacgtacggcttccaaatgaaggtaagaaaaatcggtctccgatgaactccatctcctctgaacattctgacgcagagagatcaagtggtactgcagaagaagaaacgagaaatgatctcgtttaatttcttaatacatatatggtcgttctttgatttgtattgcgcagcaaaagatcgtgatcaaggtgtgcgcgccgtgcgaggggtgccgggcgaaagcgctggaggtggcggcgagggcggcggacggggtgatctcgctggcgatcaccggcgacgacagggacaagctggaggtcgtcggagtcggcgtcgacgtgacccgcctcgtcatctgcctgcgcaagaaggtgtgctacgccgagatcctgctggtggaggaggagaaggaggaggaggagaagaaggagccggaatgcaagccgtgctactggcctccctactggtgcccgccgccggaggatccgacttgcaagccgtgctaccctcgctacagctacgcgccgccgccgccggcggtcgtcgtctgcgacgagcccagcgcctgttccataatgtaaaaaaggaaaaagaaattaaagaaaaaaaaagagatttgaaggaagagacgtctcttcaagcacttttttaagaagaaattgtgaacgtgttaaggatattgaacacaagatattgagattgaaaccacacgacccttatattaccactgtactatcaagtgcacctctgttccatcacgtagattagtcactcaactaaaaccggcgaatatatataccttacatgcatcggttgaaaaactaatgctgcttaatttcatggtgctagaccaaaacctgtacacatgaggaatttagaatcggcactaacgggggttctttgctagtgcatcatgttgtgtaagcagagagacgttaacatacttgcgggtgcaatggggtggcacgaaataccttttacctatattggaaagaattttggtacaaataaccattaccacgtaaattattgaattttaaatattacagaa

SEQ ID NO: 48061 - DNA, 1575 bp, Oryza sativa
aaaattgttgtgctccggtcacattcttctgtcgtcagctctttgatttagtgtccatctttgtcttgctttgtttcaatcatgtggaagaaaaggtgacacggatatcactgccaaattaagcaagatgtcatattcttctaacataaggtttaatttggtaacctccttgaaaaaacttcttttaaaataattgtaagcataagggcatgttcaatggtaaagatgagtatggtctcttaaacaatacaagattatttagaggccgtgtctgtacaatagttgagacgataaagactctaatcattaactcaaaaatattatttttgttaatattctttccattcttttaccctcatgcaaccatatttccatattatagtgattaaaagtcgttgttaagccgttgtcatgcataagaacgatgttttatctctcctttttctctttcttccatgtcaacaagtattcctaattagcaacgcaaagagaccactgttgacaaccattgtacatgccataacaagtgaaatcctacaaataaaaaacaaaaagagaaacgactgaaagttatttttattcgaaccagatgtccggttgtttgaaccatattttaagtcctcatattacaaaactgagaataaattgaggtggctgccaaacttgtagcttagcatgtaatttctggcatgaagaatcaagtaggaagggcagaattgattttttttctgtgatagattaattaattgaggaaaaaaaactaccagaagttgttaggaaaatgtatcaataataatcgaataggagcattgaaaaagatctcatttctctaataccttaaatcaatatcggtaaatccaatctctctaattttctctttatagaagaaagaccattgtatttataatgacctcactttttgacagaaaaccaagcaagtaaaatcctctgctaatttccaagtaccataagacatctttacgatgtcacatgtgcatatgcaagttgcacaacacagtaaattaaacaaacccaaaggtggacctacattattaggctatatgatgtgcaggctgatactggccgtttgggtttccgttttcaatattagacgacattattcgataattaaagtttcaggtatttcaaatctgatacccgcatccacgtgacatataccagacattttcgtttttgataccacggttttcttatagaaaaaatgaaattaagcagtagagtatcaactaagatcctattcgagattctaaagaaacagattgtgagtagccaactagtcgtaatctaaaaatatagatttgttactccctccatttcataatgtaagtcattttaccatttcccacattcatatcgatgcctatctagattcattaacatcaatatgaatgtgggaaatgctaaagtaatttacattataaaacggagaaagtacattctaaccttttaatttattttctggattatatacaattacatagttttggaatctagctagatgatttaggaaaaaggctatagagctgctagaagttcctgtttaaacaggacata

SEQ ID NO: 48062 - DNA, 646 bp, Oryza sativa
tactgaaaacacgcatgtataatgtatcgatgtatatctctacggcctttgagagagcgacatgaattgtagactaggaagacctggatggcctcctagtagtttagctaaaatcagcttaattagtttgcttggagcaggtggtgacttactgactcggccaccctaattccacaaaaaccaaacgcccacttgcattgctcccgtagcaacgcgtgatttgcctcagttttccactgaaaaaattactccatcagtcccaaaatataagtatttttagactctgacacagtcttcgagatgatactttgaccaacaatatttattaaaaaaagatattttaaataaaaagaattgcatattatgatagtttgattaatgataaatctagtaacatcaattttacatgattaatttttttatttcttttgctattaatagttaaagttaaaaatgattgatttggcactatgttaaaaatatttatattttgagacggagggagtaagcagtaggagacaaggaaaacgttgtctaagctgtaatgccggtacgtacagtgggcgactaataatccttctcgggttgtttttctcgcccggaaattggaggattcgcgtaaaaaaaaaatagtgccacggagctg

SEQ ID NO: 48063 - DNA, 586 bp, Oryza sativa
tgatctcctgttgtacctccagaaaacgctctctgttcctcatcctttgaacccttttcttctgatttttggtgaaaataccagaaggacaccattgcgtttttctaccctcatcttcatcttgatcacgatcatgatgcactaggcccaacctctgatgaacaggactcttttctgacccagccgattgcctttattgtaggatcggcttgaactccccgcattgtctctgcatccagggcaatcttcaattgatggcaaccgcatcccctcgttctagcaaaatctgaaaaactcacaatctcaatgtggatcaaaaccgtcatctttctcttcaaaatacctctcctgctgcttgtcatgcctcctttgatatttgttgataattctaactgaattcagctgtgaactccgatgtttgccctcatcggctgttcttccagatatatgcaccatgttgataggaaaaggattaccattgacctttatcggctttttggagtcaacaaacttaattttggcttcctcgatagccagctggatctggtgtctgaaaactttgcaatcattggtagcatgagaacta

SEQ ID NO: 48064 - DNA, 657 bp, Oryza sativa
aagaaagatatgatttcgatatcaccaaggctgataagattttcgatttgctacttcgggagaggcagattcaacttcctgctagtcatgtgattccatcggctgaggagttggggaaaaggaaatattgcaagtggcataactctagttctcatgctaccaatgattgcaaagttttcagacaacagatccagctggctatcgagggaggcaaaattaagtttgttgactccaaaaagccgatgaaggtcaatggtaatccttttcctatcaacatggtgcatatatctgggagaacagccgatgagggcaaacatcggagttcacagctgaattcagttagaattatcaacaaatatcaaaggaggcatgacaagcagcaggagaggtattttgaagagaaagatgacggttttgatccacattgagattgtgagtttttcagattttgctagaacgaggggatgcggttgccatcaattgaagattgccctggatgcagagacaatgcggggagttcaagccgatcctacaatagaggcaatcggctgggtcagaaaagagtcctgttcatcagaggttgggcctagtgcatcatgatcgtgatcaagatgaagatgagggtagaaaaacgcaatggtgtccttctggtatttt

SEQ ID NO: 48065 - DNA, 644 bp, Oryza sativa
tctggctcatattatcagattgcaaatgtggtctcccttttgtgaaccctttgaagattttttgttatcctgtctatttaatgggtacatgagctttcttcctactgttaccacaattttctgcaattgctgtgcaccacatgatccattactgtgaactgctgtctgtatgccatcttctggagtgatggatgtagtatagtgctgtatgtgaagttgtgaaccaggcacaccctgtttcttttattacgagcaaaacactttatgtttgttctagtatgatggtaacataagttgtatgatgcaagctgttactgaaattttaatggaatatgcagtcagttggagcatcgcgaaagaacttaatgtttcatacattagccgtaaattcttcttgcatgaatgttgctggcagttgcacagtgtagtctaaatattttgacatgccatattaccaaatagttatattatttaatcttattactttttaataaggcttttatgcttgtctcgttgaatggatttcgcttcttgatggtgggagtagtattgttcatcttcaatgtcaaagattggaatgtggagtcgaatttcacgacctggttcaaaataatgcgccacctttctatcctgctttggctaac

SEQ ID NO: 48066 - DNA, 588 bp, Oryza sativa
tcatttgcggtgcatgtaaaacggagcgactaattaatgcataattaattaatagtttttttaaaaaaagattaatatgagtttttcaaacaactttcctatagatttttttttgaaaaaacgcatcgttaatagtttggggagtgtacacacgtaaaacgagaaggaatgagttaggaacttcaagcaacgaacacaaactaagagcaagtttaatagtatagtcaactggtagcttcaaattatctatagccaatttaataatctattcatgcaatagttatctataaatatatactgcatcattaatacatagtgccacatctcgtacacacataacattttgaagttcgtgccgaagttggttataaatctgtagcccaatttccttttgtctcttctctgatctcatccacgtgtttatagctaacttgtaacctgctacctaaccagcttagcattgcgctttggtactactttggatcttttttttttctcattgaaacaatgtacattacatttgtatagagattattagtgtttttacacgtaatagccaaataagaacaactaccaaaaccaaataaa

SEQ ID NO: 48067 - DNA, 701 bp, Oryza sativa
tttttcactagaatatatttgagtacatgtaaattatgactgggacaacactacaactggttcttctagccggaatttttttttagcaacgtgtgagatgtagattaacagaggtaatggcctctgaaattttctgtatgtttacccataaaggatgcatccaaaaacaatggataaccttctgctagctgaaaaggaattcaggtgatgcttgaattcagggactaaattctaatctcacatcggatgtttggacattattttaactaattacataaataagagctaattcacgtgacaatttttttaagcctcattaatccataattagcacatgtttactgtagcatcacataggttaattgtgaattaattatgctcaatagattcgtctcgcgaattagtccagggttatggattaggttttatcaataatctacatttaatacttctaataattagtgtccaaacatccaatgtgataagaattaaaaattagtccatccaaacagcccctaaagccgtttaggggcatatgcgtgtgctacgtctgaactgaactccccagattttttttttgttttgaaaaatgtgatctctccagatacattgttcgaatcaatgccacggtgataagcaaaatcaaatcaagtgtgggcgtgtggcttggcgtgtccatagcgcttcataatcatatccat

SEQ ID NO: 48068 - DNA, 800 bp, Oryza sativa
cccacccgtcagcgagggtgccgggcgggcccgcccgtcagcggcgcgcgcgcgggaagagcccgagtggtccgcgggaaaaagaaaagaggggaaggtaaatgggccgagccggcccaagatggggaaggggggattttatggtttttctttttataaaatcattttaactttgtttatttcttaataattattatttgtgctctgaaaattccactaaaatttatttacacattttaggcttttaggaaataaacaaaaatcctctaagccttatttgacttttaactttgcacattttaatttttggaggctttcacacagattttaattattctaggcataatttagaggatgtattttagggtcgttttgggacgtgacagacactaattttgaggccctcagcccattggcatcatggttgggcccatttcgactccaactcctttctaaaagatttaaattaagcaagggtgagtacaaacgtactcagcaagccaccactacagaatgcatttagtgcacacaggggttcaaggatggcttggtttatttgcttaaagcttgttttcacaattcatttcacaaacctacgacttagcagttttaactgaaaacaacgttaagttggagttgtcattaatcatcgagggttcatccaccttccccaagcctcgctaggtcaggtttaccctcgcattcctgtttatatcctctttcatcatatcgaccttcccgcacagtgggcaaggtcagatagtttggtccatctctaatcttaagcaggtcacatagtc

SEQ ID NO: 48069 - DNA, 1383 bp, Oryza sativa
ttcccaccttacccatactttgctcctgtgggctatgagggggagagagcgctggcccagtgcctgttcgccctcgcttagatgggcgccaccgctaaccactcactcgccgtccccaagatcgggtgcaccaccgaccccccgctctcccttgccaagatcgatgccgccgcacctattgaaggttgctgctgcgttgaaaggggaataattttcagacttaaacttactgaatccactcgatccactccaccgccatcgcctcgatccactcccatgtccttttggcgcctgctgcatccattccgccacggctgcatccactccacgtctccaccacagctccatcgctgcactcgatcttctagcggtaacggcgccgtctctgcctgggccgtggtgcgaaagcgtcgtcgccaagctggtcagctagccccgatcagtctccaagtttggttgattggtgataacgaataacgtacaatcctgactgtggtagtatggtagaatagcgctcctgtgctccagctaatagtttgtttgacagacgcttgattggctttttatgtgaccattttataatttatattttgtcatatatctgtgctccacagagtagaaaaggtgttgaaggaaacaattgaagacaaaatatcggtagtactccaagttgctatcagggaagcacttacaaagtgtttgtggaaatgcctctcaacaatatatccacacgtgatctttaatcttcatgcatttttttgttggaatttttttccttgatatagtaggtgggactggatttttcacattttggtccttttgaaaaacttatttcgcaaatagacccttgaaaaaacttatcccagaaatggtcctttttggggcgctagagtggctggcgccgtcgcgccagcctctctggcgccgtccccctgccgacgtggcggggcgatgctgaggtggctagggggagcgcgccagagtggctggcgccctcccccccaatttttttttcttttatttgtttgatattttttttcacatttagggacacacaaaaagcaaccatagaaaaaatgaactcaaatggacataatatgtggcatgtagaatttttcctctcctctcctctctctccgaactagtgcagaggagagagatgtgcaacttttttatttttattttatttttctaatatttttttcacgtttaggaactcaaaagaaccaaccataaaaaaaataaactcaaacggacaaaatatgtggcatgtggaattttccaaagctctaccgaaaaatttctctcctcgaaaacacaatcttgcaagcggaatttggaggttttaatatcgctgaacccggcgaagcagggaagaatcgg

SEQ ID NO: 48070 - DNA, 1131 bp, Oryza sativa
tgaagcttttgcagatggcttgaagttggaccctgcaaatgaagatatagcgaaagctttaaggtaactattctgtatttttcatcccgtgagcatcttgtgatctccctggtgcccttgtgcatgcgtagttatcgttattagaaaatttcttgcgtgccatttgaatgcttctcttgctataaagttgaaagaaggatctgtgtagagatttctccgtttctgtagtacaattcttttttttttcaccctgcagggatgcccaggaggccatgaaggaccaaatggagcacagaggttgattcagccttaccttgcgcctctattttgttgctagctactccctccgttctataaaaagtataaatctaagacatgcgacatattctaatactatgaatttaatataaattaggatatgtcacatctgttacggtttgtattttatggtaaagagggagtaagtcccaaagacattttggctgccaacggacaagcttttgcgttttgttaacctgagacctgagagtttagtgttaaatgtgaactatgtgggaactatttcatggtttgtggaagtcgtcgtgccttctggacaccatcagttttttttccttacattgactactcgttggcttataagctgcggccagaatctaaatttgaaaacttcttaaagaaaatccaagaattacttttggagttgctattctgtactaggtatcctctcttactataaatttataacccaccaactcctaaaacttaacatacaaagatgccatcatcctctactaacaagatgccactgccacatcattatctagtaacaatcattaaatttaaacatcaaacaaagatgctatattgtctataattttataatttattaaattttagagcttttaaaatgcaagtatgttaaatcatcatcccacattatcacataatatttcaatatacatctttattattttttaaatatactatgtaactatatagttcatgttatttttctcttctctcattaagccatatcaaatcagttgtttttagtgcttaaatgaaatctatggtccaaattttctctctttttcttctctcattaatctatatcacctcaatgatttt

SEQ ID NO: 48071 - DNA, 1848 bp, Oryza sativa
gtagactgtcccaaatcctccttcacctaacttaaatgaaggtgagaaattctgagtagccctcagaatctgctgcacagttaagttcacagatccaactcgagcaatttgtggagattgtgcgaatctagatggacttgggggtattcggtgtggagttggtggaaccttctcagatgacgtgcttacatccaaggatgcaatcgattcgactggaaaaaagaagtttggttgttaaggacaagatcccaacaatgcttttgagtttgacactgaatcaaaatggtgctagtacggtaggagaacattaatcttgcaaacagcttaacagtcagagctgcataccagaattgagatattctgcaacatatattaaaatacataatgtgcaaaatataaatggctttgcaaagaagttttattacaaatactttttcttggttcttctaggaaacattgagttctcaataaccctattaattgctaactagtaggggtgtcagagagatgggcacacctaaaacttaggtagcaattatttcattctgctgtgtgtatagagctaacgacacaaatgaggctggaaggaatagcagcacatgagttaaaaattacaggatgacagttaatcaaacaaacagattttgttctattagttacggactattatataagttctttttctgcactagatgccactccttcctaagtagcacagaccaagttaggaattggtagagatgatccactatggttctctgtaaatccacatactagccgggagttgctagtttggtaagtaaatggtaggtaagaaatttgtaaacacatactagtaatccatcagagttagctctaaaggtcccaatgtgccatcacaaactataccatgcagaagatggttaggatagcacaagattgaactgacatactcaacatactagaacagggagcatttgagcatgtatttaactcatgatgagagaaagctttagacaaccagttccctatgacaacaaattgcacagaatacatgtggattttaatccttacaaaatagctattcatctgactcttgccgtgaaacagtttgaagaacagaaatactatatactccctcttattacttgtcatttacgacatcagtaagtcttcaacacactttttacttcaactgtcatgatatgaaaaatcaataattgtgtgtatttaatttctagtccaccatcagcatgagtgggtgacaaccaaatggttttttttttcagcagtaatatagtgcaaggtactcatgatgtgtggactcacctgcattgcgctgaatggatgtagtgttatgcctgctgacttcctttttctcagcatgaaagcacggtatcatcagaccacagcataggagaatcacacctggcacagctagtagatgatcctgcccttccaaagaatcattatcatcctgattatgtccatgaattcccatgtttttacatgggtcatcttcaatttttgcatcattcattgagggctgccttaaaagcttccttggtatattttgtgctgcagttacaataattcccatgaaaccatgagtacacacaatttagaaggaaagaaaatctttgtgtgtacaacatcataccaagaaagtacacaaataaaggtgctctctcacaacatcatatcaataatttaccatgagcagatctatattggctctctcaactttaattctatacaatacaacatgataccaagaaagtacacaaattcaaaacccgggcattattcttagcacaattgaagctcgttaccaaaagctaatcaacaggatgaaactcaccggtgctt

SEQ ID NO: 48072 - DNA, 3051 bp, Oryza sativa
ccttacggaaatgaaaagaaaatcctagtcaagaacaagggggagaagaaagcaagggtgagcttagaattttgtggggaacgaactgcctgctagaacaccaccaaaccccgagaagcagaaaagggaatcgagggggaagatgaagacttggatttaactggtcacagcaaagaaacaaggaagactcttatctatatccagacccagtggagtcgagagaaggaagaaaagtcggagcagctaccgccggcggccgggattcggcggcggcgaatgaatcagatcgaagggtaggatagggtagcaaagggaagggaagaattgaggaggaggagcatagtgctagtagttggaggaggggaagaagagagagaaatatcaagccattttagtcgagtcagcttggattggagagagggactgtggatggatggtcaagttggagactccctggcagccggcgtcactgcgtctgcgtgcacactgactgcaacgtggggccggctgcggctgtctagttgcgtgcgctgctgattttcctactgtagaaaaagacctcacaagtactcccttcgttgttttgactttttttttccttagtcaaattcctttagattcaactaaatttgtagaaaaatacactaatattttcaatatgaaacaaatatattatcaaatatattcaatgctaaatttaatgaaactaattggtattataaatgttgctatttttttctataaatttaatcaaatttaaagaactttgagtataaaaaaagtcaagtgtcttataatatgaaacggagggattacttactactcattgaaaattaaacttactactcattgaaaattaaaaacattttaaatttcttaataagaaataaaatatccacgttccgagatataaattatttttgtttatgtttttctattgtcaaaatctcttatattttggtacggagatagtagtttttaaatttagagtatttaaatatttaccactctgaaatttattcagatttgtattattaggatgtctcaaatcccacattagatttattttttataagacggagagagtagacacatagggtggctagacccatatgtcatagtcatataggggtggtaacttgttaaatatcacatttgacaaatacttaactatctcttttagttacataagataatcctaaaacaatcatatagtatactttttttacaaacacagatgatcacaatgcgtgcgcactcaccttagacttatgagcatctccggaagactaagctactatatctggagattgagcacctttagtgactgatatattttgagattgatgaagttatcacggatgcctcattgtgacgttgttgattggtacatcgcctaccacttaaataataattagcagtaaatacttgcacccgtatcaaatcacataataattagcagtaaatacttgcacccgtatcaaaccacagagggtgtgctagtacactataagaaacataaccaattaagttaccttcacttgcaatcatatagtattgtgtattgtgtaaactcagaggtttaggaccaacaacagaattgcaagtctaccacacacttgtactcggggtttatttacccatgtcgggtatgaactaaacaccaaattgtaaatatgccatgtatgacccatgggttgttacaacaatgaaaaaaaaaggcaaaaaaaaaagtatatgttgcctctctctactgtagcacgagtcccatttttctccctcaacccgataaccatacagatgttccctcatatgtcaaaaccgagtcaaacaacctcccttagtggtgcacaacgattttgtcttatatagctggcaattcaacaaaattataagttcaaaataaaaaacatgctaggcctacatgccatcctccctattcgttttcttcctccacctctcctcatgtttggggaccaatcatcaattgattccatatggcacggtgaggcatacatgcgctcccgaactgggtgcgcgctgtggcgaggaagacaacaaccaactcaactttcttgcctccatctgagacaattagagcaggatgttctacagcacctgaattgagatcatataacttacctccctctaacttgtgtcactgacgtgtgggccctttacccagtggaccccacatgttagtgactcaaagtcagagggaagtaagctagaggatcccccttcctacggcacccatgggtgcacatgcgccacggatcagaaccataccatcatttcctacgaggcatcccacgcccatcgctcacccctacgctccacgtttcatgctgaccaccgagggagtcctcaagtgatcaagtccactgtctccacctcaccgctgcccgcaataacctttggtccatctcctcgccccatcacatctccattggccctatcattagtatcatatataggagactagcaagtgggatttaaaacatgggttgaccagataaagaaaatacaatgtaagatgaaccgatgggtaagccagaacctatatgataaaatcaaaaggtaccacaccaaaatagagaagataatccacaccacaccaacatgagattcttgatggctttgtttgtgccttgttcttcctacagaaattcatggagtgtacagtattagagttgtcacaagaacgaaaggaaacatattctatgcacacaagttcctgtgcataccaattagcaaatgtcatgaaaattctacagaaaaatagacatttactcctaatagtattatacatttctgtaaggtctcatattcaaattcattatattttagccgcaacaaaaaaagtgaaaaaaaactaacagttttaagggtaaaaatctattagaattttgtttttttaggctaaaatataataaatttgaagataagatttcacacgtaggtgtaatactattggaagtctgtgtccaattttttctagaattttctatgacatttgctagttggtgcgcacggagtgtacacgggaag

SEQ ID NO: 48073 - DNA, 2142 bp, Oryza sativa
accacaccaaaatagagaagataatccacaccacaccaacatgagattcttgatggctttgtttgtgccttgttcttcctacagaaattcatggagtgtacagtattagagttgtcacaagaacgaaaggaaacatattctatgcacacaagttcctgtgcataccaattagcaaatgtcatgaaaattctacagaaaaatagacatttactcctaatagtattatacatttctgtaaggtctcatattcaaattcattatattttagccgcaacaaaaaaagtgaaaaaaaactaacagttttaagggtaaaaatctattagaattttgtttttttaggctaaaatataataaatttgaagataagatttcacacgtaggtgtaatactattggaagtctgtgtccaattttttctagaattttctatgacatttgctagttggtgcgcacggagtgtacacgggaagttttgtgcatagaatatgttcccaaaacaaaagaaaatgttttttttattgcataagggaatgtcattgcttgccacaagctatcttggctacgcttcaatgccacaaaccaaggaaaattcactttttttctctttttgcttcgtttaacattttacccctgcaaatgaccaatattcccccacatgtttattcttcatattttcgaattctctcttgaatttctatcgtgttttcacaaatctttaggttctctctcttagaccttgtttgtttgatcccaagagaggggattaaggggaaataactctataccacagtagaatgtagaatagatctctttcaaatctctttcaatcatcttgtgggagagattaaccgaacaagaccttaagagaatattactaaaaatgttcttgatctttttggaaggttgtaggattactattaactaggtgattctccacgttttactgcgggaatcactaagcaattctgaatatatttttttgacaatcaagctagaagtaaaaaaggaaaaaaattgaaacattagggtttatcagtacttatcatgaaacaaacaaatgatacttgtattttaatgtgaaacatattgataagtatatgttaaatattataaaaataatagatatatttgttaaaatattgtgtaaatgatacgaggggtgatgattggatatgtttgcatgttgatttatagaattaaataaattatagatgatgttttatacttgcatgaagttaaatatgtaattattaccagtgggtgatgatgtgggatggttgtatgttaagctttgtaattttatacaaagtatagatttagcaccaatctaagctagatacgtgttccgcatgaaccaaccaaacatacgtggccttttcttcaagattaatattatcactggtgtaatcacccatctaaaatgatttacttgcataatgatcactccaaaattgcctctctgtccacagatgagagaaccacgtgccactcaaaacaagtggttgtacttttgtatggaggaaggcttcgaaatgcatcagctttccatcttctattattgggacatcattattgatcaagcaaactgtttaacccggggcccttgttggtctctttcatggtagatagtttaatcgccagtgttgctttccgtacatcatgcctggcaattttgggcataaaatctggtgttacacgacacaacagaacgcataaaattttcattcttttgaaagtttgactaatgaagtttgcaatgcataatcacaccaatgttagttaattaatggcttgtcgcgtcggacacgtttgagaagaaatttcaagatgtgttatttcaactcttcttatgcattcctacctggtaggtgtaacttcctgctgctctaggtggtcttgatttaaaaaaggtacagcttagctacacgggcccagatatgtatcattgtggcttttataaatcctgtacttttctcctgcattgttccaaaaaaaaagtgttctccctctttttgtttatatccgtgaatttttgtttatatctcaattcgtatcttaaaacgttgcacatacgtcttcagtttagtctatcaaaaatcttggaactgcgacgtcacatcattgtccaatgtaacgggcttaa

SEQ ID NO: 48074 - DNA, 6012 bp, Oryza sativa
tgtttaggtaaccccaagaaggaattccctcccaattaccacccctacccaggtcaattccccatccccatcccaccaaaattcccatgtatcacaaccaaacaaagcagttaatagcctcatccctttaaactcccaatccctcctaaaaactccctccaaccaaacgagccgatagttataatccggttgcaaaataaatactacataataaatatatggttataatattattacaacacaataaatactagaaatattttagagtaaattgcattgccgataaaaaaacttgtcaggtaggtgcaatctactgcacgaacttgcaaagtgctcgctttcgtgaatgaacttgtctggtgcatgcgaaggaaggcgaaaaggacacaacatggctaatcttattgatttaggggctggttaggaaattatgtaaacatatactatatgagaaggttattattagacatacacatcttcaataaaaaatagaataggatatagtgatagttgaaaaagataaaggaaaagagcaatgatataatggttagaaatatatgaaattcattatttccatgacaaaggataaagtagagaccaaatttataaatattacatgtcttatgcatgcatactcactacacgtaagcacgtcacatcctaatcaacgtcatcttcgtaaaattaacatggtcaagttattttggtcctcttcgcacggactagacatgttcatgtactgaaacaagcattttacaagtttatatactaaattgcacctacctaacaagtttgtgtaccaccaatgcaatttacttcatatattttattatgactcctgagttcataagagattttttagatgctggaataaaaccccggcaactgctcaacgagctacaaccaattattacaaaattcactcaacgatgagcacacactaacaagtccataataaacatacaaatcggcgctcatatgtgagtgtgatgacaagcaaccttgtgtgcaacggatgctacatctcgcctcgtgaatgtaggggtgaatgaaaagctcgtgactcgttagctctcttaactcatggttgactcggctcagctcgttgcggttttataacgagctgagttgacattttagcttgttggaaataacgatcccgtgcgagctaactcgcgagctaagaatagcccaatcctgccacttcatacgagcccaacaagagtaaaaatggcccaacaaactgaccactcctcaaaataaaggccctaactcttagtctccctcccccctaattccttgctccagtaactaggcaccagttgcataggttctcggagcagcatcgccacccactggcatttcgcgccccaagcccctagagccgccacaccgccgccccagcccttgagccctcgtcgtcaactttgcccattgctagtagcctccactgggaagtgaggtcatggtggcccacctcgtcaatgcccgcggtagtcgcagctccacctctgcctcatcatcatggagaagaccaatgagtaggagcaagcaagtccaccactggtgccaccaagttcaaaatcaaggagcaaatgttagagcttgttgtcctcatcaccatcggcagtgcaacactgcaagccgatctgccatgttaattttggttggtgatttgtttgcttcgtcttttggttggttgcaatttcaccaggcttctagatctggtaaagctcgggtattccaaattggtaaagctcgagtattccaaattgatgtgtacagaaatttcgttctaggtctgtgatttttattcaattgcacaaaatgtttctggcctagttgctgtaatctttgagactttgatgtgtttctttgaaggaaagactagtcaaacgtgtattggccgtgaggcaaacgagctacctcgagcttccaagtgagccgagccggggttatagctcgttagggtaaaaagccgagccgagccaacttgatatccacccctatgtgattgtgcaggcgttgcggtgtagcatgaacatgggtgatcttgtatgtgaatgcgtcgtgtgagcacaagatcacccccacacttgttcttgtacctagggtgcttcaaagacacaaagacaaaacaaaagtgaaagcaaaaggactcacccggtgatgcccggtgggtcaattattttattaattttattgatgggtgcaattacacaaggaattgaaaaaaaaataaagaaaataactgaaataaaacctaacgcgcctatcggactccaaaggatactatggaaggtctaagggctagaagcacaggacatatcttcctttcccacaaccttatacaggcgaaagagcttggcacaaaggacacaactaaaggatgcaaggcttgtcctgagctcctcaagctctacctgtccctctgccacagtgtccatatgaattatgtaaaagaccaaagctatataaagaagaatatttcattaatactataagtcttatataagaaggaagagctactagagctatacccgaaatctcctgaagacccgaggactaagaaaactccactagcactagaacaataaactaaacttgagatagttctttatctttttcttgagtgtgtgttggagagtgaatgagcacccctttatataacctctcaatgacggttatggcagttggaaatgccggaaatgccctccaaccgtcattgagagttgtaacaccttgaaaatttcggtttagaaatacgaaattaaaaattcggaataaccaaaaaatcttttcaaacttccttgcatactggaatttattggattttatttcccgttttcctgctatatatgggctaaaagatgaacgtatgagaatatgcttgtattttgatttcaaatattatttattcaaagaaccatgattatgaaatatgtcaatatttgcaaataccaatcattttcctaaaatcccttctccatatattagaaccccttcgacatatttgttctataaataaagttatatattacaattttgaaaggaaaccctctatggggcagtccattaaaacaaatactactttacaaaggaaatattgttttgattattaactaagaatccttgtaaaggattaagtcttttggcaactatattgcaaataatagctactaataaagtatttactgaaagccctatttgtgaaatataattcttaaaatggcaattttaaaagaaaaggctttcttagataaagtctggtttatctctttgagaagcctagcctagcccgcataatggattttgtaattaattgtgtgtttagtttttgtgccaaaaatctcgattaaatcttatctcctaaaagtatgccccctgttcgacatcctcccctgtcccctctctgccccgtctgtttggtcaagcgctttggtgctaaacaaatcacagtcccgaagctctctgctcctatcgcaattttatcgctctctcaaaactcttatcctacggttaaattgaaatcgctctattgtttcgaactcgataattccctcgaaaaatctacgatcgttcgacggatttatttatcgtgcatcgattcaaatatcttcaattttatccctaccattgaaccctaccatgttgattggaattatatgccatgagtcacccctattacccctatttgatatcgagattcattcattcgagcgatcgcaaagaaatcctaattctaatccccgcacgacctttttgccaaatcaaactccaatgtctcatttagcggcctaattaccattatacagtcctatgtacagtcttggtgcatgttcgagttcaagtgccaattccaatttccaaattcgagactcccttgtaatttacaaaatccccgaggagatacaaaacaagtccagcagtactagttcaaataaatcaatgtccaaattatacagtaccttgcacagtccaaattataaatacagtccaatttacaagtttcacatacacatcccaagttcctattacaatcgggccatctcttttccctgccaggccaacccatccctcacagcaagtccattgttaccccctcggcatagcagtagcagcccactccctctctccttctcagcctaaagtctactttgctttcctcagccaacacagcatgcatgcacagaagatgtttgatgaaatgcctgcaagccatcacacacatttgactaccatcaaatagctgggaaccctccccaacaacaccccatgcaccatgcaccatgcacccaattcacagaactctccaccaaaaaccaacaaacacagtaaagagagttcacaccgaaaagaactgagctcaccaaaaggaattgcataccctgcctcctgcattccaacagccacaaacatatataaaagccgctgccaaaaaccatcacctctgctttgccactgccactgccactgcctctgcctgctcctccctgcgcacatgccgccgcttgctccgccgcgtctggccacgagtcgagcctcggttgggcaaggggttgaggttggccgccgcgccgtcccgtgagcttcctttcgcacgcaagtgcacgaactatgagaacaatcgaacctttgaacgcttgaactcttgaacgtatccaaaacttgcaaacgaacttgaaccatggacgtaaccaactaaaattcaaactaaaaactgaaaaacaaacctctgtgaaccttggtggagcacttggcgcgcgaggacgaaccgcgagccgagcctcgacgcccgtcgaccgcgcacggtgtaccgctactcggctgccgcgaggtgagcatcttctccttcccttgctcttctcccttgtaacatctgaaaatttcggttttaaaatacgaaattaaaaattcgaaataactaaaaatcttttctaacctacttgcatgctagaatttatttgattttattttccgttttcctgctatgcataacgtatgagaatatgcgtgtattttgatttcaaatattatttatttaaagaaccatgattatgaaatatgttaatatttgcaaataccaattattttcctaaaaacccttctctatatattagaacccctctgacatatttgttctataaataaagatatatattacagttttgaatagaaaccctctatgggatagtttgttaaaacgaatactattttgcaaaggaaatataattttgattattttctaagaatccttaaaaaggaataagtccttcggaaaataacttgcaaatgatatctaagtagtaaagtatttatcaaaatcttacttgcaaagtgaaaaataattcctaaaaggctattttaaaagaaatgactttcacagataaagtccggttttattcccccttaaaaggcctagcgttgatatttcttacaggggcggacctacccattgggcagggttgggcgaccggcccagctacggcccacgttgccccactcccctggatgccatatccatcagtccatcaaggaatagcccacaagtcagcccatcaagcaaacaagccaatgttagcccgttaggcatctgttaacgaccaaatttggtaagatatgaaccaggttcggcattggaatcgaagtggattcggcaaagacatagatttgaagaatagagtatgcatcggctgcgaaggcatcggctggattctgaatcggctgagatggcttcgaggctgcttctagaatcgatggacgtgcttcatgaggattgccacgatggagataaagctctcagataggtaattgtatctattaattaggatatcttatttaatttccttagagatatgtttgggtaaaagtctgccgcaaagacttatggtatcttagagtttgttagagataagagtcgtgtccggcaaggacatattttgtatctcgggtataaatatgacctgaacccatgtaatcaattaacacatgttcaataacactttcggcgca

SEQ ID NO: 48075 - DNA, 1128 bp, Oryza sativa
gttgagctgcatcgattcgatcttcaactagaggtaaacttgtcatggcggtttgcgttctcgggaatagtgcttccatctttatgacactctaatcttgtctatgtaattcgttgagttatcatatatactttataatctctgttagttacgctatataacttgtcatcggctgtttcttttgttaggaagttgccgatagagttagatctcgttattaatctagattatatcgtgtatctaccatctcttagaggttttcatcatcttgtatagatctcacagttatctttatgcttaatgctgtatcggttgagtttgatctattaagttttatctataattgtgatatccagcctgttttatgatcataaatagagatagtatcggagtttcagccgatcttacctgatttagctattttatgtcttgtatgcttgatcattatactaaatctgccctttatatttagatcttattgcaacaaagtatattaggctttctgtttagtatatcttgcttgttttgatatcttagtataaagtggtatcggagtattagccgatacgtgctagatctatttgatcagctatgctataaacatctacatattcattgctttaatatatatttcgacttaagtgatttatactgtctcggcatggcgaccgtctatcccaatcacttagtttaagtatatatcggagtaaagactatatgctgttaatgtctacagccgatcgagtagatttagttttatcttatttattcattattgccaatcgattcaaagatgacatcggctcgaagataaatgatatgtcataggtaagtagccgatcggctatcgtttatggatttaaccgcggtttctcttgtctttattcttgttgattgtaggatcaaatcaactggcacgctcatgaacctaaaggcgagattttggacctgtacaggatttaagcagatcttccaggctagtgtgtgttttttcacatcaacacgcttttggcacgtccggtgggatcgagttgtgacaactttttctcatggcagaaaaacaatcaccgtcatcaggagtcaagcctccaaaccccccgagggccaagcttccaaaccctccgggga

SEQ ID NO: 48076 - DNA, 1576 bp, Oryza sativa
ctcattttgtgaaacattaaaaccatcccattatgctaattctggttaggtactacttttaggcgctgtttgatttagcttaggattattataatctgaattattaggagtaagctgaaacaaacaagtagattattatgatagattattataatatataagccagattactataatataataatcttctttggaggagcttttttcagattattgggtggctaaagacccactacccttagatgcctccaataatccaaagaaacaaatagctcgcagcttattctatgtcagcttattataatctagcttagagtaatctgatttaataatttagattgcaataatcttaagctgaaataaactgggccttagtacagggagctcctttctcttcttgatttatcttcgattggacgaaaatgttagaagaatatgaattttcaatttttaattacatactgatttatctaggcatcatatattctcattatgctacttttggttaggtagtacttttggtacagggagctcctttctcttcttgatttatccttgattggaccaaaatgttagaagaaatgtcaattttcattttttaagtacaagctaatttatctaggcatcatatatttcttttatgacgaaatggtgcattctttgtttgcgatttgatttctcgatatgtttaagattgaagtatttccttgttgattccttactcacagctgaacaaaaaagactccgagatgctatattgagaacggcttgtctatatgatggaaggaatcactatatatgtgatgactgacttccaaatatgcattacctgtttctattgttgacccatgactggcttgtacaattagttcagctgaagttgtaaaacaattattacagtttcactccatatgtgtctataatcattttctgtgtaatctgtaagtattactatgccacttgtaagaaaaaaaaagtgatgtgactgtaaaaaataaaaccaatgcttaattcagctataaagacaaatagaattgcaccgtagcgtttagcacgggcatattactagtaaggagtaatggataaatgattgaggactgttcagaagccaaacagacgcgcgactcttctcgggaattcacttattgtgacttttgagctagcctatgtccagtaaactcccaagacctttcattcccatctaggagggttgttcctaatataaatatcccctatattttataatttagggacttttgacaatgagaatatgaacccctttgtttagctgtgtgctaacaaattcagagagagatctttacccctttgctcttttaatttccttatgagattatagaagcggcgttcgacgccacccaattggtgctcctggtccctttgaggatttttcctcaattgattctaggttgtgttggttgataacttagagtgtggttgggcgaaccctcgattcaagttgccgtaatagaggcggtatggtggttggcttcaagtacaattgtcggattgcactgttatcttggttgcttgcaggtagttatcttggtctctttga

SEQ ID NO: 48077 - DNA, 540 bp, Oryza sativa
atactctgatcagaggtgtacaacaggacccacacgaaatgaacaaagatcaaatgctacataccccgtcgagtgtggtacacaagtgattcaagcttattacatgcccgttcttagccccaccccaaccacctataccacgctggggttcccgacgactcagtcgtgcgtgcgcgatgtgaccaaggcgggtgcgccacgcgggaggcacccccgtccaaacctaggcactcgaggccctccaaaggctacctgcctcacgactctccaacgtggtataaatgatcacagtagaactagtaagaacaagccggtcccaaataaggcatgtggtaagtacgtagggtgcttgattagatgtcaaaatgttcggtccttaacgacctagacggggctacttgcatcaggggaaaccaacctcccattatcgccctatcacccgtccgaatccaacataattcatcaaccattatttagtgtaagtgctcaagttttatgcccaataatgcaagttgtctatataccacaattaatagcact

SEQ ID NO: 48078 - DNA, 555 bp, Oryza sativa
tgccagatacttatattctagaacttcaccctttacatgttgtatgacgcatattggttatttttcatgtcgtgacatagtttcaacctgagacaaagagtgatagtctctttttcatgtacaaacttctttcacagttcatgaaaaataatcattgagattctctcttccaagctcacaacaaactaatatatctctgccaaacatctgatgatgcaaatgttctccttttttctaatttccttctccttctttgctctccctcctcaccttgtcttgctgctccttgtctgtcccagatatttctaagttcacatgtttgtgatgctgcactaccaatagttaattatacaaaactcggaaacaccccatcaccattccaaactttaagcctctaaaacactagcagacctcaatcatatgctctcctaacttaatttacattgtgggcatcgagcccaggagaccttccaagattatgaacaatatcagcagagagagctctgtttcgatgattttattctctatttctccaactggaaaatctaattgaat

SEQ ID NO: 48079 - DNA, 671 bp, Oryza sativa
  unsure (1)..(671): unsure at all n locations
ttatgcttcatttggttaccatataagttttcttgaatgttatctgagtgactatagttcacatattgttgtaaaaatttaatttcatagatcagtaaagttcattcattgatgttgtttgtcttctaattttcagttgacttagttttgctaagatatagccccccttttttcacttgatctcgctttattccctgtgtagtatatatgtatatgtatgtttctatctccgttatctcctctcaagaagataatcaatttcttctactctaattctcttgtacaatgggtactagaaaaattacaatgtaaccattgaaatttatagtgtcatattggtgtagatgtagtttacagtataaaaaatttgactggtttttagaacaatatgacaaaaaaatatggctagtccctagtttaatttggcccaatagtttagacgcggttatgaaacaacatatatagaataaaacgtgaattgtacatgcagtattgctagtctcactaaaagaacagtagctccatggagaaataaacccgcacaccagtcatgtaattccaaaagtngaaagatacatacaagtgcggctggtgttacccctctctgaaaatgntcaataaggagcacatttggaagccactcagcagaaacatcatattcaccacatgcg

SEQ ID NO: 48080 - DNA, 703 bp, Oryza sativa
tttttttattttgatctttggtttctcgtttacttgagttgtgtgcgtggatgagattggatcggatggtctcgattcgatgcgcctattggtcagaagtagtagaactcagaagtcgttgagctcgtccaatttaagctcaaattaaaaaatatattattctcttaaaaaaaagtccaaataccctctaaactacatatagaagtttgtaaggcatcttaaactttaaaactagatatctaactccctaaactttacaaaacagttcatattatctcttaaggtgattttgtataatggtttttatctaatttgtactctctccgtttcaggttataagacgttttgatttttgtcaaagtctaattgttttaagtttgaccaagtttgtagaaaaaagtagtaacattttcaacccaagataaatttattatgaaaatatattcaattattgatttaatgaaactaatttagtattataaatattactatatttgtctatgatcttagtcaaacttgaaacagtttgactttgaccgaagtcaaaacgtcttataacttgaaacggagagagtatataacttggatgagtttgatcacgtgacatatacattggacatatatattaaaatctccatttaaatctttctttttaatcacttgttagctctcacttgtttgcaaacaagtcccaccataataa

SEQ ID NO: 48081 - DNA, 1402 bp, Oryza sativa
ttttggaggctttcacacagattttaattattctaggcataatttagaggatgtattttagggtcgttttgggacgtgacagacactaattttgaggccctcagcccattggcatcatggttgggcccatttcgactccaactcctttctaaaagatttaaattaagcaagggtgagtacaaacgtactcagcaagccaccactacagaatgcatttagtgcacacaggggttcaaggatggcttggtttatttgcttaaagcttgttttcacaattcatttcacaaacctacgacttagcagttttaactgaaaacaacgttaagttggagttgtcattaatcatcgagggttcatccaccttccccaagcctcgctaggtcaggtttaccctcgcattctgttttatatcctctttcatcatatcgaccttcccgcacagtgggcaaggtcagatagtttgttccatctctaatcttaagcaaggtcacatagtcaagagtagtacaagtcttggcactcattatccacgagcacgtctatccgaatagattggtttactcacagtgcagtggatgtacgcctttaatcccgcactctgtgacttgcccaacacatgggcctagacctaacacatgagactcgtcacggcccggcttttcagtcattctcacattgcggcacccgctccaaggactatgagcccccattgcatctcgatacaccaaccctacctcgagccagaagtgaggggagtcatggcactcccgagagcagggaatatttaacatatatatatacttatagggtgcattttaggtttttaccagtattttccaatcatcaacacttcaacaacaacactatactcgtacagaacctaccatgactggggtgtcgccccacgagaacttcctagtccatcgagtctctacccacttgttgatgtgaaaacacggcagcttgggagatctgctcaggtccaaagctagcctcgagtgcgtcaagggcgtgccaactgatttgatcctgcaatcagcaagaaagaataaaagcagaatcagtcgaccaatagccaatcggccgatagcgtatcgttgatggtctcagcagatagagttaaaccaaattggctatggactggatatatcaaagaataataaactctcaacacgcccaaaaggctataatactgtatatggagtttaatagattgatttaagacaacattatgaaagtagacgatgagataatatttagagcatgaaaaataaagtactagctaatactctagtacaaatctatataaacaaattaatccatataaacatatcaaatagaaatcaggcatgaagggcaggagtctagccgacactgtctaaagcttgatatgcttatataa

SEQ ID NO: 48082 - DNA, 2860 bp, Oryza sativa
tatcgttgatggtctcagcagatagagttaaaccaaattggctatggactggatatatcaaagaataataaactctcaacacgcccaaaaggctataatactgtatatggagtttaatagattgatttaagacaacattatgaaagtagacgatgagataatatttagagcatgaaaaataaagtactagctaatactctagtacaaatctatataaacaaattaatccatataaacatatcaaatagaaatcaggcatgaagggcaggagtctagccgacactgtctaaagcttgatatgcttatataaaaggatctatctatataagtggggaatatacatgaaacagggagtgaaacatgcatattaggtaagattggctgaaaccccgatactatcgttattatgcctaattgcaggctagtttgcatggttctaagcacaactagggatgatgcatctcaaagtatgaaaaagaaacattcaatctagacaatcaagcaattagacacttttcaggatggtagatgcctcaactaatctcactcgccgcggtgtagcgtctgttgattaattgagataggggcaaattaatacttttctcgttgtttctctttcaatctgcactagatataataaaataaggggttcggtatccggtagctaattaccaggtttttgcggtatcctatagccaattcacgtatttgcagtgtctgacgggtaattacacatcttttaggtgtcctgtagcaaattttgccatcattattatgcctaattgcaggtgtttgcatggttctaagcacaactagggatgatgcatctcaaagtatgaaaagaaacatgcagtctagacaatcaagcaattagacacttttcaggatagtaaatgcctcatctaatctaatctagcatgccaatttaaccgaaaccaacataaaccctcaagcgagcagcagccaatagagctaaattgagaaggtaagattagattaactaagacatgctagcaaagactcgcgatatcgagcctaacacgtctaaagcgacatgttagccctgatagcgcaggccattgagacgggttacctcttgcgaagaactcgctagaaaacgagaaaaataaacgggtggcgatgcgtcgtagttgtgttggattggctctcctattacaatgctatggggttcatatttatgctccgagtacaaacttagtccattatggacacgactcaatcatttctaaagttaagatacaaacaagaccatatacagcagtctcttaccaaatctctaacaaaccgactcaatattctaactaatagatacaattgccttaattgagctctatctcttattggcaatggcaattatcccaatctaggcccatgctgagcccaagttatgttatatcggctgtattggctatcggcttcatcaaccttgatcaacttcatactttgttttctaccgatacggtattcagctgatgcacagtccaactccaagttcagttcaattcaattaccaaattcacttcgatcttcttccttctactctgaatctgatgacaaattccattgttaacacatgccccccccccaatttctgtttcagtagaaacatatccctttaggaaaatatatgtttggatcagtttatcaaacgctttagtctgcaacttgcaacatcttgaaagatgaggcaatcaactatggaggcccttggtggtttgtgcaattatggatcaatatgtataaaaggttagcagtagacatatcatcactagccttatatcagctttcccaacaattcatgctgatggtgaagaggctaacacaaggagatatatgtcttttggagaagcagttattgtatatcctggagagaaccaatcggttgatggcttcaaagactggttcttcatattctactagtgagcgtgcacgtgcaaggcacatttttcaccatttatgatcttctcaagctgaatttatcaattgtgtcaaattagaatcttaagatccatctaacatatgttgtttgtttccatctaaaatgttaatggaaaaaatagaatgtgccgtttccatctcaatttcaaaatagaaacataaaataaatactgagctcgtcttacctagcatgactcaaacctatcctatctttttgttattttctattttacaaatttttatgttgttttcaagtttataggatgcaattggaaagagaaatatacaatgtgatacaagttatctcagtggggggagagatgtctctacccccccccctcaagcttggctttcgctcaggatccttggtaaggattgaatcgctgaaagcggaaatatgcttgaaggtcatcatgctgttgctgcgtcatgttgttgatgttggcaaattgagcatcagcagtctgttgccattcttgcgtctgtgctatgtgttccatgaggttgtattagatctctcccgtttgcacattcaccattctcctagtgatttcacccaagtcccaacgagaggaacttgagcgccattcacctggagatggaggcataccacttgatctagggggttggttgtgcccccactgtatgtcatgaggcacattgtcgcgtcccaaaatgactctaaaatacatcctcgaaattatgcctagaataattaaaatccgtgtgaaagcctccaacaattaaaatgtgcaaagttaaaagtcaaataaggcttggaggatttttgtatatttcctaaaagcctaaaatgcgtaaataaattttagtggaattttcagagcacaaataataattattaagaaataaacaaagttaaaatgattttataaaaagaaaa

SEQ ID NO: 48083 - DNA, 631 bp, Oryza sativa
tagaaatggcgcattttttcttacagtttttttcttgcatgttttttttaaaaaaattaccgacgatggaaataatatttctcgcatgttttttttatggaaaatggaaaaccattttagcatttttttgcgcttttttctcacgcatttttttgaaccgtttttatttttctcgtgcattttctctttttaaatagttagattagattagagatagagaagagatatacactgattagaaatcggaatttgtttcgccctttccatttttttctcgcgtgcattttttattttgtacgaaccagctttttattttttcacgaaccatttttttagccactttcttagggaatcggacaaacttttttagatgttttttcagatttttttcgtctttataggaatcagactttatttttccctttttaaaggaatcggatctagcctttatttttcaccacttttttttgccttttataggaattggatctactgcttttttcgccacttagtggaaacaaaattttattgttgttgttttctttttttccctttttttccttttttgcagtttttctttttttttatgcacctttatgccctcgttctctcccttttattattttttcaa

SEQ ID NO: 48084 - DNA, 785 bp, Oryza sativa
ggcgtacgccggagggaggtggcttagcgtgacggccgggtcacggggagaggggaagccggccggtgcctctgccgaccgtggcatccgcctccgcctgcctccgccgaccgccgcatccgcctccgcctgcgcccgccggccgcccacgcctgctcgcccacttccgcccacgcctgcgcctgcccgcccccctccgcctgcgcctgcgcccacccgccccccgccttcgcacgtcggccgccccctgtctggtagaagagagaagaggagtagaagagagaagaagtgttgagaaaggagaggtagaagagagaaattaatttaaaatagatagcagttgaaagataattgtaaaatataagatgaaggatgtaatatggatgatctgctggagtaaaaagaaatatagagtgataatctttttggaggatcatccaaatagcaatatggaggataaaatttagatgagctgatggggatgctcttagggccgcttgtgaagaagcatttttgcaggcgaacagtactacttagccacctgcaaaaattgatatacgcaggcggccgcccgcccacctgtgatagtgcctgattttcacaatccttaaatcacaggtggagcagtaggacgcctacgtagatcggtgtttgttgatcgtactggtgatggaccaaatgacactatcggttttcccagtcacaaacaagctgttctaatctagtataatgtaccagcttgggacactggtatcatgtgttgctcttttatatatggctatata

SEQ ID NO: 48085 - DNA, 633 bp, Oryza sativa
caatatggctattgcagaatctttcttggatggttgtcctgacccaaagaaattgcttgaaattctaggcaatgttaaggttagtgaatttgcattagtttgtttgacttttgatgttcatatttccattgaggctatgtactagaaatatccattcttttgtcagtagagaactctacagctaagttactgtttgtacaggagtttctgattttttttgggtgaaatttctgttttccaaatgtacctaaaattttcttggcaacaataattcaaacctaaaactatgtttactttttttttcttatataaattcattccaattgtaaatttggttatacaagaaatgatataattttgatgtttgtcactttagtccaatcatttagttagtgtcaattatatgttactaactatacttagttctcaaaaggacagtcttcttgttctgccctgttttccttcatccattcgccgggggtcttatcattttgcacaactcatctatgtttcagttccaatttcaaatttgttcttttccttcttctgggttgatgaagatatttgtcacatgctacatgcacgaaaatttattttggtttgggtataggaaaccttaacatctacatttta

SEQ ID NO: 48086 - DNA, 1145 bp, Oryza sativa
tactcttgtctatggctaggatgggttggaaactatgtcacgtcttccgtctgtataccgtggtggtatgtggcacgtggttacacgtgaggaagatgtgtcttgtaggtaaagatgtacacctctgatcagagtataacctattcgaatagccgcgccctcggttatgggcaagccgagcaatgtacccaagttagtgtttttaattcttcaaacctgcttaacaactaaaatgtggaatggttggcctgggttggcttgggacgagctgggacccaaggtcgggttgccagttcggtctgaatcatcgtaggccttgggttaaggcaggttcgtgtgggttcacggccttgattaataatattgtatagctctaggaccgtatttacaaaatagctttgagcaactaagtgtcttttaatgctgtttactgcaaaccctaaccccctatattataactcccttgtactcccttacatttattctgcacttgtgggtgtgtcttgttgagaacggtggttgtactcagtcttgctcaatttttcccaaagccagaagaggagttcctggaagatgaaggctttggtgtctagctcgtgcctgccgtcaagcgcctgtggtcgtcgccctagtcttccgctgtttttcgtttgtcttcctgtgtgctgggccttcgccgcccatgtaataaattaattgtttaagcttccgcttgttaaactctgtattgtatcaacttttggtgtaccttgcctcctgggacaaggaataatacacgcatgtaaggaacgcccattgggttatttccagtcgtgacagtgtccacgaggaagaatgggtccaacggagccttcccgggttcggccgaaccaccaatttggccgaaccacttctgaggccgttgatcacgagattcgacgtggacggccttgattacttcctgatggcggttccagggtagtttcgtcatttcgcataggctgtaaccgtcatacctgcctataataggaggagctcactctcatttccaagaggctctattgtatcttttgtatattaaaataaggaagagagtgaggggaagctctggaggagtgcccggaagtttggcgctcatccgacttctactttgacgagtgtagctt

SEQ ID NO: 48087 - DNA, 643 bp, Oryza sativa
caccttcatcctagttgaagtgcagttgtgagttttcgtgtccaacgtttgaccggtcgtcttatttgaaaaatttatgaaaaaatttaaaaaaagtcacagatgaagcattattcatatattatcatctaataataataaaaattaatcataattttttttaaataagatggatagtcaaacgttgaataaacgatacaaaactatattctttcttggacggaggtaagtactactccaatttttatgaagatatgtatacacctccaagaccttgttcgggtggaaaaggattcccttcctcatggggattgagcaatcatgacctaagttagcttatttagaccgcaagcagcacaagaatatatcttatgcatataaatttttcgtacacatcaactagcaaatgtaaaaaagtttgtagaaaaaatttgacacataatacatcctgggctgggtagtgttgagataaaactagcgtcatttttttcacgctcgtgtgtgtgcttggtcgggtattcatttaacactatatattatagtgatccaaatagaggccggccggatcaccgctttatcaacacaccggccgttttttttgagtactactagctctcttcactagtgtacggccatctattta

SEQ ID NO: 48088 - DNA, 588 bp, Oryza sativa
ggagcctctttttttgcttccataagccatttttcatatggagggttggataaagagctgcttgggatgctctaagtacctgtgtgggtaaggactgatcacccgttacttgggtaggggacagtcgttgttgagcagtgtacaaccatctgtgatgagaaataaattaataaataagttaatgatagatactcctaataatagtgattataataataataatcttattaattagcgtctaacactcataatgaccgtccaccctcaagcacagggtgaccaaattaggcggcccatttggtcatgaacgccatctttagtaacaaagagcttatgtggacaccataaccggatcatgccggatcaaactcggtttatttaaatttttagaggcactatgagcaacttccataaaatggcccaataagtggctcagatgaattttaggaattcttataaaaaatcgtgctcctagagactctctaactggatggccaagacataccgatggataaaactgagatgccgctagacaaaattattcagtaaagtccgctggtcattcgatcatgcagtgggacccatgtt

SEQ ID NO: 48089 - DNA, 613 bp, Oryza sativa
ttattatcccttaatcccctctcttgggatcacacaaacaaggtctttgagtgtgtaccttaagatctgtgaaaacaccttagacattcatgagagaatttttttatatgaacaataaacatgtgcgggaatattggtcatttgttggggttaaatgcttaaccgagcgaatagagaaaaaaagtgggtgatccttggcttgtggcagtcgggcgtatctcaagatagcttgaggcaagcaatgacatttccttatgccataaaaaaaacatttttttttgttttgggaacatattctatgcacaaaactttccgtgtacacttcgagcgcaccaactagcagatgtgatacaaaattctagaataaaatggacacaggcttgctatagtattacacctaccagtgacaacttatcttccaattcatgatattttagactaaaaaaacacgagtctaatagattgttacccttcaaactgatagttgtttttcactcctcatagttgggctagaatataatgacttcggatgtgagacctttcagaaacgtataatactattaggagtgaatgtctatttttttgtacaactatcatgacaattggtaattgg

SEQ ID NO: 48090 - DNA, 622 bp, Oryza sativa
atatatatatatatatatatatatatatatatatatatatatatatatatatatatagttagcacatttctttggtgcaccatggtgcccaggctccatggccatccacaatccaaatgctttaagatctgtgcaatgcactataggatactataacctattagcgggtctaacacgataagatattgcatgcatatactttccatagaacatgcatgcaggtaatttccatttcgaagtataacgtgcttgtgtttccaaaattgatgcccaccaattatgattagtactttccaacatcaatgccttggtgtggaatgaaacactttgagtgattcgagagaatcaattgaggagtacagtaaaagtttataaacatcaaagaaaaccccaaggtggtagacacttcaaggttcacagacacatgtatatcttgaaatattttgcgtgtcatatcattgagcagaaagtcattactctagtcgacccatgagctttactcggggatgagtaatggataactgtgggggtgttgttgacggtcgttaagtacaaactttaatcgtcaagtcctgcataagaaacgtcaaatataataccaaaacttagtggtaggagttta

SEQ ID NO: 48091 - DNA, 549 bp, Oryza sativa
aacgcccattgggttatttccagtcgtgacagtgtccacgaggaagaatgggtccaacggagccttcccgggttcggccgaaccaccaatttggccgaaccacttctgaggccgttgatcacgagattcgacgtggacggccttgattacttcctgatggcggttccagggtagtttcgtcatttcgcataggctgtaaccgtcatacctgcctataataggaggagctcactctcatttccaagaggctctattgtatcttttgtatattaaaataaggaagagagtgaggggaagctctggaggagtgcccggaagtttggcgctcatccgacttctactttgacgagtgtagcttcctaggaggaattctgaaggagtaccggagctgtcgatacactctgctctaggttcggagagcttattctataaagtaagcattcgtgttcctttcttatgttatttaatttcttagtctaagtaagatagatttccatctttgcgggttcattgtttagtatttatactaagtgctctagtactaggact

SEQ ID NO: 48092 - DNA, 581 bp, Oryza sativa
tgaaaactcaacaaggtgtgcatcggttgacttgataggagtttgagcaaggaattcataagctgctttctctgattctactgaactaactgttgagctaactgtggagatggacccagacccaatttcactttcatgtgaggtcacagtatcatggtttactctctcatcagaaacctgcaatgcaaaggaactggtaataagctctatagtctatcccaactggcttcagattttcaaatggagcaatggactaagctttaaacttaacctgagaaataaaccatcccttaactctttgttgggcttattttgacgctaactagaaattttaaactcgaacattacattaaaattcgacccatagtcccatacaatcaagtacatgatccagtaacagtaacttcaaatttgatgtccaatacgcaattactccccacatttcatattataagtcgctttgactgttttcctagtcaaacttcggtaagtttaaccaagtttatagaaaaatatggtagtattttcaacacaaaaacaaacatattatcaaaatatattcaatgttagatttaatgaaa

SEQ ID NO: 48093 - DNA, 688 bp, Oryza sativa
ttaaagaacatttgatgataaatcaagtcacaataaaataaatgataataacataaattttttaaataagacgaaaggtcgtttgtcaaaaaatcaatggcgtcatacgttaaaataaaatacggagggagtattttccatgagctccaagatgaaccggaaatacttggggaaaagaacaggtgaggagaggcgaagccaaccgccatctaacctgacgatggtacctcgtccaacgtccagtcgacgaccagtcctcttccggtcttgagcgcttcactgctgaattggtagatttgggacagatgtataacgaccgtcgacgaggctagtgttgatcatataacaactgacaagtctgcaccgaatctgattctccaccacgtagcgtgcgtgcatgtaccttattagtatgattcttactctaaatatttttgtcagttacttaaaaaaatgagatttagagaaagagacgttactccaaatattttttaagaaaaattgtaagtgtgatgggatttgaacatggtaacttagggtcaaaatcacatactccttgctaatgcactgtaaagtacatctcttgtcaatcacttctatgttgcgtaagtaatactccctccgtattttaatgtatgacgtcgttgactttttgataaacgtttgacccttcgtcttatttaaaaaa

SEQ ID NO: 48094 - DNA, 671 bp, Oryza sativa
caacaaattaagtgagcgtgcataattattattcttagtcggggttgctgaccatgtatttgtgttgtttaagtttttcgactttgttgtgtttgttgcgtgtgtaacgtcgaatgcaccaaggtctagtttgcgttgggccatcgacatactggcatgtttttgcgccctttgaactcatccaccaagatggctagggaatcgaaggtcatctacactgccttcccttgcattgaaagcttgaaccaccactccgtgtgaaggtgccgtcgatgaaataggatttggttcaaggtggtgaaggtgccgtcgatgaaataggattcggttcaggtgcagtcagtcacactaggaccatccaagttgtatctaaggactgagattctcggagcaccgttcacataaaaaaaaatattgtacaactattgtagcaatggtactgtagcacttgatctacatccttgatctgaaaaataaatggagcatgggcgccacttaggggtgtttagatccaggatagtaaagttttggtgtcatatcagctattatataggatgtcgcataaggtatttgggagctaatctatctatctatccgccagctgattagtggagatgacggcttgtatttttctgacacgtggcacgaaccaacatcgtatagatgattct

SEQ ID NO: 48095 - DNA, 641 bp, Oryza sativa
attgtaaatgaaatatgatagacatgccaatgtgatatccgacactttgattatatggatgatgaatatatgttaagtattataaagatgatggatacatatgcatacatacatacatgtatatgttaaaaatactatgaaaataatgtgaaggaagatgattggatgttgatttggagaattcaataaattatagatgatgttgcatgcttgcataagttttatatgtaattattgttagtggatgatgaagtggtatgtttgtatgttgaactttaagattagcgggttataactttatactaagatagaatatggagttataaaatttagaaaatgaattagaaatcaaacactagctatctaccagcagctacttaaaatcttattaagcttttcaaacagaccaagtatttttcttttttggcttcgtttctgaaccggagtctgggaatttttactagtaagatcatggtttaccacaatttatcttttttttttctgggaaggtcaaaaggaaatttaatgattgtattctgagctttcattttttttagcttacgtttttgagccgttaaccatacaaatataaaggtcatgtcccaaaaaaaatatttattggtttccctaaaaagagtatt

SEQ ID NO: 48096 - DNA, 822 bp, Oryza sativa
caatagtcattcacaaattataatagcattttcttttatcgtttaattcggaaatcccgagcccactaaactaccgtccaaaccaggggcagacggctgcttcgtttcaaaaaagcaggggcaaaatcacaaaccctaaaaaataggagtaaaatcacaattgagatgtaaattaagggcagaaacacaattgcctctttctctaaaggcagtgttggagggtttgtgctttttcagagtagtctgggtttttatctattaagaacaaccttccccgtgctttgctgtgaaaatttctaactagtaacttttaatatttttaataattgagctaaaagtaaaaaatatattagttataaaccataaataaaactgatttgtgttcagatatatacatttattagacttcgtacgagattgtaaatgaaatatgatagacatgccaatgtgatatccgacactttgattatatggatgatgaatatatgttaagtattataaagatgatggatacatatgcatacatacatacatgtatatgttaaaaatactatgaaaataatgtgaaggaagatgattggatgttgatttggagaattcaataaattatagatgatgttgcatgcttgcataagttttatatgtaattattgttagtggatgatgaagtggtatgtttgtatgttgaactttaggattagcgggttataactttatactaagatagaatatggagttataaaatttagaaaatgaattagaaatcaaacactagctatctaccagcagctacttaaaatcttattaagcttttcaaacaga

SEQ ID NO: 48097 - DNA, 672 bp, Oryza sativa
aacacaaatacatggtcagcaacaccgactaagaataataattatgcacgctcacttaatttgttgtactcggcatccaccaacacaactcagcatgtgtttatattgattcaggccacgtatcatttgacgagcctgaattcatacacatccacttgcgctggccggaattgaggcccatccaaacaaggtctagaagtgcatcattatctaaaaggtctaaaagtgcatggactcacagtaatgaatctcgatagttctccattcaatcatgccagattttcaaccaatacactaagttttgcttcatgcaggaggacaaaaaattacttgagagtttcgagatagcatctaacataattctaagaaccaaaaactcctaacaggagccatctaaggatcggacctgcagaacagcaccatatgtcctgagaatgtcagcgcgggcaccggcatcgccatcattgagatcaagcagtgttcctaaacaaggaggaaatgacacggaaaatcaaagtcaggggggagtagataacagattttgtttgaaaaaacatatcgttgcccatcagccaaagttgataaacaaacagcgacatagcagaggattttgattctgttccttttggagccggctagcccaactactccagaaattacacgattcaaaag

SEQ ID NO: 48098 - DNA, 506 bp, Oryza sativa
cgagctcggtacccatatctgtaaatgaaaactgcacctgcagggctttaacagcggatttgtacagatacttgtcacatttcaacatctctagtagcaacttggatagagaaccgaaattctgacatatatcaactgggtagcggcagaaggcaggaagcaaattccacagctgattggaacatgatttcaagtcttcacatttccgtgctgacttggctgaagttaaagcagaaggttaggaaatcatgttgcgtatgtatttaagacctaatgaattggctttacctacccatgttagaagcttgttgtacagattctgctagaggtacaatgcgctctaggaattgttgtggtgaggccccatagatatacttatctaaaatgggcaaagccaagtatttgagcatgttagccggtcctcatcaaaacctattggaattagtgaaaggattttatctggccccaaagcaatgacagctgccccaatgcactcttcaacctga

SEQ ID NO: 48099 - DNA, 609 bp, Oryza sativa
actaaattttttacttaggtagatgagttataattattctagatgcactcacagcattactaagggtgtgtttgagaggagaaaaaaagagaagtttaagaagatacgtaaaacaaggtgagctattagaacaggtacaataacagactattagccagctataaacatattttaatgagataaaatatgatagagaagagaatcgggctacagatatgtagccagctgcagcacggattccaagacgtagtgtgtgtataaattggctatatatggtgagaccatatataaagagtatagtaatcaactattgtatgaattggctattagattaactatatatgaattggagctagtagtgggctatattattaaacttgctcttagcgcatgaataattgagtgttaactatttcaaatataaaaatagattaatatgatttttaaagcaatttttaaatttttttttaaaaaaacacatcgtttagtagttcaggaagcatgcgcgtgaagaacgagagaaatctcctcttagtctcttgctactgaacgaaagcttaagaatttgcaaatttgccaccgtttttttcaattttgcaagtatgccac

SEQ ID NO: 48100 - DNA, 573 bp, Oryza sativa
catatatgatagtttctttaatgataaatctagtaacattaattttacgtgattgatcttttttatttttttctattaatggtcaaagttaaaaatatttgactcgttattatgctataatgcttatattttggaacagagggagtacttacaaacaacacggggctgacaatttctttagggagggtgatcccaagcccaccgtccctatgaaatcgcagcaggacgtaaggatgtcctacacttatgggcatgcccatgcatattgggggttcctactggttctgatggtgtcatcaccaacgctgcgcgcgcttgatgatttcatgtccttggattataggatccccgatttgatggagcttttgatgcacccgctttgttgcacgcagggatcgggcaccgagcaccctcgcaaggcgcgatccggggaacagatcgatcaggttgaatccattcatgagatccatggtcttgtctaaagcctcgagatactcatccccctgcgggcacgtgtcgccgatgattgccgtcatgatgatgttgttcgccatgatcttaaccagctcgctg

SEQ ID NO: 48101 - DNA, 524 bp, Oryza sativa
actataggcgaattcgagctcggtacccgaaaaacatgtcattcgcttaatccgtactatttaattatttttttagcttcgctgtgccttggtcaaattaatgttacaaaaaagaagttctggtatggtgtattggtgttaccatgactttgcacttcaattgcttatgtagaatgtaaatctcgtgatctagcgaagctccatgagcatgcaagatgtactacatccgtccctagatataagggatttttgttgaatgtgacatatcctagtacaacgaatttagacaagctttctgtccaaatttgttgtactaggatgtatcatatccaaccaaaatcccttatatttagggacggagtgggagtagcttaattgggtgaagtaagcagcagtcaggccgaagcgcggttaagcctgccaatggggcaagatccaccccatatccaatccactagccatcccataaaatccaaaccagaccaatccattttcctggtcagtccaaaccgacccaacccatt

SEQ ID NO: 48102 - DNA, 656 bp, Oryza sativa
  unsure (1)..(656): unsure at all n locations
gggcgaattcgagctcggtacccaaggtaaattgttggacaatggaattgaataaattgtcacctttttcttataaaaacctcaagtaaatgttttgattaaaaagaggtgtgtgggactatgttctggcgcttaatttacaagttacccaaacataacattcaggacaatgataataaataatcgtgactggccggtgtagatgtaatcgggacaaagtgattttagtttaatatgagtgaaattcagtatatcaaagactacaaactattccacagtatagaatattctttttcaaatttcttaattataatgtagtttatcgtacatataacgaatacgatgaggtaggatttctttaagcattctcccgcttccttcctagttattaagaatttgtgttagataaaacatgcagcaatatataggtggcatatgcttgccaatcaacgtgtacatgtagagtgcacaattgtagatatgtcaggaacaaattatttgataatagaattcaaccgtatcctatattttttaaactctaacttattggtagttgtttacacccaaattttgtacctagggataaaataggaaaaattgccaaagtttggaagtctgccggntttctctaattgggccagtctgactgccatctg

SEQ ID NO: 48103 - DNA, 1235 bp, Oryza sativa
gtcagtcacctgaaattcccatgtatatatatctgttccattcttaaagaagaaatattcaagtaagtattatatgtagctttgaagttactacatgtaattcagtttggtccagattgtttttggcagctggaaatcaatgtgccaatttggacagcctgcaaaggattgggcagagtgaagaataggtccatatggaatggacgcataattttgcgcccaaaggcctgtccccttgtaaattttgctgaatttttgcaggaagcatggatgcttgtttgcgaattgagattcatgtaggagttgggctattcacctgttcaaactcggagattagaaacttggagcaaattttactttgccatggagttcatgaaaaagccggtgtttgctttgacaatataccttcactttccaagctgattcggcgcctaggattcaaaattgaggatttatcctctagtgccaatgacatataaggtcagaaggctataaatgcttaatttctatctaaaaggagtgcatctgatcaaattttaccatgaagctcggcacaaaatctcaattgaactagaggactttgtatgcatatgacagatttaggctgatttcaaacctcgtgttttcaacatttctatatggcacagaaaataaaatagagtggctcattaacaggtgattaattaaatatcagttgtaaaaaaacttaaaaataaattaatatgatattttaaagtaatttttctatagatattttttacaaatataccgtgtagcagtttggaaaacatgtgcgcggaaaacgggaggcaaaagttaggaaaatggagtagagaactttggaactttgggggtggttagatatagggatataaagttttggcgtgtcacatcgatattatatagggtgttgcacgaggtgtttgggcactaataaaaaaattaattatataatccgccaataaacctcaagaagaatttattaagtctaattaatctatcattagcaaatgtttaatgtagcactacattgtcaattaggcttaaaagattcctcttataaattagtcataatttgtacaattagttattttttagtctatatttaatacttcattcggtgttcaaacgtttgatgtgacatggtaaaaaattttaggtgataactaaacagcgcctttgcaaagaagaaggggaaaagtacgtaaacgaaaagagagagaaaaaacgagaga

SEQ ID NO: 48104 - DNA, 603 bp, Oryza sativa
aatggcatggctggggttggtaaatgcaaatgttgagctggtccctgtcgacatccccatgcccgacatttttcccatgcacaacccaacaccgtcggggcccaaggatggatgtttgtccccggtgattattcacctggacaccttggaggacctccagccttatccaatggtgtacaaacaatacaagtggtcctacggaaactatgatgattgtatctcgttcccaaataggctataaggctatgccatgcagactacatccgaatgctgtgcggggaccaaatgaagacccagatgtggatggtggtggaggttatacgtgctaccaaaaacgatccaagtcactgtggggccgcatcacggggagatcccacagcattgatcgtgggggagatggggaaagattctacaatgaacacactaggggatgccatcgcaacagagacacatacattatctttaacacattctccgatctatggacgacactgaagttagggccaccattctacttttaaccctgcataaccacatagccaagaagggggggggatccctcgcttttgatctgtcttcttccccaactgaggtgttttcctt

SEQ ID NO: 48105 - DNA, 701 bp, Oryza sativa
agagtatatttatctataaatgtagttaaatttaaaacaatttgtctttttaccaaaatccaaacatgttataacttgaaatggagtaagtagtaaatatggagaagcgaaggaattgatgtgaaaaaaaggtgaaaatgagatgggagatgggagaggaggaggaggaaggagatgatgagtgctcacgaactcgagcccgatgccgcgggacgcgccctgcaccatggacacgccgccgccggatgtcgccgtcaacgagaacgccctcgccgccgccgccgcagccgccagcgtcctcgccgtcgccattgctcctcctctcgcctcgattcgattctcttcctccgggtgctcgcggcggttcggtggcgaggcgaggcgcacaggggcagtaatggcgggtcgttgttgtgggggaaattttgggggagaattgcgtggctagatgaaggcacacgtatgccgcgcgctggccgggaacggcctctttaattcctctctcgttttttctctctcttttcgtttacgtacttttccccttcttctttgcaaaggcgctgtttagttatcacctaaaattttttaccatgtcacatcaaacgtttgaaccaccgaatgaagtattaaatatagactaaaaaataactaattgtacaaattatgactaatttataagaggaatcttttaagcctaattg

SEQ ID NO: 48106 - DNA, 520 bp, Oryza sativa
tcataaatctgttttagttatgcatgctggtgaagtgatatatgatgaaatagtatataatgtcactttcttttaataattgttcatatatgtttgaataacatgtaaaggttctcaacaaaacttaaatgaatataattttacaatttaaaatatagtcaacatgtgtcataaattctaattgtgattttaatcataaataacacaatggtacaaatagataaaaaaattgaacttataatttaaaagttaaaaagttagtataatttaaaatttactgttgcaaatattatgtatttagaagtatgcttatttaaaatttattgttgcaaaagctctcataaagagagaatgtgagggaaaaaaatagaggatttcctaaaagaaaacacagaggaggatgtacgttttttttttaaggatgagaaaacataaatctgatttaatggcttgaagttgtatgtccactaattttaataaaaattaaaaggtagatgtttatttttcacgatatatgatt

SEQ ID NO: 48107 - DNA, 516 bp, Oryza sativa
taattcattgccgtattcaaccatataccaaaaatagtaatgcaaatggaagtaaacatatgtttcgtttgttgcaatttgcaaaagaattggcattgccaaaaacgtcggcaagaaaaccaaagcacatacacttgattgcttcaaaaaaaaaatcacatactcttgccttttgactagattaatttgccaaaattttgacagtagccaaatctcgtctttaaccaaaagtttacattggtgtcgatccgaacaagctctcgatgttctgactaaatagctcttcttaaacaaatggacctggatgtacgaaggagtagcatgctgactttgaagtttgaagtctgaaccggcaaatcgcacaaagagatgatcgattggccaaggaaagaagctccttttaaagtacttgtgtcatttatatatgagcccacgatatgggtccccataccaaccccttaaaatcagaggacaataagttgtagaatctgttttcactgcccaagacatgatcat

SEQ ID NO: 48108 - DNA, 934 bp, Oryza sativa
ttttaaattatgacaacttcaaacaatattttcaaatactaaatgatttgaaatgaaaaagtcatcaacaacaaagttgtataacttatcaatatctataatttttactttggtcatttttctatatgactttgtttcaataatttgaatttgaatttcaaattatgacaacttcaaacaacattttcaaatactaaatgatttgaactgaaaaaatcaacaaaaacaaagttgtataactcatcaatatctataacttttattttggtcgtttattcatctgacaaagtgatagtaacattgttcacaaaatttacatatctctcttatagtttataaaccatatggagatatgtaaaatttatgaacaatgttaaaatcactttgtcgaatgaacaaatgaccaaaatgaaaattgtagatctagatgaattgtacaactttcttgttgatgactttttcagttgaagtcgttcactaataaaaaattctatttgaagttctcaaactttgaatttcaaatttcaaattatttaaatagagtcagatagagaaatgaccaaaataaaatttttgcatctcgatgagttctacaactttgattttggtgacttttccatttgaaatcatttattaatcccaaattttgttcgaagttgttaaattttgaaaattcaaattttgaaatgttcaaatgaacttattcgtaaaatggaccaatacaatagttgtagatctcgatgagctctacaattttgttgtttatgatttttacatttgatacacaaaacatagcctaaaattaaatttaaagttatcataaattgaaattaaaaagtacaacatattattgtattttttttttgccaaaaacaaagaaagggctgcagaggcgccccgaatttttggtgcgaaccaaagttttagcgccaaa

SEQ ID NO: 48109 - DNA, 943 bp, Oryza sativa
accaaagatggtttcttcaccagtgtagcaacaccatcttttatgtaaaattaactgtaccgtacagatcaaccaaccaagaagcataatatatacaaacttgatcctacaagatcaaattcctatcaattcaaggacctacaggatcaaagcatatcggtataatctaatcttgctacacaggcctcaaattaatttgttcagtttcagaggtgcttggtttgaagcctaatcttggtctagtgtttaaaacttatgaagataaagattaaattggcgtacgacgtacgtaaaacgcgaaagatattaacacatgattagttaagttttaagtattacaaacttgacgaatggatatattagatattttaaaacaacttctatataacaagttttcgcacgaaaatgtaagtttgaaaaacgtgctaacgaaaaccgaggtaaaatctatatcttcatccgaaaagaacatgattcagccgcacttatggccttatcggttctgacaaattagtgtacaagagtacttatacttcactatataaaaaaaaactacatagaaatatgtcttttttactgtacagatggtgtacataagaaaatccacttatgcctgcagtgcgggctgtgcggcccacagttagtattgcacgcctcatttctattctagagacggttatgcgaacatctagaaattgatttttagatatagttgtcttaagcgattgtctttaaaagtagattttcatatgtggtcgtctaagttgtccgtatgatttagaaatgtcactactcgtatgtgcccccaccccccctccctttttttccatattacgaaggtggtattttttaacctggagttcttttgtgccagtacttattaattaattaatacttcgtaaaatgacaattggatagtccttacatgtataaagggtttttt

SEQ ID NO: 48110 - DNA, 528 bp, Oryza sativa
atcttgtcgggcttgaaattttttgttggtatcctccatacatggagctttctcttatttgtaatacccaaaaattcaccagagctacttgcaacaatcatttccggtttacgggtctgtgttaaatcgaagcacacaacacattgatgtaagtgttaatagaaaaccttaccacagatactacagcacaatattattgatatatttctaattgcaatagcaacattagcagcaaactacatttccaaatggaagctcactattcatagcatgatcaataataaaatatgtaaaaacatattgtcgcaggaaaatggttagaaaacgaactgggacaggtaaaatttgtacctcagccagaagactacccacttgacgccctttggctaagtcataaattcgcaactgcccgcgcaatttctcattagatggcttactggtgtctttaacagagacgaatgcaaacggcgtgtaaatttcagctcctctcgatattctggctatgttaggaatgacctgcgcccaaaa

SEQ ID NO: 48111 - DNA, 595 bp, Oryza sativa
ggaggtaaatggacttgtcagcgagggatgagtaaaagggtgggccggcggcccgaagagagaggaggagggagagagaggccgcgggctgagggagggagagagtaatacttgggccgaaaaaggcccaaggacagagagaggaattttaatttatttttcatttattttaataggttaaatgaattttgtggtattaaaattagttattgagctccgaaaattcacggaaaatttcaaagaataatttagaccaacttatagccattttagtttgtttttttaagttttttcattcaatcataaaataaaacgccacaattttgatttttttattcataaaatgagactagagatgacttcaatcctaaaatcctaaaatcctaaaatgagagactataattgatgtagacaacaagagtccacctaggacaaatgatttatggtctagtggcaatgtagtataacaagattttttttgttttttttaaaaaatataatagttatgtgttttatgacgatccattattgtcatccggctatcgtcacagagcccatgcagagtatactatgacgatggttatgacagatacac

SEQ ID NO: 48112 - DNA, 653 bp, Oryza sativa
tagtgagtctatggatatattatccaaatcaatgtactaggcctaggaaggaacatggtctgtagccagtgacgacagggtctgctgccgtgtagaatttagttcattacttgaatatcgaatgattcctgcaaaattttgccattgtctccaaaattggaagtgccttttataaaatccaccataacccaatggatccttaagcataaaggtaaaggctttatatacatgtaatcgtgtatggtatataatctggacttttccagaattaaaatagcagatttacctaggctttcctcgagcatctataagttgatgtgtcttggcatcaatgttctcttttacctgagaaaaaaaatcatgaactagttataccaaacatgcgactgagtttaataaatggtgaagaaatgtatgggcaagattttcagcctgaagacctctaacctggtcaagattccaaataagatgaggctgcaactttgcttcaaatgtggagggaccaacctacaaagataataaaaagttatgtgtgactgaaggtcaagctaagcaccattcacagcagctactagcatgagtatcacgattcaggggttgacaagtacataacaggagtaaggtccaaatgttagaaaacaaaatagaggtta

SEQ ID NO: 48113 - DNA, 616 bp, Oryza sativa
taatctgtaattctgatagcaaaactagctctttttggtgaaaatgtaacgcgttaagatatccagtaacacggtgagtgaatgatgctgttttactgactctgaataaagtgtgtgttgatctggtaaactgaaaactcgatgcttctttcagagtttcagttgtctgttgcttgcatacatgatggaatacttttttcttctagaactctataacaaccaggcaaataatttgtcttcctggaaaaaaggcaatcttgtcgattatgtactgatatctggcaggctaaacttagcaattgcattagatgccaaatattgccatataagtcttccagattcagaaattgatggctaagctgcactgacaagtacgaaatgcatgcaggcttgtgaacagtttcagtctgtatcgatggcaatagatgttgacccgtgccatatctccaaatatgatactccagtaatttgtatgatattcacatgaatcaagctcagttctcgtacaaatcctatgaaattcgtttgttccaaacaagccctaaacaaaaaaaaattatgatgtcataatacgacttacaagttacaatcaatttgaaacgcgtgaattttactg

SEQ ID NO: 48114 - DNA, 544 bp, Oryza sativa
gggactatgttctggcgcttaatttacaagttacccaaacataacattcaggacaatgataataaataatcgtgactggccggtgtagatgtaatcgggacaaagtgattttagtttaatatgagtgaaattcagtatatcaaagactacaaactattccacagtatagaatattctttttcaaatttcttaattataatgtagtttatcgtacatataacgaatacgatgaggtaggatttctttaagcattctcccgcttccttcctagttattaagaatttgtgttagataaaacatgcagcaatatataggtggcatatgcttcccaatcaacgtgtacatgtagagtgcacaattgtagatatgtcaggaacaaattatttgataatagaattcaaccgtatcctatattttttaaactctaacttattggtagttggttacacccaaattttgtacctagggataaaataggaaaaattgccaaagtttggaagtctgccggttttctctaattggccagtctgactgccatctgttg

SEQ ID NO: 48115 - DNA, 826 bp, Oryza sativa
tgaaaacaaactgctgatatctccttggataagtccgcagaaaaatgcatctgatataattctcattttatatatgtacttttgacagctgcgtgttgctcgtcaagtagaagtgagttgcagttcttgctcttctaagctgtcctgatggagaaacactggcagagcaagatggggtgatactacttttcgatgcagaaaatccaaagcctgtttcttcctggtcagtaaagaaggtatgtttggctgagttgttatactctgaacagtccatagagcacattatatattttctgggactaaattttctggttagtgattgtaggcagtgcgcattgttagctacttattgctttggttctcaagtgaaatgtttatattttgtttctttcctctgcttgtgtcaatctgttgaatgcatcagtggcccattaatgtattacaagaattaatttcacttttcttttgtaggcaaggggaggcagcgttgcttttttgaagggtgattcctctttggatgcaaacagaaaagacaggatagatggagaggcatcatcgctggtttatgtcaacggttctcatgagtatgttatatttgatccccgaagcaatgaagaattgcatattggcaagagtgcacacaaaaatattcaaactgaggagcctggtgagttatggtttgctgcatttattctaatcagcttctgtatacttgtatttttcattgtgttaacctgctcttctctacggctatatttgctggtggcaagattatatagtactccctccgttttaaaatgtttgacaccgttgactttttagttgt

SEQ ID NO: 48116 - DNA, 1865 bp, Oryza sativa
ccacttacgtccgatctaagatcaatggacatctacacttgtggatttgagttctgcaactagtttaggtggtcatcatgtttggtcaaatgttgtgtatataggaacagctcaaaggtgagaaaaggtttaaaaagaagtggaaaaagggaaagtgagacaacaaagaaagttggaatttggataggagggagtgtccatatcacacacgcatacacatggtataggaatgagtcaagttagaccagtagtagtagtattaatttccttagcagccacagctagcttggcattggcaaaatgtatttatcaataatacttaaaaaggcttcagtgatagggatagtgaaatctatcattgtaagtatttccgtcgtaaattttatggagtaaatcacttcttgaacatcttgatattgaaggcaatcaagtttagacaaatatagaatcaaaataagtgaatattccccgtagcaaataatggatagcacacttcattaaaaaaatatatttatccgtagcaaagcacgggtaccatctaatgtatatgtgtggtattattttggtgtttaccctattggtcactggagacaagaccagtgtggtagtagcagttaaattctattgtagtaattagatggtaaaataaaatatataggcagaattcttcaaaaagaaaaaaaaatgacattgtatctatgttgacgaaatggttccgtttctctaaaattctcatgaaattcctccaacctaaataggccgtataagaatttagcaaaacaaaatattgtatgattgactagataccccaattacatctatatgttcacgaaagctaagtttgtatttttcaaaatgaagtcaactcaaaatccgataatgatccgaaattattattggtacaactttgtcatccaagtgggattagtcctaatttcttcaccataaatgcgctgtgccatgggtacgttgtatactcgactttgtcgacatagcttacataaaaaaaaaattgaaattaattaaacattggaacagagctagctatccatgcatgacgttcgcatgtgcttaggacagaaggatattactccctccaatatgtcttgataaatatcgttttggacatcattatggtatttacaacacaattcaataatttgtattgtaatatattatatagtctagtgaaattcaaacattatgaaacatttctccagattaatttatatgtgattctcgcgtatccattctaaatacttttaagatgccgttcatacttcagagttttaaaatgtttgaccagaaacatgtccaggtacacgcagggtgaaatgagttttttaatatatttaatatgaaaaaggtattccattcgtcatctctttttgttaaacccagccatattggttaagtgaaaatgatggtttgcaaccttgcatcaatcaatcttaaagtaacactgttttgagaaaacaaagcgttgatgttacgttggattttcttggcttcacattcttataagcatagtttttttttaaaaaaaatgttaacccctctctagcgttgacaatgatgcgaagattttttttagaaaaaaaaacgaatgatgcaaagattgccatatgcataatttaattgtatttgtgatacactgactgacatatgttgatatatctccatgtggtgcaaatcaatctctgtacttttttcaagacaaaatccatgccaattatgtatatacaggaacctgaacaaagaacaaccacgtgtcttccagagataccgcacaaatgtgcagcaaatcaatcataatttacacacagagtacgtttgaactgtaaccaattacaatcaaagacgtc

SEQ ID NO: 48117 - DNA, 1506 bp, Oryza sativa
aaaacaaagcgttgatgttacgttggattttcttggcttcacattcttataagcatagtttttttttaaaaaaaatgttaacccctctctagcgttgacaatgatgcgaagattttttttagaaaaaaaaacgaatgatgcaaagattgccatatgcataatttaattgtatttgtgatacactgactgacatatgttgatatatctccatgtggtgcaaatcaatctctgtacttttttcaagacaaaatccatgccaattatgtatatacaggaacctgaacaaagaacaaccacgtgtcttccagagataccgcacaaatgtgcagcaaatcaatcataatttacacacagagtacgtttgaactgtaaccaattacaatcaaagacgtcattatgtctgacaggatccggctttgttgccattaggtctgacaattaacctaaaaatatcttgattacgtacgatcgagatgattaattttgggacaaagatcgagaagatggctcaaagtgcttcaattttattttattttctccttgcaatttcacatgcggtcgatgaagttggtgtctacaagagtgagccagttggccaattgcgactatagctaacattgcgaaggacatcacaccgaaaagataaattttgtgatttttttttaaatcaagagtaagcagaaatcgtgatcaatgttcaagttgggcacgtttcaaaattcaaatccctgtcccgcgatgaattgacgaaggaacgtgcaggtctcaaattacgtgagtggtggtcgaaactataaagtgcttctttctgattttattggcaataagtccacgcttttgcagaattgcagcttatgctaaataaatagtactccctccgtttcaaaatgtttgacaccgttgactttttagcacatgtttaaccgttcgtcttattcaaaaactttggtgagatatgtaaaattatatgcctatataaaaatatatttaacaataaatcaaatgataggaaaagaattaataattacttaaattttttgaataagacgaacggtcaaacatgtgataaaaagtcaacggcgtcaaatatttcgaaacggagggagtagtagtttcgttaaaaataggacgccactttttttcttaatttcaatcactgttttttattaaaaataataataaacatagttagtcccacgaaatacgggaatagattgtttagatatagagttaacaaaagtgagagcatattttctcaattttggtcgtattgcacaatccaaatatctaaatgtgtactcgtagaagaaaatatctttctaaatctacttaaggacgtgcgtgcattacactcataccactgcacacgcatatatgagcgcgtccttaactccttatacacatgtgacatgtccactataaattcatatattatctctccgttttataaaacaaattagatgctatcaggatttattgtactcagttatgtttcatcctattaga

SEQ ID NO: 48118 - DNA, 3374 bp, Oryza sativa
  unsure (1)..(3374): unsure at all n locations
gattgctagtagtcatcctcgtcgtcgtcctcctcaacctcccgcccgccaccgcgttctccccggcgctccggcaccgttaccgcccgccgccacgttctcccggcgctccgccaccacccgcacgccgccgacgcgttctcccccgcacaccgcgccggaaccgtttgagagagagaggaagagtgagagggagaagagagaggaagagaggatggggagatgataggtaggtcccacaatttttttttataaatagagtgctgactgccatgcgtacgccacgtggatcaaaaccactgcgaattgggtcgagggggtaatttgtccgggttgcatggctgggggtgaaaaatacccggctttggggtttaggggggtaattcagacgaccgcgatagttcgagagggtaattcgnactctttcctttattatttattaaattacttaacgttgacactaatacgatgtaaaaaaaattagaaaaaataaaatttataaatagtgagaaaggtacgggtggaaacgatacctcttatacagaaacggagcttgatcgattgggaatttctgtgaccgttttcacccatatacggcccaataaccatttattggttattgggtctgcgggctgcaggcccaattaaatctcgatctcttcgcttaaaccaggttaattagcaggggattaggattgacacgagcgcagcgtggcctaactaaaccgaaccatcaactaaaccacccctggccttttctggtcaacggtcaacgctcagcatgcaaaccccgacctaaacctcgccatggattcgcctacaaaagcttcgcgcggcgcagccaccgagctgcacgacggcggccggcggcgaggagagagaaaccagcagcagttgcgacggcgatgggctgccaccaccaccaccaccagctgcgacgcctcgccgtgctcgccgcggcgctctgcgtcgtcgtcgtcgcgacggcggcgaggccgctgcaggcgaggagacacggcgaggcggtggagatggacgtgtcggcggcggcgccctccggcgatggggcggttcgagaggggaagtggctgccgctgctgccggcgggtggggggctgatgcacttcccggtggtcggcggcgtgtcgatgccgtggatggccggggcgcccgccggcgatggccgggccgggggtgcagctggtgcccccgtacgtcggcgcgacgcggcaggagcagctaagcctgtgggcgtcgctgttcaacccgttccaggtcaggcccaggctgcccgccgccgccgcagagacgacgtcgccggcggtgcccgtggacatcccggccattgccggcgtgtcgccagagaagacgacggtggacgagccggccgccggcgagcccaagtggggcgtcttcttcggcaacaacaactagcctatgatgaatattatgatccattagcttttaagtatagaaatgaattaatcgaccttctttttggattaaagtttagtgagtataattcaagtaatacatatgtaagtctgcatgtttaggtgtcaaacttattacaaaagaaaatatggagagttgtaatatttgtagtgatgaaaacacatgaaaattcttcacttatatcctgtcccaccgtttaaaatatatatatagtcacttgaatatttttgtttttttctcaacactgacaaagatagttggatatatattaatttaacaatgcctagctggataaaaatgatcatcctgaagggatggatgatcattttagttgtccaatgcctttttttttggaggtttcttaagtcataaattttcaggcccatttgtgctatatgggccgggaattccagcccaatttgcttgagatgcacttgattttgtatagccaacctctggccggcctatttagaatttggtagataaatgtaatttagcatttgatactttcgcaagaggaagattaaacattagcctctagtgaaaattgcctaactccatctctgcattaaaccatacaacatactaattatttgctcaatttgtcctccctttcttatccacacaaattgggtactgagactaatctgatagaaaatgaaattgcataattgccaatcatgtgatagctaaaagaaacataagacttgaaccaagtgctcacatgctctaatattgcacagcaataaatgggtagagactcctagatttcagggaaaatgttccaaatttgttaatctccaatgtcttgagtttaatgcagcagcctccaagcttgtcataaacctgatggaaaaggctagctgttggcacctgtatttatgtacgagttaatcaagctaatgatgatgatagaaaaaaatggtggttagctatggatggatgtgagccacaagctcagccatggctgctctctccttacatctgaatgacttctctgcctcacaatctcatggggcagaggagaatggacgatgcaatgcaaaatgcaaggccccagaaggagaataaaatatgtggctagggttccaaggatctgttttgaggccacaagtccaccaaagttttatagtgatgtggatcaaattcaaagcaggttggaggatgagaaattcatagaacccttttttttctctctttggttttggtctttggaatattttttttcttttctttttccaaggagtgtgatggtgactatcaattatccatggctttttggcaaggaaggttcacctttttttcctataaagaggctgtgagaatatgattggatcactgtgtgtattatcatgtgaaagataactggttatagatgtataggtacttgtccaattggaatatgagtgacacttatgggttgtttggagggtttttttttactccttttcctctaagaatttaacctttttatcccatttttgccactaagctgaaaaccaatttcacttttgttagtcagctgtaccagccccagtggcaaaaatagcaacagtgagatatgatcattgcttagtgacaaaaaacataaagccatcccataatgtattattccgattaccccctccgtctcagaatatagcaacctagaaccggatgggatgtatcctagtactacgaatatgggcatgccccctgtctagattcgtagtactatcatatgtcacatccgatcctaaggttgctatattctaggatggaggaagtactaaattttcataattcgattccatgccctctagtatgaaatccgtaaatacatcgaaccggagggtttcattaccaaaagtaaaagggtagcaacttttttattatgaaaagaaaaacagtaacaaagtaacaaaaagggtaccgagctc

SEQ ID NO: 48119 - DNA, 2003 bp, Oryza sativa
agtgagatggacgtgacactaatctggtgctggatttgggcgccatactgactgacagacaggatcgcttggagctcagatctcccaaatcttccgtaaccacgaccctgcacgatgacaagttttcatattcaagtcgatgacttaactctgtgttagagaatatggtagttagagttatattagaataggattgatttatgtggactccttccatatctgtaatcctttcttatctccttctcgtgtactcctatatataccgctccccctgagactcaatacaagtcatcccacattacacagtatatctctcttcatatactatccaacactctgaatttaaattgaatcaaccggtgttataattagtagtcaaacgtgggagagtgtttttattcctcaaggggatatctcattgtttcttacatgtcctgtacatagttagtataaaatattttcaaattttgataagatagattaatacaagatatatcacttcacaaacatagaaattcaaatttaacttctacatgtagtaacaaaaataacaaatataaatacgaatgtacattaattagtttcagtttaattggtttttttacaacttggagcagtcaagtttgaacttgcagatttgtatataatatatctcatattaatatatcttatcattttttaagtgttttatgactatcttaggtgttatggtgttatgtaagaaacgagggatgtccttcgagggatgaaaaatctatctccgtcaaaggtggtaattattcagaatgctttcgtaagttcagagtttttgcagttaatttaaatcttgtgtgagatgaaccggaggagattaattgtgatgctatgttggcaaggcaagttggggggtgtataatgctatgttgataaccattccctgtcggtctccggcgagtcctcttcttgcctggccatgccctgccctgcattctttctttctccaccaggggaatccagttcacccccagtgctgcttctgctgctgcttctgcatcatcttgccctgttaaaaagacacagtgcctttgttctttcgcagttgcaactagcatctcctcctctacttgtactcacttcacacctcagctcagctcagctcatctcctgtcatctcagctcaaagagaaagagctgaaggtgtaagctgatcaccaggaagcagaggctttttttcagattacagttatctgaaacaaccaacttcagaatcaatcagcaaaggtagagggagtttcttgtttcttttgtgtactactacatgactatatccatatctcctttttcttctacttctttttcttttgtttggttgtgagtgttgttgctgtgtgtttcaacaagtcaactggatagatagattcatagatatgatagtttttatctgaggttggaggtttcccctctcatccaccacacacattttggcaccccaatcctgaatttactgttcaattctcttctttttattcttcctctgttgattgatcatccatgcatgcatactggtatatagtactagtgctcaagtgctcatccttcctgatggtgaatctcttttgagaaaagaaaagaaaaagatctctctcatcttggctttttttcctgttgatctgagcactgctcttctccaggttgtttcattctgcaggtctacagcttttgtcatcaaagtggtagggtttgtactttgtagtagattgcagtgatggcccttctctgcttttttttcattctctgtttgttcttgttgctcttattctgtttcattctactttttttaaacaaatccatccttagagttcagttttcccttaaaatttttccaaacctacaaattttgttctctgtgaattcatttttgcatgattcttgcagaatctgaaatgatcattggctttgcaggtagaaacaagacagagctgctgtgcttctgtgattaattagggttgttaatgccatgaacc

SEQ ID NO: 48120 - DNA, 1438 bp, Oryza sativa
gggcaataagaaaacagcagcagcagtgtctcgtttattccactcactctctctcgatctctccccccacacgatatgtccttcctatcctttcccactactttacttcccactactttactttctctctcctctctccctcgtatgcattgttaatgtttgtagtgtcataattacaaatcccccggctctggcgaggcgttggatttaggcggtcctctctctcgttttgctctcctctctctctctcggtcttctctctcgctctcctctctctcggagctgaggcgacaggcggtggcgcaagaggggaggctgcggcgggtagagacggtgcggcccagcggcgggaggcggcatcgatcggcggtgatggccacgccctcccatctgcggcagcggcatgcagcgagaggagcggcggccgctcggaggcgcccttcctcgggcagatccgacgggaggaagggtagtggcggcccgacatcgccaccacggcctcggggcagcagtgtcctcggcctgccatgattttgttgttggatttgtgatttgattttctgggatgatttttttgttggatttgtgatttcctgatttagtggatttgtgattcattttctatcgtttctttgtattgtcgctcagatggatcggatcgggagggaggtaatacatggatattaggtttgttctggggatcaaatttatgaggtcgagattaaatttggtattttcgtgttgtgtttttggttgtctgattgattgattgatttggggatctagctcgggttttttttttttttgaagatagactcggactcaaacgaacgaagcagggacggatcgcacggacgagtgaaaaattgcgcataccgacgaaagtttgggtgacaaaaggaaaattacaaatctgttaattagttaagataagataaggcgtaagagtgcgagaccaaatttatttgtagggtagtgcgctaggcaagagtatatataggacatatgccgtatatcggtttttatattgtaagtcagttgtaagggtagatttacttgctcacgagtttatgcaaattttaacattttaaaaggaaaaaaaatatgttttctatttaaaagatccaaaagtttgcaaccgcaacaaaagattgcacaagttaaagaataggacaatcgctaccgtagcctgttggagtcacctaccgtctagaaggatgcttttttatgaagagaaaaacatgccgctcctcctcaaaccgaatcggatccagaattgcagattcatgtgacaagcatcaatcatcatgcctgacgtctgatcttcacaatggtaaaaaaaatgttgaacaattatttggtcagtgggaggaccgactggacagtaaccttgggtaatctgaccatccgaaggataggcagtaaaagaaactccatt

SEQ ID NO: 48121 - DNA, 671 bp, Oryza sativa
ctgcagaagttatcgagatgctaagctaaagcgttctggatgccttgctgtattgtctgtgaactctgtggctttagacctccaccaaactaggcacaactcactgaagaactctcaggaggtatgtttatgaatgatgctctatcttttgctgcagcaaaacaacggtctatgtggcctcttcctttctttcttggttctacttatctgcagtgtttaaacttagctttatgtttcaataacattgcaagattgtaagctggaatgttagaggtctgaatgcaccagcaaaaagggaggcggtcagaaatctccttcaacagcagaatgcaactctggtttgcctgcaagagacaaagctgcaagatgtaaataaggcctgcataattgaaacaaatggagtaaattttcagaacaatttctttttcctgcctgcagagggatctaggggtggtataatcctggcagctgatgagaactattttaccttgtcacattgtgatctccgtatgttttccctaacagccaaggtgactatgaaagaaacaaatgcctactggacaataacaggggcttatggtccatagaaagatgctgccaaacttctcttccttcaagaattacaggatgtggctccaacaaccctaccttcatggttaatcttggagatt

SEQ ID NO: 48122 - DNA, 620 bp, Oryza sativa
tcattcaaggtccaggatacaattcagaggtctatatatgcgtgtccagtactccagtcagcactgaatatttggtgaaaaattgagtattttccagtgcatgatgagatcatgcatgatgaagagtattggaagacagtttaacttgtaaagttgcagttttctccgacaatagtgatttagaaaattatgcgtgccataatttgttggccttagatttcggatcatgtcaaaagtaatgcatatgatatatgtgttcctaacttcctatcactcgttcactattatatattgagagttcctacgttaataagttaaacccatataattagggacatgctatgatcctgtacgtgaacaagttaaatttatggggggcatgcatatctctcttcaaggcacataaacattaatcctttcactgtccatgcgtcttgtgcatgaataactttttgcaagattcaaaccacactagccacatactgccttcgtcccagaaaaaagacaacctatgcccaaaaaaataaatctggacaaccatttgtctacatatgataccatgtagatcctaagactatgaattgtggtgcttgaacgtaacccgctctgataccatattg

SEQ ID NO: 48123 - DNA, 2315 bp, Oryza sativa
tgttgttttaaccattttcttaaaagaaaaatctctttccattccactctcaatataatcattaccaacaaacgcttcgtctgcatgcaaatatcaacctgttcgttgtctacatggaaatatcaactttaattttattattttgaatcttcgactcctaaagaagacaataatcacgcaacatttgcaacatgcatcgccctctgcatgactgtaagggtaacaagtagtttctttccaccttttgtttttgcagttattgagtttgtctctcttctaaacatttctccttaatacaaaggtgtatatcttgtgagcattaatgaaaaaagtatgggatttaccccaaccagatcgacataatgctaaaagcatgaaccttattaccagctctagacacatacaatgcatgtctcaactttcatcatcttttttttatatatataatggaatatacccggactctacatgtctcaattttcttagcctatatatatatgagggattcatgcatataactaaataagtggtggttgcacaaatcacttggatttgtctttgctgccaactacatcgttctagttaggattggagctcctatttggtcagcatgtcggatgagcaacatgaggcatacctcgccgcgtcggtgaagttcgatgacggcatgattttgtgttgggagtgttttaagtcgaacaataaagattcgactaaagcacgacattacgaagatctaattaaacacaacaaatcgaagcatgctaggaacaaatttatatgtggcaagtgcggttgttccttctatagcgagggagaggagggcacacatgatcgtatagtccacagtacctagccaggtatatggtgttatatgagattgaaaatttttacattgcattttgtagtttaattctaacctcaattgtttgtttgatttttttccccttgaaggtcattgggctgctaggtggaagaaattaataatttgatggatttagtggttctcactttaggaggattccaactagagctccatcagctagattattagtcttagataatttctttaatcattagtagttgtgcttgctgcctatagctttagttgttctcgcttcatgaggattctatttgtagcctaatcattttattattgatgttgttaactttgccgcctttcattatgatctaagttaatctgtctaattatttaattgtcagtaatttggcactatattttgattactctcgagtgatggttcaaagcatctgcttaatttatgcattctaatttgagttgaataatttcagtgttgctacctttaaaacactctaatgcaatgaaccatatgaactctaatgacattaaaatttcttaacagaatcccgtacaatagtttagtaaaaaggagaaccatggatgaatctgttttcattgaatattaagtacgaccatgcatacatcgttagctgcggtgcagtctaccggtagctcctggcatatagccgcaatgtccacctatgagcgtcacccgctctttctctagcagcgcacaaacaccgtagtttacgtggctgtcccgagcagcaacaagggtgaaagacgcacactcatgagagtgtgtgctccgctccggcatcccgattgcacatcacccatcgacaccgcgcccattaccaccacccatgtccaccgctgccgctccgtctaggcaacaacacaagattgagacagagaccgaataatgttctagatgactgaaagtttggcaatgcatccgatcttctgttctagatgactgaaattttgaaaataccaaagatcaagactgaattgttcggtctgatcaagtaccggccactcttaacctgtgaagctatttcttttcgaaccggatactgtggagaacacggtgttggagttacattcaactgagttcacttgaagagggtttagatttagtgaataggttccatctaggtagaaacaagcaagttgattatatcctattgcctctctttcaaatgaaaaataaactttcgacgatacaaatcttaactagtgaacttttgatatcatgaaactatctatctatctattatatactaaaagtccattagattttctagaaacgctctcataccgccatgtggcaccctacaaacactcctatgccgccacgtggcgctctaataaatttagaattctaaaataaatctaaccgttagttttcatttaatctggtggacccattattttttaccattggatctataataaaaataaccaatccgatttatcttaaaaggcc

SEQ ID NO: 48124 - DNA, 1419 bp, Oryza sativa
tacggttgtttatttataaaatatctacaattctacatatgtaattttttaagacttttttagaacttctataaaaaaagtttccaagttttcacctaagatgtggtttccactatatatttccggcatatagaagtgaggctcatcatgaataaatcaagtggttatatctgttataggaatgaaaacggagtggatacaaacaaatatgctcttatcatatttgttttcatttttatctagatatgaaaacggatgtgaataaatcaaatacaaaatcaaatatgaattgcctcgaatactattgacacgaatatgaaaataaatatttgtcaaaactcaacaattgcccaaattttaatagaaacaaatatcaccacacatgattagcacattttatatataaaaaaatgttttatatgtactaaggccgagttcccaaccttgtctccgaacacggaaagccaagtaacggattaacacataattaattatgtaggagtattagctaaaaaacctttcaaaatgaattgatatatattttttaaaagtaacttctctatagaaaatttttgaaaaaaacgcaccgtttaatagtttggaaaacgtgcgcgtggaaagcaagagaggagaggttgggaaaattgggagaagaacacggcctaaacaatgtccattacgtttgacatgtataacattactagcataaatacatgtataaatgtctaattaatgttacaacgtattccataaaatttagtacaatgaataaaaatatttacaagtttaaacaatacttgagagaacgtgcctgaccggaggccctccctgatgatgggctgagtggtgtttggttggtgccctgaatatttccagtgacgcctggcctgagttacttccgtgcatcattagcccaagcgccaccgcataatcaagtggattgattagtgcagcatgcaccatgcaggtcagcaggtgctggttgagtggttgtgatactgatgatatgactagatgattaaactatttttgcccctggcttctcatctttttttttttttgcccctggtataagtcataacctttttttttcatctgttctcaggcacaacaccaaccaaaggcttgcctgaccaggcattcctattccatcaaaacctcagggaggtctcaggcactgctcaggccgtccacaaaacatgcccttaacaacatggactagtattactgggatgagacgtggattgaagctcaagttatgaagaaatgaggtatactctgcctttagcaaatatctgtattgcaatattttcaagatatccatattattactaagtgtgttggtcatgtttgttactttcggtagcaacacgtgaatgccatgcacaactgattctcagccatgcataactgattctc

SEQ ID NO: 48125 - DNA, 4688 bp, Oryza sativa
tgctcaatcttttccccccttcagtaagagaagcttcggagaagatgtcttaggtggagtcctggcttatatcccagttgagcgcctgtgaagatggagccgtaggcccgcttttccgctgctgtttatttttgtttatcaggcctgaagcgcctttgtaataatgtatatattatcgatataataaagatgtgccttttgtatcatgtttgtttggtgtaccccggcttttcctgggacggggattaatacactagcgttcgggaaaaggtatttttctcggtcgcgacaagctggtatcagagccatctcgactgtaggataagccaagtggataaaacctaaggacatattttataaataaaactatttgcgaaagttccttttttctccttcccctaatgctatttgcaaaaggtttactccgttcttccttcttcggattttcaactagtactagatggtcagctttgcgaagaagaagatgtcgccaattgtttgccgaagctccggaagactgcaggatccgcttgagaagtgctggaagcagtgaagccagctgtgaaggagtgaagatcttagagaacccgtcgcagaacccaagccaccctctagggtagagtcgtttgtcgtgtgtttccttgcttgtgtgtgtagcgcgtggtttgcatcagtgggttgtgatgtaaccatgctaggttgtttgcttaatcaacttgcagaataagcaaaacaaacaacacatcaacaaaaagagttagttcctttaaggtcttgtccctagttttggtctattctttcctgacttgtttcctctctcacctcaatccctgtcacagatgtttaacagagaaaaaggaagtaactcaagttttcaactcaatccaccactggcctcaagagagttagcaagggcacacccttggtccattccaagcatgctgcttagttcacagctaccattggttggaagtcaagaccaaaatcagtatgtgtttgatcgaccatttgccacccaggtcaatgagcttccaatgccagaagagcatgtccccttttgtcatgattgtagagagcaaggacactatgccctgaattgtccatgggtatatgccaaagaagccccttcctttggtttagcagggcagtgtagacccccgattttggaaatcggaaatcttctgtgtttatccgtaccaatccctggatcagtagttggtacacacatacatagttggatcacaacatatcacgaatgaatttaggctaaaagagttaaatacttacattagggccaggtaggccaacaactatcagagaacaacagcggaagacaaaataatataagggcccggttaacatgccacaggcagtcgactggggaacgagacctagaacaagaccgcactccgatcatcttgtgggatacgcaagcgtaccgacaagggcttctcttcaacactctcctaaaagatatataaatagcaagggtgagtaccaaccgtactcagcaagccaccacaacaacaatgcatatgatagcgggtatttcaaggaatggcttcaggttcttttgcataaagctaattttacaattcttttcacaagcctaaaacctagcatagactgatcaaattttagtaccagtgttcactttaaacaacgacggttctgtccaccatccattgtgatcccaaggatagcttcccgccattgaatcgtcatggttttctgaggatgtccaccttccctcctctcgggatgtggctccatcagcataaaattcatcatgcaatatcccatcccacacaagttaagaatttagagtctagccaagtgtaatacatgtcccggtgctcaataaccgcgagcacggctattcgaatagatttggtttactcacactgcagtggatgtacactttacccgcactccgcgactacccaacacatgagcctcgtcccaacacatgagacgcgtcacggcaaagcttttcgataacctcgcattggcagtacccgctccatgaacttttcatcctcatgcactctaggcgtacacggtttctagcagtgagaggagttctggcgcacccgggaagggaagactcacacatgcattaagttatagttatgttttagattctctcatggcagtcctaccgatggcgacaccactgtagacacccgcctcgcggtcctaccaatggctgccccaccgtagagcccctgcctcacacatcaagaaaccactatgcatggatactgcctccgctcagctatctactccgctaggtctatacccatacgagaagtgcggttgtacgggggtcgtttcatgcttaacttcatggctcggtccttaattgaccagggacggcactagcattttccggacaccacccaagtcctccagccgccccagtcgaaaacagttgttttacttttttttcctttcacaaatcatgtcatcaatatcatggcaatgtggcgctcatgtctccacatgccgcatctcaattaccttcccaaaggtaattgcccaagcatatagcatttgataaatatgagtatgcatgattctagaatagcctttctaagcaattgtcatagttgactagggactcatacgtaaacatggttacaaagatttaagggtaaacaataatcaaggcatggcataatcacaagtaggatgttcatcattgcatgcaattttatttataaacaaaacaatttcgcaattgggatcaacatgctcaaggaatagtgatgacttgcctgctcaggataatccctattctcgatataatcttgatcaaccttcacctcctggaagttgcagacgttgcctcacgactaaccgatacacaaagtctataatacgcgagaaaaaccaatattcaagcaacaatcaaatatgcacaaacaaaatatatttgctgagatcgaacctagggttgctcatattattcgcgcttgctaatggactctaatcaagctaagagctaaggtttcttagtctttctgttgtcatggtggttcagtctagctaatggctaaggaaggattatggttacacatgcatctatctaaatagaacggttatacactagaggttctgttgccggatggattttggatcggtcaaataattactgtgaatcatttgtattattattttattaatggaggctttaatttaattatgtacatatttcacttgtcaaaataaattataaaaggttaacaattacccatgctgtgtatgttagaattgtttaggttaatcatattatggttacggattatcccatcacataattttacaatgaataatccaaatttacagttgatctgtaattatacgaggacaagatgtataactagtatttatctaatattcatgttcgtcacatactccctctaaattaatatatgcaacaagcaaattaatacgataccatatatctataatgggatgtacaatatatgtgtgcacaatatcttaatatattgaatcatttatttgaatagtttctatttactgcttggttaactaagggttgctcacctctcccactatatgctattatatgggatatgtcgttgattaatttcatataggtgatttaatcacactagctctgttattatttgccataaacaagcttaggaccgatctatgtgtatctatattttacttacctaataattataaggctaactctatttaaataactaataagtcgtgggttttaattatatttggacatagattaataaatggcactaatattttcctatatatccattaacttcaaacatcgattatacttaatttatgtggttgctacagtgacagaacatattaaagataattattctgctgtacaatactaagcatatttttaagttgactattatgcatcatcttgatattaattatttaatttttataaatatattttatccaatagtgaattatatatcattggaaagcttatgaaattagatgaatttaggttcaagtttcactcaaatcggagctgaaatgaataagttatgctagcgtaaagattcaaatttgaattaattctaataattgcgaaatggtactgtccctaattcatttatttataatacaaccttatccacaagctacagtgaccgacaggtggagtcaagctctttattttcttttcattaactttactatctgcgaactacggcaaacccaatttcgatttaaactattttgcgggtataattattttgttgtcataagtttttaatttactcttcccgagcattatatccatataataggttagaaatttctattacgagctaaatatcggacgaaatcctagaaatattatacaatttaatttagtctatgactaaacgatataatacacggctaagattcctagtaattaaatctgaatttctaccgtgaaccgatgacttagagagattaccaaaaataatctataataatctaaaagaattcatctaattgtttagttattaattatatctaatttactaccaattttaatctaatctgatcaagacacatattcttataattaactcggaatttcgaccgaaatactattacgctcgaggaattttcaaaaataatctatgattaaccccgaccatttttatttcctaaatcct

SEQ ID NO: 48126 - DNA, 815 bp, Oryza sativa
ataattagttttgtacttagccttagcatataagattgtgtagggttctaatatatgccagttagccttagcatatatatgactatttgagttttagtataagattatttgagttttaatataagattattagatttgtaattagacttagcatataagattgtgtagggttctaatatacgacagttagacttagcatatatgactatttgagttttagtataagatcattatagttttaatataagattactagatttgtaattagacttagcatataagattgtgtagggttctaatatacgatagttagacttagcatatatgactatttgagttttaatataagatcattattgttttaatataagattattagatttgtaattagccttagcatataagattgtgtagggttctaatatacgacagttagacttagcatatatgactatttgagttttaatataagattattatagttttaatataagattattagatttgtaattagacttagcatataagattgtgtagggttctaatatacgacagttagacttagcatatatgactatttgagttttaatataagattattatagttttaatataagattattagatttgtaattagacttagcatataagattgtgtagggttctaatatacgacagttagacttagcatatatgactatttgagttttagtataagattatttgagttttaatataagattattatatttgtaattagacttagtatataattattgactagctagggtcctaatgtacgtacttagacttgg

SEQ ID NO: 48127 - DNA, 678 bp, Oryza sativa
gctcgagatatggccggtgaactagatcagtgcttaagtttcatttagatctctgcttgtggttgcttttgcttgtgtgaactagatctgaggttaagtttacttcatttagatcagtacttttattttcttttccttgtgtgaactagatctctggttttgttcgtttatgtgcacattattgtctttttaggaacaatatgttagtcttttttatgtttttttcaatttattgtttggattcatttgttcaattatttgttatttcagtagttagaattgcagctagttatgaaactattagcatattaagttatttgtcttttgttatttgttatttgtcttttgtctttgtatccagaagttgagtactagcagtcacatattttgtatattagttggcactgtaattctgtgaagaataaaatccaaataggtgaagatggcactagcagttatttttttagactagtccattttcattgaatagtctgcaatatagagcgcgaacggcttgctcggcagcggtgacagtgcctggagcgcgcgcggcctgcttggagggagttgttgaggaggcggcgatgtcatacgcgtaggcggagtggattgcgttcttggtctcgtcgtggctgtcggcgacgtagacgacgccgtcactgctgatgcagccgaaga

SEQ ID NO: 48128 - DNA, 962 bp, Oryza sativa
cgtgccacatacaccacggtatacggacggaagtacgtaacatagtttccaacccatcctagccatagacaagagtaccgacccaaccccacttacggccgaaacccccgggacaggtaggcaggattgagcccctagcagcaggacaccggccttgtgccatgacatctcgactaccgggccgcagctcgtgtagccttcatttgtcctagagatgtccatcgaccccggacttcgtccttatatggccgaggtgctactatcaaaaccatacaccccgagcccagcctaaaaccattttgaggattttgaatagagggggaggtgtgaacccaattccacaataatccaacaattccatagtgtccaggtgataagagtattcccaaagtctagagttgtaaaaccacataatgttgcctaattaaccagcgaagcatctacctaaaatcatactagtggtaccatgagtagagtgtccactagttggggttttgtttattctagggtgaacaggggaataatatcaataccaataataaggtcataacaaaggtaaataggcatggctagacaaaacagtgataacgtgagaatttaaataaagcgataatgcaataatttaaatcaaaataattttataaactgggattcaatgtgttcgaggatgatgtgacttgccttgctcgctttcccaaacgtcggcttcaacctccacgaagagcggatcttccgaagctgcagcgtctacacgaccaacggaaaataaaaggcttttactctaataaactccatataacccacaagaacaaagaacaaaaatgggttcttgacttcttaaggaaaaattaaagacttgaacggtccaattccgagttcaaatggccaagttatggccatttgaagtttatatgctctttaaatgaatatttacgaatttcttcatttaaattttaatttaa

SEQ ID NO: 48129 - DNA, 761 bp, Oryza sativa
  unsure (1)..(761): unsure at all n locations
ctggttcatctactnnnnnnnnnnnnnnnnnnnnnnnnnttctacaaagcatcagtccatggaaagacgcatttgagatgacaaagccatacaagtcaataaaatccacatgaataattgctgatgagtcaatgactcacaacagcttctcaaggccacatcatcacaattacagtgttccatttgacataaagaaatctgaagaatgcatccatattttcagaattatgcggacaaagactgtgaggtactgaggtaggcatctattaccttgtattcttcctagtctcagattccttcacatgttcatacaaaatgcattcacttgcaagttaatttcttcaaaaagagaaatatttagggcaacaaaagaactcaagtcacttcatcagcttgagagaatggttatttgcacaaacaacttgagcaagccatacgaccttaacatccagtttaatggtttgtaaccaattatttccttttttttaagaaagggaggtttcaacccagtcagaaatacatatttaaaaaaatgaaaagacatcagctagtgatcaacctagaaaattaaatatcaaacagcacaggaggtcaaacaaaaggaataagcctaatttctgatattgcaatgctctgctttctgaaatttctcgtacgaaccaaaaaacaaatgcatgctctaagaccacccgcatggtaaagttaggtgatatctataaaacatgtacatctcagcaatagactagattaatagtaaccat

SEQ ID NO: 48130 - DNA, 730 bp, Oryza sativa
ttatcccgtcatggcctcgggtcatgatacttagtcaatccatggaccttgtactaaacctttgtatttcatataaaagataattgaaccaagaaacataaacacaaaattcataaacctaatccttatgtctcaacagtcaaaagcccaaagtaactactttgcattgtacatctggaaattattttataatcagaataagaacacaaagaagcatacttcggtgccaacatactgaacagagcacaacctgcgtatgtgtattgatcaaaagacatccagaacgctcagcagctaagtactgtagcaaagaacatcccaaataactgcagagtagaactctacaagaggtgaacaacagaacaaaattaatcagcggtgataccttttcaatggaccattgctttgaaatacagatctgacgcaaaacttgccttggagcggctctgttcggaagggcttgttaccaactccctccgcctcgttttccggacgcacgcttctcaaactgctaatcggtgccgtttttacaaaaagtttctatacgaaagttgcttaaaaaatcatattgatccatttttgaaaaaaaaagctaatacttaattaatcacgcgtagggatgaaaacggtcggaaacggtcggaaaaaccctctaccatttccattttcattttattttctcgaaaatgatgagctacttgcagtagaagacgaatcaaccggggcgcgc

SEQ ID NO: 48131 - DNA, 3377 bp, Oryza sativa
atctccttctttcaggataatacacgcgctccgggggaacgcggctggtaaccttgacttgtcctggacaccttccccttcccttcggaggggcattcatcgcggcgcaagccaaacggcgggggcgcgacgcccgaggacgcaaccatgtggtttttcgggccggtgtatacttgctccgcggtggagatggtttttgtttgttttacgatatgcacgagaagcaggagcgcgcataggtgggaaaggcattttcgacataccagaacgggaaaagggaggggggggggggtcgggatcgtgggccccacccgtcatgcacacgtcgggtgaaccccgccggtgaagaaagtacgcgggcgctcaccggtgcaaggcaagtaacggaaggtggggcccacgagtcagcgcccgatggttcaggttcagggtcgggtcaggtcaggtcaggtctcccccgggtcgtcgtcgatcgggggatggatgtcagtgagggcgaacgcacgaaacagccgtgacaaaaaaatgtgtgaggcgtttgttggaaaagaccaaagctcttttattactcgtgctgcactattgcactgtttagttcgaggggttgaaaagtatcatattgatatacgtacatacatttaaagtattaaacgtaaagtaataacaaaacatattctatctataaactatgagacaaatttattaaacctaattaatttatcattagcaaatatttactgtagcaccatattgttaaatcaagaagcaattaagcttaaaagatttgtttcgtaatttacacgcaatgaaaagtttttacgtagaaactacaaagggcctacatatgcatgtgctgtttgccccaaaccgtcattcgtaggtaaccaacgtagggggggttgggtggtgctcagcacttcagcagtcagagcaagtttaatagcgtagccaactattagctctaattcatctatagccaatctaatagcttattcatataatagttacatattacactattaatatctggtcccacctgtcatacacacacttcttcttaaagtccgtgctacagctggctacaaatctgtagcccgctgattttctctttcctcatttatcttcttaaaatatgtttgcagttggcttataggctgctattgtacctgctctcagcagccagttcaaccttccccgatgaagatcctctgaaagtactagctggcccaatgaatgatactcctacatctcctactcctatctggtcatggacgacacacaggccaaagagccagccatcatcattggcttcaagaacaaagagggtggtagcggtaacagttaatcctagtgttaaggatcaagctaagtgccagcatttttatgcgttttcatatacaactggaactttactgagtacaggtatgatggctgatctttattttgtcatgtattctaggattctaattatgtacaactttgttaggtgattcatttaatatttagactgtacacagccacagagatttggaaagtttgacttttaggaatttcggattgttctaaaccaaacttgtgaaggctgatttcacccagcaaaccaaagagctataatccaggaatgattgtttccacaacatggagatgaactgaccaaatcagggtttacaaaaccgtttaaagcaaggaatgcaaaactccgcaaaataataaaatctgtgaaataccgagtggcatgcgcgaaaaataacaacaaaatagtataaatcaatatttgaatccttgtgaccaattttgagtgaacgaagaatggatttcgaccaagaaaacattttgacctttgctatgatttggacacccccaattgaaacattttgacctttgctatgatttggacacctccaattgaaacaacacaattgatagttatgcaattatgtaacatatgtatagaattaaaattattatgacaatggttgaaaaagtttaaagtccatgccatcatcaacacaatattataatgtctaacaaacatgaagcaatataatataatataatataatatgacaacagaatactcactccatccaaaataagttcatttttcacctctcccatttatcccaaaataatttcacttctttttctttacctactcttggtccacaaattgatgagtcttattccttcaataccacttacctatctttatatacatacccactaatactacttttcatattgatgagggacactttgatctttttcactttatttgagtacgtatggttaaaaatgaagatatttttgagacggatgtagtattataatggctatgacatcaggaatataatagtaaaaaaatatttgatataacaacatatatcatgggggaatatccagtaaaaacctcgtacaagtgaaaacccgtgaacaaccgaacctaaaattttataaattcatggaaaaaaatactggagatagccagataggtataggcatgagatacatttccaccaaatcttaatttcaaactcaacttcttttggggggtgaatagtgccttggttttcaccagatatttctctatataacatactattgtctttttgcctttttctttttagaaaatatttgattatgttgaagtgccaaaattcacataaatctacttttaaaacatattttgatgcctcataggattaccatgatcaatgtttataggatttttctcaattttttttatattcttcaagtcaaattcaaaacttgcaaattatactaaagtattgtagcgcccgttccgtcgtggcgcctagcgggaaaaattatctcttaaaaaccctaattgcgaaatttgtttctctgattgctgtctagtgtccgtgccatctcaagatctcaatccccgatctatcgtcgagttcaattccgaatccaatccctccaaatcaaatttctccgcaaaagtctagtttgcctcctccgggttcgatgggccgatttccgctcggcccatctctcccccggccccctctccccgggcgctctctctctctctctcgcgctctccccccccgctcagcctcgcccgcacgccgcgcgcgcgtgcgcgtgagccgccgcgccgagcgctccctccctccctctctctctctctctcgctttccccggcgcgtttcccccccccccccgctcgctgctcgcgcgtgcgagagccgcgccgagcgccccctcctttcgcgcgagctccccgatcgcaaagccggagccgcgcgccgtcactagcgcgcgcgcccgggtggtttcccgcccgagccgcgtcgtctgcgttgtccgcgtcgcccggtcccggtacccagccgcgccggccgttg

SEQ ID NO: 48132 - DNA, 1418 bp, Oryza sativa
  unsure (1)..(1418): unsure at all n locations
ggagagatgagaagttagttatgataaatgagagtgaggggatgtatagaaaaggagtaaaatagtagatagaaagaaggattgataatgttaagaagaagaagaattagnggaaagaaggatagaaagtaaaaaaagataggaaagtaatgtataagaaagagaatagtagagaaaaaagggaaaggagagagaaggaggaggaagnaaagaagagaagggagaaagagagaagaagaagatagaaaagaaaggagaaaaaagagaaaagagaaggagaagaaagaaaggaaagaggnaaaaaaaaaagaaagagggaaggagaaagagaaaaaaagtaaanaaaagaaanaaagnaaaataaanananaannnnnnnnnnnnnnnnacatccccggtcacatctcctcctagcttgattctttttgggacggagagagtacctcataactatatccaacctaaaaaaattcttagtccagatacattgtaataggttgtgtctaaccatctcctaagttaccatatttcgggacagagggagtatactttggctgagtttagttccaaattttttcttcaaacttccaacttttccatcacatcaaaactttcttacacacataaatttccaacttttccgtcatatcgttccaatttcaatcaaacttccaattttagtgtgaactaaacacaccctttaagacaaatatagtagtaagtatcatgatcattaggtatttatggcaaaccatttccataactagcagaacggataactaaataagcagaaagggtaaaagcttacaggggatattccagtgatgttcaatgtagagtttgacttttaggacaaccttgctgcataagccaaaaactccaacaagcacatcctatgtatagtcatgtatagtcctggtcctgtttggagagttgagaacatcagttccttcgtaaatgaatccctctcatgagagatcaacatgatacagtactgactgatatataaaggtcaaggggaaaatgaagtcaaacatggttaggtcgcaaggtatgtcgaaagcgactaccgtgtcaacttgtcaacatttttatgtactcagcaacactagagctttctctcaagtgggggaaaaaaaactgctttgattcatttatgtactatatgtatgctagctatatgcaccatcccgtacattcctcctgtgcatcagcaacaaaaatttaccctgagcagcaatttcttcgtcataagtctcgagcactgttgcaacgaaaggggagaaaaaaagaaagagagagaaatntggtccatacttccatcgtctcaaaatataaaagggtttaagatagatgaaatacattctaatactacgaatctagacggataggaatatatttcttagcttaagctttgt

SEQ ID NO: 48133 - DNA, 636 bp, Oryza sativa
ctcataggggtatatgcatgtgtgtggtgaaacttgaccactcggggacaagtcttagacttgacaaattctttcaatgataggcgacgtaacagtcgacaacgaggtgcgtggcaacttcgtaaatgtcaaaatatgtctacctaatctctcagaagtactcataggggtatatgcatgtatgcattaatagggggtgagtgtgtgcgtgctgtgagtttttgcgtttgtacttaggttctaaaaaatatcaaacattatttattgtttctcttttaatttaagagataaaacaatagggagtggacgacaatattgtgtacatggaagggtgaggaggtggtgaagattttatttttctatttttctaaatgatttaagtgaaagccggtgacagggtgtttcattttttctaagaatttctatggtttttcctgtttttttatagaaggtgacacatggcaacttaagattttttttaaaaaaaaatagatctaatagttaaaaataataaatacgtcaatttaattactatttattacaattttatgacatattatacggtgatttatgagcgctctagagcgtgtttaatttatttttgttacgtacaataaatgatttagtataacataa

SEQ ID NO: 48134 - DNA, 896 bp, Oryza sativa
caacgagagcatgaggggaggaggatcggatcgccaggctcacctggcaacggcaaggccgaggccacgctccgatttggcggtggcggaggtggccaaatctggaggcgcacgcgcggagggaggagaggagaggaaagaggtggtgtgcgtgtgtgcagaacgagtactagtagaagctagaggggaagggaagcgaggcagttgggagtattttatacgatgagctggatttttttggtttctttttgtggcttttattcaacttttttttcttcaaaattgctatgcaaacaacctaacttttcgccgttttttccttttgggtttatggaaagattactttgtctttctttcaggtttttagaccagcatgcttctgtaacaccctgaaaattcgaccgacaaaaatctaaactctaaaaatatgggccttcaaaaactttttaaaaatattgcatcatgccaattttattcaatgatttgattggattttgatttcggaattcatcgatcacaaataagggaaagttaataaggaattaaccctgaaattagatttggttaaagaaataaataaattataatttaaaataaatattatgtaaggatagaaataaataaaatatcatcgcggccgtatttgtatcaattagatttaaatgcaatggaacaagaattaatcctaattaaaaattcaaataaataaaaaaataataaaatatgggtaatattaatctagggtgaattcattggttggataacacaaatattgagtaaaattcatatatgcaaaaattaggaattatagaatcaaatttataggaaatagactaaaatgggaaaaataagaaaaagtcactattcattagcccctaagtgcttgatgtgggcct

SEQ ID NO: 48135 - DNA, 848 bp, Oryza sativa
cacaaatctaggcctgtgaggaaagtacgaacatcagtttggggcatgtgcaccataactaatgagtcatgctgtgcagccaaggcagtgaggtgtacactaaaccacaggtgcacacaagccagtcaccacattgctggctgtcatagcgcatacaatgctcaataaggtgataaacactactaggtggtcagcaaggttagcagctacaggcacctaacaccgcctaggatcaacttgacaaggggtttcctagcaattaccaaacatatcacataaaataaagacaattaaaatatcagcactagagctaccaaggcaggtgcaccgccaaatgcaatatcacagccgagacatagcacatagctcctaaaacatgcgccgtgcctagggccaacttttagaacattaagcacatcaaataaggatggcatggcattaggtgtttaatgtgatgcattttacaaagtagcttattgtgtggtatgttgtgtcctactggtatctgctggcatagctacatcctaataaacaaaactagcactgtgactcacaaagaaccacaattgggacaaaatttgctcataatagagatgagaaggttcaacaagaagatagccgtaacgcgatatgtgaacatttccctcctcacccccatcatattcattagtcactctactgctttccagaaagaaaaagaaccttcccttcccttctctcattcaagagaacagaaatttagattacacatacggttgtctaaaagcagacaccacaaattctagcaccaaggaatgctgacccttggggttgcccaaaactcccatgatccaatcactacaagtcgg

SEQ ID NO: 48136 - DNA, 675 bp, Oryza sativa
tggtgaaagtcggcataccgcaaggtggtcggcaatttggccctcaaaacaggcagatgatagtaataacatcacgtttgcaccaagtttggtatggtatggacgggcattgccagatgattgtgttgcaaaggttgaagtttaatgaagcatggagtctctttgaatcaaatgcgggtattagaataacctataacgtgcaagtcaagtgtcatgccgagagcatagtgaacaagtgtggaggccttccgcttgctcttaagattgttggtcaggctatggcatcaaaaggaactgaacatgaatgggaactagctgtgaatttgcttgaacaatcacaattccacaaggtcccggatgtagaaaatgatctatattctgtactgtacattagttatgacaacctgccagatgagaggacaaagcaatgctttcttttctttgccttcgccagctatggaactgtatgcacagagtcctacacgaagtttttggatgggccatggattactagatgaagatgatgatattggaaacagcaatttgagaggttactcagtcgttccttgtttaaaaagagcttgtctattagaaggacatcctctaggggagaagtatttgaggatgcatgactgcatccaagatctggccctttggattacagcaacaaaaagg

SEQ ID NO: 48137 - DNA, 6310 bp, Oryza sativa
cttcaggtttcagtcccctcacaaattttgttacaaagaaggttttatcatagcttctattgtagactaacaacaccctatgcatcaactccacaaacttaacataataatcatccacactcccacactgttttagattctccaactcttctaggtgttgctgatatttatcccttccaaatttcccattaacagctacaaccagctcagcccaagtttccacaggatgtaaggcctcataggtttacagccacaaggctgcattcccaatgaaatgcaaagtagcaaaggatgaccaagagttgtagggaacctaatacatttcaaaatacttctcagagttggttttccagagttttgggttatctccatcaaactttgggaaatctgtcttaggcagtctagggctggcggatctaacactaaagctggacccccctactcccttctctgatgtttctcccaactcaaaattaacaggcgaatggtggaattggggcttactcttgaccagggtttgctccttagccttgaaggcttcggatgcgtcaccctggtgagtcgattcgacgccgtgcctacgggcgcttgtgccgcctgcgatggtgtcgttggcgtcaccgattctagctgcgtcaccctgaccgcaatctcatccaccggcttgttcagctcccggattcctgaatccacgcatgggatccatttctccagaccttgaagcgatccgaggatgttgttgatacttgttgtgagctccaccaccttctcgcccaacacctctgcttcttcttccgctgcccccatcctctcggttagggttggatttgccttcttcctcgccagtgcgcacgagaaccgaagtgctctaatactagattgtcacgaattccatgactcttccagcgtttcgcctagttgaatcaggatttcgctagagatttggattagagattggggaaagggatgaattgaggagggaaaggtagtttagtggcatttgatttctttcattttttcgataccgtttacagacaagggatttccccttaaatggtcacatgccacagcacacacacccacctgacgcgtctgccgacccaacacggcacgtcagttcactcacacacccttggcccataactggcccacacaggctagccttaatgaactacagttgtcatgacaaataccttacattcatgccatcctgtacacttatactcgttttgaattattcttttaccaacatacccttgtcaatttgatttataaacttgcctgctgagtaaaaaaggttaaaaaaaaagagaaaaattcagctgctccagcccttaccctatcatagagagagagagagagagagcgagcggccacagcaccagctcggagagcacagccaacagcggcgaggtccgcggaggaatgctggcggaagggcacaaggcgatggcgcgagctcgccagtagaactggcggcgaggttagggacggtggcggcaggcgcgagctaattcggctgcgcaacctctgcacacgtggcgaacaaatacgacggcgccaatgcaaggtggggctgcggcacgatgagcagatccggcggcagcaagcaaggtccaagacgataggttcagcggcggcacgagctcggggaggatggcgggtcacgacgtggaggcgatggccggctcaggcggtggtcgccaatggcgagccctccacaccagctcttctttcttctttttcttgccttttctctctataaattatttttatcctagattttctttgtctctagtccgacggcaatgaaatgcatatgtggcagcaactatttcaatttgggattttgatccatatggcatgtaaagtacatgaagggtatttcggtccatacgaaaatacaatagcaaaaaaagggtacaaaacaggtattaaggttgcaagatggcatggatctaattttgaaaatattgcaatggcatccttccaattagatgaattgtagtgatatttttcaaaaccgttaaatttatgatggcatagatccaattaactcttgatttatccaggtaaggactcctttgaatcaaagtgttgtagagaaattttatgagattgaaattctatagaaaatttttctatttggctctttgatttaaaggattggtgtttttcaaatccaatataattcctatagaatggcttattacatgtaggtttgaaggaaatttagcaaaaggtccaacctcttggaaaaaaatcattttagtctatctgtctcatctgatttctgtgttttttctacggctcaattaaacgatcattcatgtgttttccatgtgttttgcgatactctgttttacacttgcattactgtcagaatcaaagtttttctattcctctattttttttcattcctacggttcaaagagacgctaagagtatgaactaggaagtcttgattttgtttcatttatatatgtaaaatgttgatttgttggtgagatggtgagattgaagggaacccttccacattaaaccaggttacaattgttgtacataatgaaatggaatcagttggcatgttaggatagatagctttttaagtcaaattgttagctcaaaatatgcatgagtgtgagatttatatcttgctggatttacatgagtattaatacatatggtaccggagaaaatgccaaccatatcaaatatccggttggtacctaagatttgagaatcccatgtgaaatataaattgaggcactatatttaaaaacttcctagaaacaaacaatagattagtattttagaatcttttatcatgatgtagtgatttatttttattaagcggaaaaatataatcctaaatgcttggaacgtacatttatatcgtcaatatgagccatatctattaccattaaacatgtatcataagctaatacaacaagctcgaaaaatctttaaacatactgaaatgcattgacatgaactaaatatatactcctacctccgtgcgagaatcggaggtataaaaaatccgaggccttaattttttagggaggctgtttagtgacccctgtcaaatagtacttgacttgtttctgacactcataggttaagcatgcatgaattcagaactagtaatccttccgttctaaaatacttatatttttcgaatattgccaagtcaaatattattaactttaactattattagaaaaaaataaaaaacaatcatgtaaaatgatgttactagatttatcattgaacaaactatcaaaatatgtaactattttttaaaaaatattttacttttatagatattgttggtcaaagtggtatctcaaaaaccgtgtccaaattcaaaaatgcttatatttttagacggagggagtagcctggatctacaggatagtgggagtgcaagcccgtagttaatcttgaaaaatagaggttattgggtatcccatatacatatgactaacatatctaacgagctactccctccgttgtttaatatatcacgtcgttaactttttaaaatatattggaccattaattatattaaaaataattgttatttattttattgtgacttaatttattatcaaatgtagtattctttaagcatgagttatttttttatatttgcaaaaaaatgaataaaatgaatggtcaaatgtttaattttttttacttatttgtgtagatttaggttcccttcaatataagttgaataataaacaaatgccccgatcggttgagctgtggttggacggagcaataaaaaaattaataagcaaaacctttatgccaatatcattcacgattttatagtcaaggctagaacatagtatgatgaaaaacccagaaaatgagctttctctcaaaatttaaattttcggtattccattcagaagtgtagtaaaacggtcaatgtgttgacacgtttcaataagatctgaaggtcgcgtgttcgatccacgctcaccgcacctcaattttcaataagttaaattatttaaattcccttctttagggttgaaaattaaattgcttacttaagtttttaatttttctattcatcagtgtcgaaattaaattatttccccaagtttctaaaattttgtttcttcaggatctatggtatttttcagcttgcaattttcatcaagttatattattttcctaggattttaaaaatttcccctcttcagggttgaaaattaaattgcttacttaagtttttaatttttctgttcatcagtgtcgaaataataattatttccccaagtttctaaaattttgtttcttcaggatctatggtatttttcaacttgcaattttcataaagttatattattttcctaggattttaaaaatttcccctcttcagggttgaaaattaaattgcttacttaagtttttaatttttctgttcatcagtgtcgaaattaaattatttccccaagtttctaaaattttgtttcttcaggatccaaggtatttttcaacttcattttgtcttcaacgtagttaaattgttttcctaggttttttaaaacttatcttctttagggttcaaaattaaattggtttcctaagtttttaatttttcttttcgttagtgtcaaaattaaattgtttccccaagtttctaaaattttatttctatagggtctaaggtatttttcaacttcattttatattcaaggaccaagttaaattgttttcctaggttttaaaatttctgttcttcagggttcaaaattaaattatttttcaaagtttttaatttttctttttgttagtgttgaaattaattttttttccccaagtttctaaaattttgtttcttcagggtctaaggtatttctcacctgtcgccgcttcggatttgtatgtcgtcaccgtctctgctgttccacgccactcggaaaagggtgccaccgtcatcgccgagggagtgggccgctcggagccgctggacgcaccaccaccgccgctctgggtcaccgccttctccgccgctctccgggtctgctctctctctctctcctcgttcttgagtcttgacggttgcatttggtatatgaaaacacgatccaaaaacaagttaccgtgattttcgttttttgttgaagttagtaaacaatcagataattacattgaggcgagcttcttttatgagcttttgaataaaatttttgacgaacggttgctgtaaattattaactatggaatcaattgtatgatgctcctattgcaaaagtgaacttgaagaaaagttgtgctatgtttcagcaatgtgacaatatcacttgttttactgcaggggttgtgcttatatatatttgttttcagaacttttttttaaaaaaaaggagactacttctgtagagttttgagtcacatcagcatggtgcgccaattttgcatttgtttagaaaattccaaggatgtgcacttttttttgtttgtcagctagcatttggccaacacatccatgtttctatgcatctcgagttcaaaattttctctccaacaaagatccatcctaactatcacaaacttgcaaataaaatgctgcctccatgccacatcttctccttttttttgtggactgaattacttctgtatatgtgaaagtatgattggcattctaattctgtgctgttttgagcttttcgtcagaagcatgcaatgatattatggcatactccttgaaatcctgcgaattttattaagaaaaatactttcttcctactgttgttacactagctgtgtggagagaaaactttgtcaaaagctaaatattacggtaaatgttcttggtaaatcttttttctggcattatagtatgcaactgagctatgccagaaattgcgatcacacccaactgattaactgaacgacatagtggagacttaggttaaaggattagaaatcagagtaacttagaaaacgatacctgtccaatgctaatgcagaggcttgctgaaagattatgtagagtttttacctgaaagaatctctacagacactacaacacgttcatgtattctaagagccttctatggtttttaaagctcttgtcctggtatgcttgacacggagctgccttgacaaactactatcacatctggtgtgtggttgctatttgcttgttcaagaatgtcgggaaagtggagatccgtggagaacttacggtgagtttgctattcccatgtcatccaatgaaccagttttttacttcctccgtttcacaatgtaagtcattctagcatttctcatattaatattg

SEQ ID NO: 48138 - DNA, 2873 bp, Oryza sativa
gctagaatgacttacattataaaacggagggagtacttgataatgttaatatggcatgggaatcaatggtctcttcctatacaaggcagatcctcaatggattaacttatctgcatctataccaatataaaatatatctgtttcatcacataattcttttctagccctgcatttctacagcctacatatggtataattttagtatcatggttgattcaatctgtagagtctagcgtgcactgcagaatccagtgtgcacaatctgcatacagtataattcaattgcaagatcggtgttctttgtaggcatgcaaatcgataagaacttattcatgtgagttgatggtcttaacataatgacatttgtttatcagcgtatgaattatggggaagaagtatggcatgttgcccactgtttttcttcttattatatactagatgagggaaccaaagtggatcaatacgccttcagaattttgtgcatctttcaatttgggtaagatgatattgaaggaccagaagccaccaataaaatagaagtgcttatcttatccatttcatttactggaattatacttttgctttttcattctatgcagagagcagagtcaaactataggattgcagttccggtttcatttatacaagttaaccgtgtgcaatttaaagcaactaaattttgcacatcgttgcaattatcagagacacctgattggggtttcgaaagaattatattagaatagttttgcctcacagatgatttaagaaacttgtcaattagaccttaaatgttttcgtttgagattggtttacattcggcaccttaccttccatggtaatctgagtccatgtccttttaaggaatagcataaaagctaacactccctattcccaaacgatgtttgacaaatgcttgttaagtgatatattgtgtgaatcttatgatcacctgtttatatctgcaggttatatagattcatgtcacatgtgtatgtcttcagaatatctatatttatgtcagtgtctgtttttagatttatatatatttaggttacctgtgtatatattgagatttttcctaattgcatatcattacaaattacaaatatatttaatgaattttatatggatagtgtactctgttcttgttccatttttttccaagaataattgtcattagaatatgcagatttagtttgggaagcaaaattctatattctcaacttaggctttgttttcctttaggtggtgatatgggccctgtttagatcccaccccaaaaattttcaccatgtcacatcgaacgtttacgtttgaacacctgcatgaagtactaaatataagtttaataaaacaactaattgtacagattgcgactaatttgcgagacaaatttttaagcctaattgctccatgatttgacaatgtggtgctacattaaatatttgctaatgacagattaattaggcttaataaattcgtctcgcggtttactgacggattctgtaattagttttttattagtgcccgaacaccccatacgacatcctatataatatccgatgtgatataccaaaacgttacatccctagatctaaacaggtagctgagaggtagctgagaagatccaggccacttaatttagatgagaaaaaaaaatatctcccgcgagttcctcatggcttatcatagcaagaccaatggtgccacttgtaaaatccagatttctgttttaaccggcttggcatgcactacctgaattaagtgagtaaacatgtccatgcaacgtttctcaattcaatgagcaggaagacgtgccatgcacatgcataattactagtaacaataaaattctcacttagtctgaagttcttaacctaggtcatgaacaccgtgttgactgttcatccgaaacttgtttggattgatgaaaaattttgccaaccccaaatttttggtaactttgatagtgttgtatagttatttgatttgctaccaatttatgctctcactagtataaattgtattatatcagatttggtgtcaaaacttactaatgtttaggcactactaaaatattggtaagataaggattggcactaaaacaaacaagccctataataatcacttggctttccttttgtgaggttaatttcttggttgcagcccaacctctccttgtggcccgtgacctattgatgcctcctcctaataataatgtcccagtcatgtcacatcttgttcgtgtaaggacacgtgatcagtgtagataacttctttgtgctacctcccacaacatttgtttcagtcgtgggaaatactcatttcgtcatgaaagaaaaataaccttatgtctagattcattattataggtggtacgtgtccagtagcagtaaatacgtcttcatcagtaacagtaaagcagagcattcccgtgtgccggaagaggtcgccgcggctggagacaattcagccggtgttctactggcgactggcctcctcgagttcttgatcttggcggattgccgtccatggagaccacacgaagcgatggcagcatcatggtggtaggggcggtcgatatcgattgcccccagcaccggctgtgcgggtaccgcgacttgatacggggcgtctccggcggcggcgccgccatgtcgcgctggccggaggcggcgcccttcgtcccgcagatcgccagtactggtggcgatggtggtgcagcggtggccggcggcggctggtcgagcgggagctcaagcccggctccatcgtcttgcagctcctcctcctcttggcgcgagggagactgctgcaacgacgtctgctggtgttcttcttccacggtccacgagcttcgcagcatcgcggag

SEQ ID NO: 48139 - DNA, 1078 bp, Oryza sativa
ctaagtacgtttgtattgttttgatagattttccttagttaaattttattaacaatagttttttctatttgatccctagttaaattaactagggatttttttatgttatttagtcgattgaaaatttggattgattttaaatttcagttgaaggatatcaggaaattgacactggattagttttaattactgtaattgatttaattgcaaactgcgatataccgttgcattttgcacttcaaaaaccaattgattattcactaaattaattaagcgataacagccaagatattctgttggtaataaatgctgtagttttttatctatactatttaattcattagcccgtaatacgatacggcttaaacttgagctttctaaaatatcactaatattttttatggtattatttttcatcttttacgggttgttatctaaacattgattcaatatatgctaatttgttgcccattttactagaatttagagtataattgacactctttttgccttataaacgcggatattaatgaatttatttaaacattttcacaaaacacctttttggtcgcaattagtctttggagtaatggcaattttaacgttacctgaatttcaaacaacagcagcaagtgaaagtcagcatgagcaaaatactattattaatcaagcggctatgcaatctgcattaagtgtagatgaagtcgaacagcaagcactttttgttgaattaaaacaaatcattcataacattgcgccacaagcggtcattttttaagattttttaactaaatgctatcgctttgaggtcgattatcaaccacctattcgagcccggtccttttatttaaatctaaattaatcaatatttcatcatcgcattaaggtgataggacactattgcgcaattttatttaaatattaaagatcctttattatgatttcaaaaattattacctctattttcggttcaagtaacgatcgcacgttaaaacgtttaaaaaaacgtgtggtacacattaataaattagaagctgaatttgaaaaattatcagatcaagaattacaagccaaaaca

SEQ ID NO: 48140 - DNA, 714 bp, Oryza sativa
attgagggcctattattccgcaaggttcattccaaattgaaaaaatcgaggtttttccccgcccaagtgatcacgtggtagttttggcaaaaccttacaaatgaaggagggggccaaattaacgctcagtaacgacacgtaaatttaacgtatttgttctttatctgacaaaatgcgttattttaagaatgggcataagccaaattagggctttcagtgcggggtttatcatgggattttaaggatgtcacgcatattgcagatttagcgaattaatcacagattcagcaagtccattaagctgaggcgttgggtatcaagcaatggatcggttattgcaacgtttacaggcagatatataactttatccagttaaaggtagcaaattaaggttaatgcggagcagaaagtagttaattgtgtaaagttttcttagttaaataatcgttttgctttgttttattgaaataagtccccataaaggtgttggtcttttatgtttaaacacaagtaataaataatggcattaaattttagttcagttgcattagaaagtacgcaagcaaaaggtggttatggtatcgggtgactaattggtcatctattcaacagcagatagtccggtacgtgtacattatacgggataatagaaaaatggcacggtatttgatagttcggtacaacgtggcattccagcaaaatttccggtagggg

SEQ ID NO: 48141 - DNA, 622 bp, Oryza sativa
ccgatgactaaacgtaacggcaaaaactgacaattttggggctgtaccgcctatccggattgtcagcatattgagaacatcggcaaatccacggcacgacgaaaaggtaccgctaattctcaaaatattagccaacaaattgccaatttaagaaagttggttcaatgagtattttttatgttatgattgagacttaaagagccgcttagtgaattgtcggttatcaattcacaaccagccaaaatattcccagcatactgaaagggagttctattacgttacaacgttgataggtatgccacctaatattttgagtaagtctctcttactcacaccttttctaaacgctcgccattgcgaattcttaatgatatctgtttacttggtatgattaagaattcgcaatggcttgctactttttccatacctgagctcccaggtgaaaaaaggagtgccgtttgtgtcaaaaagatgccacagcttttaccgattaaagaccacagagtaatcggataatgcgaacgtaaaaataagaacattgtgacgaaaatgcgattgtttttatgcctcaatttatattgcaccgcttgatttatctttagttaatctataatcaaatata

SEQ ID NO: 48142 - DNA, 560 bp, Oryza sativa
ctttgtgaatgaaaatgctcaataaattgcaaggcatcaggataatccgcacaccaaccagcacgactcatttggaagtctccgagattacggcgatgtaataggtcgtcccacgtaacgcctactggtaacacttgaatcagatctgactgacttaatgcacgaataacttgatctgcaataacactatgtttgctttgttcatcataaagtaaatttatcttaaatggattatgttcactaatatctgcctgttgcaataattgctcaattaaaattggctgccacggtgtggctcttgtggttcgcatacttttaggtaagacagaaaaactcgcaatgccatatttttgtggcactcgtgcagataacaccattgatttaataacttgccgtatttcttttttcttcaattgcaaatcagcaaaattaaattcatagaaataagtacacaaacgtggaaattgccaaatattatgttcttgactgactaacggattttcaatgatatcaaattgtctaatcgcctgtagctcattaattttatggtattctacttc

SEQ ID NO: 48143 - DNA, 622 bp, Oryza sativa
tattgttgatgaaccattaggtggtgcgcatcgtgacgtacttaaaattgcacacagtttaaaacagcagattttagctgatttagcagagttagatagcctcaccacagaagcattgttagaacgccgttatgagcgtctcatgagttacggctacgtttaaagtatatcattaaataaagcggtccttttgctaaaatttttggtaaaagtgaccgcttttttcatctttgcgattgatggaatacggtacaatcctgtatctatccaatatacaaagcggtcataatgttaaaagaacgaattagtaagaaagtgcaagaattgataagagcaatcgcctttttatttaattatgtattgtacacataaatgcttgatcttcattgattttttgcatggctaataaactatacattaagccaaactgcttttcataatccaaccatttggttcgaatagacggctgatcagaggttaagaagaacagatgatttatattttctgttggataattaatgtagctagtgctagcaaagccccccattttattgggcgtaaaacctagcattgcaaagatctcaaatggaatattagcaggcaggaatattgcatcaggaaa

SEQ ID NO: 48144 - DNA, 523 bp, Oryza sativa
tggttggcctttgttttgaatagtgatagtgaagtgttcggtgccgatccaactaaagatttggaacattttttaggttataccgccattatcattttctgtattatgtttttattgggaattgtgttgcaattactgaataaaaaccaatatcaagtattacgtcgcccattagggctatgggcatttgcttgggcattattgcatgtggcgagctatttagtgcttgagcttagcttagatgtttcactgtttttcagtgagttagtacaacggccttatttaattttaggcgggatagcgtttaccattttaatggtgatggcgatcacttctattccgaaagtgaaaacagcactgggtaaaaaatggttcagcgtacatcaatttgcttatccggctattgtgttggcagccattcattattattggtcagtaaaagatgacacgcttggcccgatcgtgattggtataatggtaactgtcatcgtcttatggaagtttgggtaccgagctcgaattc

SEQ ID NO: 48145 - DNA, 627 bp, Oryza sativa
catgctttctcgatgaaccgggttgttcattgccttttttgcttgtatcaaagctggtattcacataagtaaataactgattaactcagggtttaaacatcaatgaccagtaaccttgactattgtgtaagcacaataggttctgttctgatttatcaatcgtccagcccaatggttgggcaaacccgcttaatttatttaagagatcattaatatcttttgcgttacccgtttgatatgccatgcttaatactccgttgttgtctcaatcacaaaataatctttggttgccacacgatagcccccattaaataccagtcctgtacgcccttcagcgatagtgacttggtcactggcggcacgctgaatacccggaatccaatacacgccatcgaaagctccccagcggttgcgaccttggctagaatccttaaggctaataaattccacagggattaaaggataagcaccgccttgactttcacccatcgaatcaatactgcgtggctgttgatatgagctgaacatatcgtaattgcataacggatataatgcttggtaacgagagtccgtacgtagattcttaccactgctaccgtaaaaatcgcgccaactttggtcgggcat

SEQ ID NO: 48146 - DNA, 1007 bp, Oryza sativa
tttatcttattcagaagtttgaacaaactcatttttgctatacttatttatcatcaagcttctatcttaaaggggaatacggttcaagcggattggtcaatgccgccagatttattttaatgttgctagcgctagaccggcttagtagcaaagtaattattaaaggctataccattgaagataagtttgcaaaagctctatttgaaaaaggagaaaaacatcctcttttattcagatcttattcaaaggaatcgacctggaatgaagacattattgataaaaattatcctatgagctattgggaaggatacaaacccttgcaccaaaaggtgcatgaatacatcgataatgatgagttactcccgaaatataaaaaagaattcttgtgctcatatgattaaaaaatactttcgacaccaatattttctcttgttaattttaaatgaacaggcgcatttctcatcttcagcttagtcatttgagcttctataaagggagcccaatttctcgtttgaactaaataatcataagaaatagttgttataatgaccttgtttttcatactgaccaaatagcgaagcacgttttctaattcataactatccaccagatcaatacacaacgtatccgttgtctctcctttaaccatttcacaaaaatcttttccccgctcaattaaattataatgttcgtgcttcgtcagttccgctatcaaggttgatttgcccgtcgcaatactgccggaaataacaataaaattgggagagtggaagtagtcaagtctagatttgacatatttttttatgttatcgctatagtgttttttaacatcgaaacttgagttaaacatggatatatctaacataattgatatttttccttatgggttttgcggaagttctaaagcagtgtcaaaggttataaaccaaatcatagaggtttgacgcaaaatcacattgatgaattgttttctaatttaagacagtttttagaaattaggggaacag

SEQ ID NO: 48147 - DNA, 783 bp, Oryza sativa
  unsure (1)..(783): unsure at all n locations
ttcaagaaacccaagcagtccaacgccacctgattttagggggttgttttcaccgttcatcttatatgaattagaaaccactaaggttgatggtcaggaatcacactacttaaatagtttattcccaactaatatcacgattaataataatggtgatgcagtcttgagtttaactcaaagactaaatagttcggctacttatatgaactttgattataaccaagctaatagtttggccactctaatcagagaaagtagtcctaataataccttttatgttgttgataacagttcaacaattaatcaaccattagttaataaaacatttattaatctaagccaataccaatcagggttcttagcggttgggatcatccttttattcttatcattaatcatgattgttggctttaaggttcaagggttctttgggatctttggtttgatcttatcagctgtgatcaccttcttgatctattcaagatttaacgcgtttgttgatctatttagtttcattggtttaattggggtgatcatctttaacttcttggtgcagttatttatcaatctcaatttcaagcgcaacgttagtaataagatctccttgcntgagtcgtgaagattaacccacaacaagacctttttaaaagcagtcgatctttatctgatattattagatatcgggttattcatgtcgtttatctctaaatatgagtcgcaatcaattgggatgggtaccgagctagaattcgcccagagtgatcgatagcattcatgccgcgc

SEQ ID NO: 48148 - DNA, 527 bp, Oryza sativa
tgtgggaagatggtaaagaatatccattttacccattagatacttcatctgcgtcacaccctgtttatacaggtaaacgccgtgaagcaaatacggaaggtcgcgcacgtataatttaatgaacgctttaaaggtatggcaagtttaacggctaaaaaataacaggaatgtgcatcaaaattttaaattcattaaaaacagctaaatcccgtcatccagattgccaaattcgttcgttgtaaaggtaagttgtacgttatttgtaaaacgaatccgcgttttaaggcacgccagcgttaggtgtaaagataaaagcgtatttaaataatacgctttttttatgtggtaaaagacggtttagactaataatgcaccgctagcacagggttaaacgtgtggctgataatttatcttgtgtgcttgttactgcctctctaagtaagagaggcaagtgttaccaatattcgtttatggattacgcttgaatttactaaagtctggttctcgtttttcgttgaaagcatttc

SEQ ID NO: 48149 - DNA, 1767 bp, Oryza sativa
tgcctttataagcgatattaaattgcgacttggtcaatttccattcactatcataggtgtcacgattaaattcattactcgcgttaaaagccgatcgcaatttatattccacaaaatcaccagcataatagcggttaattccagcactaaaatgtgtttatcttgcccaaaataattcatagtctagataagtgcgtggggccatgttccatttatgcgtaaattgcgcataataaaaacgcatacccggcacaaatgttacatcacgccatttaattttgtcttttaaataaaatgctaaacgttgatgattcactttgccatttagcggtaaataatccacttttaacgtgaaatattgctctttaggtatgcaatcgggacaattttcaatatcaaacggttggctttctgcataatatttccttgcaccggtatattgtcgtgctaatttaggctgttttaatgccgattgataatattgccattcccaacctacacttgcctcatgtgtagtatgcgctaattcaagcttcttaaattgtaaatgctgtttaagctgaacacttttttgttctgtataacgcttaccaataccgcctttagtcgcttcttctgtatttggatcagagatccaattaatgctatctgttttagtataacgataaagcgtatctgcatcatattttgtttgcgttctattatgacgataggataattcgctagtaagcaaacccatctgttataattttcccatttaatgttagttaataacccaccgccactaatacgaaaacgaccatctaatgcattatctaaatattcatctgcataatgtggtgcataaatagcatttgctaataagcggttattatcattcacttcatttttatagcttaataataggctttcattacggcggtggcgtcctacccatttatgcaggaattgttgatgctgtggcaccgcactttgttgacggctatatgcaaataacaacgctgaatgtgcagaaagcggttgatttaactgaatagttgtttcatgcttatcaaatttaggttgtaataatggcgaggtggcacgttgaaattatctttataagcgccgtcaagatggaacctagtccaagcactgtgcgttgtacgatatgatatagcaccagacgctcgctctgcatttggttcttttaactgcgcatcaactgcaccgccagtaaagctaccataacggcttgatacattacttttcaaaacatccactttcccgattaaatctggacttaaccaaaatgcttgaggatgccctattggaatatgctcaggattgattgttttgaccgcattaacattaataacgccattcgcacctaaaccaatcggattgatattatcgttgatccccataccattaagcataaaattattattataataacgctcaccgtggaatgatatattttgcggcgtgatctcacctaatgtattgccattatgcgtattagatacttgtacagcaggcaaagaagctaacgcatcactaatatgcgaattagcggcaatttagtattgaataatttctctgtaaaagaatatttgcctgacgatgttgaatttacatttcccttcacataaatagtgccgagttctgtattagcatacatctgagtactgaataaactcaatgaaacgaaaagactaattttatttaacttcataaaccttaattatattatggaaatagtacgctaattctaaattcttcaag

SEQ ID NO: 48150 - DNA, 679 bp, Oryza sativa
tgattttagccaactcgccagcaagtaagatctctttaaattcaggcacagcgcttttcagtcgctgtttaatcgcctcacctgcaaataaatagttcatcgtgcaaacacctttttactgcttttgataaatacaacctgattatcagtagtggcgtcatcacttttatcataaagccctagcgataatttacccgctgcaacatcagataattgtttaatccgatgtttatagcgtagataaacggtactatcctcatccacgctgttatataaataatagtgggcaatatcgcaggcgatgcgattaagagacttaagcacacttttaacgggtagtgcgtagcggtcagataaatacatatctatttccgcttgtgcatcatccagagctttttcagcctcttggtctgttgcaatcaagcgataaatttcatcctgcccaaatgacaaaattaagtcatctaacgtgcaatatttcatgattagctcttaactactggtacaagctctagataagggtcgttagcaagcgtaataatttgctcacctgttagcgcatcatgagcaatgttaattgcctcaagcttgttaaaacgataaccacaacgcccatagctctcctgtggatgtatcgcttttaagcggatggtatatgcacaggattaatctctcccaa

SEQ ID NO: 48151 - DNA, 667 bp, Oryza sativa
tcaatgctcatcgcttgcgcttgcatttcttgattgaacgttaacctaccaattcacgcatttttgggaaaaagcctaaccaccataagtgtttgttttagttgatgagctattttcattgcaatcaagccccatgttgggctaattaaactttaaccttttgccaactctttttttaaatgccatatctaatacatttagtagttctgactttttaaaactcattatttagtctcctgtttataacgttggatatactcatcggctgaaatgccaagtgctttagcccccgcaatctctgcatccgataatgcgactttttgcgcatctgcgttagggttttgaccgcctgtttgcgtccccaaaagtgcagggttagggcttactgtggctaaaaagtctgacaatgccgttaaattctgtttacctaaactttctgcccacgctttttgagcaggtaacaagcgaccgtctgataatgcggtttgaattaacgcatcacgctccttgtcattaatgctttgtttaagtgtattaagctcagtttgtacggtttgtaaatcagctaacgccacatattttgcagggtctgggttgtttactttggcacttagtgcgaccgtttcagattttgcttgcggggtaccgagctcgaattcggcctata

SEQ ID NO: 48152 - DNA, 752 bp, Oryza sativa
ctatagggcgaattcgagctcggtacccctactcggattaccttaatcaatataatgctttatttttaataactatcttagataagcaacgctacaaatattcttttggtagaagttggactggacagagatttgatcaaactaaattatatttaccttgtaaagataatggtagtatagattgggaatttatggaggattatatacgctctcttcctaatggaaatattatttagcttaaaaagccatacaataaatcttatttatgataatcagaagcaacctacctttatagttggttgcttttggtgtacatcaaatttcgaaaaactcgtccttatattgtttaaaatacaatcaattaaacacattgaaaaattttccttgacaacattcagaccttattcaaactgacctttattggaaatgcaaaattttaaaaaaaacacttgacaaaagaaaacgcttgacaaacaccctttaatataatacctttttgcccacagagaatagtcccctcattaagatttttactttttaagccataaaaggtttaaaaatttaagagttttaatgaagggattttgttttctatggcacagcatttttcgctatcttgcaaggcacgccacttgtctatacaagtggacgagctttctgatgtcgaaattttgtcgttgctgaaaaccgcttcgtggggccatgctgataatataaatgatattgaatgtccgcattgtcacgttagacac

SEQ ID NO: 48153 - DNA, 1559 bp, Oryza sativa
ttttctttaaatatttttgatggagtgaaatatcaggttgtagaaaaattatctgagattagctagaaattaatagcgaggtttctatcttagctattatttatccgtaaatattctacctatttcgataggtgggatattttacgcctaactttaatatactattcgcattaaattatatatcgttgaaaatttcatcattcaaactactaaaaatattttccttgataatcttcagcctttaccacacctgcatttcatcaaaagttaaaaattttcaaaaaacacttgacaaaagaaagtgcttgacaacccccccctctctttattttacatttttgcccacagagaatagtcccctcattaggatttttactttttaagccataaaaggtttaaaaatttaagagttttaatgaggggatttttattttctatggcacagcatttttcgctatctgcagaggcacgccacttgtctatacaagtggacgagctttctgatgtcgaaattttgtcgttgctgaaaaccgctcgttggggcaatgctgataatataaatgatattgaatgtccgcattgtcacgttagacacgaagcctacttcattaaaactcgccaacaatggcaatgtaagcattgttgctatcgcttttcaattactgcaggcacaatatttcaccttgctaaattatcactgcgaaagatattaaaagccttacgttattttgcacttaaaagcaaaggattatctgccattgagctttctcacgaagtatcaacgttttaaacgattcacattatttaatcgcagcataacaattgaggtaacacaatgaaactacgtaatatggaaaattcaccgattaataccgatttagccgtaatggattatgaagaatttaagtgctttatgaaagaattagccacaatgtattccgatatatcagataatggctacccattactttatgatactttacgaaaaatcagtaaggcgatagccacacgtccttttgaataccatattatttatggagcgtatgaaatcgccaataaacaagtggtagtcgctatttttgaaatgcaatttaatgaaacaaatctcggtcgtacttccgtcagttttgccgaagataaactgcatttaaattgtccgtccaaagtccgaaaacaacttacccaacaggactatatcacttccgcagagagcgcctatccttgcattatggaagaaatgctatttgataaaattcgagaaagacgagaaaaggaaagaagaagtgtaacccctttaaccaaagaggaattagaagcacttagttaatattggcacttaattcattttagtgcttgaaataaaaataaagtaaaatacctttacctgtataaatgggtaaaggtattttttatgcggttaaagttaaatttgggttttgtgcaactgctacataataccgccgcaattttttgcaaaaatgaccgctttctctgctattcgaaattattgtgccattttttcggtgatcgttaaaaaaccctcagcgctattaaaaata

SEQ ID NO: 48154 - DNA, 758 bp, Oryza sativa
  unsure (1)..(758): unsure at all n locations
cgtggcnatgaatgctnatacnatcgatcgaaaangccgaattcggctttgtacccctcttgcggttgtggttgttctggcgcttgcgtaacaacccgttctgcttcttttttatcttgtacttttgctacagaaagcggtttagtcacttcggtctgtattggcgtattttcaattgctggttcttcagttgtaattggttctacacgtacttttttgcgtaaatcacggcgttgtcgacactctgtgctttgttgatcgcgtgctacacggcgttcaaggtgcgcttcttgtacgcctgctacttcttctacaatttgacgacccgcgtttttcagttccgttcgctcttgacgtgtaagttttgcgtcctcttgcgtttggttttgtgtctcttgtttacgttctttgcgaaccttaccatttgagctaacactgcgattaccgctctctccttggtgcctgttttacggcttggctgggctttccacttttccttaatcttacccgcataacccttttttttccccagtaaacggtttattaataaacggttatggctgaagtttggcatagttcccagttgaaatttaactctgacgttctaaaactattggcgataataccaggttctttcgggcggtacaattcctggcctatagattcggtttcatcaacgggcttcttcactcccattgataaaattacctaacctaactaaggaaggtgatatattttcggtaacctatacccttacg

SEQ ID NO: 48155 - DNA, 554 bp, Oryza sativa
ccgttgatttaagcggtcggcgcctaattcaccgattcttaatgcggataaaaaacgaatacgttggaatgctataaaaattgcgtcaacactcacactagcgggatctttttctctttgtttaactaaggttaaataatgttgatagcattggactgcttttttaacgattagattaacacattcttgtgtccataaatgcgtttcagtgaattgatttttgtttgggtattcaattttttctaaatcagtaaattgtggatttagaaaagtttgccaagattcgtccgcttgttgctggttgacttttttagccagtgcgccgatgcctgaattagcatcaaagcgataacttttttgtagatgacataatgaatcgcaaatcgttggaacttgattcatcatatttaattggtatccggttaattcattcaaagcagtgcaatgtgctgtactataaccttgagtcataaaatggcccaattcgcccataattgcgcccgcttcaacagaggctagttgatctttatcaccaagcataatcaaacgggttg

SEQ ID NO: 48156 - DNA, 552 bp, Oryza sativa
  unsure (1)..(552): unsure at all n locations
cgaacncgagctcggtacccattattgtcaaaacaatcaccaattagcttacctttagacgtaattattccgcaatttgaaggtaaaaatattcttattcagcaaaaagttagagatcaagctggagaagtaaataatgttaaatcgttggtgcatattgattcactacaattacgcgcaaatgtggatcaacaagcgattagattagaagattttagcttagtaagtgatcaaggtcatttactctcgaagggatcgttaatattagctaacgactatccgttaaacttacatgtaatggctaatttggcggagcaaaaatcgattaacttgccggcgagtgaattaacaacaacattaagcggttcattattggctacgacacatttaaccatgcaaaccagtggcgtagcgaatatgaagctagtaagtgatgtgcaattggctgagccaaaaacgcctttaaaagtcagtttaaatagcgatgcaattcattatcctttactcattaatacgtttgaacagccacttaagattcaggcagcaggtata

SEQ ID NO: 48157 - DNA, 603 bp, Oryza sativa
gagctcggtacccagtggtattttacaagccgtcgatcaggttaatattggtgcacaggtttacggacaaattcattatattttagtctccgaacggctatttgtcaaaaaaaggagagctgttagcgattatagacccacaattggcacagtctgagttaaaattcgctaaagcggagttagaacgtaatcaagcaaatatgcttgctaagcaagctatcctgaagcagtatcagacgaattctgaacgacatagaagattaatcaagctcaatgctttttcccaacacgagcttgatgacgctagaactcgtttataggtagcaaaggcagatattcgtattgcacacagtaattttgaaagcgcacatcttctagtgacaatggctaaaactcatatggcctatactgagatccgctcaccaatggatggaactagagtgtctattatggctcagagtggccataccgctacagcacagctactaagtacctaccttaatgactttggctaatatcgatacgatgaagatcagtgtttaaatatgcgaagctgatatcatgcatgtacaaacgggagctcctgttgcttgtactttgctc

SEQ ID NO: 48158 - DNA, 776 bp, Oryza sativa
atggcattgatgacatgcgatcactcagggcgaatttagctcgtacccctataggctcattaagtttaaaccttatttttcctatatgggcttatttaaagatgattctatgttcgggctatataaggaaaagtgttgttttttacgtaagtcagatcaatatttgcaggaaataaaagacactatccccattcattttttatctgatcataaaattagccgccaatcaaaaatattttatctaggtcctcaacacattattgaaaacatttcttcctattcccactggattacgtcctcaatctcttgatatcaacgtttacgctcaagaattcgcactggaaatcaaactaaaatccgaatttacctgatatgattattaatattgaaaggttccttgctcgagttaatattaataccgccgatgaatttaaacaggtttgggaaacaaacgcgtttgtaggcttatccacaaggatttgagtcaattcaatacttttaattaaattatatggtgcattacagcataaatgatattatatgctttcattaaaaggagaaaaaatggtacatgaagcaagccgactcttggcttctattacccggggtttacaaaaagaattaccggctaaagtaaattgcatggtgcttaatgaccaagtcacaaaacacacaagaaaatggaaggcaatttttctataaggttgcctttctggattggcggtgctcccattatacctataaatgctatcttccataaggagaataggcttgga

SEQ ID NO: 48159 - DNA, 692 bp, Oryza sativa
aagtaatataaataatataatctaattgagataaatgggacttggtgggtagcaacgtgtagtagtgggacaagaaaagtgaaaggctattacaaaatatgaaaaaggaaattagaaagtaaatttagtaaaacagcttcattttagaatagtgaagctgtttttttattcacaaaacaaatctggttgctgatgtttcattatacgttttcgtacacgattaataactttacgaatgcctgattcagtcatgccatactttttaactaaaaagaaccaattattaccagtaaaatcattataaatatctaaatctcgttgagcaattttataataaaaatctttaggaaaagaaatgacttgaccagcataatgttcagctaagaagtcagcaacacttgttgaaatttgttcgcaaatttctgtatcaaggttgtaatttttgcatagtgcactcacgttatcttcaatgtcgcgcaaaagctcatgtcgtgctatttccatttgaggatcatcttgtttttcctaatttatataaaccaataatattagagatatgggtcccaaatctgccaataacttagagcctttaacttaaagaataccattgtgaaatttggcgatattcaatttatttacctacttgtttttgccattggttcaaattttctaaaataaaagaggcttgtgaa

SEQ ID NO: 48160 - DNA, 751 bp, Oryza sativa
tgctgaaaaacagccggtcgtgttaatttataaccaactaaaataagtaccgcagctaaggttgctaatggaatttgattaagcatagttggaatggtcagtacacaaactaacaataacagcccgtgcaatatacttgatattttatgggtttcgcccgcatttgcatttgcagaagagcgaacaatcacagcagtaatcggtaagccccccattaatgctgaaactagattacctataccttgcgcttttaattcttggttggtatctgtaatgcgacgcttgctatctatgcgatcggcggcttcaatcgacagtaatgtttcaattgaagcgactattgccatcgttatgcctgtgctccaaactatcgaataatgaaaacccgcccaatcaggaaaatagagcaagtcgcctatttccgcccaactgtgtgcgataggcagttgcaccagttgactttcgggtatggctaaaggtgtaccggcaaacaacttattcaaaccaatactcatgattacggcgatcaaggcggacggcaacatttttatgctttttaatgttgcagagcgctcccaaccaagcatcatgagtaacgacaataaagaaataattaatgaacctaaatggatattgataaaacttaacgataattcattaaataaatgtttattaccaaaagcataaggcaattgagaagtaataattaaaataccaataccggctaacattccttcaatcacagcaatcg

SEQ ID NO: 48161 - DNA, 797 bp, Oryza sativa
tttttagaaaaattcggtatgccgaccgcacttggacggtatcaaccaaatgcgtctattgaagaacaaaataaattattggaatccttgtacgcaatccaatctgatagcggcattattgtgccagcagatatgcccattgaattactcagtgctggacgtagcggaacgggtgattataaagccttatatgacaccatgaatgagactatccagcgtgtcgtattaggacaaacatcatcatctggaggtactccaggtagattaggcaatgatgatttacaggaaaaagtgctggaatccattattaaagccgactctgacgttatctgcaaatcctttaaccgtggtccggtaacctggcttacgcaaatgaatttttctaacgctaagccaccgcgtatattcaaaatgtttgaagaatcagaggatttaaacgaaaaagctgaacgagacaaaaaaatatttgagacaacaggttatcgtccgaccttaaaacaaattcaaatttcatacggtggtgaatgggaaaaggcggaacgtttaacctattctacaaagaacagcaaaagtgctgtcaaaaataaggttgattttgcacatattgtaagtgatgaacaagatatacccgcacaaatggtaaaccagctaaataatacccttgcaccagtaattgatgactgggtaagccaagaacaggcattagcaaataatgttgaatctcttgaacagttacgtgatgaattatttacccttaatgcctgaaatggatttagcccgttatatcgaagcaatgg

SEQ ID NO: 48162 - DNA, 641 bp, Oryza sativa
gatccatagtatccgatttacgcaacagcaagcacctgacggtacgccttggcaaccattagcgaattggtatagagatagtaagaaatacaatcaagataaaattctcaccctacacggtgatctacgcggtacattacgatatcaagcagataatcatggtgtgatatttggttctgaccgtccttatgcggcaattcatcaatttggtggcacgataaaacctaaaaataaaaaaatattaaagctggggacattatatgcacgaagtatcataattccagctcgtccatggcttggtatttctgcagacaatgaacaacgattaattgaaatcgcacgtaatcaccttgaaaacgcatttaatgcataaaacgcttgtaaagctattttaatgtttattctataaatgattacttagatactttttaaggcgtttataaacatttataaacgccttaaattcaaataaatcatctcatcacttactcattatatttttcctaccaaatacattctagacgcgtccaaaatacaaatgcgttcctgcctgtcatactgacttcattgaattaatcacaaatatattatcgaaatgaaactcacaaagatgccgattatgaaattaggcacgcatacag

SEQ ID NO: 48163 - DNA, 662 bp, Oryza sativa
tcacaatcagtatcgaaatattcaattaagtaataaaagtttatatcccaattcatttattaatattgacggtatggcgggtagattagaatcgaaatgcctttatttacgtttaaatcaggagaatgaaatattacagctagatcaatgggggcgaatttatgttataccgaaaactaaacggagtaattgtaagcagacagaaagcctttagtttaattgaattattattagccttaacattatccgttttattgttatttccactatcaaccttatacaccaatttttatcgaaatagcgttaaacaacaagaattactttttctgcaaaaagaaagtcatcaactacttaattatcttaaacaacatagccaacatatcggctatcaaggtgtgaatcggcagggaagcaatttttcattattttcacagcaagataaacgatacaaaatagcgaataatcagcagtgtttaatctttttttatgatttaaatggcgatggttgtttaggtaaaagaaccactaagaaatcggcgtgtgttaaacaaaataaaaatactagcaaagaattagtaaaagaagtctttggtattaaagtcgaaaataaacagctttatatttttgataaaaataaattagagcattgtattggatcacaa

SEQ ID NO: 48164 - DNA, 580 bp, Oryza sativa
ccaacaaaatgtttgtctttagtgtgaaggattagaacgaacctttatcttctgacacagattctttcgtttttgcatcggacgacggttgttcggattttctaacttgttctacgtatttaacttcgccgtcaatttttatcattttgacgcggattaaacgggcttttaaactgacggcagtatcaccttttttgtgatgtttgctatctttagatacgatataggtatccgtccataagtcagacagaacaaatgaaatcaacacttttctttcttcattaactgcattcatacaccgctcaattagcttttcagcctcaccgccgacaatattgcaatcaaagaaccgatattccggatttgacgcatcgccggtaagcgctgatacacggcaggctaaaaaagggtttccctttttcggcgtgactttacgaatatcatttaaataaccgatgccggtagtatgtaggttgaaataattttgttgagtttgagtagtcataatttgtttctcctatgtgaataaaaaagcggagaaacattcctacccaattcgggttaaatgtttcccgccagg

SEQ ID NO: 48165 - DNA, 598 bp, Oryza sativa
aatagtagcactccgtaatattgaattacgacagtgtcgtcccttttggcaacgaccccaaccaactaagatgacgcttaattgatttcggcaaatacgcctttccttccccttcatcgctttccactcagaagaaatacttatcggatttgcacctctacaatttgtaggacgatattagcttaccttaataattcaaacttgccaacaactaaatgtaacatttttaaatgaaagacgatgtaattcaacccattctaattttttattaaattgaataaaatttataaataagcacgaacaataaaaatttattatttacctaaaaaatatcttccgttactatatgaatatatctagaatcatttttattctagaattagaattattactgtatatatttggagaaaagaatgtcagacatcttaaaaacactttcaatattcgtagcttacgagtcattgcaagagaagcaacattagaacaaatggaaacactacttgaaaaagtatcaaaagtgatagaagaaaaaagggaagccattaaaccccacggagttgaacaagctaaattataaatacaaagaattattagaaaa

SEQ ID NO: 48166 - DNA, 573 bp, Oryza sativa
cttcaaaaagtacttgacctttttttactaaatctccttcacgtactttcattgaaggacgcatacccacatattcctcaccaagcatcgcaacttcattaacggtattgccgttatggattacttgtgctggcgaagctgcaataggtaaatccaagccttttttaattgtaatcatattatttgcactacttttttgggttaaaaaataagattgcgaaaatcgcaatcgcttctattgagtcgtaacggtcatttaataacaaatgaattcccccacctgtttctaaaaagttacataaagctctcaaatcttagttgttatcttgcaattattttacaagcaaaaataaaggcgctattttaccttaaaatgcggttaagtttttacaaaaaccggctatttttgccgattagcccttgaaaatttgaaataaatcaaatatttattacgggcatagattaaccataactcaaaagtagtaaataacgttgatttaaatacgcactattccttttaatatttcgcatagtcttatgccatagcctttaacctgtcgatttgcaaaattt

SEQ ID NO: 48167 - DNA, 513 bp, Oryza sativa
atggcacaccacgttgattagcaaaatcaaactcttgctgaaaatgttgagtagcaaacaatctttctgcaccggctaaatcaatcgcgaccacgccagcttcatatttagttaaatactgtttagccaagcaaattgtttctaaatttgctgatctattatctgccgcacgcatacaacataaaatcaaatttgctttaaacaaacttgtgctagccaagcccgcttgtaagccacgtaatgcggctttaccgcatcttcttgtgacattgatcgttgtgtatgtagttgtggagcaaaacgaatttctgcatagactaaaccatcttgatctaaacgttgaattaaatccgtaacggctgagctcaatgcttctggtgtttgcaataaagaaagtggcaagtcaaaacaacgtaaatactcatttaaatcactgcaatcttgtgggactgatacataagcagttaatgcttcagctgtactcgcgggtaaattaaccgcttgttttttagc

SEQ ID NO: 48168 - DNA, 548 bp, Oryza sativa
cttcttcaatggagttttaattgcgtacgtcatattgcgcacttggaataatcatccatttctccccattgatagtgagaatttgacggggcgaaagaccaaccattgtgcattcgtaacggtcggggagaataccaagacgacgaaaaatgccatcaatcccgtgtgcaattaagctgtgcggacacggtattaacgattgaccgaacttagactgactgtaatagacgagtaaggcatcagggtggtaagtattttcgtctgttgtcatcgccgctctgccaagcgtaagcagatattttcctttgtccgtattactcacatctttataatccgaaacatttgcgggggcaaaataccacggtgtacgtttatcgccactgataccgtcggcacgaacgatctcttgattgccgcgcgctccgttagaaaagccgtaagcatgatcgctattttgataatgcgcgtagttctttgtgatataggtacagtagggatattgaccgccggtataggtgccttttttgtttaacgtaccgataccaaag

SEQ ID NO: 48169 - DNA, 625 bp, Oryza sativa
ggcataatccaagccccttacgcacaaaaaacgcctccacgcctgcggcgcaaaactccatgcggcgcatgtcttgcattgtgatagtgatattgtccataacttatccttttttaatctcagttgtgcgataatttccgtatgccaacacctgccaatcctcagtccaacaatcgccgaaaaatacgcattgtggcgtcccctcgtcgatttgcggaaaattccaatcttttgccccgaccgcctcggggctgttgtttgactgcttgcgggcggtggcttggctgacaagatagctgatagccaccacgattaccgcgcgcacgattgcccatccgattgctgcccacataaatccctcctaaaatactcttgagccgtcatacggggattttgtcggcatatgcggaatccccccaaaattaagcatgttgttaaattttttaaggcacgtttgcgcccgcccgtcgcaccccggatagactttaatcacggtgccaatggatagtttttgcgtcccgcccatgagcgttaatttattatgctcatgcacggtcaccgcgcgggtctcaaccacaccgtcatccagccattcgataaatcccgcattaaaccagccttgcgg

SEQ ID NO: 48170 - DNA, 667 bp, Oryza sativa
tgtattctgccattttttgtttgaataatggttcattcaaatttattttcgataaataggtcgttaaaaaaaattgtttttggacggaattgagcgtatttgcttgaaaaaataatgcgatctctaatacaggatcagaaatagcgctgtattcccaatcaataataaataactgttgctgatgttggattagatttgctaaatgtaaatcatggtggcaaatggctaattgcaaaggctcgatttttttgaacggcgggcaaaaattaagttgatgttgttgggagggggtgagtctatcccataataattgacagcgttctgctagttgtaaaatggtgcgctgttttggtaatggataagcgtgcaatgttgctagctgtaaggctaattgctctagtaaatcgggatcaaatgcagtggcaggtttgccttctaaccacgttaataaactgctgtttgcggtttgataatagactttcggtgtaaagggcagggcgtcaaggtgctgtagaatataggcttcttgtgcataattaatagctaaaagtgtagcacgagcgctttgttggcgaaaaataaattttggttgcccatcattcaatggcgttgaaagttggatcatttggctacaagcggttaaacctgctaattttttgcgaaaaat

SEQ ID NO: 48171 - DNA, 611 bp, Oryza sativa
atttttagcaccaattatttttattgtggttggttttttgagttttgtgctagtgctacgcacttggatgcaattctgtcaagttagtgcttatttgccattatcacaatcattattacgtttaaccgcgcctatggttaatccggtgagtaagtttattccaaccgttaaaaatattaattttgccgcattgttaattgcattagcgttgttagcggtggagaaaggggtattaggtttgcctttgactatggcagtattggtcgggttgttaggcattattaagatgtttgggcagattctttttttcactacgcttattcgtgctttaatgagttgggttacgcgcggtgatcatcctttagatgaggttattgctcagattacggagccggtattaggcattattcgtaaaattttacctcgtacggggatgttagatttttcggtgatggtgtaaggctttggtttggtattgctgaataatctattttatagtgtattcggagctttttgggcggttgcctgatgaaagcgggcgagtttgttgaaaatccgtacggtattcgcctgcggatttttttacagcccaaagcgagtcgcgatcaaat

SEQ ID NO: 48172 - DNA, 801 bp, Oryza sativa
aaaaagcaaatattgcttttaccggtaatattgataaaaaagttgagaatggcttagctattcttggccaagcaaaaggtgctgctattcaaattacaggtcttgatggtaagccagtaaaattagatggttcaaaaactaatgtaaacatccaagatggtgataattccttacaattctctgcttatcttaaaggttacccaacagcagcggttggtaaagatgatggacctggtccaactccaacaggtaaagctattgtagctggggagtttacttctttagttaactttactatgagttatgaataaaaattaaatagtgtgctagttatagaggaataggatagatgttaaagcaagcattattacaaagatggtttattttgcttgttatgagttttgattctcctttactacatgctatagggtatggtgcaggtttcgtatcaatgaatggtagagttgttgatgctgcctgtaccatcgctatggattcaccttatcaagatattgaaatattgcttttagaaaagcaaactttagaaaaggaatttgaaattcaattagtcaattgtaatttagctcagtatcacaaacctaaacctaatttgcatatgttgcatatgctctttcgtaattctgaaagtgacttaactaaaaatgataaggatctgatatatataagaagtgtgcagtctcctttttctagtaaattattttttgagcaaaatttcatccctcctagtatgctattaaagtaccgagtacatttaattgcgaactcaaaattatttcaggc

SEQ ID NO: 48173 - DNA, 613 bp, Oryza sativa
atattggtgtggagcttttaaccagcttaataaagcaacattttcaggtggcaaatctacacttgcttgatattcaatcacacttaaattgcgagtagttttaccgagttggttgttaatttgttgttttaattgatcaaaaataagcatagttaatgtttctagcaaataggcattaatttttagtggtcatgaacgtggtagctattttagcctatttcttctttaaattcataccaaatcagagtaaagtcgaattatttttttatgaattaatacaggaataatccaaccaatagttgggtttaggaaaaggcataaaattttaaagattaatattgatattctacacttttatttattggtttaaagcatcagatgaaatgttaatgggtatacttttacgttaagatgtttatattttaatgatttgcttactgttattgatgttcttttaagctgttgtagtgacttgttttcagcaaacgggtcatgaagcggacaaaatttgcttaaaaaaagattataatcacggaaaaataaatgaaattagtccgagtggcattagctgtgccgttgaattgttattttgattatctattgctacctaata

SEQ ID NO: 48174 - DNA, 619 bp, Oryza sativa
ggctgctttacaggtaaggctatttttacattcacttgtgtttgataatctgtgtatgctgtacctaatgctaaggaatattgccctttatggccaccaatcgcagcacccactgagacaccatagccattgccaaaatttaaagaagacatcgccgccgtattggctgtattcatatgcatttctttgcggaattgatggagaattctttgatcaatttgttgaatatttgcagtagttgctccgcgtccagaagcttttttaaaatcactatatgataatgaatcaccttcttttgctaatttttcatatgctgcaacatatttttcaaagtctggcaataagtatttaatcgcttctactgaaggatttatcgattccgttaaggcattaatattttcattaatcccctttaggttaagataagacatagaatctaaagattcaggatttattcctacttcgtttaatttgtcatatacatgaaaaagcttttcattctgttgttccaaaaacccacgattaaaccgaacccatttccacatatcatataagttagatataacggcatagttatcacgttctttgaggtgacggtaaaaagatttttcctcttgat

SEQ ID NO: 48175 - DNA, 519 bp, Oryza sativa
actatagccaaacaaatgatttcgattaaattccgttctcacaattaacggcgaagttaaatctttcgcaacataaccggttatactttcgataaattcaggaaaagtctcggttttgataactaacaatgaaccaaatgcgcctgtttaaacaaatcaatcgcttgcttggcattagtttgaaaatcaaaaaaatcgaccttagcattagtgggtttaaaagtatgctgtaaagttagcaattgatgtgcaatgggagttagaatcacgaattagcctcattatagaaatttggtttattatacccaaattccggctatacttgcctaaagttaaaagtaatggggctgaaaatgagatatcagaaattagaaattcaggaagcccattgggcaatggaaatattaactggaaaaaacatcgtgaaggggaaaatataactaaacatactgagcaaagtcttattgagctaaaagtccaatttctaactacactccagcattcacctgcggaaattga

SEQ ID NO: 48176 - DNA, 1694 bp, Oryza sativa
aaagcgttcacgcaattaatttattaaatatcgccttagcagaaattatccaaaaaataacagatgcgaaatttgaccagcaaattgatattgaaattattagtttattgtttaatgaaaaattgaatagccaacaaaataacttaaatttcctggtcggtaaggtaaatttttgcactttattacctatgcgcgccattccatttaaagttgtttgcttattaggtatgaatgaaagcgattttccgcgtgcacagacggtgaatagttttgatttaatgcagtatgcctctaaaaaaggcgatcgggctcggcgtgatgatgatcgttatttatttttagaagcactattatcagcacaacaatttttctatattagttatattggacaatctaatattaataataagcaacatttaccatcggtgatggtttcgcagttactagattatttcgctgaatatcttgcgcctcaatctttagcattagtcagcccacaaggtaaattttctgaacagcacttttttgcagaaatggtgcaacaacatccattaacagtatttagcttaaacaactttagcgaaacaaattatgcctatgatcgagaatggctcaccatgacccaaacggaaaaaatgcaagagttttgcccgggtgaatttaattcaaacgctgaattgcctactgaaattcagctcgaacagttaattaagtttgtggtcaatccggtgcagtatttctttaatcagcatttaggtattatttagggataataataaacagattgaagaaagtgaaaaatttgtattgaatgcattagatcgttataaactacgtgataaattggtttgcttagatgatgatttaattcagcaaatgtttgaacaggaaaagctgaaaggtaatttacccgcggcgaatttgctcaactagcacaacaaaaaattgtagcatcggttaacattataaaagacgaattagtgggttatttaaccgaaagtgagattttagaagttgatcagacctttttaattaatggaatcgaattacgtgttgtaggtaatatttgccataggtttggtgatgaaattgttttttggaaagtcagtggtttaaaagataaagattatattcgttattggctttattatttgtttcttcgaatacaatcacaaccgttgaaattaaagattatctatttagatgaaaataaaaagaaagtattccaatttaatgaaattagccaagatgatgcaaaaaagcaattacgcatttatttaaccgattatttatccagtttttcttgtttaaaatgggctatgtttgaaggtttagatgattattttaaaaatcttaataaggctgaaaatattgagcactactgtcaggaaaacttagaaaagttaatcggaaaagaattttttaatagtcgctatttaaaacgtattttaaatcaaagcgtaatgttagattatggtagtattcacagtactacattacaatggtttgagttaatgcaaactagtaaaaaaagccctcatagtaaggaaaatgaatgaaaaagaattttattgcacaatcagtccgttatgcgctctgttcttatttcacattagcagtgatgaacccaacatttgctaatgatttaccaaatcagaccgctaattcagtacaaacaatgccaaatatggctg

SEQ ID NO: 48177 - DNA, 646 bp, Oryza sativa
gaccgcgaactcaaagatcttgaatttgagcgtaagcaagtattacatcatctcgctttacttaaggctaatattgacgtaattaagcgtgcaatcgccctttgtgaaccacgaagaagatattacgcactataacactgaaaattttatctaccgccgccgattcaaattgtttaaggggaaaattcgcaagtatattttgcagatcatgcgagaaaatcccaataaaggctttactatcagtgaactcacccagcagatttttgctattgaacaaaacgatagcaaaccttccgccaaacaccttgattcggttcgcaagcagttaaatgcattttaccaaaatggcttaatcactcgcacgcaagtaagccatagagaagtgtattggcaatggaaagcaaaatagcggtaacaccgctattccacacgctcaaccacagttatttaaagatggttgctacaacgttttcagccgccaatgaaacccaccacgacaaccagccctttcttttccagccgcaataacatactctttaccgccctgtaataactatcgccaacatcaacaaattgcggctgaccttgcaatttaaggacttgttcggcgatttctccgcattgaatccaatctccatattctcgc

SEQ ID NO: 48178 - DNA, 718 bp, Oryza sativa
atcagtaagccattcggcttaataaaagaaaaacttgcgtgataaatcatcatatcttgatgatctcttaacgtaatcgcccagaacccttctaatgggtcaagttgattcgccattagacaaatctttaaattatctgttaatttagctatttctatacttttgccctcacttaatgctcgacaaagcgctaaaggcaataatttttccattaacataaaattagttaagatcgcttctagccgttcggatttattaaatgatcggttacaatatttttctaagagcgtattgactcggtaaggctcgtgattaaataaaggttgccattgcgtattatgctgaagatagtgtacaaactgctgacgttctttattacataagatcgttctgaattgataacgaatatattcttttacctttttcacgattcttgcttcattagcgtacatttggctaaatgtcggaaacgaatacgtttttttcattattttgccttgaaaatctaaatatataaacgacaaagccgtacctaattcaacattaggtacgggctttccttatacacaataactaaaatcgtaggatagcgttattttttattcaattgtggaataacattattttgcacagataataaacctgcgtccgtataaacagctagtttatcacgtgtatcaacaatgtataaattacgcatagttaattgacctatacg

SEQ ID NO: 48179 - DNA, 738 bp, Oryza sativa
tgactaatacggccttctaaggtaaattcacaatctgttgcaagcggtaaatattgataacacgcttaattaaacggactaaatcttctgtcgctaatgccgttggcgtaccgccaccaaaatacaccgcttgaatcttgccatttccttggcgaattgaagcttcgtaagcaagttcttcaatcaatttatcggtataaactttactatagtcttctttccaagcatttcgataaaaaccacagaaaatacaatgactggcacaaaatgggatatgaaaataagctaaaccatcctcttttaatacattaattgccgcttgttgccaacattgttgccattctgcttgaggtatagcttctccctcccagacgggcattaaggcttgacgttcagggaaggcgttgggttgtgcttgagttgctttccaaggtattgttgtaatcattttcgctcacttacattcttcaaaaagaggaatttactttatacctaattcatttttaactgatattgatttttatcaacttatgattgagttaatacaggctaccgctatttagtcagtaatacacttctcattccgccacaattcagcaaaatctgaccgcttcttaatcaaatggctagttgcaccgtccaccataatttcaaccgcttgtggtcgtgaattataagtagatgacattgaagctccataggcgcctgctgaatataccgccagtaaatctccttcag

SEQ ID NO: 48180 - DNA, 705 bp, Oryza sativa
taccgttgaaaacctatctgtacattttgattcgttttgtgaatgcggttaagggtgtctctgccctagaaatctctcgtgatgcgaaaatcaactatcgcaccgcctttgtgctttgtcataaattgcgtaaagccttgctagagagtcgagatatgcaaccacttcaggcgaagtggatatgggcggcacttacattcatcctgcacctcgtaaagcaaataagaaagccgaccgcattgattaccgcttaaaagaaaatcaaaatccaaataagcgttgcgtggtagtcgctcgtgagcatttttctgcggatgaaaaagcggaaaattcactttatcgtggggcaaagcgttcgcacgtgttcgtgacgtattctgaaacccagtcggtagtgaaaaatttcgctcacgcttacattgagaaaaacagccgtatcaatacggacgaaaacaccgcttacgaaagtttgttactcgactatgatttacgcaccgtaaatcataaagacgaataccgtagtgattttggcgtaaccaacaatcaagctgaatcctttttctctcgttttaaacggatgtactacggacacgtgcataaaatgagcaacacctatttactcaactatgccaacgaaattgcgacacgtgaagataatcgccgtaaaccgaatggctggcagttccacgatattttaggcaaatg

SEQ ID NO: 48181 - DNA, 676 bp, Oryza sativa
aaggtgggtgcagcttttaaacgcgtctcattcgctcagacgcctaataccaaaaaatattgatatttctagcttgagtttagcactgacacaaatttcaaatttttatattgttttttttggcagggtgttacgattcgacaatgactcacttgacacttaattacgtactccctccgtcaaaaaaaaaaacaaaccctggtttctgtgcccaacgtttaaccgtccgtcttattttaaaaaattatgaaaaaaaataaaaagacaaatcacgcataaaatattaatcatgttttatcatctaacaacaataaaaatacgaattataaaaaaatttcatataagacggacagtcaaagttggacacggatacccagggtttgcctttttttttgggacggagggagtacaccagtaagcatacacacatgaatattgggagcactagagttggtttttcttccatatcttaatttatgctaaataacatagaactatatttctttgggatggagaaagtattcactactcttctctttgtttaaaaaacacctctatatttgatagcttcaacctttttatcgcgcttatttgatcaccattgctatgtggcaccaaacgtgacaacccaatcaacattaaaagtttaaaaacatattggacccacctatcatct

SEQ ID NO: 48182 - DNA, 850 bp, Oryza sativa
aaacaagacaaaacgtttacgacaatacatgttttgatgatgaagaatacattagtcgtgaaaaatacacgtttacgacaaaaacgtatgtcttgatttaataagctgctaaaaatacacgtttacgacacatatactgctaacaaaacgttttctatgacacaatatacgtatgaaaaaaaattgttcataattatcttttagtttgttttaattttctacagattatcatagcgtagtatattactctctgcgtctcataaaaaatcaaactagcattggatgtggcatatcccagtaatacgaatttaaacataggtatatccatattcctagtacaagtatatgccacgtccgttactatgttggttttttatgagatggagagtgtatgtgtcatcatgtatggtggtgtgcaggtttggcgacgttgccgaggagccaaggatgttgatctcgtcggagaagctggtcggggaagggttcgagtacgagggcaagaacctggacgacatgttcgacgatgctgtcgagtacggcaaggcgttggggatgctgccataagccgtagtgatgatacagtagcagactgatgtgtgggcccggacccacatgtgagttactgctactgcatcagcagtgaatctgcatccgttcgtaacatgtgggtagaatgtagtatatgcccttgctatacatatccatccgaataatcatgaacattatcgaaataatttgatagcatggattgtgacgtcatactacaatatttcatatatgcatgtataaattcgatgccaaatgaagagaaaaatgaatccacatgtgcatggtcttgactattttactg

SEQ ID NO: 48183 - DNA, 657 bp, Oryza sativa
ttgagctatttcctgtaactgaaatggtttgtgtggccttgttagtccttgtagtttaacatttgtagttgtgatgtactgtagtgtccatgagatattcgtctatttccttgctggttgaatcttaacataaaattgccttgttacaactaactctgtacctaaattgtctccttgtctatgacagactgtaggagaaagttctctggttcgttggatggccttttccagatttaccaaattgcattaagtggagttggtggttacaaagtttcttcagaggactcattgcatttggttgaagccttaaggttcgtttgttcccaccagtgctttagtcatttgttgctacctttgttttggatttgatcaaaatctcaccttacatgttcttgcactcatcagtgtggttatcacgactctcccaccagaccatgctcaaagagcattggagttaatctgccaaccagtaattaatcccttgcaggttagtattgatcttttacagtcatttgatgatttcgattttatcaatgctaatatagtatataccgatataatacgaaataatccaagctggagatgcactgcttgatcaagtttctgttcgggaaattaaccttgcatatagaccgaatatcatgcatttttaggtgg

SEQ ID NO: 48184 - DNA, 520 bp, Oryza sativa
ataattggttccgtgcctcgtgaaatcgtagcccaacgttggtagagttcgtcggtttcgcacactttattagttgtcggtgggggtttgcttttttttttttttacaagcagttgttaattcacggtaaatcacgatgaggaaaaaaaaacaggttatctgcggtgccggcgaaacgcggtggaggtggtgttgttgctgctgcatcggcggcggcggggagcgcgcaatttggcgccggggacagtgagaatccatacgaggtagaatgattgggttattgggagtggctatgttcatgtttaggatcagccttcgttggtgatcaggtgattcaatgattggatgtggctcctggtcttgatgggatggatggtccctgtttgttagaatttggggatcaatccacttgatgggttcaaccatgtgaagatggcctataagcggaggcgaaaggattcccatagcaacaaaaatgccgaacacctgttaaggtgggtttgggtcatgggggttcaga

SEQ ID NO: 48185 - DNA, 607 bp, Oryza sativa
gggtgaacaaaataagaccaaaaaactcggttagtagttcggctcagccatcaacagaccaaaaaattttcgacaaattcggtcattagtttcagttatccgaattacccgaaaagcccgaattgtgatccaatagtcctagaaggcttaccaagttcagtagaaataccaaaccttagaggccagcagggagggagtaagtcaacctcacgccggccataaccagcgctgcttccaatccaacccatccatcacgcggcagccgccgcagcttcaatggcaccgcagccgcttctgtctccactctccaaacgttcgtctccactttcccattgttgcttgcatagagtctttgcaacttgtcaaattcagtcaaaccgagcccgagaccgaatttactggtcgtgagtttttttttacgaaattcggtcatgagtttccaaaaccgaaatgaccgaaaaccaagaccaaatttttcggtctgaccgaacgcccacccctagccttctaggcctccttccgattgtaggaaaaagaaggaattttgttcttatggattggatcactgtagttttatatttgcgtttggctatatttaagttaagaa

SEQ ID NO: 48186 - DNA, 518 bp, Oryza sativa
ctgctgtttgtgatgatgatatgatagctagctagcttctcaaatcaagaactcgatcgttttgattttagctggtcgtacttgagtagtactactcctgatcaaaattaattgctgttctttgctctgctgatctagccattacagtcttcaaaaaatctcatcttctctctctctgctgctgcaacaagatcgaacaagtagaggtaccctgcgaacagtgtctccaacagtgcgatctgttctcccgggcctgcttggtcgtcgtcctcgtcgtcttcttcctcttttcatgttcttgcaagcagagagagtcagtcagtcaggcagtacagtacacagtgtgatcgatcgatcgatttcgatttcgatcgagaggagagagagagagtcgagtcatgtcagcactgtggctgtctcgtccttcttggggaatcgacgtactgtttcttcttggggagagtcacggatggctacctatagcaattgcttctactgctactagtagtagtagtagt

SEQ ID NO: 48187 - DNA, 6643 bp, Oryza sativa
ttgtttaagttttctttttgttttttattagtactccgaattaaaatctggttttatttttggcttttgcgggagattggggcagtggagcttccctgggcgtgagctggggtgtctctgtgcacgtgggcccgaatgatcaaatattaggagattattaagtccccggtttttcttaattaacgtagtacatttcttttaatgatgtgtttcttgtaaaacgtttttaaatataaaagttgctttgaatataaaatagatctatttttaagtatgtaataactaaatactataaaattaattatgggctaatggttgaatacgctaactttatttttattttgatctatctaaaacaccacctaaaagagctaccgtgggttgggctgttgaagttaaaatgccgtaaggtttgtaattgctctttttctctaaagagaaaaaattaacagatcaagtggataaaaaggatactctttacaatcatgacttggtctagcaatgattcggtggcaatcaatcatctagcaccttgattgatttatcatctgctcgatggcacacaacataacaaacatatctctttttaaaagacagattaagtcgttaacatcttttctcataggttcatagcatgtgatccatccgttttatattataagttgttttaatttttaagtcaaatttattaatagtttgactatgtttaataaaaatataacaataattatagcatcaaattaacggtagcgctaaaatattagttcgagcaccgcacaacgctttcttcttctgcttttctcttgtttaccacaccaccattcatctgcatctcacctttcctccgtccgtttttcttttcttttttaccacctcaccttccgtgtttattttttctcttttccatatgcttttctccctttttaccacaccaccattcctccgcatcacaccttccctccgtccgtttttcttttctttttttaccacatcacctcgtgtttattttttctattttccatcttatccatgcttcatcaaaaggcccggtaaaatattaaccatctagatttttccccttctcattccttctctccagtttctgttttttgcattttagtaccgtctagtttttctttccgagtttttgtattttagtatcttcccgcgtttcaaaagtaacgaatttactatgtggagttttccatttactcccagctttccacatctactcattcaaaagtaacaaatttactcgcataaatgctcccttcaaaagtaacaaatttacttgcatgaatgcccccatatcgtactgcataattcctaaatggtcgtaaaggaattactaccagcttataacgctactaattcttttactagtgttatgaatattgttcagactttgtgatctgcgagtaaaacaattaccaccttcctctcgatatagcccacgatattgtagccaccgtgtagtaatatgtttactgtttactgatatgttcaatacacaatataagagtaaaaattgatactaagagtattgttaatctgtattataaaatggtcatacgaatgaaaaaaaatgcaggctcaatcacacacgagtgataaaattactcacaagtgaatcaaactagaaaagaaaaaaaatgattcagccaaaaatccatcgtgaagttgggatcctggtggctttgttggatcttgctataaggatggagaggttggtctgtgtcttgtgactggtgctgaagagggcaaccgggtgattagcagtaatcgacgatggaatcatggaaggatgtagcggcgtggtatagaggtgagctcgacgttgcatggtagcagccatccatcatatagtaagcacgaagaaaatgcaaaaacattatcgttcgtgtcatagagacgacgagcgaaagaaaaatagcaaacaacttccatcatcgacggactccacactatcctctgcggacagccacatgaagcatgatgtgcaaatgtaggacctgtgcagcccatcaattcagatcaggtaatattggagattgcacgttaatttggtttgcaaaaataaattggggcttcatgcgtgaaggtgaatgagagtatgcatgtaacattgaacatatgagatgaatgtggaataaggcatgattgtgcaccataagtttatctttgactctttgcggatcagggtcacatatgagatgatgattatgggctgatttggtttgaagctaaaacttgccatacaaatattggcatttttaatagtaattctagtaatatttggcttgctaccaatacttgcaaacaccacgtagatattgtcaaaaaatattggcattggcaaaaacttacctatgttttggtattatcaatattttggtatgcttgcaaaccaaacaaaagccttaatgtcatccttggctatcatccacccccttacaagaacggatcgaaatcacaaatcaatgcacaattatcaagatatgctacaaaggccttgtttagaaccaccggcaaattttttttccctgtcacatcgaacgtttgaacatatgtacggagtattaaatattgataaaaaaaactaattacatagtttgcgtgtaaattgcgagacgaatcatttaagcctaattgcgacatgatctgacaatgtggtgctacagtaaacatttgctaatgatggattaattaagcttaataaattcgtctagcagtttacatgcggattatgcaatttattttattattagtctatgtttaatacttcaaatgtgtgtccgtatatataatgtgacacaccaaaactttacacacatatctaaccacccccataaatacaatgactgccaggtaaattctttctttctttagaacttttcacctcgaggacctcaactccttcctcatcaccaattgtgttttgtctcctcagtgtgccctaagccatcatctaaagagtgaaaaatgttgttccaatcaaaataaaaggaccattcccgcccatttgaaaaggctagttattttcaaaagccaaaatggacagattaaatctccatttagggctcctgtggaatgcgtaataagaaaaattaatttagaaattcagaggaatatgaaggaatgcacatgtaaaacaaataatttcaaaatataggaagtttggaacacaaaatttggctaactaattatattagtagtcaatatgtgctcaacttaaagtcatttggtgttatatgacacaatttgcttggacttagcgaaggaaagaaaaaagatgtcaagatggatgttcaaattgtgttcaaattcttgtatagttgaagacgaagaaaatatcctctgtttttcctacatacaaaacgaaggaagaatgccgatcttttccccaaatgatttgaaatatatcctacaatccaaatgaggccttagggcatccacaatgtggtgtaaaaatagtctgcaagcaatagaatattccattcagccacctattaccactgtgcaactagtccatatagaaaatatagcaaaagatacccatatgcatatggactacccatatgcatatagagtacccatatggaataaattatattatctatctctacttttctctcttctcctaatgataccttgtatccatatacattatggagattgccatagggataaactatttatgtgggtcccatcttcttagaggatccaatgtcctgcaaatttctttcaaatggaaagaaaggaaaattcagcgtcttggaaattttgctttcctctattttttccatacctaagagctactttgaaatacaggattacaaaatgtagggatagacagaattacaatactccaatatggtaggcatgtaaaatagaggattaaaaacatagaaattctatgtaaacagctatttgtatgaggtcaaggaaaattataggtccactgctacaaagctttgcttatattttttaatcaaacaactttattagtcaatgactgtgcgacttatttccatagtgttgtcattatatgcttgattggctccttcttcatccaggaaagtaacataagttcagactgaatgggtttgtttcccgtacgtttcctatggaatcgccggaggaggaaaaaaaatcatttgtactgcatgtgaccaaattttcaatccaattaaagttacagcaatctaatccatttttctaaacagataatctggtctttactttatcaaaaagctacaatcattcattacaatgttcttaacttaaatatagccaaacgcaaatataaaactacagtgatccaatccataagaacaaaattccttctttttcctacaatcggaaggaggcctagaaggctaggggtgggcgttcggtcagaccgaaaaatttggtcttggttttcggtcatttcggttttggaaactcatgaccgaatttcgtaaaaaaaaactcaggaccagtaaattcggtctcggtctcggtttgactgaatttgacaagtagcaaagactctatgcaagcaacaatgggaaagtggagacgaaggtttggagagtggagacagaggcggcagcggtgcgatggaggcggcggcggcggcggcgtgatggatgggttggattggaggcagcgctggttagggcggcgtgaggttgacttactccctccctgctgccctctagggtttggtatttttactgagcttgttaggcctcctaggtctattggatcacaattcggtcttctcggttaattcggttaactgaaactaatgaccgaattgctcgaaaattttttggtctgttgatggctgaggccgaactactaaccgagtttctcggtcttattttgtccacccctgtagaaggctagaaagctgcactcattttttactagcaaaatgtccatgcttgatgctttgcttatggtataaaataatgcacacacttatttaaatatatatatatatatattatttacttgtttcaaatacatatttaaatattatataatattagaaaatatcaaggactttgtaagacgtgtaaatttggtggggggttggtggagaaacaatatttaaacttgaaatgagaaaattcaccacctagctggaatagctcagccggttagagcgtgtggctgttaaccacaaggtcggaggttcaagccctccttctagcgttatttttattgggccaatagaatttttgtttctggcccagttcagcctatttttattgggccaatagaatttttgtttctggcccagttcatagaatttttgtttctggtccagttcaagccctctttctcgcgtttttattgggccaatagaatttttgtttctggcccagttcaagccctccttctcgcgtaatatttattgggcctcttacctctattgggctaggtttattgggcctcttacctctactggcccaacatagcccactttttattttctggtccaacatatttttcgtttatttttgtttctggcccaacatattgggcctcttacctctatgagcccaacctagcccatatttttattttcaaggccggccttaagtccattctattttgccacatattaggtcttctacctttttcttggctaattcctactacgtatctttctttagtccaaaaatattttcttcttatcaggcctagtccaatctgttttttgaaggccggtcctaatgcatgcgctcccgaagtccgatgaaattacacaaacacaactttttttcccctggagaatatctgttccatgcaactacacaagttcaacaatctgtcatccaatttgctctcttctgtaacatctatatatactgagtttgataattattctattctatatgattggactacttacattttaaaattcctcttattaacttgaaaagaaatggttgacagctaatttgccccactgtagatttataaaatttataaaattctttgcgtggttttattgcaaattaaacagatggaaatctatgtatcagagacaagacatcctttaactttcttgtgcagcatatgaaagagaagtaacttacattaaagagcaaaaatattttgggtagcatatgaaagaagatttataagtataaacaaaaactagataaaaaatatgtacagcatatcatttaaaaatattcccaattttattgaaagaaaatacattttttttgggtgaaatgaaagaggaatcatttacacaaaataaaatggcacaaacaaaataatttacgttaaactgcagaaatatatcatgtatatcatataattggtaataccatattaaaaaaaatgtgaaaatcaacccaaacatctattttgtgcaagggggctttgaatgttactctttttttctttaataaaggcagtttgggtatttcctaaaaagccatctggtccaatggtacagagtgaaaaatgactcacaaactcatggtctagtatataaggaggaaattcgcaagtcattgaacaaagtgaactcagtggcagaaaatatattctctcttcctgaagagcttggctcaatcagatttaaatattattcccatcattacattttttaaagtacaagaatatcaaa

SEQ ID NO: 48188 - DNA, 1068 bp, Oryza sativa
tcatagtactagaattatatgtcgtccatctactaaatctcttatattgggacggagtgagtaccagctaatagttatatataggtattgaatatattcttcatgtaaaattctgcaaatttcaatcaaatttccgattacaaaatctgacgatattttggcccacacagcgaccccggctggttagattagccagcactaggcaataatttaaccaaattactcaattaatattcatacaataatgttgggttgccttggtgtttggggctattcgtgcttgctacggcttagcccaagcaccagaaaagccctcgttccattatcgcttgagatatgtgcagtgtacactacgaccagaaattgttctaagtactcttgtcacaatgtcccaaaaattagagataaagttaatatatataattctaaaagtgaactaaccagccgagctacctttaattcccaccctcatagatacacacacaaaaataataaccacacacacacacacactcaaactttcttgattcttgataatcttaggcttacttataagatcaagagtctactaagatcaagagcttacttctgaggcttaactcttatatatatggtcctaattaagttactctttcgagtaccctttatttttttaataagtattctctctgtcttaaaatatactaatatatatagctaattttaggattcaaatttatttcaaaatataactacatccatttcctcatctaaactaatcacacttcttgctcgattcaacttttttacatactttctcatcttaaccaatcacagctagccatttctcacgcactaaacctaatttaagaaatgacatgcataagtagttgtattttgagatgaagagaggaccagtgataaaattttggtttaagtattaaattatataaacaatgattaaattaaacatgcatatttaaggttgtgcccatgtgttaaatgacacacacacatatatataaagaatatgtgtatatatatatatatatatatatatatatatatatatatatatatatatatata

SEQ ID NO: 48189 - DNA, 1228 bp, Oryza sativa
agcgtagctgaaaattacatgcatcgacgatggtcttatcctgtccaatgatcacacgacaagtatagcagaagtactgtgttgtgcatcttcaagcaatttgcatgcactactgtgtgtgtgtgtgtgtgatcgagttgatggaactatagcaaggcttatggtgtagttattttaatctagtgcagtattaggcatgcattgatttatgttttatctcattaccacacctagctaggctacaatggtgcattttggcttatatacagggagatggattggaattttgttcctcaaaggatttcacttctttctttatatatcatataaatagtcatattttttttaaaaaaatcacaagataaattaatatgcgatatttcacttcataaacatgaccttgataaaacactaacgagtatacatacattcacaattatatttattattttttttaaaacttgtagaagtccagtttgaatttgtatatttatgaagtgatgtatcacagtataatctatactgttatttttttagttttattcataactagttaaatatgacatgcaagaatcaagggaaaaaacacttaactatattgagagattggaacgttggtggttgctggcaggcaaacccccattttactcatcatgacaccctactttgaatatagcactatactagagtctccatattgaacatagaaaatatgcacaaacacacattcttccttacacaaattaaggaattgaagtgagactagcaactattcttccacacacgcaagggcggatccagcgtgaggatctagccctagccccctacatgctggatctccatggagagcaaggagagatgggagggggatgtagaaggcaatgaggcctccccaacgtcaagctatatcttccttgcccacacggtaccttcctcgtgctatttttggttgcgcatttctttccaatgccgataggtccctttcgtctatactagtaggggtgtctgtgagttgcaacgtgaaataaagtagggattaattgatttcacatcacatagggtgaaatgatgttaagtaatgattaagtataaatttattgtaacgaaaattttaacatatcacaaacgataattatgtcacattttttacagttttatatattggtaacatgagcaacggaaattgttgaataaaatggcacagtattttcctaaaaaaatagcacgg

SEQ ID NO: 48190 - DNA, 2699 bp, Oryza sativa
ttttaggccgtttgtgttcggttttcatgggctttcagattgtgcttttgttgtgatggaggtgaatagttaaacgattttgctatatctctatatatctcacttgaaagattttttttcttatctctcacttgattttctcactcaaattacttccgcaagtttttttttgcactcaaaactttcagatttgtgcataaagggaaaattttgctagaaagaaattttcacacatgtgacgtataagattcacgtgctagctaatgaaaccatagctgaatgtacgttttactagtaagttatatcgtggttacaatataattacaatatagttacaatgtattaattatatttcaattatattatagttatatatgaaagtttttgactaaaaaatttgcggtagtttttaagatactccctaaatgtatcttaaaaagttattgttgtcatatattaaaaatggtgagagtataatcttttgtttttttacctttgagaatgataaatgaagtagtatcaattctattatatgagttgaatctccatagtgccttaggatgtgttcgggaggcaaggttgggaaccttgcctcctgacacggaaaacgaaacacacgattatagtgagattaattaaatattagcaaaaaaacttaaaaaaatatattaatataattttttaaagcaactttcatatagaaaacttttgcaaaaaaaaatccaccgtttagtagtttgaatagcgtgtgcgtggaaaaacgagggaagtaatttgggaaagaggggaaaagaacacaaccttaaaatgattgtgattcttgaaagacagagagagaagattgtgtattgtttgccctatttaagttgtatggatacaaaggaaatgcttgcctttatcaatcctttgtaattccttcacaatgagtttgttgcagacgggacagcagtattgaattgatgtacatttacaacaagtgaacctcctaatttcttaatcttaatatctagtatttctttctctcagcataaaaaaatgtttccccatggtggattggtggtcatcccctctactattcatcaatcatatttctctccattcattttcctataatacaataactatgatatttttgggtattgaatgtctcaaattttgaacccctacagtcttgtcttggagacacttggccagtagttattacttcatccgattataaatatttgacatttagaataggatctgactaggctttgaaatgttgaccatcaattttacatcagcataagtttgtaaaatgaaataagcatacggtattatgatagtactttttcaagaaaaattcatgcataccagttgtcctttttttaaaaaagagcatttaaaaaattatcgatggacaagggtttaaatgttagccaaatcttatactaataaacattaaatatttatagagtgtatttcatcactatagtcaattcctgacctccttcacatacttggttagtattaataaaagtcaagttgaaacaaattgacatgataatgatttgttgtgtagccatatatataggacatcttcaactagtggttcccttatcatcgttgtacccctcctcggtaataggttagttaccgagcaaaacagataaaagctaaaatgctagaaaaggttaattaaaaacttttttaaattcgtaacaaacatttttcgttatttagccttggtggtaaactatggtgaccgatggtcaaaccttggtttcaacgaagccacccattgtagtgtaaaaatatttctgtagcttaatttaggggttgtttggttggtgaccgcaatttgctataccaaaatcttagacacagttgaattaagctacactttattagcacattggcccgtgcgttatattgtcattttctagccaaagtttgccataattgtggctaacaaattgttggccacattttggctacgttcgataggacatgttcccaacttctccttctcgtttttcgcgcgtacgctttttcaaactgttaaacggtgtgttttttgcaaaatatttttttacgaaagttgcttaaaaaattatattaatctattttttttaaaaaaagtagctaaaacttaattaatctcacgctagacgctgcttcgttttacgtgtcgggtacccaaccctcactcccgaacacagcctttgtgtggtttactacagttatagtaaagctagtctccatccaaacaatcctttagtccatataacttcgtatactccaaaattccactcgttctacggacatcactaatacgaagatcaagtggaagatagatatttttaatgacatgttattttcagtgaacacttgaggtcctcacgatccacaaacacacattttcgtagataagttctgaaatactccatacggcggttgtcacgatgtcatgatcgtcgttacccaaggaagaagaaaagagtggcattttctccacgccagtgttcccaacggagcatcttttcttcccccacacggcatcgacgtcacactttctggtgcaaactttaataattagtccaaaaacaaaaaaagaatttcgggcacatcttctcccgaaacgccaggtgggccccacctgcatcactgacagcctgtccccacaacgcgcagtcgtgttcccacctgtcaggatgtta

SEQ ID NO: 48191 - DNA, 698 bp, Oryza sativa
tcattaatgtgattcatcaaaagtctaacttattattcagaaatagcatcaatcagcatgtacaatctactattactaaaatatctctcttttttttggaaatggcaaaaggacaataaaaaaatgaattgttttacttcaactcattttcttttactcaagacaataaccacaaaaatggtactactttggtgcttcctgtgcacaaaatataatagcacacattttacaaggcattgagatcatatttcagctttctttaacgcaaatccttcagtgtcagaaggattcatggtacttctatatgagttaaccaaactacaggacagacttgaagtaaaactgttcactcctatataggattataaagataggatgaactcagcgacatggaaacaatagggtatatgataggagtccatatgaggctagacatgtatgtacctgtggcaaaacagttagcagctcaaggaagcttgggataaagtcttgttgagagttcatttcatcacttagccaattcacaatcccaccacctccccagtcctctacaggtacatgcaccgcaagagcagccattgcaatgcaaatctgaagatggcacaaaaggtagtttgccattataactgtgaaatacaaaattgattgcttaattacaagctatatactcaaataaatgtggtcttagaatgtgtgca

SEQ ID NO: 48192 - DNA, 735 bp, Oryza sativa
atatcgatcttatatactatctccattttttaaataaataccgccgttattttttcctcacaaccattcgttttattaaaaaaatttaggtaattataatttatttggttatgagttattttatcactcatagtaatttaagtgtgatttatatcttatacatttgcataaaatttttgaataagacgaatggtcaaacatatgagaaaaagccaatagtatcatctattaacaaacggagagagtatgcaatataaactcctacttctcctatattttttttcaagaatcaagagataccactcctgtaggtgctagctagacaatatatatatattgagctgttccacagcacgagaaaaaccctaacagatagcatagaaatttcaacatatcaagaagccaagaagaatatacagataacgatctggaagctaccgtgatggggacacactcagaagtgagagctaattaatcatgaaacttgtcctacatggttaatttaattaaaaacaataacaaacagcaattataaatagttggtaggggccagagttttcttcagctacacagagaagttgttatttttagagagagagagagagagagagaggaatatagaggcgatttcaagggcttacaagtatatagattaaggatgtgttcttcccactctcattttctgcgcgtacgcttttcaaactgttaaatgatgtgatttatgcaaaaactttc

SEQ ID NO: 48193 - DNA, 1153 bp, Oryza sativa
tacttattaaaaaaataaagggtactcgaaagagtaacttaattaggaccatatatataagagttaagcctcagaagtaagctcttgatcttagtagactcttgatcttataagtaagcctaagattatcaagaatcaagaaagtttgagtgtgtgtgtgtgtgtggttattatttttgtgtgtgtatctatgagggtgggaattaaaggtagctcggctggttagttcacttttagaattatatatattaactttatctctaatttttgggacattgtgacaagagtacttagaacaatttctggtcgtagtgtacactgcacatatctcaagcgataatggaacgagggcttttctgttgcttgggctaagccgtagcaagcacgaatagccccaaacaccaaggcaacccaacattattgtatgaatattaattgagtaatttgtttaaattattgcctagtgctggctaatctaaccagccggggtcgctgtgtggcccaaattatcgtcagattttgtaatcggaaatttgattggaaatttgcagaatttttacatgaagaatataattcaatacctatatataactattagctggtactcactccgtcccaaaatataagagattttagtagatgtacgacatataattcctagtactatgaatctaatcaaggagcctgttcagattcataagactatgatgtatcacattcaccatagatgtactatacattgattctagtactacgaatctggtcaaggagcatatccaaatttataggattataatgtatcatattcacctaaaatcccttagtattttattctagaatagagggagtacttttcctaggagtgcattccatacatggtcgtataaggctacgttttgttcgtgtgagatagggtgagaaaacacatcattttccgcgctcacacttcccaaactactaaacggtgcgtattttgcaaaaaatttctataggaaagttgctttaaaaaatcatattaatccatttttgaaatttaaaatagttaatactcaattaatcatatgctaatggctcacctcgttttgcgtatctttccaatatactcctcaaactcaccctaaatacattggttgcgtacgtttggcagcgattg

SEQ ID NO: 48194 - DNA, 669 bp, Oryza sativa
cacccataaagcccatggatactcccataagccccccttcaattttttcatcatagttgataagacagaagatgctaaaggtcttatcatagcattttagcatagtttaatactgagattatgtgtttatatcggtgtactcggtatgttgagtccccctaactttttgtttctgaatccgtccctgaacgtgctcaaggtgtggcagcgcgattctacgtcgtcaacactcacccgtacacatgaatgataatttttcatgattcttcaaaaaatatttataaacacatatatagttcgatcgtggagtggtttagtattagcatttcaccgaactgttacctttcaccctataatttcctcctcgcaaattaaagtttaattcgttctaatggtggcaaacagaacattcacgacgggatatcgatcttatatactatctccattttttaaatagatgacgccgttaattttttctcacaaccattcgttttattaaaaaaatttacgtaattataatttatttcgttatgagttattttatcactcatagtaatttaagtgtgatttatatcttatacatttgcataaaatttttgaataagacgaatggtcaaacatatgagaaaaagccaatagtatcatctattaacaaacggagagagtatg

SEQ ID NO: 48195 - DNA, 2073 bp, Oryza sativa
ttcgtccttttttctcaacaaatctgtatttggtgtggaattctaaactaaatatatttgcctttgataaaccaaaattttgaactaaatttcgaactgaactatttacgtgtggattgcaaactgaaattttgtactaaatttcgtttggtcccaatacaatgtgaaatagctaaaaaaaatactcactacgttttatattactcgtcttgacttttttgttggtcaatttttttaaactagcaaaatgaacatgctttcatctaaattccatgattttcgcttccactcatattctaaagaagaggaacggacgtagtcgggaatgtgaacgtcgccattgtttcatgtcaaaaatgccttgccgtcggccgccgacggccgactgccctccgcgcgcagcagccggcggcggcggagcagtcggtgaacaccatccggttcctcgccgtggacgccgtggacgcaagctctgccctcgccgcgcaacccatctccctcgccgcggcaccccgtccacctgtctgacgcccgtcacgtcctcgccttcaccacccggcgcaccgtaaggaccgcgtcacgcaggacgacccgtgtgacaatgagaaaaacatgaggtgattaaaaaaagtagttaagttttgaataagattataaaaaacatagcaacatttttttttacataaaaccaacatattatcaaacaaatttgtttttgtagatgtagctaaatttttctacaaacttattcaacacctaaaaaattttgactacaaaatagtcaaagcgagatataatatgaatcggagggagtgcatgttattaaaattagttaacaattcctttgattctgttatgatttgtagaacttttgaactaaattttgattgatccttgcattaagtgcctttgctaaacaaaaactatttcctttttaacttcgttaagaattaaactttggtttgttgtatataataagaatttatttcttcaattaatttaatcaaatttattcaaatttataattttgattaaaagtgttgttcagaggtctatctcagaatttatttgcgtacatttcaagagaaaactttcgtttatctttaatttttctaaaagctatctaaatattcaaacctgtttttcttaggaaatgttcagctttatgtcttaaaatgtttttaaacaatgaacatttctaactttcaactaaaaaagatatcagcttgttgtcatgctgttgagattgggactcctatttaaaaaaatttcgtatggcattaatttgaaagcattcataatatataaacatcgttgagtgataatttggttgacaatgaacaaacacaattagtttgttactaatttgtgcgacccttccataagttgccagacattcactccaaaatatgaaataatatcagtcatcagttttgctgaacgcgtgagttatatctggacagtggccactgccacaccacataagttccaagttgataagttccactgaatgccaacatttccaaccaaaagtaccaaacttccagttcacaaactccagagcacagtaacatctatgaccaaaagtacctaaggcaacatgcacaccgaaatagctactagagtccgaatatggactcaggttcatgcaaccccttaggaaagtaaatgtatataactaagaacaaaagactaaaggcaacagccacaaccaacagctactcaggttcatggccatgaccatctaggtcagtttaattacaaaacacatccacatgttccaggcatgtagaactagtccattctttccagcagtagcaaagtcataattatcttcagattgcgctcgctgcgtcaagctgaaccatctaaattgcaccagaaacaatagcaacccctccatggtcagcacagaatgagtttccattcagagccgaagatacggacaaagcctgttttatgttacaaacaaaatggttaatattagtcctcataagttatatggggaacaattacttcatgcacacctgcactaccatgtatcaaatacttactgggttagtcaacatgaca

SEQ ID NO: 48196 - DNA, 1620 bp, Oryza sativa
atatagcatatggctccatctactatggtctatcttgctagggctctagcaaagctagcttagctagcttccttaagatggctagctccaatgaggtgttttcaaacatgcgcatgctttgctctccatccaatccagtcgatcgatcgatcgatccaatcatggagctagacccatcaatcattgtgcccatttccctttctttgatgtgtccgttttgattcgatattggccatatcacctcttatagctataccttcgcggctggccagttcacccaaaagcttactcaactctgtcgtaccggagatcgacgcccgatcgtatgatttcacactccctgtgtctctgatgtatgtagatgacgatgaacagtgtcccatatcggtgtctcgtgttggtacacctaagcattgtagcgggagctagggtgctgacagggacggcgccgaggtccacgtcatgaggggtagcatttcttgtcaagaaagaacacgtatgtgcaagatggcaaatttttttctctcctattgcgtgcttgtttgggagcaaggagatagagagagagagagagagagagatgcatagctaaataatgagtggccgtttcttcctttgcagctaagctcttgtacaagtccacactcaatgtgtgttgggtgatcgaattaagtgggtgaaaatatatagtttatatgtcagtagtgatctacagagcagtgaatgacattgatttctagcttagctacagcttctctctactagagctagtctactatatcattaattgtgttgttatcgaagtttaagtcaacctagctagctagatcgagtaatatggacttcattcttcctttattaatataagagaaacttaggtttttaggctgcacgcacaacaaaatgttgcagtatattacaattttgatcaactatacatgtatctctaaaaatatttagcccaggcatagaaggatatgtttaattaaactatagttgatcaataaaattagtagtgaaattttagttttgaaatatcatccctatatatgtgtctcaaagtagcatcgagagcgagtatatatagattgtttcttggatatattttcgtaccaatttataatggaaatgtacaagaccatgcatatatgttccatcaacttaacttaactagtactattagtactattgtgtactactattgccttgtgagacagataatattcgtgcacattggagatttaggattctagctaattaatcgtttccaatacacacatttgagattgacgtaattcgcaatttcgtacacgtactaatgtatacatgcacatagacatagaaatagagtagctttctgcatggcgctgtagactggcctactgccttaaatgcgctcaatgaccctgcaacaaacatcaacctcagggagctcggtcattgtcccatccccacgatttaagcatgttatgttcggccagtctttaattaatttctccattcatatgcctccttggttgcaatgtactctcccctcgaaaaaaatccaaaattagatgtgatacattctaatacaatgaatttagatagagatatgttcaaattcatagtttctagtat

SEQ ID NO: 48197 - DNA, 709 bp, Oryza sativa
ccatcgactatcagatgtgccagtagttcatcataaaagaggtgattttatatggagagaagaaaaataatgtaatgcataacggcagcaagatgcaacactaaggccatataaagagtattagggtgcatgacatatatagggcaacaacgctcggaggggcgctcgatatcttttcgttgcatcggtcacccgtcttgaatcaatttccatgcctatgcctctgatgaccattagatttttcctttccaaaataaatatacttcccagtgctacattaatattaaacacaattcccaatattaaaaatattcatttacaaaaaaccaaagggatagaattatttgaccacgaatttaggaaaagaagcaatatatatatatatatatatatatatatatatatatatatatatatatatatatatatatatatatatatatatatatatatatatatatctaccgctatagatatataccgagggggggataaataacatgaacgggatttctttatatacacctatagagagatagatccactgaccccgacaacctatatgagcttacgaataggcagatttctgctgcgggggagtcatatatctaaggaccccaattggattactgtaaaacaaatttttaccttctcttaaccgccgtaaagggtaagggaaaggaatttctaaacccaataatttaaattt

SEQ ID NO: 48198 - DNA, 748 bp, Oryza sativa
  unsure (1)..(748): unsure at all n locations
gtgtggngtgaanccttatatgatcgtgttcatcataaaaataattgagtggtatagccatcacataaccacgatccgaagccacaccgagcaatcacagaactacgatccgaaataactagctttatacctgtcaaggttggatgcggccaagtggtgagggtgagaataatccgaagcctcctggactctgacctgtcaaaccgaacaatcacagaaccacaatctgggactaatccacacaagagacccgagagccaaaagcacgaattagggggcaccagaggagccttctcacaaatccaaaagaactcacaagaacaaaggggtaagacacttatgtagtcttcagcaatctctcatatatgaggatttcaattgaacaaaagttatctaatggatggagtagagagtgcagccgtggatattcgtgctcaacgtttgaccatccgtcttatttaaaaattttgtaaaaaaattaaaaatatttaatcacacataaagtactattcatattttatcatctaatagccataaaaaatactaatcataaaaaaatttcaaataagacgaacgggtaaacggtgaatgagaataatgcaaatagcacttattttgggaccgagaatttaccaagcaagaagcttttttttacatgcgtactttggtatacttgcctgggtctggtnggcatagtacgagcgatgggaacggaacggtacaaacactgcgatccgtgtgctggtga

SEQ ID NO: 48199 - DNA, 572 bp, Oryza sativa
actattcttgcaagaatgccacttgtggtgagtctctagaagtctttactttcccgtatcattgatacaagagtgggatttcatggaccaaatgcacggagaagtctcttgaccacaaagtgatttgtcatgtcctcactcccaagtcctttaatcttgttgacaagaatcatcatactatcatacatctcttgcgctgtctccttgtcatgcattacaaatcttgcaagccttcctttcaataattgaatcttggactcacgaacggagggacatccctcatgagccaattgcaaagtatgccatatctacttggccttctgtagtccatcaaccttgttgaactgcttcggattcaaggcggagagaattgcattggaagcttgagcattgcggctgatgaggtgatcttgctccgaagggagctccatgtcatcatggggtatacaatacctgttcatacaatgttgcaaatacttggatgcaaagagattagatgcaacttcattttgtgctactcgagcggcataatatgtcccatcaaatcgaagagcacgcctagaaagcatgga

SEQ ID NO: 48200 - DNA, 709 bp, Oryza sativa
catcattatttactagctagggttgtataatatacgtcacctatacttagcttatatcacgatttgtaattagacttagcacgtaaggttgtgtagggttctaatgtacgacatttacacttagcatacatgacttagattgttaaaacataaatgtctcgtgacttagcatatacgcacgaaacacttagcatatacatgactattttagtcttagcatgtaatattatttgagttttaatataagattattttatttgtaattagatttagtatataattatttactagctagggttgtataatatacgtcacctagacttagcttatatcacgatttgtaattagacttagcacgtaaggttgtgtagggttctaatgtacgacatttacacttagcatacatgacttagattgttaaaacataaatgtctcgtgacttagcatatacgcacgaaacacttagcatgtacatgactattttagtcttagcatgtaatattatttgagttttaatataagattattttatttgtaattagatttagtatataattatttactagctagggttgtataatatacgtcacctagacttagcttatatcacgatttgtaattagacttagcacgtaaggttgtgtagggttctaatgtacgacatttacacttagcatacatgacttagattgttaaaacataaatgtct

SEQ ID NO: 48201 - DNA, 966 bp, Oryza sativa
gggttaagataaaccaagcgtagaatgacacacaagcatttgctactcattcccataatatatgatgtaagccaagtggaaagaaaagagagagagataatctattcctatacttctagtatacatagtatacatatattctagttaactgatatactagctaataccctctatccgatgccctcctggtacttcgagaagccacccctgactgccgagttccttacgacagcccgtcatgaccatacaaccggggctaaaacggaggaataccctccccaggaaattaacttaggactatatacaggcgcggaggaatacccgtactgagctgtcaccatcagcggcccacctatcatccgcagcatataaccccaaataatgatatcccgtaatctagacaccctgtctaaactaccagatactactctaatatcatcgtcatgacatagagtaattgcatatgcaaacattatacccgcaccaaagcatctcccagataagctagcagcatattcagtataacatgaacataatgtaaagtaggcattcgtatactcgaaaaatatttcaataccataaatgtatatagaagagtattctaataaaagtacaaagcttacaaaagaggaaaggaaagctactagagccatacccgaactcttccgaagacttccggactcctgatttctactatattcctattccaccagctagatactactaaactaaacttgagagagtatgagaaagcttgcttgaggtgtgtgagtgaagtgagaaagtgaagtccttatatagaggtagttatgacggttgtggaaggggaattgtccgaagtgccctccaaccatcattgggatgcaatcctggacgtccacgccgaaccctgcatccaacggcgccatgatgggttcggccgaaccatgggctgggccatcccggcccatcttcggctggcggcct

SEQ ID NO: 48202 - DNA, 603 bp, Oryza sativa
agtactagttgaaatcgaagaaggaaaaagggagtaaacattttgcaaatagcattagggaaaaggaggaaaagggactttcgcaaatagttttatgtataaaatatgtccttaggttttatccacttggcttatcctacagtcgagatggctctgataccatcttgtcgcgaccgagaaaattgcattttcccgaacgctagtgtattaatccccgtcccaggaaaagccggggtacaccatacaaacatgatataaaagacacatctttattatatcgataatatttacattattacaaaggcacttaaggcctgacaatcaaaaataaacagcagcggattagcgggcctatggctccatcttcacaggcgctcaactggggtgtaagccaagactccacctaagacatcttctccaaagcttctcttactgaagggggaaaagatagagcaagaatgagtacaaccacagtactcagcaagccacaccggcagatgcatgattaatgcaagggggtacaaggggtaataatgatataggggttaagttttgcagaaaacggcatttaaaaatcacttagttgcccaaagccattttaaa

SEQ ID NO: 48203 - DNA, 1159 bp, Oryza sativa
ctgaatatggagggcaagtacaagctagctgattctgttctccagtcaaaatggcaattgcggaatcgaaggaccttctcagattcgtttattgtcaattcatctgcttaattcacattctctgttgaaaatttatcatgagtagtgctccatgttcaacttatttattggaacaagagttgtatgtggtacgagcatttgaacaagaaacattatttattgcactatgcggaatgcccagatcagtaatcagaggaacactttatccaatttagagcagtgaactgttgtaacactggctgcatgaggaccttataaggtattccttctttctcttgctttgacatttattcttcattcaacagtgcaacctagctgtgatcgctaaagataccgcccctgttgatttcttaacccgcagcctgtcccttgccattcccctcctctacgtgagctaacctggtgcactcattcttctctaactaggatacctctcgatggcagcagtgctatctccactgatcgtggtccaggatgtagaggtgggtatgtattcgttgatactctactgattagaatttgacgaaccactgtcattcaatctgctgacacatattgcagttaatgtctgttcttcctgcctgtataaacactgtttgatgcatgtagaaatgtgtaccttgcaatgtcatgcatggatcaaaatcagacagctcaagataaggtattacaagcacacttaattgaacaaattcgacatgctgcactttgattgacaattttgagggcaacaccaatcttgatttgagtgaaaacttgctttatgtttctatttgttccatttctgtcttttcacatgcaagtgcaaccttatttttttatgagacgttgctgtacaagattaccagcattttcttcccaatgaacaatacagaatgttgtttcttattaatggttctatccagcaatccagtcttctataggttgtcctgtttttgagcagtattcaggagggcagatccctcccttgaatttggaagtgactagtatattcaatgcgtgcgcatatgcaatgctctttgcaggcacacaacattattttagcttcattgaattctgacatttgctgttttggcaaatagttatgaacctctcaaca

SEQ ID NO: 48204 - DNA, 3273 bp, Oryza sativa
ggcgcctctgtgcggatgcgggtaagtccggcgagcggcggcggcggcggcggcgcggagagaagggggggatatgcggttgagttgagagccaagtattttgtgtgggtttcggtggttgacaggtggggcccctggtagctttctcccgtgaaaaactagtgcggaggtgtgttggttttaatggctttggtttagatcccatcatggcttatgtggacgttaagagcaagtccaataatataaccaattgttggttctaaatcatttatatctaatctaatactctagtcatcctatctttctataaagttatcccccactaacttcttaagcttgacatgcaaagatgccacatcatcatctactaacaagataccatatcattatccactaattaacaagatgacacatcatcatccactaacaatcatcatatttaaacatcatgcaaacatactatatctttatagtttttataatttaagagttttttaaatacaaacatattaaattatcatccaatataattcacataatgtttcaatgtatatctttattatgttttatgatatcctatatacttatatagttcatccttagtttgtgcttaaataattaatctatggtccaaattatttttctccttttttttctctaattaagtcatatcacatcaattatttttagcctttagataattaatctacggtccaaactatctccctactactagcttactttttacatttgaatcaccattctacatactatataaatttaaattatcataaactacattaatttatttaatctgatgttatctagctattttacatgttattttttttattgttatcatactgaattcccgcagcaatgcgcgggtttcacctagttggatataatagttactccctcggtactcataaaggaagtcattttggacagcgacatggtctttaaaacacaactttgacctattgtttctataaaaatatttattgaaaagtgatatatgtatacttttatgaaagtatttttcaagacaaatctattcatataatttttacattttcaaactcaataacttgagagttatttatgatttatattcccaaggtttgacttaaacattatccataaaggaatagaaacaataggtcaaagttgtgttttgaagaccgtgttgctgtccaaaacgacttcctttatgattactactccattaatactctgtcctacctctaatatacacataacgtcttagagtctgtgttacagccggctacaaatctgtagctcgcttttttctcactcttctcttttcttctcgatatgtggttatagttggtttatagcttgctattgtacctgctctatgcaagtactactagtactatctgctcggaacttggtagattctctctttttcaagtttctttttgtaagtttacatgtaattttgacaagtttattacgatactcgaaatctatgtaagagcagagattaataaatgatgcgctaccatagatcatggttgagatgataacaacatttttcgtatgaccataacaggataatgtttacaacaaaaaataatactgatattattaagcttgatatggccatacagcgaagcttgaaattgaaattaattaagcacaaggtggtacaatgatattagtgtgctaacccaagataatgtctattgataaaaaggaaaatagccaaaacaatgtagcttgcagatcaaaagcggacaaattggataagtctagtgtttgatcatgccatacgctagttgaattctagtggacactactaaattaccgacaagttgaaacgacgctgctactgatacggataatcaatatttatcatggatataaaataaaacgagagaacatgaactgagcataactttttttatagtcaaatctacacatttagattcaaattcttaaacagtacgggtgttcgaattttttgctaaattataattcatgtgaaaggtcacaagaataaaatgtctagtgataaaataaccagtttctttagacataggagtgatttatgccagacattttgactagctcttaacataaacataattagaaatggaactttactacaatgccaaagcaccacgggttttgacgctgaggcccaacaccttaacaccgtggaatatactacgaaaacaataataggcacaaatgggggggggctcctagttagcgcagacgcgccagataattttgtagcgcgcacttccgtaacttcctcctgtttcgacgatctgtatatttttctgttccgcatcgcttcaggggaggttaagcgtgtgggtccactacagccacgcgtcattagcactaataacaacgctaaccatatggattaatctagttatagtttttattatcaaaataatacataaatagttaagttgaaagtttcgaaaatatgatgaaaattttcaaaatctgagttgaaagttttaaaaaaaaatcttgaaagtttcaatttcgagttgacagttttgaaatttgagttggaagctttcaaactcgagttggaagttatcaaatttaggttgaaagttttcaaatttgggttgaaagttttcaaatttgacttgaaagttttcaaattttgagttgaaagtcttcaaattcgggtcgaaagtcttcaaaactcgagatgaaagttttcgaaattgatttaaaagtttaaattttgagttaaaagtttttaaattttaaattgaaagtttaaattttgagttgttttaaattatggttgtgacttttaatttttcatctataaaaagttttaaatttcacgtatatattttaaatctttagttaaaaaatacaacctcatgaaaaaaaaggaaagattaattaaaaaacataattatcggaaactaattccgtcaactaatataatcttgattattttctccgaatctagcgcacttgagcacgcttcccggtgttccctcgcgcaaaaaacagaaatagaagtaggccgaagagaaatcacgtacgaggacatgggcctaaaacgcacgctagatggctagttagcgcgtctgcgctaattaggaaattcgcaaatgcaggttatagcatgcgtactgcagtgataaatggtgtctgtattatcttggagatcaatgtttgaatctttatcgctgcaatattgtttcctttttctttcgaagtgctgaagaaaaaaaaaaacaagacggaacagattcctaa

SEQ ID NO: 48205 - DNA, 1086 bp, Oryza sativa
  unsure (1)..(1086): unsure at all n locations
caaaatgcatatgtaacgccgtatcgcctaattaggaaatctcgcaaatccaggttaaagcaatgcgtactgcagtgataaatggtgtctgtattatcttggagatcaatgtttgaatctttatcgctgcaatattgtttcctttttctttcgaagtgctgaagaaaaaagaaaacaagacggaacagattcctaagtggcaaaaaaacaacgataacgcagattctgaagtggcgaaaaaaaacaagatagtggaagtgggtttggacctagcaccttcacaccttatttagaaacaatgatagtgggcctcaacaccatgacccatgacgctgagatagaaatctatttttggtttataattttttagtttgtgtattactcgatgccaaaatatatgatgctaaggattcgtttggagagtttaaagattttaagaagctgctggttgatacccaacttctgataatatgcaaaaaattgagttcaacttctgacttctagcttatatgaatgaaaaacttaattattttgggagttttcgattcagggaaaaaatagagttttccaaagctttttcaaacaggctctaagcttctaatttcaacatcaagggtaggggtggatactgacatgactcggctcggtctactcgttaggataacgagccgaatcctaactcggctcgactggcaactctagctagcttgtttagctcgcgagccaatacatccgtgactcaatagaaatctctcacttcgagattctggctgccaacaattttttttgcaattgcttaagaaatcaaacaaccgacaaatcacaaagacttggcacaaatttttttttacacattgcatccataaaaacagatctgaaagtctcgtcatattggaaccaaacaaaacaccaagcaaacaccctagtgaatcctagaccaaccaaaattaacatgggagattgacttgccggagtgccgaactgccgacggcgacgaggacggcaagattgaacttttgctccttgatttatactcgtagcgctgtcgatggagatgcatgctcttgcatnctgcagcaggggacc

SEQ ID NO: 48206 - DNA, 507 bp, Oryza sativa
tttactttccgagggtcgatgaatccagtatcgaaaaccccccaccgtcgggccctttgaatctccattctacaacgataaaaggaagtatatattatatatagtctacttatatacaaggacctaattatttaaaggaaacgtaataagaaatctaactgaacgatacttacaaaatgcagcaactcataatagaaacgtcgagggcgtccagctggtatagttcgtagatacccttgaaattgatccagagaatgtcatctccttgcaagaagtccgtgtccctgatcctcgctctgatcatctctctaccggtggcgctcatctccatgtacagttgatggaacttgtacatttgagtgggtaggaactgcagctgctcaggcttgataagcggtttatcgagttcgtacatgtatttcactttcgccttttcgattggtgcacctcatatcaattgatccgtagttagcccggtgtcatcaataaattcttgtattccaaaat

SEQ ID NO: 48207 - DNA, 681 bp, Oryza sativa
aggaaattaacgggggaacgactgaaaaggcgacgggatggcatggattcaatttcccaaaattccagcggcacctagccaatatcgtaaatagtagtggtatttttctaatttgatacatttacaatagcatggatccaattaaccctagtttttatcataggtcatttatataacaagttttgtggaagattcaaaatatcatttttttggcaatttatgtcccaaatatactaccaagcataaaaaaaataaaataccaattctatttctgccgtgaattattatggaagtaaagagaaaccgttcaaatgataaggaaggcaaaccttgcagagaagggaattatcaatcggaacacatcgctgcgcgtgttcatcatactacctacgaaagtacgaagccgtcaggaaggaagagcccttaaaaaacgtttaccacttaacccccttgaaactccttgtaatcaccatcccaccccaccccccctccgtccccccacggggctcttcttcccccggttattcgttcgcctctcccaaaaccctagccctccgcgagcgcgcgatccccgataccctaaccccgccttcccctccacatcggcgccgtcccatggcctcccggggagcctacgacggcggctccggcgccggaggcaagatccggaggcgccccccc

SEQ ID NO: 48208 - DNA, 2157 bp, Oryza sativa
tgttgctagcatttcagtaactggtaggcataggtaccgccgatatatcttttaattgcataataccccaaatacagcatacacctaaggaactgaacttgatctgcaatgatggggtacatccatgaagttcataacacagcatcacactattaccatgaaatgatttgtactaataataatttctatgtgaccaagaaaatataaaccatgaggctatagaaaacatgggtttccctaactggtttttctttttttaggagaaaaagaagtgtacttcagttctaaagctgggaactaagaaatggacagttgtatggcatttactttggtattagttagttgtagaaaataccattgacatttctggaaggttctgttaccttagataatttttcttacccgtgtcttctttttctcatacgtttgtttatgctaccacattctctcctgtaccttctcccttctttttttctcacttaccgagaccaattttctgtggtgaagttatacttcattgttaatgtcatgaaccgaggccatgatggcataaccaccactgggagggtagccgggcggcgccggctattggagaagggatgtatatttagactagggataagaagatattaaggaaagaaattatactaatctgattcattgcttaatgataatagacacaatcccatccttatatagattatataacttgatccttaagtaaggactcaatctaatctttgactgataatcttatctctatatgggctgcttatggccctcagccttttggctcaatgctcatcacaattaacttactttattgtagttccatttaggctggtatacattggagaacactaagaaaattgatacatcctgcatagaaaaagaagttcgcattttctttgtagcagttaatgcatcagcctgcagttgtatatgatttgcgtacatgatttgtatggagtagcaatgcagttgggggaacacatcttcttgatagttcaatcctcatttatcctttaatacttccatgcttctgtatgagttgaagtgcaatgccatgttttctttgctagatcctattgttgtgaatacctgttttgcctattgcattgtaacttgcaaatttgttttgctaatgtccaagtgtacagtagaaatgcgaaaacatatttctatcttacaaataattttctgtcttgcaggagtgaatttgaatatttgtctgagttgttgttatctagaacggttgggtccaaattattgattccaggagttggtaatatgaagaaaatgcattttcctgagaaggcaagtcgatctggagacttacctgttgatttctcctttagaacattcaacacttctgttaatacgcaagtcatgttgctcactaaatattcctgttcatatgatgaaattgatttcttttacaatcacccatactgtactgtacagaacataatttaaagtgttgaagcaacaatataatttcttatttttaagatactagaaaaaatgcccgtgcgttgcaatgggtaaatgctattttaattttattgttgttatatggtttagctagggtaaaattcactgtgggaattcgcttggatatttttttttgaaaatcataagctgcaagagtccgtatatcatctcaagttagcatgcgagtttttttaatgatatttcttatacgactccttctgtatttccaaaagcaaatgagcttaaaatccaactcaaacacggatctgtatttctaaaagtgaacgaacttaaaaaccgactcaaacccggatgacataccaaaataccggcaaaaacatcttcaatttttataatagtagagatatggcatattgttgagttaaaacccttgaccagcagaatagtttgttatttttttttcgaagttgaggaaagcatatcataggtcccccttattccctaaatttttgcaggtcacttgggtctctggatttgagtgggtacataaaattgtataagtgggtcaacaaagtcatcctacttttttttttggtatacttcgataggaggcctgtggttgctttttggcatggtttaacctgtacttatgccattcacattttaaggccctattttccattttccactttagaaaccaaa

SEQ ID NO: 48209 - DNA, 873 bp, Oryza sativa
cctttccaaccgatagacgttattcaccccaattaccaggcctcccccctcttctttgttgggaagtccaaaaatcatgctccaccccctctgtttgttttgggagcaactccccgacccccaatagatcagcaatattccaaatgtcctcatctcctttttttaaggttctgtttttcctccttcatttaatgtctaattacttttatgcccgcagtatttctgttatgtattggcccaaagagcacaatagtacatcagatcttgcatatttgttaaatagaaaaattgaataggtagccacagactacttgagaaactcaaagagacaactaaaaatgtattacaccttaatcaatctgtttagtgcagcatggcaatcatcaagttacccttgattcaagtattatgttaccacgctgttgcagttgctctctctgaatttcattagtagaaaataaaccttccatacattattttcttatttggcctcttaaaatcacaatttaacatggaaaggtccaaggtgaccaagttgtcgtatgtatatctagtatatgagttaaatttaattagtgtgtgtgaacaatgccaaatgtgtcttttagcgaacaaatatcagtttatttgttttaagcaatattagaaattttataattgttctttttctatcgaaaacatgtgcaattagctagtgctctacatactgccttattttattctcattcttgagcacaataccctatctctgttactatgtggttacatctctaactcaagttcctcaatctgttcagagtgctgtttcttccagggatttgtttggtactgtatctccatatcaggctccaagcagccttcatacatttggaa

SEQ ID NO: 48210 - DNA, 716 bp, Oryza sativa
agtattccaagaaaaagagtggaatgattttgtgacccacttatacaatttaatgtacccactcaaatccaaagacccaagtgacctgcaaaaatttagggaataagggggacctatgatatgctttcctcaacttcgaaaaaaaaataacaaactattctgctggtcaagggttttaactcaacaatatgccatatctctactattataaaaattgaagatgtttttgccggtattttggtatgtcatccgggtttgagtcggtttttaagttcgttcacttttagaaatacagatccgtgtttgagttggattttaagctcatttgcttttggaaatacagaaggagtcgtataagaaatatcattaaaaaaactcgcatgctaacttgagatgatatacggactcttgcagcttatgattttcaaaaaaaaatatccaagcgaattcccacagtgaattttaccctagctaaaccatataacaacaataaaattaaaatagcatttacccattgcaacgcacgggcattttttctagtatcttaaaaataagaaattatattgttgcttcaacactttaaattatgttctgtacagtacagtatgggtgattgtaaaagaaatcaatttcatcatatgaacaggaatatttagtgagcaacatgacttgcgtattaacagaagtgttgaatgttctaaaggagaaatcaacag

SEQ ID NO: 48211 - DNA, 2378 bp, Oryza sativa
  unsure (1)..(2378): unsure at all n locations
ttttcgactttagaaaccactttntagtagtccctggtacacatacttcttttttctattcctacatgagtttcacttgcgattctatctacatttgccacaaaatagcaaagctcgtaccatgaactattttatctcctgacacatttgttgtttataccattgatatgccatatgttccgtgactacaagggtaacataatctcatgctattcattcctgcaggatcaagttgcttcacctgcagaacttgcaaaggcatacatgggttcaagatcttctaagggatcaccattacgtcttagattgcatgacccctctgtactttccaaatcgatagaagctaatacaacacaaataacgaggcctcccaccctctctctgctcgcgagtgcaagaaatcatgctccaaccacctctgatcgtcttgggagcaactacacgacaccaaatagatcagcaatatacaaaatgtcatcatctccttattttaaggttctgttatttcctacttcatttaatgtctaattactttatgcccgcagtatttctgttatgtatttgcacaaagagcacaatagtacatcagatcttgcatatttgttaaatagaaaaattgaataggtagccacagactacttgagaaactcaaagagacaactaaaaatgtattacaccttaatcaatctgtttagtgcagcatggcaatcatcaagttaccttgattcaagtattatgttaccacgctgttgcagttgctctctctgaatttcattagtagaaaataaaccttccatacattattttcttatttggcctcttaaaatcacaatttaacatggaaaggtccaaggtgaccaagttgtcgtatgtatatctagtatatgagttaaatttaattagtgtgtgtgaacaatgccaaatgtgtcttttagcgaacaaatatcagtttatttgttttaagcaatattagaaattttataattgttctttttctatcgaaaacatgtgcaattagctagtgctctacatactgccttattttattctcattcttgagcacaataccctatctctgttactatgtggttacatctctaactcaagttcctcaatctgttcagagtgctgtttcttccagggatttgtttggtactgtatctccatatcaggctccaagcagccttcatacatttggaaggcaggtattaatcacgaaacataatcttattttgctgtaaatttgttttgggtttattaccggcttctggatttatgttgaactgctactgcatgacttttatcttggcttctttgtttgattagtgaatgatttatgacatgaaatgtttggaccttcaatattgatcactgattgactcaccacataattttgttgctttaaagtacacgatacaatgttaattgcagatttttttgatcggatgctgcctattttatgcgtaaaacacaagctattattttgaaatctaaagataaactagacgactctggaatatgttttcttgaaccctctttaatcatggtaaattggtaatagtagttggcaattagtggtgtacctagaagttttctagacttgggcaaaaacaacttcagctagcatctggcgtcatcaagcgctagtggtatgacatgccctccattttgctgtgtgatggtgaggcctggtgtccctacaagtgtcttcaggccctgcatccaccactgtttgcactgtttaccttaaacttcttcaggccctgcatttacactgtttgcactaccttaaggttttaccctactattgtagttaccgaatgcataaatatagcaaacactaatttccaggatgtgatttacagtttatatattgctagcagttagtgacacagtatttggacaatatatattttatgttaaatgaccaatagtgcataacattgtttaaatgcctaataattattttgaattggatacctgtgcaaattttcatgggtacataatttacttgtgggctacagtccacttaatgttctttgctgctgtcctacctgcttagatttgatgctaccttgtatgtaacatttactgttaataatgaatcaacaggttctgaagaggaagagtgctgctctcaataacgagagtgcctctggtggtcccatacgcaaaatgcatcagaggtacaacagagggtcaccactggtgcaaaacttcgtcaaggccaccaggggatatagtgggtagccatgctaagaaaacttgatgaagggttgggaacactcaggacaaaggtaaaaaacttaggtgtctggattaagctggaggatttacctccaaggggtggacatgtcagagcaaaatgatacaatttt

SEQ ID NO: 48212 - DNA, 1851 bp, Oryza sativa
acattggtcatcgccgaggctttctgttgtgtcgccgctgttgccacctgctccccgcccgccatgtacagggttcgctaccacggccaactacttcggccaccttgctggctgggtggctgccgccgccaccgctgctgccgtcttccggccactgccacctaggcaggtcgctgtcgtcgcctggaccgtatggttcgggaataggggaaacagcgtcagggccgattgaggagacagatttctgctctcattttcttcttttacgtatatcaggggtagaaaggtaaatcaataaattccaaaatgattattcctctttattcttattattttgttatcttaacaattccagtttccgggccgggtccactaacttccataaaaaaagagtaaacacctccttcatttgaaaaaaatgggcaaaaaacccaaaactcgaaaaaaaacacgagcaaaaccataattgaacattaaagtaggagcaaaacaaaattgttcctaataaatataagtcgttttacgtaagcttgcatataaatattcaaaaatggataaacagtccatgtctccatttagggctgatatagctagtgtaatatttttttttggaggaaaggaaagaattggttttacagatgtcaaaggaatttcataggatatatagagaaattcctctacattttggagaatttctagcataagatcttcaaatacttaggagatttgcaatctaacttatgtatctttccctcctttctatctataagaaatcaccccatttgccgcgcaagggcgcagcaagccccacgccctagccgccgtgactggccgtcgctcgtcgcgcctggccaccgctctccacaggaagacgagcctgccctgccgtgtagcgtctgggagcggttgccacaggaagtcacgttgccctgactctccacgcctaggagggctgccgtaggaagccccgtggccgccgccctgccggagacttgccggagtgtcgtcccacgctcgccgccgccgccgtgtaggtctagggttttgttgttcactgcacactcggtgggcaggagaggactcaatccctatctattcactgcacacttttttgattttttcatttgcctttctgtaacacaaaaatgtggggtctatcgaacagccgttaaaagtaagggcaaacgacttgtttgttttggaaaagtgggggcaaaattgcaaaccctaaaaaacgggctgtcggccgacccaccagttgccgtggtccacaaaaaactgaaatttgagggaaaaaagggaaaaatttaggaaatatagaaaatatgttggaaagataggataaatatgaggaatatatgaaggaaatcgggaaaattgagaaaattacatggaaaaagtatatgggctggcaaggccaaacccgtgccgacctacaagataaggtgttggcccaagaaggagatgcaaacagactgggcaggcacggcccactggttgcggatcgatatgtgcatactacttaacggagtatatatttgtacttacggttaaaacagcttgcagatagaaattacgtgcatatgtttgtaaagtgatatcgcatagatcataatctattctgttaaattttattacattcgatctttcataactgattgaccgagttacgtacaagaaacgacggaacatttttcgacagaagacacatgcaactttcacatatatatatgaagttgtacatagtaggggcatacatccaccatatgcaagcacaagcgcgcatgcagctagcattcgcttatttatctacatggagccatagcaacaagcttctaattcagggggaga

SEQ ID NO: 48213 - DNA, 676 bp, Oryza sativa
atttctttattgttattgagaaagtaaaatactttatagcaaaacttacaatatctttgggctttggctaagtgcgatgattagttttgtgttctcttttaattttgcaaacttcggtatggtgtactctcttcgtcccaaaaaaaactcaacctaggagaagatgtgacccctcttaggataatggatctggacagaccctctatccagattcattattttaggagaggtcaaatctcctcctaattaagtttctttgggacggagagagtaacagttttggtttttgctgaccagaaatattcatgcccaagctggcaaggcccatccatcgcttgccagtttcccacagccaattaagagcaagtttaatagtatagctaactactagctccaaatcatttatagccaatgtaatagccaattcatactatagttgtttactacactattaatatctggtcccacctgtcatatacacattacgtcttgaagtccgtgctgtagctggctacagatcagtaacaccactgctcttctctcttattttattctttaaaatatatttatagattatagtctgtattccagctctaattaatgctaaaagtttagtagtggcttctatggtctcgtgccctttgacctcgatggtttcgatcgtctcgttcccttt

SEQ ID NO: 48214 - DNA, 686 bp, Oryza sativa
ttttgagtacttgatgatgtgatccaggtttgctgttgagttcttgatgatgtgatccaggaggcggtgatgaatgggatgtgaggttggtgagttcgactcgaatgagccggctctctctttttattttttttttttttttttttttttttttttttttttgctcgagcaaagcttaaaatgccggctgtatatttctaataggggccggttgctattatatatgtcggttgggaaaccggcacctatagacggtttctaaccagcaccaatgagtatttgtgtactagggaacttgattttttttaaagatgtttaaaatcaaatgatttttgacaacctttgacaaaataaacaaatttgaccgaaatttcaattgaactatcacaaatttgattggtgaaattaaacataatttttccagtaaaaagaaaacataatttttacatttttttacacagctggcagaagtgtcacagcacttggacaggctgttccttcacttgtggatccagccgaccggtggaggatcacgttcacctaggttggctgcttcccgcgctctgcctacggagtcattgcccggacctttttcttcccggcgtggtcacattggtcatcgccgaagctgtcctggggagtccccttgttgccacctgttcccgcccgccatgtccagggtttcg

SEQ ID NO: 48215 - DNA, 522 bp, Oryza sativa
  unsure (1)..(522): unsure at all n locations
aatattaattatattataaaaaatataatattaaacaactaattataaaaaaaattaaaatttncaaacaaaatattaaaatatatattttcctatcaataatacatatattttataatatttaaattcataaaaaaatattatcttagctaaaaactaatcctgataaagccaactataatattttttaaattattgatgataaaaaaaaatataatatcagttacactatgtggaatttattttacttttcacaatcttcataattaatattattttacaattaaaaaaaatattacaaattaattttttaatttttcaactatatcatataaaaacgatacaatttttgcttaaatataattcaattttatatatataagataataaaacacacttttttacttttatttcattctataacctgttttttctaatttttatttattttagttactctaactatccataaaatttgttttttacaaaaattcttatctaccataatttatttcttactac

SEQ ID NO: 48216 - DNA, 788 bp, Oryza sativa
ttgaacccgttgaccaaaaatcgatatggagaatagagtagaggaggtacacagaatcaatgccaggtttgtaagaacagatgacattcaaatttaacaaattggcaatggttcatgagaggataatcatcaaaaattcagttcaaaaaacagtccattgggtacctccatagctcatgtgccaaaattcggatcagccaaaagaaaacactggcatctttgccagctcaggcaaacactcctggtataaaatgaagaaatgtgaatttctgtttgccgatcgcctcagccctgaaaaaccagagcaatttgcaatgcaggctgtaataagttctcatgatccttgtccttgacagaggacgaagtgacttatttctttcgcttaacttttagaattcttcttgcagacttttcactgttgccaccagtagtgcctattgagaagccacctggggatgattgactatgctggccaaattggaacatgcccggtgaagcggatgtagctgaagcaaactgagttgctggcgtactaaacagagttggagtggatggtgaactgcttggaagaccaaagggtgaagctgctgaaaaagcaaacgggttcttgtccccagccatctgacctccattcatctgatcagttcctgtacttaaaccaacagtcgggctcggtgtaccaaaaagtggtgttgtaggtgatgcatttggtatcgtaggcgtagctgaggtaaatgagaatacagggctcgaggttgagctaaaaggtgaagtggcaggggagccaa

SEQ ID NO: 48217 - DNA, 1715 bp, Oryza sativa
ctaattaattaagtgcagtgtgtgcggcagtcgtcgccgcagatgatcaagcatccttggctcatcgccagcacgcagttctggcaagcctcaggcgagcagccgccgtcgcactgcggggcgcacgccgtggcgacggtgtcggtgtactcgcacgaatgggcgcatgtctcgtcgcagctgccagcagaacatcttcgccgccgccggcgcgacggcggaggaggagaggacaaccagcacgacgcaggccatggcggcgacggcgacggcagccgtaggagatcgaggctacgccggtggccatcttgtgtggattattgtgcatgcgtgtgtttggtgtgcctgcagctgcaggatggttaattgactagccggagtggtgtccagtgtaatggggcatgcagccgacgatatttattggcagcaaagctgagatatacttatcttctcaatctcacctaattagtatatgtgcaagtagcttgcaagtagaatgctgtaagatggtggttttcaaaggaaatatcaaataacctaattgaagtaactaaattgggtgttcagtccgcatgtatagggctgtcaacgagccaagcttgagcgaacttccctatgtaggcttgagctcggaacagactcgagcctaatttgacatcgagcttggaattaagcttgggctcggttcgttcgagcctcgagccttttctcgagcttgctattggaaactcagccacgagcttgctccattcaagagaaaagtagaactgtgatgatttgatggagaaaagtagtactactagtactactttggaaagtaagataagaagtcaaacaaatgctatactctctgatggatttgacagtaccgtattgttttgttgatggaagaattcaatgaggagggagatagaggggatggataaaggagagaaacaaagagaaggtggagctcgtcgagctattcgagctcggctgagtaggctcgcgagttcaaaggtaagctcgagctcgatttgattatcagacgagccgagcttgaatcgaacttataacgagccgaactcgagctgcttgtgaaccttgagctttttgacagccctacccatgtacaaagtacatttgaacctaccaagatcttcatcacatctatttaagccaatactgcttaagtccctccgtctcgaaataaatcaactcgagagagtttagattgtaaggaaaaatatccacaatttataaataacaagaaaagaagcccgcgcagatgcacgggcattttatttattgtttatataaataatgctaagagaattaagttatatctcaccatatacatataacaaattatagattttgcctcgtagtaataaaaaattatgttgtgaaatagaccgtagactttaatataaatgataagaatgtctcttagatttaatcaaaattcacttttgtccaggtaagtgtaaactctcctattatcaccattacttattatcattgttcttaaaagatagatatgattttaataaatggaactccatctaaaccaccaaaataagtctaatacatcattaatacataaaactttatttcaactatgtacctaaatgtttatgcgaacacttatttctaaatctacggataagtattctaaaactaacgcttctattggttattagttattaggatagcaccgttaaaaaatagacatg

SEQ ID NO: 48218 - DNA, 1789 bp, Oryza sativa
aatacaatgtcatctttagaaatgagtgaagttgatcactaaaaatatatatagctaaacaaacacgtgaccgtgacaatgttcagagtattatatcattttttatattttgacaaagatctatattttagcatcttgtttgttttcatcacctattgtccataattgcatgagacacctttactaattctaaaattgtatttatttcccaaaattatttataataactaatttgttgaggtgcacttgtagttatgccactatggtttatgtcattacattcatcaattatcacttatgaccattatattataattcctctactataagagaatatatcatgaatagtttcatgctcatgttataggattgttcatttgttatcaaacctatttggcaaagaaaaaatgtatatgaccatagttcttgtgatggattaaggggtcgtattatagcaagatcattgcctgagcataccaatccaatagttatgaaaaattaaaaaaaaactttgagaatctcaatctcacacaaactaaaattaaatcagatataattaaaaaatataatgttgtttcatttttcatgcatgtatatttcagttagtgttatataattgttaagtgatatttgaccataaattatgatgtgaaattattttgaagattatcatgacattacttattatatgtcagctccaggtgctataatgtatttagttataatataactatgatatgttatcaacatttgaatacacctgattataagttgactataaaatttaaaaataatctaaaaaactttgcgtgtaaacacatttaatttgttttttatatttatctagtttaacttgcttcaatcgaacatcgctaaatggtttctctcgtatgcatgagattaaaaggaagcgggctaatcaaataatccaaaaataatatatccatcattttgaatgaaaattgacaacaaaattatagagtaccacgtagcattctaagagtgcttgctgaaatgccacatggccatatttgtggagtgataaattatatttttatagtatggcaaatcctattttaaaaagaccatctattacttactttttttaagggaacagtatatctaattgtttattttgttttatagcttttttaatcgtagtacgtactctgataaatattttttaggctttataactttattatcgtatgtacgtatggttctttgtatttgtttttcaatcaaacatccagtaaatggtttctcgtatacataggagattaatagtaagcgggctaatttaattatctaaaataatggatccatcattttgaatgaaaattgacaacgaaattatagagtgccacgtagcattctaagagtgcttgcagaaacgctacatgatcatatttgtggagtaatgaattttatttttatagtatagaaaatcgtatttttaaaagaccgtctattttttcctaccgacgtatatatatttttagggtcttatggcttttatttttactcgtgtatccgtacgtactttttctagggaacaatatgtaaaggtttattttattttctagtttttttgggctttattatcatataaatgtatatgtctttgtattttttcaatagagcattcggttgtatacccaggaaattaagaggaaatgggctaatctaatgatctaaaataatggtccgtcattttaaatgaaaattgatagcaaaatgttagagagccatgcatgtggcgatttaagagtaattgtagaaacgctaa

SEQ ID NO: 48219 - DNA, 1885 bp, Oryza sativa
tataagggataaaaatccaagctttccatttttagacacgttcaaagaatgagaaagatcattaagtaaatcaggagctttaagttatccctatgatgatttctatactagtgtaacatgttaggaaacgataggcaaacaaacgataaagaacaatagatcaatcacagaagacacgagattttaacgtggaaaaccctcccaaagcaggagagaaaaaaaccacgggcgctagccagcaaaatatcttcactatatctagggtgaggttacatcgctgcacggcggcttacaagaggtatatatatggtggaaccctaaaagggatgacgatccgtaccgtgggggctctgcccccgcacccccgggcgtccccaggtgcacgggcctccgctccactacggcgaagcaggtctttatcaaatgtaaataaatttggattacaactcaacataacattcttacatgtagcatgaaaaatacacaagcatgcatatctttttaagataaaggatagaaatccgaacagctagcctctgtatctgcaagtaaacagaagcatccacatatatatgtgtcaagtccagaagctagagcttgacgtacaacaggcacgttgagacgacgtacatcacaggggttgatagataattaagtgcagttcttgcggcaggagtcgccgcagctcgtcaagcattcctgcctcagcgcctgaaggcagctctggcaagcctccggcgagcagccgtcgcactgcggggcgcacgccctggggatagtgtctgcgtagatgcacgaagcagtgcagatgtcatcgcagctgccgcagaacatctttgccgcggccggcgcgacggaggaggacagtactagcacggcgaagacggcggcgacggcgatggccgccgtaggagagtttgccccggaaggcatgctagttgtcagcgtactactaattgtgtgggtcaagcaaagctagaggaagaagctgagatagatggagagcgaggaggagactgagattgatgctcggattaatggaccaaaccgatgcggtgcactggggaagatgcactgtgttgactatatttataggcagaaaacgcgacgctactatctgctcccttcgtctctaaatgttttaaccaacacaaatgaagctggaggataaaagtccttcgttaatatggagaaaaaaaacgacttgttattaaagagctctatagaacccactataaaatacaatcaatgtgagataatttgagaacttttatgttataatatattggtggtatatactgatagtataagtgatataagcgtttagattattttgtcctctcttattgtagtaggaaatttgaagtggtaaaattgtcttcctatactattagacggtagcaatgatagatgttttcctcgcttgatctcattcctcgtcatccttcacaattgcgacaccgccatcaaccaccacaatatataggatgactcggcattagttagaaattaaagcatgaaactactaaaattttatttttcatttcatggcaaatttctaaattgtctttgttatcaatatatacttaacgtaaaagttataggctaaaatcaggtttggaaattttggtttagccgatttgatcagacctcgccgaaatgctgaaatttccgtaattttgaataaagtttagttgaatttgaacaaatattaccaaaattcatgaaaaaaaataaaaaaataaaaaaattctgccgaaataatatcgtatcggaggggtccgaaatgaccgatttcgttctataatttccaaccctggctgaaattactttgagggatggaaggagtagctagctatccctaatcagtaaattacatgaccat

SEQ ID NO: 48220 - DNA, 831 bp, Oryza sativa
aacgggggtcatcgtggcggatgggcgacaagcccgaaagttcttggaaaaggcacgggcgcggcccgccgctgtccttgcaagccggtgggcggcgagaaggcttcttcttgctggaggaggagaaggtggtcttgaagcggaagggcggatgaaggaatggatgccggcgccggcgtctggaccaaagggaaaaaccggcggcggcggcggaagaagagaagacacagcctgccggcggcgctcctggtcgccatgtacattcttccccgggtttgatttcgcggcgaacatatccccgttgtttaactaccgttttgcagaccggagatgaggaagaaaatggagtggtgtgggcggggggaggagcgggttagtgttacggctcgccggcggagaacggtggcgcgcgggtgggagaaaaggcggggggcggcggcgccggcggcggcggacgcgacgctcgactcggtagagggtagagaggaaggggagggctgtgagacgatggatctccatccgacgtccgaaaaattatccgtactttaaagggtactttgctctttctttttttttttttttttgagaaacagggtaactttactctcatatggataggatatatgccactattactttacattctgatggctaggttagtccaagattatctaaattcgatgtttctgtttggttactgtagaacgttggacctttcgaatgcgttgaacaaccacatcacgaggtgatcgccggccttaggctgaggatgaagggcaattggagatagaggttgagatagataccttacatgtggatccagatgtattt

SEQ ID NO: 48221 - DNA, 2102 bp, Oryza sativa
aggcgcgaccttgtagggccatggtaagggtaagacaatcttcgggtactaccagccgtaacaagagcataggggtttacaggtataagagcaaaaatcaaaaggcgtagtggcgccggcctaaaaatgctgcccaggcgggtgcccaccggcgcacaatgaggagtgagttctggcgcggaattttaacgaagaaggggtgaatggaacggcccgcccaatggcgaatggcgacggcatggctcggcacggcatctagcggcggctagcggcgactgaaaaggcggtggcggcggcggccaggagggcgacggcgctagggcgatagagagcatgggagcactcggcgagatggggaaaaagagagaggggatggcggtggtgcttaaataggggaggaggggtacgaacgtggccgggagaggcgggaatcgccagcccatgtgggggagtgggagaggagagagagggaggtgggcgcggggcacgcgggtgcgagggcgacgtgggcgacgtagcctgggagacgcgtgagcggggcggggcgacggttgcggggcgcggcggcgccggctggactagggagacgggcccgacaggtgggccccacctgtcggcgacccggagagaggagggggctcgggcggctggctaggccgtggccttcggccggcccagcggggaggggaagagaagagggaatgggccggcggcccattcgaaagagaaaagagaaaaagagaaaaagaaaaagaaaacgaaggaaatgaattttccagggattaaatattgcttgtgctaaattttaattggttaaaattatttctagagctctgaaaattccactaaaaatcttgttagcgtatttcgacacgtagaactcaagaaaaattccacatgccaattccgattattatttgcattgatttattagggtttactcttgttttacaccggtattttcttgagaccatttctaaattcaatttaggcttgggagaagaacttcaggatgtgacatgagttcatctgtgacgggctctagtttcggcctgattgaggacagtagtcatctgtgacgggctctagtttaggcccgattgaggtcagtagtcatctgtgacgggctctattttaggcccgattgaggtcatcagtcatctgtgatgggctatagtttacgcccgattgagatgagtatcatctgtgacgggctctagtttaggcccgataaaggttagtagtcatctgtgatgggcgctagttgtggcccgatagagataggtcatctgtgacgggctatagtttgactggtcgtctgggttaaagctatcggtgacgggctttacttagggcccaattgagatatattcattcgtgacggccgtttgcccgattgagataactcttcacatcagtgacttctagcctgtgacggatgctgtgtccgattgagatggggcttaccgtccgattgagatgagggtatccgttctagtgatatatgaagaaactggaaagataccattgggaaaatgggggactacgaaagaaaggggatgggggaggctcctacttaagcttggggagggctagctgatggcaacgggggcatcctagcacatggcgaagtaagtggaggctctcacctttaaggaggaggcactcgctccaggtcttcgttgttggtggtgaaaattagtgcgtattctcgccaaggatctggtcccatgcatagcctagttagccgcgtggtgaagtcaataaagtgaaatggcccctcttgtagggagcaccatggtgttgagagtggatcatggaccatggtagaggagacacaacgtcagcgatggggacaaaggaagatgtgtggttgagaaggtgcactggtgtatccatgcggcgtgaaagaaacgggctacggtggttacaaaggagcaggagtgtacaagaaaatcgagtgagacatagaactaaagtggtggcatcgatgactagagaatgaatggcactagatcttggcaaatgacggatcataggtggaggcagccattgcacacttgagggcaagacactcgctccatgtccttgtagttggtgat

SEQ ID NO: 48222 - DNA, 954 bp, Oryza sativa
atttaaatttgggttaaagtttttaatttttaaattaagttttaaattttaggttgttataataatggttgtgcttttaatttttcatctataaaaagttttaattttcacgtatatattttaaatctttggttaaaaaatccaacctcatgaaaaaagaaggaaggattttttaaaaaacataattatcggaaacttattccgtcaaataatataatctggattattttctccgaatctagcgcacttgagcacgcttcccggtgttccctcgcgcaaaaaacagaaatagaagtaggccgaagagaaatcacgtacgagaacatgggcctaaaacgcacgctagatggctagttagcgcgtctgcgctaattaggaaattcgcaaatgcaggttatagcatgcgtactgcagtgataaatggtgtctgtattatcttggagatcaatgtttgaatctttatcgctgcaatattgtttcctttttctttcgaagtgctgaagaaaaaagaaaacaagacggaacagattcctaagtggcaaaaaaacaacgataacgcagattctgaagtggcgaaaaaaaacaagatagtggaagtgggtttggacctagcaccttcacaccttatttagaaacaatgatagtgggcctcaacaccatgacccatgacgctgagatagaaatctatttttggtttataattttttagtttgtgtattactcgatgccaaaatatatgatgctaaggattcgtttggagagtttaaagattttaagaagctgctggttgatacccaacttctgataatatgcaaaaaattgagttcaacttctgacttctagcttatatgaatgaaaaacttaattattttgggagttttcgattcagggaaaaaatagagttttccaaagctttttcaaacaggctctaagcttctaatttcaacatcaagg

SEQ ID NO: 48223 - DNA, 945 bp, Oryza sativa
  unsure (1)..(945): unsure at all n locations
aatggctgatnancnctgggtgatcngtctcacttatacatggngaattcgagctcggtacccatgacatgtagaaatgtgtaccttgcaatgccatgcatggatcaaaatcacacagctcatgataacgtattacaatctcacttaattgaacaaattctacatgctgcactttgattgacaattttgagggcaacaccaatcttgatttgagtgaaaacttgctttatgtttctatttgttccatttctgtcttttcacatgcaagtgcaaccttatttttttatgagacgttgctgtacaagattaccagcattttcttcccaatgaacaatacagaatgttgtttcttattaatgggtctatccagcaatccagtcttctataggttgtcctgttttttgagcagtattcaggagggcagatccctcccttgaatttggaagtgactagtatattcaatgcgtgcgcatatgcaatgctctttgcaggcacacaacattattttagcttcattgaattctgacatttgctgttttggcaaatagttatgaacctctcaacaccagtctgtgttttgtaggtaccctactttgaatatgctcacttgcttgtaatttgcagtataattgattaaagttcctcctgaagtaacttccatcaatctattcgcgcagttaatatgtgtacgcatgatcaagtttcagtattgctatttgtatcacagttattctttatgggttggttttatttactttgcttcacttacaagactgctcagagattataagcaaagctgtgtctttgtaatatgtgggggtagaccattccttctttaggaaattcctgatgctgattccctgtactggaatctgatagtagaaattttttaagaaatttttttatgctgattccctgtactgtaatctgatagtagaaatttta

SEQ ID NO: 48224 - DNA, 1022 bp, Oryza sativa
cactcgattttcttgtacactcctgctcctttgtaaccaccgtagcccgtctctttcacgccgcatggatacaccagtgcaccttctcaaccacacatcttcctttgtccccatcgctgacgttgtgtctcctctaccatgttccatgatccactctcaacaccatggtgctccctacaagaggggccatttcactttattgacttcaccacgcggctcactaggctctgcatgggaccagatccttggcgagaatacgcactaatctccaccaccaacaacgaggacctggagcgagtgcctcctcctcaaaggtgagagcctccacctacttcgccatgtgctaggatgccaccgttgccatcagctagcctccacaagcttaagtaggagcctccaccatcccctttccttcgtagtccaccatcttcacaatggtatcattccagtttcttcatatatcactagaacggataccctcatctcaatcggacggtaagccccatctcaatcggacacagcatccgtcacaggctagaagtcactgatgtgaagagttatctcaatcgggcaaacggccgtcacgaatgaatatatctcaattgggccctaagtaaagcccgtcaccgatagctttaacccagacgaccagtcaaactatagcccgtcacagatgacctatctctatcgggccacaactagcgcccatcacagatgactactaacctttatcgggcctaaactagagcccgtcacagatgatactcatctcaatcgggcgtaaactatagcccatcacagatgactgatgacctcaatcgggcctaaaatagagcccgtcacagatgactactgacctcaatcgggcctaaactagagcccgtcacagatgactactgtcctcaatcaggccgaaactagagcccgtcacagatgaactcatgtcacatcctgaagttcttctcccaagcctaaattgaatttagaaatggtctcaagaaaataccggtgtaaaacgggga

SEQ ID NO: 48225 - DNA, 743 bp, Oryza sativa
ccgcgccatggtagaccactgataactatccgccgaattcgttctcggtacccagtatccctctaaatctacaatgcaggtactattaccgatggttctcaaactggtagtgctttatcggtctccaacaattcatcattatgcatcaaatatcatgttaaaagtcacaataaaaataaatggcacttatataacatttttaatgaaatgaatggtcgaatatcatattatctaataaaaaccggtgtcatattatttattgaacattatagttgtttagcaaacattgtgggattcgattgaagagctggtatagattcaatgccctctaatgcagcggcggattcagaaaattttatgagcctaggcaagtcaaatgatagatgataaaagcgcacaaatccgtataactctgtacaaaccatttctcattgatgtaaacaatttgacactacatagttattattttggagagaaactaatgcaaactacaaataatgatttgaacctcaattactaatttcataatttgcgtggttaatcttccctttattagaactaacagtgtattaacagtgtatgttcatgaggcggagcctgggcaatggcccaggctggccgggccttggctccgccattgctctaatggtttagaagttgtgaactatcctagatatcgacaatccttgaaataaaataagaatttatcaaccatcatatgtgaataaaataaacgggagaaa

SEQ ID NO: 48226 - DNA, 2355 bp, Oryza sativa
  unsure (1)..(2355): unsure at all n locations
cgagaccttagaagcccgccgccgttgcaccgttgcaaccaccagcttccgggcaccgctcaaatggctgtgagcgctaccntgcatctccaggaatggcggcagcggagcccaccaaccccaaggcgcgggggtcgccgccgccccggtaaggaggggccatggcgggggtcccggggcagtccgggccggcaggggagagcacacgggcatgcgcggctaggatgcggtcnaggagcgccatggcgcgtgggatctccgcgaaggcgtccgggctgagggcgttgagctggcggaagcggttgaggcgaaccttgtaaaccaccgtggacgggtcgggcggcgtcccggcgagcgtcttgaacccacgccggagctccgcctcgagcaaggcgccgatgccgccgaggcgccctcctagtgtggcgagggaggaagaaagcggcggcgggccggctcgccgaaaaagaggattggagagaggggaaggaagaagaaagggggatgagaatgactggtggggtccattggttaatagagagtataatgcggagagtctgttggaatagaatgcaaatttgactctctaaacttttgttaggttggccaaataggtatttggagagctaaaaatgaccactctattaaagatgctcttcgatttgaacttctttcatgggggatacataccgtcttatagcagcttaatttagaacacgatggcgaagaggacactccattagagtagcaaaagagtgcatggttgaattcaagcatgaggcaagcaataagaatcaaataataaaaaaagccagatttggtggagaaacgtcccccaaacatttttttcaaaattttttgctataagatattatgacttcatggacactctgtaaacgtcagagccgtcctaacaattttggggccagtgaaaaatataaatgagaccttattttctaaaaagtaattgattaatacataagggttatatatttggaacggatattcacagccactgtttttttaccactgtttgttctttgatatgcactgtctgacaagcacgtcaggaaaggtagcatcgacctaatactcttttttaagactgtttttagatcgaggggcaaaaaaaatttttaaggtgtcacattgaatatacggatatacatttgaactattaaacatagtctaataacaaaacaaattatagatttcgcatgtaaactgcgagacgaatttattaagcctaattaatttatcattagtaaatgtttactgtagcaccacattatcaaattatggagcaactaggcttaaaagattcgtctcgcaatttacacgtaatctgtataattagttttttttttctatatttaataccttatacatgtgtccaaatatttagtatgatagggtgaaaaaacttgctaggggatctaaataagcccttagatatattctgctattaaacaagtaggaattgtttgcaatcaatgacaactaatggtatatcaaataagctcattcacctgtatattataatggcgatctggttaagtaaaatatcgttgcaataattcattttttcttactaaatagaaaaatataatctaagaacgcatgttcacatccccgtcatgaaactttacgattaccatcgaacacttgtcggaattgagaaaaaaaaacagcttgttctagtggtggagcaggaagagtgaaattcaaaaagcataatctaaagatcataaacatgtcagaacatcaatttcaattgaaacatatggttattaagcctctgcaggcccggtaaatgtaaaaattagcttatgaacacgtcattattataatattcatttctagttgaataaaagaaaaaaaacccataaaaaattttgaaatacatctggatccacatgtaaggtatctatctcaacctctatctccaattgcccttcatcctcagcctaaggccggcgatcacctcgtgatgtggttgttcaacgcattcgaaaggtccaacgttctacagtaaccaaacagaaacatcgaatttagataatcttggactaacctagccatcagaatgtaaagtaatagtggcatatatcctatccatatgagagtaaagttaccctgtttctcaaaaaaaaaaaaaaaaagaaagagcaaagtaccctttaaagtacggataatttttcggacgtcggatggagatccatcgtctcacagccctccccttcctctctaccctctaccgagtcgagcgtcgcgtccgccgccgccggcgccgccgccccccgcctcttctcccacccgcgcgccaccgctctccgccggcgagccgtaacacta

SEQ ID NO: 48227 - DNA, 810 bp, Oryza sativa
tgccccatgctatagttgtggtatctatgctcgttgccctctagggaaacaaagagaagatggatatgatgcaaatagttattcggttcttcccataaaatatagtttctttatgttttgtttagacacaattttgtttatggtggtaatcaaaactacttaatttttatggtacaaatacaatgtcatctttagaaatgagtgaagttgatcactaaaaatatatatagctaaacaaacacgtgaccgtgacaatgttcagagtattatatcattttttatattttgacaaagatctatattttagcatcttgtttgttttcatcacctattgtccataattgcatgagacacctttactaattctaaaattgtatttatttcccaaaattatttataataactaatttgttgaggtgcacttgtagttatgccactatggtttatgtcattacattcatcaattatcacttatgaccattatattataattcctctactataagagaatatatcatgaatagtttcatgctcatgttataggattgttcatttgttatcaaacctatttggcaaagaaaaaatgtatatgaccatagttcttgtgatggattaaggggtcgtattatagcaagatcattgcctgagcataccaatccaatagttatgaaaaattaaaaaaaaactttgagaatctcaatctcacacaaactaaaattaaatcagatataattaaaaaatataatgttgtttcatttttcatgcatgtatatttcagttagtgttatataattgttaagtgatatttga

SEQ ID NO: 48228 - DNA, 564 bp, Oryza sativa
cagggcctgaagaagtttaaggtaaacagtgcaaacagtggtggatgcagggcctgaagacacttgtagggacaccaggcctcaccatcacacagcaaaatggagggcatgtcataccactagcgcttgatgacgccagatgctagctgaagttgtttttgcccaagtctagaaaacttctaggtacaccactaattgccaactactattaccaatttaccatgattaaagagggttcaagaaaacatattccagagtcgtctagtttatctttagatttcaaaataatagcttgtgttttacgcataaaataggcagcatccgatcaaaaaaatctgcaattaacattgtatcgtgtactttaaagcaacaaaattatgtggtgagtcaatcagtgatcaatattgaaggtccaaacatttcatgtcataaatcattcactaatcaaacaaagaagccaagataaaagtcatgcagtagcagttcaacataaatccagaagccggtaataaacccaaaacaaatttacagcaaaataagattatgtttcgtgattaatacctg

SEQ ID NO: 48229 - DNA, 702 bp, Oryza sativa
gcctcagcgtcaaagcccgtggtgctttggcattgtagtaaagttccatttctaattatgtttatgttaaggtctagtcaaaatgtctggcataaatcactcctatgtctaaagaaactggttattttatcactagacattttattcttgtgaccttccacatgaataataattagcaaaaaaatacgaacacccgtactgtttaagaatttgaatctaaatgtgtagatttgactataaaaaaagttatgctcagttcatgttctctcgttttattttatatccatgataaatattgattatccgtatcagtagcagcgtcgtttcaacttgtcggtaatttagtagtgtccactagaattcaactagcgtatggcatgatcaaacactagacttatccaatttgtccgcttttgatctgcaagctacattgttttggctattttcctttttatcaatagacattatcttgggttagcacactaatatcattgtaccaccttgtgcttaattaatttcaatttcaagcttcgctgtatggccatatcaagcttaataatatcagtattattttttgttgtaaacattatcctgttatggtcatacgaaaaatgttgttatcatctcaaccatgatctatggtagcgcatcatttattaatctctgctcttacatagatttcgagtatcgtaataaacttgt

SEQ ID NO: 48230 - DNA, 1273 bp, Oryza sativa
ttcggtgttacaaaggagcaggagtgtcaagaaaatggagtaagacagagaactaaagtggtggcatcgatgactagagaatgaatggcactagatcttggcaaatgacggatcataggtggaggcagccattgcacacttgagggcaagacactcgctccatgtccttgtagttggtgatggacattagcgtgtattctcacctaggatctagtcccctgggagagcctcgcgagccgtatggttaagttaatgaaatagagcggcctatcttgctggctagcagcatggtgttgagagtggatcacggaatgtggcacatggggtatagtgtcaacggtggcgacaaaggaagagacttgacagaggggatgcagtggcacggatagcagaagaggtgtgatgaaggcgtaccggtgtgtccgtatagtgagtttgatacggatcagagtggttacattggagcagtagtgcataaggagatcgagcaagacagagagaaattagagaggacacgcgggtgaacaactaaacaaacatcagtacgtaacgattccaaaaaatataatagaccctttattgatagaaaaatgtccgaattacactcttgaactatagaactatagagacatgcaaattacccctcaattcaaataccaggtaattaacattctagttctcggggctaattcgcaacaggtcagatgtaaccggaaccgtcactgatcgtgatgcactatatatctattactacatcgatcaagtgcagtgtgtgctgcagtagtcggcgcaggacgtcaggcatttcctcttggtaactcgcaggcagttatcgcatgcctcggcgggtgactgcccgtcgcatttgtcgccgcacgcggatggcacgccgctgccgtcgcacgaagcgccgcatatgatgtcacagtcgccgcagaacctctccgccgtcgccgggccgaccgaggaggtagacaggatcagcgggatgcaaacggcaacgacgatggctgccttaagagaggctgcacggcaagaagccatgttaaatggtgtgttggtgattcacaagcaaagatggagatagctcgagatctttgattgctaaatgatgagcaattgagcaggtgtggggtgcccatgccatggagccactggtgggaaaagcgtttgtagtaccggttcgttacccccccttagtccccgtttcttaaccgggacttaccattacgggactaaagatcgctatcttttattccaggtgaaataaccg

SEQ ID NO: 48231 - DNA, 817 bp, Oryza sativa
ctttgcaagttctgcaggtgaagcaacttgatcctgcaggaatgaatagcatgagattatgttacccttgtagtcacggaacatatggcatatcaatggtataaacaacaaatgtgtcaggagataaaatagttcatggtacgagctttgctattttgtggcaaatgtagatagaatcgcaagtgaaactcatgtaggaatagaaaaaagaagtatgtgtaccagggactactaaaagttgggtttctaaagtcgaaaattgcacatataggcccctaaacatgtgtatgtgcataagtacaggtttaaaccatgcctaataagcaactacagaccacttatacaagtataccaaaaaaaaaagtaggatgactttgttgacccacttatacaattttatgtacccactcaaatccagagacccaagtgacctgcaaaaatttagggaataagggggacctatgatatgctttcctcaacttcgaaaaaaaaataacaaactattctgctggtcaagggttttaactcaacaatatgccatatctctactattataaaaattgaagatgtttttgccggtattttggtatgtcatccgggtttgagtcggtttttaagttcgttcacttttagaaatacagatccgtgtttgagttggattttaagctcatttgcttttggaaatacagaaggagtcgtataagaaatatcattaaaaaaactcgcatgctaacttgagatgatatacggactcttgcagcttatgattttcaaaaaaaaatatccaagcgaattcccacagtgaattttaccctag

SEQ ID NO: 48232 - DNA, 1578 bp, Oryza sativa
tagaaggtacagaagagaatgtggtagcaataaccaaacgtatgagaaaaagaagacacgggtaagaaaaattatctaaggtaacagaaccttccagaaatgtcaatggtattttctacaactaactaataccaaagtaaatgccatacaactgtccatttcttagttcccagctttagaactgaagtacacttctttttctcctaaaaaaagaaaaaccagttagggaaacccatgttttctatagcctcatggtttatattttcttggtcacatagaaattattattagtacaaatcatttcatggtaatagtgtgatgctgtgttatgaacttcatggatgtaccccatcattgcagatcaagttcagttccttaggtgtatgctgtatttggggtattatgcaattaaaagatatatcggcggtacctatgcctaccagttactgaaatgctagcaacaaatctaatactgctcaaattacttgctaaacatgagcctattaatgttatacaaaaacaggtacttgcctcgtgaatgtcctctgtttcaatagttcttcaagatccataacgtcatagctatcagaccttctaagaatgtcatctccatctttggcagaattctgaggattgacaatggacagattccacatataaagcaacatgtgtttaggaacttgatcatatggaagattcaatagggtatcaaggtaaaataagtagcactggcactggacaaaaatgtaagtgtgtaacttaagaagacttcatatggttacacatgttatcttattatccattcaaagaagtatcaattaataaatcttgcaagaataataacgaccatatatttcaagtgaaagaggttaaattctaccggcttaaaatagaagtcaatgttttaatttctatataaacttatagtgcttaaaaaagcatagcaaacatctaaccatgataactagtaggttattatccgacaagtacaacgtggaatacgcaaatttacaatatgcatttacagagccagcttacattagccacggttccggtgccctcttcttcttcttccggaatgtcatcttctgtgtatacaaacaacaggaaactttgtaagtttgccagcagtcactaacaacacgtgaaccgacaatcgccactttgtatgaaagcatcgattacgccgtcatcccccaatcgtcggaagaacggacaaaataaacaacagctactacatagtaacatagctaagagtccatatgcaacgcaacatgccgatctacattgattgaagctactaaattaatcgactacagagatttagagttggtttggcctactgcgaaatgattgcaccaaactgcacatcatcacacatcaccaacagggccccaacaaagctagcggcgaacgctgtcaaacaaaccctaaaagcgaaggcgaggccaatgcggagaattaagcgctccgcctgcgagggcggcctcctgaccaaattggcaaaaaaggcggttagcgagatgcaccccttcccgttgggctcgagtgagggggggggggtgacggaaaaggagg

SEQ ID NO: 48233 - DNA, 660 bp, Oryza sativa
atgtctgcatagtttattatgctgataagtgataagttcccttctattcatttccatgttggctgtttaggtaataacgcaagtagtttgtttggtaatggtttcgtgattttctacctatttgcttaatgcttataatttattaaatttccaaatctccccttcagaaaactcgtgagcgtttcagttggatagtcttgtatccacactgtatattttgtccaccctaagtgtttgacctctcctgtaatgatatggcaaattcacaatttgttccaatgatctgcttcatgataaatacagtggtaccatcatggtaatcacgttatgaattttactcttaaaataatattttcaaaattttctacaattgcataagtttctgtcaatattttctatgccttaatcatacatcaataatttacttcattactttggcagagaaagggaatacaccataaaggataacaatttagaagggaaatacaaagactggcagaagaagttacatcctgacctagttcattctaaatctgaggtctctccctaggccctggcattcttaccaatctatagtattcgtacctttgtcttcaaaacaatttgtgacttggcttctgttttgtgtagaaagagagagcctttgctgctgagcaatca

SEQ ID NO: 48234 - DNA, 1056 bp, Oryza sativa
  unsure (1)..(1056): unsure at all n locations
cgggcggagaagaaggagaccagcctgcggcggcgctnccttgtcgccatgtacattcttcccaggtttgatttcgcggcgaacatatccccgttgtttaactaccgttttgcagaccggagatgaggaagaaaatgaagtggtgtgggcgggggaaggaccgggttagtgttacggctcgccggcggagagcggtggcgcgcgggtgggagaagaggcggggggcggcggcgccggcggcggcggacgcgacgctcgactcggtagagggtagagaggaaggggagggctgtgagacgatggatctccatccgacgtccgaaaaattatccgtactttaaagggtactttgctctttctttttttttttttttttgagaaacagggtaactttactctcatatggataggatatatgccactattactttacattctgatggctaggttagtccaagattatctaaattcgatgtttctgtttggttactgtagaacgttggacctttcgaatgcgttgaacaaccacatcacgaggtgatcgccggccttaggctgaggatgaagggcaattggagatagaggttgagatagataccttacatgtggatccagatgtatttcaaaattttttatgtgttttttttcttttattcaactagaaatgaatattataataatgacgtgttcataagctaatttttacatttaccgggcctgcagaggcttaataaccatatgtttcaattgaaattgatgttctgacatgtttatgatctttagattatgctttttgaatttcactcttcctgctccaccactagaacaagctgtttttttttctcaattccgacaagtgttcgatggtaatcgtaaagtttcatgacggggatgtgaacatgcgttcttagattatatttttctatttagtaagaaaaaatgaattattgcaacgatattttacttaaccagatcgccattataatatacaggtgaatgagcttatttgatataccattagttgtcattgattgcaaacaattcctacttgtttaa

SEQ ID NO: 48235 - DNA, 660 bp, Oryza sativa
tagaccgagccgagtcatgtcagtatccacccctacccttgatgttgaaattagaagcttagagcctgtttgaaaaagctttggaaaactctattttttccctgaatcgaaaactcccaaaataattaagtttttcattcatataagctagaagtcagaagttgaactcaattttttgcatattatcagaagttgggtatcaaccagcagcttcttaaaatctttaaactctccaaacgaatccttagcatcatatattttggcatcgagtaatacacaaactaaaaaattataaaccaaaaatagatttctatctcagcgtcatgggtcatggtgttgaggcccactatcattgttctaaataaggtgtgaaggtgctaggtccaaacccacttccactatcttgttttttttcgccacttcagaatctgcgttatcgttggttttttgccacttaggaatctgttccgtcttggtttcttttttcttcagcacttcgaaagaaaaaggaaacaatattgcagcgataaagattcaaacattgatctccaagataatacagacaccatttatcactggagtacgcatgctataacccgcatttgcgaatttcctaattagcgcagacgcgctaactagccatctagcgtgcgttttagg

SEQ ID NO: 48236 - DNA, 657 bp, Oryza sativa
  unsure (1)..(657): unsure at all n locations
tccccatactatgcaaataccggaatcgcgacatcaaacatcgacaatgttaagttgcttttatgatttatgtaaattactttaagactttattgaatttactttcataaatgcatttaattaaaaatcttctctacatttttctcgtgaatttactctacatataatttcttatttcaactcagtcataacttagttgcttctaatctatagagagttacaatttaaataaattacttttaaattaataaaatgtttaaatatattcaacatggatcttgttttatcatatattttatgtagagtacaataatataaatatatcttgaagataatatgtaatttaaaagatataagttattaaagatgttaaaaaaagacatgcaccatatactaaagggagaattatatatggaatggagtggtctactgttaggactaaagcactaccatgcgagttcagatcccctggagttgatgccaactccaccagataggtttggctaaatctgaacccttcggttgcttctacaggtggcatncttccnccccnnnnnnntnncntgcatttattaatgtccatttggagggaaaagtttcagggtgttctccataaatttgatcacgctcttcctaaacagaatacaaggcacattt

SEQ ID NO: 48237 - DNA, 892 bp, Oryza sativa
ttaatatatggtcaatatgtctctctcacatatttttttggtcttgtgcctaagccggctgtaatcgtgccatccgcttcttctctcactcctctcctctcttatccacctcagtattcagtcttcttatggccttaaaaaatttatggaactttatatccttatgtccggtgagtacaaaagtaaagtggaaggaataatttttttttgtttgcggggaaaaaggaataaattttagaagggtaagtacaaaatgcaggatctggggtacttgcccatcctgatcagtatacttatagctgtgtctcagatatccatttcacctataacttttcaacatgccaatgcacgagaagcactcttaccaagaatatcactatcaacacaactatacaggtactagctagctagatccaataaacacgcttgttttagtagtgcgtctgcaagcaattaagctaggaatcaatcagataacataaacaaggaccggatctatagtcgatactactagatctggtaaatgcatgcgttcattgactaaatctacacagccttcactaggtgatatcgcttacgtagttgggaaaaaaaaactatagttgttttggaattgttactgacatttagtatagtcactgcttgcataggactagtaaatgcatccatagcgtatagttcatatgcgatactagagaggtgggacacacatcaatcataacaattaggaaaatttgttacagggtataaaacacctatagaaataatcataggactcacccatattaaaatagaggaaataatagagaggtgtagcttgcaacctgtaagcacgatttatctgacatgagggtccaaagacactctcgtaccatttgaaccaaggacgagt

SEQ ID NO: 48238 - DNA, 550 bp, Oryza sativa
atcaagtcaaaaaacactataaaatgataacataagcacttatgatatcattttatagtgttttttgacttgattgtcgttttatagttgagatatggtagtctgacacatgccaattatgcttcagtttccaatttatgaggatactcacttatttccagcacattaatctgacatgtctttttctccagggttttcaaaccaggttcagaagaagcctcagtttctaaccaacgtgatacaaagtcgaatacagataaaccaccaatttctcaaagctctgggcaaattgtttctttcactagtaatccagtatttaacgtcatctcctcaaaaccaacaaccttaagcaatggcctggcagatacaacaaaatctgcttctgctgctgtatttccttccaatggatcaaccaagtcagtttgttctacaaatgctggctcttcaacaccttcgttcccaaagttctcatttcagcctggattccgaacatcaacctcttcagtgcaatctagcggtattcaagagcctgctataacagctccattca

SEQ ID NO: 48239 - DNA, 1699 bp, Oryza sativa
tcaatgtcatacatgaccgtcttccaaatcatgcatggtcgtgtgtatgtgttacacactagtacagatccttctatctgtgacgggctctaatatgcttagaaatagtgggccgtcacaaggaagtcatctcaatcgggctgaaaagtgcccgattgagatatggtcgcatagacatgttagatgggtataaaacttaagcccgtcatggatgacacctatcagtgacgggccacaacttgaggcccgtttgagataacaactaggcccgtcacagatgactcatcagtgacgggctatatacttaatctctatcgggcattaactaaagcccgtcaccgatgactatttttccatttttcatatgaaatgtttatatttgtaagttgactatagcaaaataatttttacgggtagttgactagcccatcacagatgacccttatctgtgacgggcattaactatcgcccgtcacagataagggtcatctgtgacgggcgctagttgtggcccgattgagataggtcatctgtgacgggctatagtttgactggtcgtctgggtcaaagctatcggtgacgggctttacttagggcccgattgagatagaatcatccatgacggccgtttgcccgattgagatagctcttcacatcagtgacgccatgcccgattgagatgggcttaccacccgattgagatgagggtatccgttctagtgacacccaccactgcagcagcaacgccggatgttagagatgacgagttcaccattaaagctaggttccactagcagttcttagtctaacctgaatttctacgcttgggtgttttctgaaatttatatctcaagtataatccaaattgtcatgataatgtttgaagaaagaaaaacaatagctagaaatcctgagaattttggcaatctcttgtgcacgaagccaaactccaacaataatcagtagcatatctgccatgattttcatttttacctttgaaagcagctttccgaatggttcccagttcgttatgagttggatcgtcggaggcaaggcaatgttcacttagaccatagtctagacggtctagaccgcgtctagacgctagacgacgggttatcgtctagtttaggacctaaactgtgaattagaccgtttgaccgtctagtcggtcaactagaccatctagaccacacaattaaacaacatttagatgactgtagaccgtaaacctatcgtttagattgtggtctaagcaatagatgtgacatcccggcccaataaggattaggcctgtgtagcccatgtgagctgtgtccgcatgtttagtaccaccttgctagtttagcacgagtggaaccgacttatgaggcctcttccctccaaccacatcactcccgggttaacccttttacacgaagcaaggacgaaagtgtaagtggggtggtgtgtgtaagtgggcccgctcatcggttgggctgggctacgcggatctggagggagggctgttacaaatggtatcagagccgaccctcgcggttgcgcgtacgggtcagtgtgcgggcatatggcgcatggcgcatgtgcgcactgtgtgaggcacaaggcatggcatatggcatcgacactggacgtacggatgtgcgctaagagggggtgtgttcctggacatttgcctgtgtggctgggtaagttggac

SEQ ID NO: 48240 - DNA, 1853 bp, Oryza sativa
ccagtgaacccgcgagcggctccggcgggcgcgcgcccggagtcggcggcggagcccggtgcgtgcaaggaggcggcgaggtagggcgcgcgactacgcgaggaggcggcgagcggcttcggcaggaggcggtcggcggcgggctggcgagcgaagaaacttttttcgttttctttttcgctttgatcgatccctaaccgctgttaagacgtgggagatcgctaattgcagggcagatccaactcttagtatgagccgttggatgaatagatctaaggatcagaaaacatctgatttaatgaacttacgtttcatgctttgtatttgggtagaagcaagaattatgcctgtggtagatgtattttgaccatggttcaaaatctcatctcagtatatgtgatattactcagaagattaattgttgagtactaaactccaacaaggtatagatttttcctcaatttccgttagcacgtttttcaaactgctaaacggtgtatcgtgcgaaaactttctacatagaaattactataaaaaatcaattaaatctatttttcaagtttttaataattaaaattcacttttgctacacttaatattcatcttgttagagaatctaacggagtctaaggacgagatttgttagaggatggaactggatgtatatgtactcgatcagaagtacgtctgtccactatctggcctatgtacctacctttgacacgtatatatcttgagatgtgcgtactttcaaaaggaaacaattactcccacctcaacaattttttcctggtgtttctgccatcgtgctcgtgccgtgagccaaaatcaattctgaatgacaggaaataaacaaaaagttaaaacctaaatacatgagatggtacacgagaatgcttcatcttcataacttgtccctacaatccaatttccatctgaacacgaataggaatccttcgtctatatgatgcgaccatgtagtggcatagagtaaatgaaattgtacccgttcgaccatatatcgatatgggagaatagagtagaagaggtacacagaatcaatgccaggtttgtaagaacagatgacattcaaattttaacaaattcgcaatggttcatgagaggataaatcatacaaaaattcagttcaaaaaacagtccattgggtacctccatagctcatgtgccaaaattcggatcagccaaaagaaaacactggcatctttgccagctcaggcaaacactcctggtataaaatgaagaaatgtgaatttctgtttgccgatcgcctcagccctgaaaaaccagagcaatttgcaatgcaggctgtaataagttctcatgatccttgtccttgacagaggacgaagtgacttatttctttcgcttaacttttagaattcttcttgcagacttttcactgttgccaccagtagtgcctattgagaagccacctggggatgattgactatgctggccaaattggaacatgcccggtgaagcggatgtagctgaagcaaactgagttgctggcgtactaaacagagttggagtggatggtgaactgcttggaagaccaaagggtgaagctgctgaaaaagcaaacgggttcttgtccccagccatctgacctccattcatctgatcagttcctgtacttaaaccaacagtcgggctcggtgtaccaaaaagtggtgttgtaggtgatgcatttggtatcgtaggcgtagctgaggtaaatgagaatacagggctcgaggttgagctaaaaggtgaagtggcaggggagccaaaaggtggagcatttgtgctagttaaacggttgcaaaaaattggtgaagatgctgaagcag

SEQ ID NO: 48241 - DNA, 1372 bp, Oryza sativa
  unsure (1)..(1372): unsure at all n locations
tcatacaagtatacagtagaggttcagccgatatgatctttatgtatgcccggtaggtcaatacgttctgctacgggccactgttgacgcgtggaccgaaaaggagttttcgggttacagccgagtatacatgaacctaaagggtcgcacacttaatgggccggaataaggggattggatggagatccaatatgagcttaattcggatagggatccgaataggagtcctacgggccatgtaggcccgagtgatggatcctatatattcgtgaggggtgtgaccggcggaggcattgcatcacgtgagaaaccctagccatcacttccctccccgagcaaaaaattagccgcacgcgggtgctagcacatctgcgcgtggcgttccgtccttgtacgtgtggataccggtagaggcgccgctggtttgtggtgctgatcggcgtgggagtacggtgaggagaacgcacgaggagcagaaggtcgagctgatgcgatcgactacttcctctacatcgacgcgcgctacttcgcgagagttccttcgacttctcagcgtcttcttccgctgcgcagcgcgtcgagtggtaacgatctatgatctaatacttgcatggttcctggtttacgcgatagaaaattttgatttatgctatcgtagcctacgcgtaacccaacacttcttaccgggctgctttgctggacagaataaaacgcaaattgtgcatcttgttatgttgtgcttcctgtggtcactagcttaatacggtgttggccttggtggtgtgtccaacagtgtaatccagagagaactccattgacaattgtgtaactgtcattatcaaatagtggaatttttggagagggccgagtaggtcccgtggttttttactcctcatctcgaggatgtttttccacgtaaatcattgtattatttgtgcaagttgctttgatcctttataattacttctgcagcatccttcacttctagagatgggctaagtgaaaggtttggaactgtcaatgtcatacatgaccgtcttccaaatcatgcatggtcgtgtgtatgtgttacacactagtacagatccttctatctgtgacgggctctaatatgcttagaaatagtgggccgtcacaaggaagtcatctcaatcgggctgaaaagtgcccgattgagatatggtcgcatagacatgttagatgggtataaaacttaagcccgtcatggatgacacctatcagtgacgggccccnngnnnnngncccnnngcnnnncgcgccccccgctccagcccgcccttccggggcttgccccccccgggtcggcggttttcgttggcgcgcctcggccccttgtcgctttttcgcgcac

SEQ ID NO: 48242 - DNA, 831 bp, Oryza sativa
cgcggatctggaggaaggggctgttacaaaatggatcagagcccgaccctccgggttgcgcgtacggttcagtgtgcgggcatatggggcatgggcaatgtgcgcactgtgtgacgcacaaggcatggaatatggcatcgacactggacgtacggatgtgcgctaagagggggtgtgttcctggacatttgcctgtgtggctgggtaagttggaccgacggggacgtcgggtcctttgagggggggtgtatgcctgtgtggcccatgtgagctgtgtgcgtatgtttagtaccaccttactagattagcacgagtggaaccgacttataaggcatcttccctccaaccacatcactcccgggttaacccttttacacgaaacgaggacgaaagtgtaagtggggtggtgtgtgtaagtgggcccgctcgtcggttggggtgggctacgctgttctggagggagggctgttacaatagaccaatgcattttttttattgctggagctgaagcaacgaaacttcgagcccagaccaaagccttatggttttgaccccattccatatttctctcctctactcttggctagtcacggcaacgaaatcacgtcatctctcctctgctagtcgtcgcagtggaccttgctcccacctctctccaacccacaactttactcgagtggctgcccttatcatagcactgctagttctctaatattctgtgaaaaatgttaagcatattacgatgaatatattctgccaagaaaaatatgcatgaatatattacgatgcaaaaatatttatgtttgtaaaactacttttatgatatatgta

SEQ ID NO: 48243 - DNA, 717 bp, Oryza sativa
actttcaagatttttttttaaaattttcacccagaattttgaaaattttcatcatattttcgaaactttcaacttaactatttatgtattattttgataataaaaactataactagattaatccatatggttagcgttgttattagtgctaatgacgcgtggctgtagtggacccacacgcttaacctcccctgaagcgatgcggaacagaaaaatatacaaaacgacgaaacaggaggaagttacggaagtgcgcgctacaaaattatctggcgcgtctgcgctaactaggagcccccccgcatttgtgcctattattgttttcgtagtatattccacggtgttaaggtgttgggcctcagcgtcaaagcccgtggtgctttggcattgtagtaaagttccatttctaattatgtttatgttaaggtctagtcaaaatgtctggcataaatcactcctatgtctaaagaaactggttattttatcactagacattttattcttgtgaccttccacatgaataataattagcaaaaaaatacgaacacccgtactgtttaagaatttgaatctaaatgtgtagatttgactataaaaaaagttatgctcagttcatgttctctcgttttattttatatccatgataaatattgattatccgtatcagtagcagcgtcgtttcaacttgtcggtaatttagtagtgtccactagaatt

SEQ ID NO: 48244 - DNA, 728 bp, Oryza sativa
atttgtttggaaacggggggccaaatttccaacccctaaaaaaggggttgtcgggccacccccccagttgcctttgtccacaaaaatacttaattttgggggaaaaaaaggaaaaattttaggaaatatagaaaattatgttggaaaagataggataaattttagggatatatgaaggaattcgggaaaattgagaaaattacattgaaaaagtatatgggctggctaggccaaacccgtgccgccctacaagataaggtgttgccccaagaagaagatgcaaacagactgggcaggcacggcccactggttgcggatcgatatgtgcatactacttaacggagtatatatttgtacttacggttaaaacagcttgcagatagaaattacgtgcatatgtttgtaaagtgatatcgcatagatcataatctattctgttaaattttattacattcgatctttcataactgattgaccgagttacgtacaagaaacgacggaacatttttcgacagaagacacatgcaactttcacatatatatatgaagttgtacatagtaggggcatacatccaccatatgcaagcacaagcgcgcatgcagctagcattcgcttatttatctacatggagccatagcaacaagcttctaattcagggggagaattcgcatataatatttggttcagctgttgacgcagttggagcggcagtaggagccgcagtagt

SEQ ID NO: 48245 - DNA, 1226 bp, Oryza sativa
gaggaggacgctgggtcagtgcaggcgccgctgcagccacccatcccaccggcgcacgacgagttgcagtactggtcacacttgctgcagatcatatgcaccaccgcgggctctggtaacaatacagcactaccagcacaacgcacacgacgggtacaacgactacatcaacagggaagacaaccatcatatgggctttgtaacgttatttggataatggcaagaacaggaattaagatgtgagatgtcataggcaaaatatcaggcaattccgctatttatagctaggcgactgatgctcaagcttgctaatatatgcacttgtatatatctgtgtgtatcgatcactggatattgcgtgcaggtaacatgcactgaatacgtcgtttatcatatctctgtattgacttcaaagatggagggtggtatgacataatatattagttcattcaaactatgtgccgttattcctcttgtgcttgtaaggtcaaatatagcttctgatttagttaaacacacacatatataaatcacctgagacaacgtcattaaataattttctccatgcagtttgtacgtaccaaattaagtaaaatggcccagcaactagcttagccagcagtgcagcacaaggattttaattaatcatatccatgatgcatgtgatatatattctccttgcattgcaagtctaaatgcaatgagtcaagtcaactccgatacattcatgttgatctccattacaataacagatatacgattacagtcagggtttcaaaaaccgctgggggcccggttaccgccacccggcggtacggcggtaaccgcggtaaccgcgcaaaaccgcgacaaatttacaaatcgaaatttgaattcaaaaattcgggcaaaccgcgcggtttggcgcggttaccgcgcggtttgacgcgggaaccacgcggtttggcgcggttaccgcgcgatgtgtaatgggttgcacagtaacgggccggcccatttttttttttttttcaaattttcaaatttatttctcgttttgctctcaaatttgaataaaaattacttttttttgagaaaatttcttaccataaaacacttttaaatcaagcacttaccttcactatttttttttgaattttattctttttttttaaaatttttgaatttggaccaattttatttaaaccgtaccgggcggtacgggtaaccggacccccggggtacgg

SEQ ID NO: 48246 - DNA, 723 bp, Oryza sativa
tagtgttacatccaagttagcaccaattttagccaggtaggccaccaccaaagaccattaagtggcgtgtagccccccaagtaaattatgtaaccatgaaaatttgcacaggtatccaattcaaaattaattattaggcatttaaacaatgttatgcactattggtcatttaacataaaatatatattgtccaaatactgtgtcactacttgctagcaatatataaactgtaaatcgcatcctgaaaattagtgtatgctatatttatgcattcggtaactacaatagtagggtaaagccttaaggtagtgcaaacagtgtaaatgcagggcctgaagaagtttaaggtaaacagtgcaaacagtggtggatgcagggcctgaagacacttgtagggacaccaggcctcaccatcacacagcaaaatggagggcatgtcataccactagcgcttgatgacgccagatgctagctgaagttgtttttgcccaagtctagaaaacttctaggtacaccactaattgccaactactattaccaatttaccatgattaaagagggttcaagaaaacatattccagagtcgtctagtttatctttagatttcaaaataatagcttgtgttttacgcataaaataggcagcatccgatcaaaaaaatctgcaattaacattgtatcgtgtactttaaagcaacaaaattatgtggtgagtcaatcagtg

SEQ ID NO: 48247 - DNA, 723 bp, Oryza sativa
  unsure (1)..(723): unsure at all n locations
tcccccagagttatagtattggcgatgacatgtatatttcaattcaagatcaatttgaagaaacaaagttatattttctacatatnttgcagatgatggagatacgtgaagcagttaatgatgccaatgattctcaaaccctggagaagatacaatctcaggttctgttaagcacaattatgtcatggttgttatttcgaagcataaatacgcttgactgatttctaggctcgcactatatcacctttatcagattaagagaaagctggaaacctggtcccattccttccaggaagcatttgaaaggagggatttcgaccgtgcagtgaaagctacacagagaatgaggtattatgaacgcgcagtggaagaaaccataaagaagctctaattgtaaagtgtacagtggcaacagatgtggaggctagcccatgttcttggatgacccatgtttactacattgctcttaggatgaaataatgccggatgcttcctcaccaccactcaaccagccagcgctctcttcactccatggttgcaatgctgcaggaaggggaaagacatatttccacatttctcctcgctgtaaaaatatttcatcacagatatatacaggcagcactaggcagacaatgaaatggaaactgatatttgttattaccaagaattacattcattctttgctcaataagttatatgtaaaatgtgctacacttgaaaagt

SEQ ID NO: 48248 - DNA, 724 bp, Oryza sativa
atgttaaaaacccatgctgtggctatttaagggttattgtagaaccgttaactcttcttttttgtagagtaataaattctgttttatagtataaaaatcttattttaaaaaacgtctattttcttaaaccaatgtaaataaattttttatgtcttacataattttaggtcttatagcttttattattttaactcgtgcttatataagtaattttttttttcaagtgaccagtatcttttcttttatctttttttaatatagctatttatcgtacgtgcgtatgtatgctgaagggttcgttaatcgtttgatcgtttctttccatagtacgtacgtatgtttttctggtgtaaacggtttcacccatatctacagaatattaagagtaagcaatagatctaatctaatggcctaaaataatgggcccactaatttaaatgaaaattgatggtgagattataaactgccacgtggcaatctaggagtgtttttaggagcgtcacttggtggcttaaaaacgtttgtaggaaatttaatggacttttagtatataatagaatagatatattgataagtgaagagtactgtagggataaaacttatcaattgaactatggattagaatataggtaaaaaagtataaattgattagatttgtgacaaagttaaattttaggagttcatttattttggaaagaagggagcaagtctctacgtttcagca

SEQ ID NO: 48249 - DNA, 722 bp, Oryza sativa
cgaacggatcgaaagcccagcttacatttcctagcccggtgccaaagtaagtttaagtttgtccatggttcaagcctcttaaggtagttcgttctcccttgcttgttaacagtcttttctgttagtaataaccacccgttttagtaactcaaatagggtggtttgatatctcctttgaaacccaccgtctttcagcattccacctgcaagtttcttgcacatatcctatttgggtgatatcaccaaaataagtatatttcagcttgcttgccaataatactagtggagggcataccccttactctagaacgctactccggttagtctattacccatcatgtagctgcaggcactccaaactctggcatgcacaataatcctcacaagatgtccaccggcgtagcctcgatctcatacggcggccgtccccgtctccaccatggcttgcgtggtgctggttgtcctctcctcctccgccgtcggctcgtcgacggcgaatatgttttgctgacagctgtagtcgagtcatgcgcccattcgtgtgagtacaccgacaccgtcgccccggcgtgcgcgccgcagtgagtcgtcgactgctcgcctaaggcttgccagacttgcgtgctggcgatgagccaaggatgcttgatcatctgcggcgacgactgccgcacactctgcacttaattaattagcgtacgtaaagatcgagtaaaccatga

SEQ ID NO: 48250 - DNA, 718 bp, Oryza sativa
aggaagttaagaaagtgcgcgcttcaaaatttttggggggtctgccctaactagagcccccccggctttgggcctatatggttttcgtagtatatcccccggtgttagggtgttgggccccagcgtcaaagcccgtggtgctttgccattgtagtaaagttccatttctaattatgttaatgttaaggtctagtcaaaatgtctggcataaatcactcctatgtctaaagaactgggttattttatcactagacattttattcttgtgaccttccacatgaataataattagcaaaaaaaatacgaacacccgtactgtttaagaatttaattctaaatgtgtacatttgactataaaaaaagttatgctcagttcatgttctctcgttttattttatatccatgataaatattgattatccgtatcagtagcagcgtcgtttcaacttgtcggtaatttagtagtgtccactagaattcaactagcgtatggcatgatcaaacactagacttatccaatttgtccgcttttgatctgcaagctacattgttttggctattttcctttttatcaatagacattatcttgggttagcacactaatatcattgtaccaccttgtgcttaattaatttcaatttcaagcttcgctgtatggccatatcaagcttaataatatcagtattattttttgttgtaaacattatcctgttatggt

SEQ ID NO: 48251 - DNA, 723 bp, Oryza sativa
  unsure (1)..(723): unsure at all n locations
aaaagaagtaaatatagtcacccggttttcccattcttataataccaaggaatggacggtgtagccggaggttataaaaccaaagatttaattccatgcatgtgtatttaatcacatcgttccaatanaaccggacagtgatccactacatgtcaatgatatgcacacccctaatgttgcacttgaagcattggctcaattcgtctagacggtttcatttctttctttggttcgtactccgtaaaatctattagggcagtcccaaccctccacctaggatggtgtctatggcattaaatacattgctatgtaggatttttagcttatgtggcactatatttattaagagagagaagagaggaagaaactgggtctcatgcaagacacagcttcaacacgagaagctatgcactagacactgtcaagttttgcattgggagataatagtgtcttcataatagatgaaaaataaatatgattggtagagaagagcgatgatgtatttattaatggcccactttaagaaactatgggttgtagagtgtagtttatattatgatgtcttattgacatggtaccatagacactacttatggacactatgggttgggagactgaccttagggtctgtttggtacagctccaactcctaaatttagctctaagagttgggtctggagtggagttgtggagctgacataaacccagctccacaactctagt

SEQ ID NO: 48252 - DNA, 717 bp, Oryza sativa
attcagaatttgtttttataaggaaagaaacttctcactttccaagtttgcatcaagacgtaatcgtactgtaacccaagcttttacgtaagtttttatttttactgaaacatacctttctattaagcacgttttaaatgaactgagaatggttcggggtctttgagatagagcaatgcaaaggctttgaacctctttgttatctgccatggtctcctctggattttttttttctattctcttcagttggagacccttcctgttgctttcggccttgtactaattcttttgtaacgttaccttttcagttcaagtcatgggcttccttctgaacagacacagaaacgaagattaagtagcaagaatagcagcaaaactttgcaactttggttcaacacatagtttacagttgatgtattgcaaggaatcaagcaacaacaaaggtactttacttatacctatcaagccatacaacaatagaaaagaactatgtggttcatttgttgctcataccatttcctaagactttcatcagtaatatgacaaattaagaccagagcatgagggcagacttcagtgtgagctctgcgattattaaaacgccagtcagtggctcagtgctaaaatttctactatcagattacagtacagggaatcagcataaaaaaatttcttaaaaaatttctactatcagattccagtacagggaatcagcat

SEQ ID NO: 48253 - DNA, 1215 bp, Oryza sativa
cgccccgtatagaattttcttcggctaattaaaaaatttttgaatttgttaaaaatttcaaggtggatttttttccatccgaatttgtcttgcccatctgcttacccatcttgaattttggattgcattttcggtccccgtatagaatattcttttggctaattaataaattttttgaattttttttaaaaatttcaaggtggaattttttccatccgaatttgtcttgcccatctgcttacccatcttgcctatatggacgtgactaggtagagtgcgggttcagatctcctggagttgtggacgaccccaccaggtggatttggccaaatatagaccctccttttcttctacggctgagatcatatctcttaataattattataaaaaaaatctaagttttgcttctactccctccgtcccaaaatagctcaatctaggataggatgtgacccatcctaggtaagttatttttgggacagagggagtacgtccttaggcgtgtagcctggcgcagcggccatggcttgtcagtggcacgcggtgccgacgatggccagtgcgtggcctcggggatataccatacggttctcctgatgaaatgtgttgaatgttgtcgctctgaattgctctaacaagtcatgttgtgtgtggagaaagagatgcatgtttgattagtttattgcactacgtattgatttgttctttgtggaaagaatgtgccttgtattctgtttagcgagagcgtgatcataattatggaggaacacctgaaaactttccctccaaatcgacactaataaatgcaggggaggggggggggggggggaggatgccagctgtagaagcaaacggagggttcagatttagccaaacctatctggtggagttggcctcaactccaggggatctgaactcgcatggtagtgctttagtcctaacagtagaccactccattccatatataattctccctttagtatatggtgcatgtctttttttaacatctttaataacttatatcttttaaattacatattatcttcaagatatatttatattattgtactctacataaaatatatgataaaacaagatccatgttgaatatatttaaacattttattaatttaaaagtaatttatttaaattgtaactctctatagattagaagcaactaagttatgactgagttgaaataagaaattatatgta

SEQ ID NO: 48254 - DNA, 714 bp, Oryza sativa
catacattgattcacacatcacattcttttaactgtcaaaggcaatttttccttctgcctttgtaaaatggtgtaaactggattcttgtccctcaagctttaaaagtttttctttgctaataaaccataatgcttgtagtaatagaagagctttggtttctttgctggctgcaatctgtggggttcttgggccccaaagaaacaatataatatccagatctcaattggtgtatccccccataatgcttccttttgtattgcttctaatttgctgcagtggaaggttttagggcatactgaagaagctagcacgatgatggttgtggcaagagaagatgaagaccgctgctgccaactctgaaagtgataggctgggtattgggtgatagattagttaagaggttccctaagttgtggcactatcctctatctactgaagttgtgatgtttgaaatctgcttgtactggcagcccttttggttcttttagttgtgttgctgcttttagagctggtagtaagttttggagtctgtctgttttcctttaggagggctttgaccctccctacgctgtaaacctggtgtctagattttcccagcacaaaccttttggctttcaataggcttatgagcaataaaaaataattcttaatgataatatgtttcttagcaatttaaaagaaaatgttagaaaataaactacaacgaaagaaaa

SEQ ID NO: 48255 - DNA, 717 bp, Oryza sativa
aaaagagaatttggagggaacccctgccactggtggtgatgaaactagatttgagaagtagcccccagcaaatatcattgaggatgccgatgactggccccccagttaaactactcacagtgctgaatgaagctgtaatagcaggctcttgaataccgctagattgcactgaagaggttgatgtccggaatccaggctgaaatgagaactttgggaacgaaggtgttgaagagccagcatttgtagaacaaactgacttggttgatccattgaaaggaaatacagcagcagaagcagattttgttgtatctgccaggccattgcttaaggttgttggttttaaggagatgacgttaaatactggattactagtgaaagaaacaatttgcccagagctttgagaaattggtggtttatctgtattcgactttgtatcacgttggttagaaactgaggcttcttctgaaactggtttgaaaaccctggagaaaaagacatgtcagattaatgtgctggaaataagtgagtatcctcataaattggaaactgaagcataattggcatgtgtcagactaccatatctcaactataaaacgacaatcaagtcaaaaaacactataaaatgataacataagtacttatgtgttaacctacttggtaaccattgcccattttcattgcaaaggtacttcaaatttaaaactatgcttttgactg

SEQ ID NO: 48256 - DNA, 898 bp, Oryza sativa
  unsure (1)..(898): unsure at all n locations
actatctcaatcgtaatgttaaagtatagaaataaaaatataatgtaatgtaaagattcgtaattntagtctaaccccaaccacacaccaccccgggggtgattgcgatccttgggcgaaccnactcgncccccgggtcatattatttattgaacattatagttgtttagcaaacattgtgggattcgattgaagagctggtatagattcaatgccctctaatgcagcggcggattcagaaaattttatgagcctaggcaagtcaaatgatagatgataaaagcgcacaaatccgtataactctgtacaaaccatttctcattgatgtaaacaatttgacactacatagttattattttggagagaaactaatgcaaactacaaataatgatttgaacctcaattactaatttcataatttgcgtggttaatcttccctttattagaactaacagtgtattaacagtgtatgttcatgaggcggagcctgggcaatggcccaggctggccgggccttggctccgccattgctctaatggtttagaagttgtgaactatcctagatatcgacaatccttgaaataaaataagaatttatcaaccatcatatgtgaataaaataaacgggagaaaaagtactggctgcgtttcatcatctctatatgatctgtcgttactgtatgcaccgttgccatcatggaccaaccacttcctcataaccggatctggagaagaagcagtgtaggagaaaaggcaaaaaccataatggaggaggacggacatatacactagtacagatccttccatctgtgacggcccataacaagactggaatttgcgggccgtcacaaggaagtaatcttaattgggccgaagtttcgcccgattgagatatggt

SEQ ID NO: 48257 - DNA, 737 bp, Oryza sativa
cttctttttttctcacttaccgagaccaattttctgtggtgaagttatacttcattgttaatgtcatgaaccgaggccatgatggcataaccaccactgggagggtagccgggcggcgccggctattggagaagggatgtatatttagactagggataagaagatattaaggaaagaaattatactaatctgattcattgcttaatgataatagacacaatcccatccttatatagattatataacttgatccttaagtaaggactcaatctaatctttgactgataatcttatctctatatgggctgcttatggccctcagccttttggctcaatgctcatcacaattaacttactttattgtagttccatttaggctggtatacattggagaacactaagaaaattgatacatcctgcatagaaaaagaagttcgcattttctttgtagcagttaatgcatcagcctgcagttgtatatgatttgcgtacatgatttgtatggagtagcaatgcagttgggggaacacatcttcttgatagttcaatcctcatttatcctttaatacttccatgcttctgtatgagttgaagtgcaatgccatgttttctttgctagatcctattgttgtgaatacctgttttgcctattgcattgtaacttgcaaatttgttttgctaatgtccaagtgtacagtagaaatgcgaaaacatatttctatcttacaaataatttt

SEQ ID NO: 48258 - DNA, 688 bp, Oryza sativa
attgcgcgctcgcggagggctttttttttgggagaggcgaacgaataaccgggggaagaagagccccgtgggggacggagggggggtggggtgggatggttatttaaaagtgttgcaagggggtttagagaccaacgttttttgaggtctctttctttctgacggattattatttttatatgttgcatgataatacactccaacgctgtgctccgactgatttttttctattttgaaggcgtttgcttatatatatatcaactgtttttttttattttcttataatatatggatatcgatgaattgctttttaattttttctatgcatgcttgtgtttttgcgacattaatttgtctgaatattttattttaattttctgcataatttgttttttacagtatctatgataaaaccttttgttaattcgtatattaatattgtttttactcccatattatttttaatctttttctatggacgattttatactcttttagcataaaatccatctttatttatcttctccttatccttgaatgtattttttttactgagtcctatcggttttgttaacatatatttgttttataatcattcttgttcaactggaaacgaaatgtctatatactcttcttattttcctatctgccttgtattattccgttttaatatcggtgtaatgacgct

SEQ ID NO: 48259 - DNA, 1383 bp, Oryza sativa
cctgaactccagaattgataagaacgcatataattggaccccaattcaactagcaatagatgaagcgtgggcccaatatgtgcaaagaggagacctcaggaagacaggacatgacaccctcatccacaaaaaagacttcccggtgaagcaacaaataggtgaccagtgcagattccatgtgtgccacaacatgcgccttctgtatagagaaaaggtgaagactttggctgagtttgaggtcggtggtctcaattgtgatagactaaatatattttagtacttatatatgatcgatcaattaatctggaattatgacaatgtagggcataataaccaagtctgcctaccagctttgaggaggttcgcgaggagatagccagcttcatcctgtgcgaaataattaaccccaaaggaatgtttaggcttaaactaaaatgatgaacaatgttgaacttttatgtttaggcaatgatgaacacttattatgcaattgtgatgatgtaactctgatgtttatatttatgtatatatttcatatgtttatgttaaaacttgctaaataaatatttgatccaattaactcggttttgcaggtgaaatatgataaatatttgaatggatgtgaaatatgtgaatggatgtgaaatatgagatggctgtgaatgtgtggttgtgtgaaatatgttgatgtgtgtgtatgtgaatgcatatatatatgaatgggtgatgctggggagctggggatattggatatctgtgtttgtttctgttatttttgcagcgggcatggctagcaaaggcctgaggctagccaaaaaacaaatttttttgtgaattatagccatctgtgacgggccataactaaatgcccgattgagatgaggtgtcacgcccagaaattcccgaatagaattccaagcagaatgtgcattaaaacccccgtccaggaccggtcggggtacacaaacgacaaatttgacatacagatccacgtcttacaaacattataaaagtattacataaatgcagcggaaaataaaaagataactggagctaagccttgacttgcaccgcagcgggaacaccactccacaagtatcctcgacggcacggacgaagcctactcctcggagaagccaccatctgacgcatactcaaactctggggtttggggaaaatatagcaagactgagtactacccactgtactcagcaagtcataccggaataggggtatgatgcagggaattatcaagggatagctataatggttcctttgcataaagcgagcatttataaatagtagttgaaagtagtaaaaccgttgtaataattaatcaatattaatcatccactgtccaatgctataccacgttgcaacagg

SEQ ID NO: 48260 - DNA, 670 bp, Oryza sativa
tttagcttttaatttctactatcttcttgttggcttgataggtggtgacattggtttgcagatatgtcggatgaatgaatatgatagccgataatttggtcatctacttttgcgcgtattggagtttgttagcttattggttgcattcttctgcttacatgttctgcactcaaatatgtgctgcctctttgttatatttttatacttcacattttagataagcttaattagaatcaaacaattagaaccatgtctatcaataacttttaaaacttttagtttgaaaacactagaacacacgacgtttgagtagtcttaaagaatacttttacaaaattagatgtttactacttttattaattacaacagaatatcatagtcaaatatatattttggtgatgatgtcattgtcccaaaaacattgaaaatccgggaactggagggagtagatcttgtgtttctatttcttggaggagcagcggcttgatctctcctattaatattgatatttctttacataatatcatcacatagccagacttggtttaagctatttttaatacggggctgactgaaaacttgttgttattttaatcagctctctggaaggtttcgggaacccgcacggggcaatcttatttcttaaacgaaattagcactttataccttt

SEQ ID NO: 48261 - DNA, 1410 bp, Oryza sativa
  unsure (1)..(1410): unsure at all n locations
taatgtttgtaagacgtggatctgtatgtcaaatttgtcgtttgtgtaccccgaccggtcctggacgggggttttaatgcacattctgcttggaattctattcgggaatttctgggcgtgacacctcatctcaatcgggcatttagttatggcccgtcacagatggctataattcacaaaaaaatttgttttttggctagcctcaggcctttgctagccatgcccgctgcaaaaataacagaaacaaacacagatatccaatatccccagctccccagcatcacccattcatatatatatgcattcacatacacacacatcaacatatttcacacaaccacacattcacagccatctcatatttcacatccattcacatatttcacatccattcaaatatttatcatatttcacctgcaaaaccgagttaattggatcaaatatttatttagcaagttttaacataaacatatgaaatatatacataaatataaacatcagagttacatcatcacaattgcataataagtgttcatcattgcctaaacataaaagttcaacattgttcatcattttagtttaagcctaaacattcctttggggttaattatttcgcacaggatgaagctggctatctcctcgcgaacctcctcaaagctggtaggcagacttggttattatgccctacattgtcataattccagattaattgatcgatcatatataagtactaaaatatatttagtctatcacaattgagaccaccgacctcaaactcagccaaagtcttcaccttttctctatacagaaggcgcatgttgtggcacacatggaatctgcactggtcacctatttgttgcttcaccgggaagtcttttttgtggatgagggtgtcatgtcctgtcttcctgaggtctcctctttgcacatattgggcccacgcttcatctattgctagttgaattggggtccaattatatgcgttcttatcaattctggagttcaggtagtgacatgtactccacttaggtgttatgaccagaaggatccaatgggcactgcggcattaatatagtgaaagttaattaagtactcaaggaatgtgtgtcattttgctgtgtatatttagttagcacacttactattgattataggcgcacataatgtactccttgtctcggcaggaccgcaaggtgtcgtagaagaaatagnccnttccttggcggtccttttggagntttgtgncngtgtcctcttgtggntcgggtgccgagctcgnnttcggctgtggtngataagagtgctactaattgcaggggggggggggggaaaggaagagtaataagattgtacatgcgtatatcgatcttaaatanaggtagtacattagaaacgtatgcgggctgaggg

SEQ ID NO: 48262 - DNA, 735 bp, Oryza sativa
aaaacggaagagcagcaggcaggctcggctcagtcggccgccccgcctcgccacgcccattgccgaggccaactcggcgcacgcgcgcgtgtgtagcagtccaaccatcacctcaaccggtcaatagggaatctccaatatcaccctatttaagttgaggttcttctacctaaattttcaaggcagtattattgtctctaacattacttgtgggctcttgagattttagttgaattaaattgggcctagcctatttattccaacaatccccaccaaatttcatggctcacaacaaatgttctcaaaactgaacctgttagttataccagtgttttgatggagactgttaagttgaacttccacctaggaaaagagctacaccatatcacaactgaacaatggactatgcattgaattgtcagtcttgtgcgattcaggtttcactcaaacccttaactggtactgggctgccggttgcatcccctctgtttggatcatataagtcatactcctggacttttcatgagtatctagagattacccagatctcatagactataactagcaattggactcatataggtgtggtccttctaagatattctgtaggatgacattctctgctttatgaaaagccactcggatcacattaaggtgtataccattgtcccatacagaaattgaagagaagcgcatccatgaagaacaaactcattttgagggtctgttctctct

SEQ ID NO: 48263 - DNA, 678 bp, Oryza sativa
  unsure (1)..(678): unsure at all n locations
tatatcaggggtagaaaggtaaatcaataaattccaaaatgattattcctctttattcttattattttgttatcttaacaattccagtttccgggccgggtccactaacttccataaaaaaagagtaaacacctccttcatttgaaaaaaatgggcaaaaaacccaaaactcgaaaaaaaacacgagcaaaaccataattgaacattaaagtaggagcaaaacaaaattgttcctaataaatataagtcgttttacgtaagcttgcatataaatattcaaaaatggataaacagtccatgtctccatttagggctgatatagctagtgtaatatttttttttggaggaaaggaaagaattggttttacagatgtcaaaggaatttcataggatatatagagaaattcctctacattttggagaatttctagcataagatcttcaaaatacttaggagatttgcaatctaacttatgtatctttcccttctttctatctataagaaatcaccccatttgccgcgcaagggcgcagcaagccccaccccctaaccgccgtgacttgccgtcgctcgttgcgcctggccaccgctcttcacaggaagacgagccttgccctgcctgtagcggttgggaccgtttgccacangaagttacgttgccctgactctccacgcct

SEQ ID NO: 48264 - DNA, 1882 bp, Oryza sativa
tctagatatccatttcacctataacttttcaacatgccaatgcacgagaagcactcttaccaagaatatcactatcaacacaactatacaggtactagctagctagatccaataaacacgcttgttttagtagtgcgtctgcaagcaattaagctaggaatcaatcagataacataaacaaggaccggatctatagtcgatactactagatctggtaaatgcatgcgttcattgactaaatctacacagccttcactaggtgatatcgcttacgtagttgggaaaaaaaaactatagttgttttggaattgttactgacatttagtatagtcactgcttgcataggactagtaaatgcatccatagcgtatagttcatatgcgatactagagaggtgggacacacatcaatcataacaattaggaaaatttgttacagggtataaaacacctatagaaataatcataggactcacccatattaaaatagaggaaataatagagaggtgtagcttgcaacctgtaagcacgatttatctgacatgagggtccaaagacactctcgtaccattgaaaccaaggacgagtactagtacttggtctcaggctgaggcctgctaaaaatataaccataatgtatagggctagcatcatgcccttatctctcgagaaagctagttgacgatcagtcgcgtgcccccctccccgcgtgactggacatgtgtcgcgcgtggaaagggggcggcggacgcgccgcgcgggtaaggagggagagcgagttttcctttttcccccccttttttccgtttccgttcggttggttttccttttttttttccggttcggttggttttccttttttttttctggtttctcttctgttttttcccggtttttttaaggtttatgaatacaaagtttatattcgtatgtataccaagtttgtatacacatatgtcatatttgtatacgcgtatacaaactttgtatatgttgtgtattttctagtttttttattttttaatacgtatgtatataaagtttgtatttatcgtatacaaagtttgtctatgtcctatataaactttgtatacatcgtatataaactttatatacatcatatctatacaaactttgtatatgtgtatatattttttatatattaaaaatatacttatatatatacacgcatgtatatactatatatattatatacatatatagtatatacatacgtatagaagtagtagattagatacagagagattagaggaagggggcggctggccccgtgcgcgcctccccacgtggctgatcgcttatcagccgtccccttctctctccactagtatccctctaaatctacaatgcaggtactattaccgatggttctcaaactggtagtgctttatcggtctccaacaattcatcattatgcatcaaatatcatgttaaaagtcacaataaaaataaatggcacttatataacatttttaatgaaatgaatggtcgaatatcatattatctaataaaaaccggtgtcatattatttattgaacattatagttgtttagcaaacattgtgggattcgattgaagagctggtatagattcaatgccctctaatgcagcggcggattcagaaaattttatgagcctaggcaagtcaaatgatagatgataaaagcgcacaaatccgtataactctgtacaaaccatttctcattgatgtaaacaatttgacactacatagttattattttggagagaaactaatgcaaactacaaataatgatttgaacctcaattactaatttcataatttgcgtggttaatcttccctttattagaactaacagtgtattaacagtgtatgttcatag

SEQ ID NO: 48265 - DNA, 1469 bp, Oryza sativa
tggaactagggtttctcagtccggattggaaacttttctaagtccctgctatagtgtcccgcctcctttgaaccctagccccacccccaactcaactttccccgcccccgccaccgagaccgtcacccgcagccaccgagccctccacggcctccaccgagcccgtcgcctccaccgaccggcgacgccctccaccgaacctggcgccaccgccaccgagcccgccaccaccgccctcgccaagcctgccgccgtcgccaccgacgctgagcccgcggctgccgccaccgagcctccttggcccttcattcggaccaccgccacctcctcactgacgacccccaccgagcccgcgccgccgccaccgagcctctacaccgactggaccggtgtcggccttcctcgtcgtcgccgcccgcgtcctcaccgacgcacgttgccaaccccccaccgagcccgacgccgcccgcccggcgccgacctacccgaccggcatctccactgaccggcgccgccctccaccgagcccagcgccgacccccaggtgagtcctccattgcgcatgaatgatgaatagatgaatgtggttcgattgatgaatgtgatgaataaatgattagatgaatgtatttgaatagttaaatgtgtatggatatatgaatgtggatgaatagatgattagagatgaatgtggatgaatagatgaatagatgaaatatttaatttatttatatgtgatattcaattcattttacatgtggatgaatagatgattagatgaatgtgtttgaatagatgaatgtttatgcatagatgaatgtggatgaataaatgattatagatgaatgtggatgaatagatgaatagatgaaatgtttaatttatttatatgtgatattcaattcagtttattagatttgtgagatgtgcaatttagtttatttatgtgaataagtgattttagaactttggattctaagccattgaagcactgaattgtgtattttcgttattttgaaaaaaagtagacgatgtctcagcaaggtgaaccaatgtcgacgacaactagtgggtcctcaagggcacgtactcctaggacagggaacaaaatccctaaggaacggttccgcataacagtggtggacgccgtagggttgccgacatctccaaggaaaatattgagccgatttaggtctatctgtggggtcatagggaggcagaaattcagtattctgcaagatgacatcaagctcatgccggccgcagagaaggacattgcttggctaatgttcaaggagagctttgattatcctgtggagcatgaggaccgtctcaggcgggctgctttcaaggttatgggcaatgcttggaagaacttcaagactaagctagtcggcgagttcgtctacaacccggcgaatctagatccaagagagaaatttccttggatcacggaacaggtctgggag

SEQ ID NO: 48266 - DNA, 719 bp, Oryza sativa
tgcatatgttctattgaataagaactgcatggtctattatgtttatttatgattaaatatgcttatttttcttcagagcaacatctaaccaactatgtataatctaagaaattgagacatatccctattgtttcaaatttcaaagagtgctatgttaatttccttttcttagattagtacattctaacctttatttgtctgcacataccaacaattcttcttgcattaatgtatagttcttaaattgacataagctttatattatgagtattacacattaaagaaagcatcttatatcagaccatactcaggcttttatgttaatttcttaaatgcaaattaatatggtgtttggttattcaaaagaaaatggaacaatgaaaacaaacgtggattttttcacaagaatttcttttttctatcgaagtgtcattgtcgtgctgttatgagaggaaatacttctctctgaatttattgatcatggcaaatggacatgtgaaattttcgtatgaatgaaacaacagaattatatttttattttacataccacctgtgatgctccacttgtgataatctagattttctatttattttatttttattctcacattggcattgaaatgatattgtttttgatttacatatatgcacatgattcctcacttcactttcatgcccccaggtcgctacacccatcgccgccgttgccagtcctgatg

SEQ ID NO: 48267 - DNA, 715 bp, Oryza sativa
aatttaatttcggttttccttgggaaaaggacaaaaaatcaccccctacagcctcccaccaaaatagtgaacagtgggatacaattacactaggtagtggggggtatttatactgtgcaacaaatatctgtaatggccctaaaacaatcaaccgtgacgggcatacaagtaatctctatcgagtcttaataaaaggcctaaaaaaagagtgtcatctgtgacgggcaccaaacttatctcaatcgggcctcaactatagcccgtcatagataagtgtcatccgtgacgggctttagttttatgcctatataccatgactgtgcgaccatatctcaatcgggcgaaacttcggcccaattaagattacttccttgtgacggcccgcaaattccagtcttgttatgggccgtcacagatggaaggatctgtactagtgtatatgtccgtcctcctccattatggtttttgccttttctcctacactgcttcttctccagatccggttatgaggaagtggttggtccatgatggcaacggtgcatacagtaacgacagatcatatagagatgatgaaacgcagccagtactttttctcccgttattttattcacatatgatggttgataaattcttattttatttcaaggattgtcgatatctaagatagttcacaacttctaaaccattagagcaatggcggagccaaggcccggct

SEQ ID NO: 48268 - DNA, 1638 bp, Oryza sativa
ctcatgtcagataaatcgtgcttacaggttgcaagctacacctctctattatttcctctattttaatatgggtgagtcctatgattatttctataggtgttttataccctgtaacaaattttcctaattgttatgattgatgtgtgtcccacctctctagtatcgcatatgaactatacgctatggatgcatttactagtcctatgcaagcagtgactatactaaatgtcagtaacaattccaaaacaactatagtttttttttcccaactacgtaagcgatatcacctagtgaaggctgtgtagatttagtcaatgaacgcatgcatttaccagatctagtagtatcgactatagatccggtccttgtttatgttatctgattgattcctagcttaattgcttgcagacgcactactaaaacaagcgtgtttattggatctagctagctagtacctgtatagttgtgttgatagtgatattcttggtaagagtgcttctcgtgcattggcatgttgaaaagttataggtgaaatggatatctgagacacagctataagtatactgatcaggatgggcaagtaccccagatcctgcattttgtacttacccttctaaaatttattcctttttccccgcaaacaaaaaaaaattattccttccactttacttttgtactcaccggacataaggatataaagttccataaattttttaaggccataagaagactgaatactgaggtggataagagaggagaggagtgagagaagaagcggatggcacgattacagccggcttaggcacaagaccaaaaaaatatgtgagagagacatattgaccatatattaatagttaagagctaaccagttagctaagaggtagactgtaaagatctatatagtaaacagctggttatattattagccttgcactaaggttctaaggttctaagcacaaactccaaagtgtctatgcttaaatgatgttgtggaggagagaagacaagaaagagagaagcagccacccctcgtataaggggaaccctccacacaaactacaagaacaaaagaaaatgagaggggctgattggtggcaagtgtattgagactagtgtataagttagttttattttttggatagatgacgtggataaaattggaggtgtgaccaccacctctattataaaacttgccctaagagttagagggtgtgaccagaaaagattgacgtggcaccaataagaattctctcgacactgtggtggaactaatcatcattaattaaacatcctaggtaatgtgctaatcagccattacttgtttcaatcacggccataatactccctcgaacatatttcttttattactaagatcaaataagaattaactagaaccaagagataattaatattaaaatggctcattggatatcagtcgacaattaatttagtatgtagagactataaatatgatcatttgtttttaaaataacaaaaaaatgaaaatacttcacatttttaaatggagggagtaattaacaagttccacgtacgtcctagactcatccaaaagtcagaccatcgtatgccaaatggggccgagctcgaattcgcccatagtaatcggtactcaccgcg

SEQ ID NO: 48269 - DNA, 766 bp, Oryza sativa
aagcgtgtttattggatctagcttgcttgtacctgtatagttgtgttgatagtgatattcttggtaagagtgcttctcgtgcattggcatgttgaaaagttataggtgaaatggatatctgagacacagctataagtatactgatcaggatgggcaagtaccccagatcctgcattttgtacttacccttctaaaatttattcctttttccccgcaaacaaaaaaaaattattccttccactttacttttgtactcaccggacataaggatataaagttccataaattttttaaggccataagaagactgaatactgaggtggataagagaggagaggagtgagagaagaagcggatggcacgattacagccggcttaggcacaagaccaaaaaaatatgtgagagagacatattgaccatatattaatagttaagagctaaccagttagctaagaggtagactgtcaagatctatatagtaaacagctggttatattattagccttgcactaaggatctaaggttctaagcacaaactccaaagtgtctatgcttaaatgatgttgtggaggagagaagacaagaaagagagaagcagccccccctcgtataaggggaaccctccacacaacttcaagaacaaaagaaaatgagaggggctgattggtggcaagtgtattggaaatagtgtataagtaggtttaatttttggatagatgaccggataaaaatggaggggtgcccaccacctttattataaacctg

SEQ ID NO: 48270 - DNA, 5279 bp, Oryza sativa
atagatgacgtggataaaattggaggtgtgaccaccacctctattataaaacttgccctaagagttagagggtgtgaccagaaaagattgacgtggcaccaataagaattctctcgacactgtggtggaactaatcatcattaattaaacatcctaggtaatgtgctaatcagccattacttgtttcaatcacggccataatactccctcgaacatatttcttttattactaagatcaaataagaattaactagaaccaagagataattaatattaaaatggctcattggatatcagtcgacaattaatttagtatgtagagactataaatatgatcatttgtttttaaaataacaaaaaaatgaaaatacttcacatttttaaatggagggagtaattaacaagttccacgtacgtcctagactcatccaaaagtcagaccatcgtatgccaaatataggcttatgtattggcttaaataaatcagaagatctagctagcttaaattacatgggaaaccggacacaattaatttatagctgctgagattaaattacatgagaaaattttcctcccaaagccaacctcatttactagcattcatggctggtgcatgttactcacacatgtaatttagtgatagggctaattaggctaagctatagatagctcctttttgcaattgcatcctgtgtataaattttcgtaccactgcggcttaccttgtcaattactaacacatagtcatcgatctcgtcttcttctctctctagctacctagctatcttcctcaagctttgcaagcttgacacgcagaagcatatggctcccggcgctgcttcccctaaggcggccaccgtcgccgccgccgccgccgtcttcgccgcgctggtcgtcctgtcctcctccctcgtcgcgccggcggcggcgaagatgttctgcagcaactgcgacgacatctgcaacgcctcgtgcgtcaactccgacaccatcgccaagctgtgcgccccgcagtgcgacggctgctcgccggaggcttgccagagctgcctccaggcgctgaagcaggagtgcttgacgggctgcagcgactactgccacaaaaactgcacttaacaacgtatggagtaacgagaccctgcgtgccagcagccttgtgtattgctacaggttgtaatgttaggattctgtttaataaaaatgaaagtgtttttttttaatttttcagaaacttattgagatttgaggaaatgtaataggaggtagcataagtttgcaatatctttgaacttcggcgctagtgctacctttactggaacagtgaggaactcaaataaaggagtaaatatagtgcaaccggttttccattcctataataacaaggaatggacgtgtagacggagttataaaaccaagaattaattacatgcatgtgtatttaatcacatcgttccaataaaaccggacagtgatccactacatgtcaatgatatgcacacccctaatgttgcacttgaagcattggctcaattcgtcgagacggcttcatttctttctttggttcgtactccgtaaaatctattagggcagtcccaaccctccacctaggatggtgtctatggcattaaatacattgctatgtaggatttttagcttatgtggcactatattaattaagagagagaagagaggaagaaactgggtctcatgcaagacacagcttcaacacgagaagctatgcactagacactgtcaagttttgcattgggagataatagtgtcttcataatagatgaaaaataaatatgattggtagagaagagcgatgatgtatttattaatggcccactttaagaaactatgggttgtagagtgtagtttatattatgatgtcttattgacatggtaccatagacactacttatggacactatgggttgggagactgaccttagggtctgtttggtacagctccaactcctaaatttagctctaagagttgggtctggagtggagttgtggagctgcctaaacccagctccacaactctagttcattttgtgagagagctccacccagctccactcccaattttggtggagctgaaactgtttggttgagctccaacttcagaaggggtggagctgaagctggagctgtgccaaacatacccttagtgttggttcttaaatgtaccagcactgatggccctccctcataaatgcccaaagtttttttttaatttcaatttagggaacctgcactgatgtggcttcccatgtagcactaaaggcatttttgggagcaccgtaggaaaagtccccatagtaaaagttatattaataaaccaaaaataatatctacaacagggttaactaatctaaaagaatttgtctatcatctaatgagaggcgaaaaagaagaaggtaaaggtcttttttaaagaaagacctccaagaactgatctaaaggcttcttctatctttagttactgatgtgtgattaatgattgggtacttctatctgtaatggatcacgcataatggtgaactgttatagggtaattaatgaatcattaacgtttaagaaccataagttcctgctccctctgcatccgaaaaataatactatatttaccttttgatatatattcatatatgtgtcacaaggagtatctttttagatgcagggtccatattaggcctcttaacatcacttcatgtttttttcagattttagccatccaaccaataaatagtactcccttctcctccttattttttctctgtatttattaatggaggatatgatagtctgttgacatatttcttgatatgcctttgattttctaaaacaacagcttttttgggatgagggatcgagtagcctaaacaagccgtgaccaaattaatgtcactagatctggtaattggatgcgtgcattgactagatctggtccttgtttatcttatctaattgattcccaattaaattgcatacaaacgaactaaattaacaagtgtgtttattggatccaactacactggtggagaaatcgtttttagtcccggttcgtaaccctcctatagtcccggtttttaaaccgggactatgaatccgggactaaagatccctatctttagtccccgttcaaatacctaggactaccaaccgggactaaagatgggagtggggcaatagtttttttttcatttatttactatttaatctctaatttattttctcccaaattaggtgggatgcatattcctaaatcaaaccctaaaatcaaagtaccatcccaaatacacaaatcaatcaatcatatacactacagattatacaccccaaatcaaagaatcatcccaaatacacaaataatgtacatctcatatctatataatgagattccaaaaaagaaattatgcatctcaatccatacaatgaataacagattcttcatctcattctatacatggatcgcaaattcttttaaaaaaaaaaaaaaaaaaaggaagcaatgttgccagccggttgagccggctgccggctctccggcccccaacgcacggccctccgcgccggccgccgccgcgctgccatccgccggccgggccgcccaccccctcctgctgcgcacacgggatcgagttgggaaggggagttgggaagggataagaaggaaaagagataagaggaagggaagaagggatgagataggcttagagatggagggagagaggagtttgtgtgaatgagaaaagagtagatgagaaaagaggataagtaatagggattatatagtgcgttttgatctttacttccggttcgtaactccaaccgggactaaagatcctagaggagcctgacaacacttgacagcatgtgaaccgggactaaagatcacgtagtcccgttctacttataaactaggactaaaaaccttctttagtcccggtttttactgcaaccgagactattgtggtttttgatcgaccgggcaaagatggtttctccactagtgctagtaggacctgtcttgcaagtttttagggttttaccaataaattatttggataattacattattagatagctttggataatcttggagctaggcttgtttagagccttttgtttttaatttctactatctccttgttggcttgttaggtggtgacattggtttgcagatatgtcggatgaatgaagatgatagccgataatttggtcatctacttttgcgcgtattggagtttgttagcttattggttgcattcttctgcttacatgttctgcactcaaatatgtgctgcctctttgttatatttttatacttcacattttagataagcttaattagaatcaaacaattagaaccatgtctatcaataacttttaaaacttttagtttgaaaacactagaacacacgacgtttgagtagtcttaaagaatacttttacaaaattagatgtttactacttttattaattacaacagaatatcatagtcaaatatatattttggtgatgatgtcattgtccaaaacattgaaaatcgtggaactggagggagtagatcttgtgtttctatttcttgtagtagcagcggtttgatctctcctattattattgatatttctttacataatatcatcacaatagcgagacttggtttaagctatttttaatacggtgttgactgaaaattgttgttttttttatcagttctctgtaggtttcggcgaacccgcacggggcgatttttatttcttaaacgaaaatcagcatcatcataccttctcttgcttcgaatgcatggggaactgagcacgcgcaatttatcagtaggttagattagattctttcctttcaaagccaacaattagcattcatggtcatgtaatttactgattagggatagctagctactccttccatccctcaaagtaatttcagccagggttggaaattatagaacgaaatcggtcatttcggacccctccgatacgatattatttcggcagaatttttttatttttttattttttttcatgaattttggtaatatttgttcaaattcaactaaactttattcaaaattacggaaatttcagcatttcggcgaggtctgatcaaatcggctaaaccaaaatttccaaacctgattttagcctataacttttacgttaagtatatattgataacaaagacaatttagaaatttgccatgaaatgaaaaataaaattttagtagtttcatgctttaatttctaact

SEQ ID NO: 48271 - DNA, 3491 bp, Oryza sativa
ctagctgttcggatttctatcctttatcttaaaaagatatgcatgcttgtgtatttttcatgctacatgtaagaatgttatgttgagttgtaatccaaatttatttacatttgataaagacctgcttcgccgtagtggagcggaggcccgtgcacctggggacgcccgggggtgcgggggcagagcccccacggtacggatcgtcatcccttttagggttccaccatatatatacctcttgtaagccgccgtgcagcgatgtaacctcaccctagatatagtgaagatattttgctggctagcgcccgtggtttttttctctcctgctttgggagggttttccacgttaaaatctcgtgtcttctgtgattgatctattgttctttatcgtttgtttgcctatcgtttcctaacatgttacactagtatagaaatcatcatagggataacttaaagctcctgatttacttatgatctttctcattctttgaacgtgtctaaaattgaaagctggcatttttatcccttataagtgccggtttattaaaaaaaccggcacaagcataatagaaaaccgacacctatcatgagtcgagccgagccgacgtgcttgagaccatgagagaagatacatggttttttaaagtcactggtggcaccgagtcctctcccctcccccatccgtatcctcttctccatctccccatctcctctcctctccaagtagcctctcctttcctctgtctcccgtccttggatacctctccagtgcgggtggcagatgccactccctccaccgttgagcctcctcctctcctctaccacagccgcaatcggttctattggcccacgacgcctcctcctctccactaatgcagctgcagtcgccgacggtcctctttgcccatgacagctcttcctctcgctgctgcagccaccgacagccctcctcacccgcatcgtctccaccactctcgagggtggccggatctaccaccatgagcacggggacgggtggatccggcaacgcgaccacaggatggcctgttcaacaatggtagcagcggtgacagtggtattctctgtgtgttcttcttagttgattttgattctctctctatttactttggggatggtgtcatatgttgattttgtttttgaatgtcgattctgtggttgtgttcttgggtgatgggagtgatgatgatctcagtggtgatggggagctattcaatgcatcagcttgattcgtggcgatgcattgagctggcatttttttttcattcctgaaacctcaaaggtaccgctgcagggtaccggtcaaaaaatccaacacctatgtccgattcctaacaagtataatcatccttttttatagtgttaggactttgtgtaataaaatgtatttctttattgttattgagaaagtaaaatactttatagcaaaacttacaatatctttgggctttggctaagtgcgatgattagttttgtgttctcttttaattttgcaaacttcggtatggtgtactctcttcgtcccaaaaaaaactcaacctaggagaagatgtgacccctcttaggataatggatctggacagaccctctatccagattcattattttaggagaggtcaaatctcctcctaattaagtttctttgggacggagagagtaacagttttggtttttgctgaccagaaatattcatgcccaagctggcaaggcccatccatcgcttgccagtttcccacagccaattaagagcaagtttaatagtatagctaactactagctccaaatcatttatagccaatgtaatagccaattcatactatagttgtttactacactattaatatctggtcccacctgtcatatacacattacgtcttgaagtccgtgctgtagctggctacagatcagtaacaccactgctcttctctcttattttattctttaaaatatatttatagattatagtctgtattccagctctaattaatgctaaaagtttagtagtggcttctatggtctcgtgccctttgacctcgatggtttcgatcgtctcgttccctttgaccttagattgcctcgccgccagtcatcggcctcccctccttcgttctctgacaaaatttgccaaatgacaaaagtttatgcaatttactgactggtatcataaaagcatgtcatgaataattacggaacatattctgcccaattgaatagagaaattataaaaaacaaaaaacaaaaatacccataaagccacaagcctggctacatgactagttttcctgtcatggcccatccaaaagttatagtgtcttcttgctgaaacgtagagacttgctcccttctttccaaaataaatgaactcctaaaatttaactttgtcacaaatctaatcaatttatacttttttacctatattctaatccatagttcaattgataagttttatccctacagtactcttcacttatcaatatatctattctattatatactaaaagtccattaaatttcctacaaacgtttctaagccaccaagtgacgctcctaaaaacactcctagattgccacgtggcagtttataatctcaccatcaattttcatttaaattagtgggcccattattttaggccattagattagatctattgcttactcttaatattctgtagatatgggtgaaaccgtttacaccagaaaaacatacgtacgtactatggaaagaaacgatcaaacgattaacgaacccttcagcatacatacgcacgtacgataaatagctatattaaaaaaagataaaagaaagatactgttcacttgaaaaaaaaattacttatataagcacgagtaaaaataataaaagctataagacctaaaatatatataagacataaaaaatatatttacatcggtataagaaaatagacgttttttaaaataagattttctatactataaaaacaaaatttattactctacaaataagatgatttagcgtttctacaattactcttaaatcgccacatgcatggctctctaacattttgctatcaattttcatttaaaatgacggaccattattttagatcattagattagcccatttcctcttaatttcctgggtatacaaccgaatgctctattgaaaaaatacaaagacatatacatttatatgataataaagcccaaaaaaactagaaaataaaataaacctttacatattgttccctagaaaaagtacgtacggatacacgagtaaaaataaaagccataagaccctaaaaatatatatacgtcggtaggaaaaaatagacggtcttttaaaaatacgattttctatactataaaaataaaattcattactccacaaatatgatcatgtagcgtttctgcaagcactcttagaatgctacgtggcactctataatttcgttgtcaattttcattcaaaatgatggatccattattttaga

SEQ ID NO: 48272 - DNA, 1401 bp, Oryza sativa
  unsure (1)..(1401): unsure at all n locations
ccaaataggtttgataacaaatgaacaatcctataacatgagcatgaaactattcatgatatattctcttatagtagaggaattataatataatggtcataagtgataattgatgaatgtaatgacataaaccatagtggcataactacaagtgcacctcaacaaattagttattataaataattttgggaaataaatacaattttagaattagtaaaggtgtctcatgcaattatggacaataggtgatgaaaacaaacaagatgctaaaatatagatctttgtcaaaatataaaaaatgatataatactctgaacattgtcacggtcacgtgtttgtttagctatatatatttttagtgatcaacttcactcatttctaaagatgacattgtatttgtaccataaaaattaagtagttttgattaacaccataaacaaaattgtgtctaaacaaaacataaagaaactatattttatgggaagaaccgaataactatttgcatcatatccatcttctctttgtttccctagagggcaacgagcatagataccacaactatagcatggggcacacatatggttgacttgatgcaggctcaatggaggccacattgataatagtgctcaacttcctacttactggtgcaatcgtctttaagggtgtcgacagtgaactaggattaattaaaattgtgctccacaatggtcatgagactgtgagaggcacgactatatcgacctatgcttgaaggaatcttgatggttcccccattagaggggcatgtctattttttaacggtgctatcctaataactaataaccaatagaagcgttagttttagaatacttatccgtagatttagaaataagtgttcgcataaacatttaggtacatagttgaaataaagttttatgtattaatgatgtattagacttattttggtggtttagatggagttccatttattaaaatcatatctatcttttaagaacaatgataataagtaatggtgataataggagagtttacacttacctggacaaaagtgaattttgattaaatctaagagacattcttatcatttatattaaagtctacggtctatttcacaacataattttttattactacgaggcaaaatctataatttgttatatgtatatggtgagatataacttaattctcttagcattatttatataaacaataaataaaatgcccgtgcatctgcgcgggcttcttttcttgttatttataaattgtggatatttttccttacaaactaaactctctcgagttgatttatttcgagacggagggacttaagcagtattggattaagggtaccgagctcgaattcggcatataacagtnggtaatcagcngttttctactcat

SEQ ID NO: 48273 - DNA, 717 bp, Oryza sativa
cttcctatactattagacggtagcaatgatagatgttttcctcgcttgatctcattcctcgtcatccttcacaattgcgacaccgccatcaaccaccacaatatataggatgactcggcattagttagaaattaaagcatgaaactactaaaattttatttttcatttcatggcaaatttctaaattgtctttgttatcaatatatacttaacgtaaaagttataggctaaaatcaggtttggaaattttggtttagccgatttgatcagacctcgccgaaatgctgaaatttccgtaattttgaataaagtttagttgaatttgaacaaatattaccaaaattcatgaaaaaaaataaaaaaataaaaaaattctgccgaaataatatcgtatcggaggggtccgaaatgaccgatttcgttctataatttccaaccctggctgaaattactttgagggatggaaggagtagctagctatccctaatcagtaaattacatgaccatgaatgctaattgttggctttgaaaggaaagaatctaatctaacctactgataaattgcgcgtgctcagttccccatgcattcgaagcaagagaaggtatgatgatgctgattttcgtttaagaaataaaaatcgccccgtgcgggttcgccgaaacctacaaagaactgataaaaaaaacaccatttttaagcaacaccgtattaaaaat

SEQ ID NO: 48274 - DNA, 1217 bp, Oryza sativa
acacatctcattatctcttgcggttgcggatggctaattttacggtcgctcgtgggctcccatcgctcactgcccgatccgcgcatgacgtttgtgactgtgatgactcaggggaggcgaggaaagaaggggactggggaaagaggaatgaagggtaagttttcagatggaatgcacgagtttcacagtgaatttacatggaagatatcggccgcgtctgagatagctgaaattgatgcaataatctgtttcttttatagcaacctgaggtataaatgaatcaataactactataaagttgagaaaagttactttgcaaaaaatatttcgaaagaattactataatgcatcattttttttgcgaggataatgcatcgtttttgggtatataaactttttttttgcacaaaatgcataatttaaggcataggaaaggatacaaacaaaaaaaatcaaaattacgcgaaatgagcgtaactttacttattagattcgttctagtggaactaaccggatgagttctggagttgatatgagtgttcgtatttatggctaattattcttttagtggtaggcgacctttagtcgacacggaggcgtcatggtgagtggtgacttcgtaaatctcaagatatacaaacgcagacttctggagatgctcatagtgatatgtgtgcgtgtgtgtgcatgcattcataggagtgagtgtgcggttgtgcgcgtgttgtgagcatctgcgtttgtaccgtgtttcttaagaaaactacaataggaaatccaaagttattcttattcatctcaagcggttatttattttcggatctcgggatggttattaccatgtcatttcaaactagccctaggcaccatctgtaaatttctatttttagcaagtttactattgcctgtaaatttgaacaaatattggctaattttttaaacataaaaataataattttcatatttttttagacaagttttaaattttaggaatatatgtttaaatacatagcctcagtagcaccataggtaatgggttcgacttcccatggagtgaattttgcaagatttaacggctttgtgctttcagtggtaggcgacgtacccgtcgacagcgaggtgcctgggtgatgtcaatctccaggatggatttaccggcccagtcttcgaagatgctcataggggtagtgtttgcgtgcgtatgttcataagggtga

SEQ ID NO: 48275 - DNA, 683 bp, Oryza sativa
ttggacagtaccctaataaatcttatagatctcaatgtccaaattagattaaattcaagaaaaacctattaattttttatttacacgtaagacaaaccacattcacatacgcacgaatgcactttctaacacatactcgataaatctctaacctcattaaattaattttctgttaaaagcataatatgcatactatttgtgtacaccaacatttgaaccatagtgaccaccacaccataagtgaccttccaaaatttcatgtctaaactatagtataccgggagtgtttgacaggagagaaaaagtaaacattgagaagatacgaagggagccattagcacataattaattaggtattaactattttaaattttcaagatggattaatatgatttattaaaataactttcctatagaaattgttttaaaaaacacaccttttaatagtttaaaaagtatgagcgcagaaaactagacaaatcttctctatttcacctgctgctgaacacggaaaatgagaaaaattgtagtttattaatgaccagagcaatacgtacttgtgaaaagcactaaaagtccatgtttagatcccatctcaaaactttacaccttgttctatcaaacatttgaactgtatgaagtattaaatgtgggctaaaaaataactaattatacagattgca

SEQ ID NO: 48276 - DNA, 700 bp, Oryza sativa
tccttttctttacggataacagggttaactaaccaaaaacctttgctgttcatcaccagttacggatcgtaacaactatcaccatcaccccgatcactccgataactgatacccagtgccgcgagtagaatgacaatgaagcgagtctagaggtaccggcaagttctcctgtgaaaagaagtggaactaaacaagctagtgtttttaatatgaaaggaacgcgggtcatacccgtacaagttcagaaagaaatcctgggaaaagacgagcagataaaagttctcttgcccgtaaaaaaggcttaaatgagtgttttttatttgagttacagggcttttcaacgattaaaaagctctctatgacggcggctaagtcgaggagtaggcacacaagagtgctttttttgggggctcaacctgtataggtactgggtaaagctagctctattgggcgccgcacttacttattgtaaaacatgcgccagaatgcccaagcctgaaaactatatatgataatatggtttttaacaaacttgcctctctttatattctaaagaattgtcagccctttgccatgttacttcttacgcgggaattatgggcaaaagttagcccggaataactaaagatctttgtttgcgggaaagggagggatttggtggaattcacaagcaagagtactccactgaaaaagcacaaat

SEQ ID NO: 48277 - DNA, 696 bp, Oryza sativa
aacatgagttgctctcaaaggacttgacttctgaaatctctattctacgtttttcaactaatccacacgagaaaatcctatctttcaagctttctctcactaacttcgccaattgtccttcgctccagatggtcaatgtcttcagactagccatcagcccttggcttctgtacccttcaaacgcaaataaataaaaataaagaatttcagcacgcgcatccgttttcttgctcgaaaaaatgattcaatctgactttatcggtattctggattgagtaaaaaagggatatatgaagttcaaggccttgccaaaaccgtcatggccctattatgtataggccgtactaagccaatagtgaataacaaactctttcctgctccctcgaccctaattaactcccatcctgccaagcctcagctgccagcgcattgtatctaagcacactgcggcaaattgatacaagtagctaaagatctcgcattcgacatccccggccgaacggttaggcaacactagggcgcctgggtcccaattcccgttaccaaacaagatgtcgagaggcgaactctgtaattcccccccagcaaaagtgatagcagctgtagcatccgtgtggaagagggtaagcttttcggcacacctttttcaagatggaaaggatgaatactcgtgttgggtcctgcagaccaagatag

SEQ ID NO: 48278 - DNA, 824 bp, Oryza sativa
tctgacttctaaggtagacaagggataggaatcaatgcatgctcaaatccaaatttaaaccaagcaacaaatgggccaaaccactagccaagcatgatgatttgtatgcatagaacatttttcatgaacccggataaagacactaatgcgactgactaaactatagcttaatgcataaactagatgcatgaaaaatgatgcgcgtaacattgccccatcgaacatagacacgacctaatgcatatcacccgataaattcccaactgactgtcaaataaactccaaataaacttttaccaaaccctagactgtccctagtcgagaaatccaattaaataagcgaccaagatttttcccacaaactcaaaagaacaaaaccccaaaatttttcccgaaacaaatccaagtgcaaaaagcatatgcagatgaaaaggtttcagagggctcttagggtttccatttggcttgtcctacggtcaaggtcggctctgataccaacttgtcacgcccagaaattcacgaaccagaatttctaagctgattgtgcattaaacccctgtccaggaccagccagggtacacaaacgacaattgttgacatacagatccacgtcttacaaaaatataaaagattacaaatgcagcggaaaaagataaaagcgagctaagcctgaagacttgactcctgcagcgggcgactccattccacaggcaatccttgacggcagcgacgaaaccaacctcttcgagacatcttcaactgggaaggacttcaactctggtgtgggggaaaagagagcaagactgagtactacccactgtact

SEQ ID NO: 48279 - DNA, 702 bp, Oryza sativa
attatgctcgcaaaaaaaatgatgcattataggaatcctttcgaaatattttttgcaagagaacttttctcaactttatagaaggtattgattcatttatacctcagggtgctataaaagaaacagattattgcatcaatgtcagctatctcagacgcggccgatatcttccatgtaaattcactgtgaaactcgtgcattccatctgaaaacttacccttcattcctctttccccagtccccttctttcctcgcctcccctgagtcatcacaggcacaaacgtcatgcgcggatcgggcagtgagcgatgggagcccacgagcgaccgtcaaattagccatccgcaaccgcaagagataatgagatgtgttgatgatcaggtaccggtcctaattggcttaaccaatcaatctatatgactgtagcccgcctggatccggctgatccgaattttgctgatactttttccggaagattttccagctcccaagagaaatcctaccgaataaacgcatttctgtagcatcgtcgcccgtatcaattcggcgagggattacaggcacctgtaagcaaaaaccctacctttcctcaacaggttggataccatcgggagaaatttcgctgcgtttcaaaggtcctttcgtctcctttatattacccggcgataagaaaccccgcttaattctataacgttacgggag

SEQ ID NO: 48280 - DNA, 1064 bp, Oryza sativa
aaatgtagcatatggtctgaacttataggtcctttcctataaacttttccttacactaactatacctctttctgcttcttcaagtaggtggcgtggacggtgtgtcccttgcctattcttaagtggctttgttgggattcggtttatgtgtttttctaagaattggtatgttgcactcgtgttctgtaaagtgtgctaaagtggtatgtatgtgccttatgttctgtgcattgcgggctttaattgtgtgatagtttgtttctcggacagataactagtaaacagctttaaaaagatggaaacataggttgtttgtaactataaaagacagtacattatcagcagcattaggtaataatgtgtctctagtactaaatcacgcgtaccagcatgtacagatatatgctcaattggttgttataagtaccttcaaaacaaaagatgatcgaaatgccaaattgatcatagtagcaaacaaaagagattagggtcagaggagatagcaaacatggagattaatgcttcttcaggttctaattgcttttctgttgcactattgcttaactcctcctgtggatcttcctcatcctcaccaacctcttcttcttaacccaatagcatgtttagtttgattttacactaatgcaagctctgccaatttgtttttataatcagcgatatatcttcgataaagtgctaagaaaagaacaagtaaactattgcatggtcttgtgaagctgtctttcgggtccaacttaactatattggtaggtctgactatctgtctttacctgctatcgatgtaaaactgccctatgtggcagctctggtcctccctttacattaccagtaggtaatttgtctagtgcctgtaccctttcttttgatagaggagtcagtgtaagccaatgcttaggtcttcacctccagccaatcagaatctgaagtcagcggggtattccaatatagctacttctaaggaggttccctagcactcagaaaccctgggggccaggcagtgaatcgttccgcagaaagatcacccggccacacctcggagccga

SEQ ID NO: 48281 - DNA, 674 bp, Oryza sativa
aacaatcaggaataggactaggagaatgaagtctaaataacggagtaaagcagtaattgggcttagtgctccaattggccttaggactaggacgaaaagcaaggcgccctctagtctcgttcgctgggtggtcagagtacagcttcgccttctcctcgggcggcaacttgaaaaactccattccaatccccaacactttcctcagcatctcctctgttatccccttacgatatatgcacattagaaaaaaaagttggaaaaaaagcatgttatctctcatttttcatcggtaagatacttgtacataacagactagcagtaccataagcagtaggcttttggactgagctacaagtcacagtattttgagtaaaatagggtaataccccataccagcatgaagccatttacaaaaagcccataatttggtatcatgccggcaccagagtcatacataaaggtctgtcttctccttctgctcgaaagagtctaatgctacatcctttcactcatgtagattgtccagcattttatttgacaaaactccttatgatctgaggaagacgaaagttatgaagctgccaagcaagatattgatggaatctcgacaacgggttcttatgtatgatgtgtccattaagtctcaaaatatcaacacggaatgtacacagagt

SEQ ID NO: 48282 - DNA, 662 bp, Oryza sativa
  unsure (1)..(662): unsure at all n locations
agtaataacgacttctccataacagtttgaagattggctcgcaacgcaagtagcggcaagaaaggagagcaagacttccttttctaaaagaagaaagaactagacttctataagaagattttgataatcgtagatcgtggaatattcatctatcttattaggtaactactttagctgctctcgaaactgaaccatcgtgaatagaactagcgcttaaggaagagtaggatctgttagcaagtcatattcaatcacccggtcttctccttcctagcttttagatagccctgattctttattggattttaatacacttagccgtgtacgtatcttggctaaactcgaatctatagtttatttaatactgatgtactcggtaaagaatcaaaaaggtacttgaagacgactttgaatgggaggaggttttctttttatccccccctaacctgattttgatgtcttcttcgttctcagaccctatggtccattgtaggatgatttttctaaggccttgaattcgttggaaaggtgatcagggtcctcttcctggtcctatcgaaccagtgacttctctcctgggattgaatatgttttgccttttcccgatggttccgcattccaatgtgggtaggattgccaggatgagncgcttatttagccta

SEQ ID NO: 48283 - DNA, 818 bp, Oryza sativa
tcgcttatttaattggatttctcgactagggacagtctagggtttggtaaaagtttatttggagtttatttgacagtcagttgggaatttatcgggtgatatgcattaggtcgtgtctatgttcgatggggcaatgttacgcgcatcatttttcatgcatctagtttatgcattaagctatagtttagtcagtcgcattagtgtctttatccgggttcatgaaaaatgttctatgcatacaaatcatcatgcttggctagtggtttgggccatttgttgcttggtttaaatttggatttgagcatgcattgattcctatcccttgtctaccttagaagtcagacatgttcttcgatcgcaagcgccgctccgagcttcagagtcgccgcccttagctttatcgtcttcttagtctgtttgcgtgctagtttttgtgtttaggtttgttgcttgtgggttaatcggcggtcgatatcatgtgtgagtggtatgacagccttaattaggaattgcgtgcctctttttcagtgttttaatcaagattaagataattgcacttaattttataagaaagattagtttccgagccatctgttttcttcctttctcttatttctacctatcctcctccagatggtgaagacaaggaatgatccccgtgactccaacgacgccagtggcagcgaagagcagaccgatggagctcatgtcagtggtgcatctggcagcagatcatctccaccgcccgaaaacccaacagtcactcaagggtaccgagctcgaattcgcccatagtagtcggttgtcatcaacgccat

SEQ ID NO: 48284 - DNA, 700 bp, Oryza sativa
cggctgcggaattcaccgcgccacaaaaggggggctgccccgtgccctgctgggacgggggcgaaccataaggtgtggtgcgatcggtaaaagggggttatacgaagggtcctgtcacggcctctttccggtatgtcgtggtggcatgtcggcgcacggaaccgtgtcgtgggcctgtgtcttgtgggtacagttgtacacctctgatcagagtaaaactattcgaatagccgtgcccgcggttatgggcggtcgaccagattcaccgtgattagtttcaccctagttagcttttggaactgattagtttaggtggtggtttgggcctgttgcaacgtggtgtaacgttggacagtgattggttaatatggattaattactacaactgttttactgctttcaactactgttttgaaatgccggctttatgcaaaagaacctttagcctcccttggatatatcttgcatcatacctcctcttccggtatgacttgctgagtacagtgggtagtactcagtcttgctctcttttcccccacaccagagttgaagtccttcccagttgaagatgtctcgaagaggttggtttcgtcgctgccgtcaaggattgcctgtggaatggagtcgcccgctgcaggagtcaagtcttcaggcttagctcgcttttatctttttccgctgcatttgtaatcttttatat

SEQ ID NO: 48285 - DNA, 711 bp, Oryza sativa
  unsure (1)..(711): unsure at all n locations
aacctcgttagaagtagctatattgaattaccccgctgactccagattctgattggctgnaggtgaagacctaagcattggcttacactgactcctctatcaaaagaaagggtacaggcactagcaaaattacctactggtaatgtaaaaggaggaccagagctgccacatagggcagttttacatcgatagcaggtaaagacagatagtcagccctaccaatatagttaagttggacccgaaagacagcttcacaagaccatgcaatagttaacttgttcttttcttagcactttatcgaagatatatcgctgattataaaaacaaattggcagagcttgcattagtgtaaaatcaaactaaacatgctattgggttaaaaaaaagaggttggtgaggatgaggaagatccacaggaggagttaagcaatagtgcaacagaaaagcaattagaacctgaagaagcattaatctccatgtttgctatctcctctgaccctaatctcttttgtttgctactatgatcaatttggcatttcgatcatcttttgttttgaaggtacttataacaaccaattgagcatatatctgtacatgctggtacgcgtgatttagtactagagacacattattacctaatgctgctgataatgtactgtcttttatagttacaaacaacctatgtttccatctttttaaagtttactagtt

SEQ ID NO: 48286 - DNA, 801 bp, Oryza sativa
tgaagcgattcaccgggacacccgggcggaccaaactccatcacgccaaccctcgcgtgggtacgtcggctagagaaaagctacactacaagcccagccgttgcccacgctggcttgtggtaagtacgataagttcttccagggcatcccgcgaaccggtccttaatcgccatgggcacgtctagcaaaaccatgcacccacagcccaccatgtagtgtattttaattagccaacaccattgcggtggcactaatccaaagctattgccaataatcaagtctatgctttaatgtggtccccttttgtgcactagttgaactaagcatggctaagcatctcctaaaccaacatctagtcattttaatacccaagttatcaatggcataagggaaacaacatatagctgagtaataggacccatcccacatgatattgtaaaacaatgcaatatttaatagaaatgcgggacatttgtaaattaggtacaatatgatcaattgcaatgtatgacttgccttgctctcgcactgatggaaccacagcaacgtcttcgcgaaaccacgaatcgacgaaacgggcgaaatctacgcgacaaacaaagcacacaagcaaaacatgctataagactactgaaacaggaagcaaaaccatttttaatggattctacacatttttatgaatttactgagacttgaatgggattaatcggagctcggatgaattagttatgaattttagaagattcactgtgtttattactataaaagaaaaacccttaatcaatttattgcgcaataatt

SEQ ID NO: 48287 - DNA, 1935 bp, Oryza sativa
  unsure (1)..(1935): unsure at all n locations
cgtagcgattcgtactaccggaaaagtgtcgctaaccgctaggcaatatagttagcttacggggtggagcgcaagcaagcgtagcgaatcacatagaattgcccctacctgccagcgcgcagatagatagggcgggcgagcgcagggatgnatgtctgagcggttgaaagagtcggtcttgaaaaccgaagtattgataggaataccgggggttcgaatccctctccatccgcgaggtcataagttctctcttgccttatctatagataagaacgaatctcctcgactcgactgatatgatggatggtagaaggttgaggttattgtgtgttgatttagttaggactttgtctccctttcgttatcttccgccccgagacctgtgggagctaagtcgaagatctcggtgtcgtcgtgagtggttgataaacagcgattgcagtttgatttagggagtcccaaccctgtgaagcttaacagacaaagaaaacgatagagacttccgggtattgggtgacgaccttaatgaatcaagtattcaggtggcagagttattagctacataagcgctcaaattcctgaatacttattgccctggcttctatgatcaacccctggcacatttaggttttgatctaaggctatcctggtctgcaggacccaacacaagtattcatcctttccaatctgaaaaaggtgttgccgaaagcttaccctcttccacacggatgctacagctgctatcacttttgctgggggggaattacagagttcgcctctcgacatcttgtttggtaaacggaattgggacccaggcgccctagtgttgcctaaccgttcggccggggatgtcggatgcgagatctttagctacttgtatcaatttgccgcagtgtgcttagatacaatgcgctggcagctgaggcttggcaggatgggagttaattagggtcgagggagcaggaaagagtttgttattcactattggcttagtacggcctatacataatagggccatgacggttttggcaaggccttgaacttcatatatcccttttttactcaatccagaataccgataaagtcagattgaatcattttttcgagcaagaaaacggatgcgcgtgctgaaattctttatttttatttatttgcgtttgaagggtacagaagccaagggctgatggctagtctgaagacattgaccatctggagcgaaggacaattggcgaagttagtgagagaaagcttgaaagataggattttctcgtgtggattagttgaaaaacgtagaatagagatttcagaagtcaagtcctttgagagcaactcatgttcagccttgtcagaataagcacagctagcccttctgttcaaattactcttcctaaacctgaacactgttcataccgatacatacaaggctatccgttcgtgtctatctcttccaaccataaacctatccggatacctgcctacaaaacctggacttgatgaggtttgactgatctattcgcaactattccattggttctttcttttcttaaccttggattggttgagagcttagtgggagggcgcgtcgctgggaaaagaagatatagtcagttgtaacttattctggtaacatttctgggaaatctagagagagctattctagatagagggctccggggcacgagttgtaaagaactagttctggtagttcagctcacccgaggcaactaaactaaataggtctagctggggtctctatcttcgggttcaggacacatagacggagcgagtctacttcggtagcgtgggatggcataaggagattgagtctcactcttttttgaaatagaattacggaatcaatacgttagaacgttttccgatagagcggaaagcaaagtaacctattttaggatcagatcaaatctggaacaagaa

SEQ ID NO: 48288 - DNA, 666 bp, Oryza sativa
atttaatgaaattttatcttgccccattttatattggaatttattaattaaaactagatcttctcttcaagacttttaaaattatttctaaaaattccatttaaacaacaatttatatattttgaaattttcagggtgtgacacctactcaaggcccactacgggtagcgagcaattaacaaatagagacaaggatgaggagaaatgacgcatatacgaccggcctgggtcactcatgatgttggtagttcaagtgaattgtcgtagtgtaaggaagattgattggttttctgattgctacttggctggcataagaaagaaggcgccccggcaggaattctgtaagcttgacttgcgcgcagcgtttgggaatcaaagataaaaaataactctatgggacttacggaactggaaaaaaggtagcacctaggcgtaagaaagaaagtaaatagagacagcacctactacgctatctattgaagcttactatataatatataaaagaaaaaaaaaggccatataagtgagatcctagccagagaagagcaacaggagctataaaaaaagaacttatggacttgaatcagagattgggttgacatccgaaacagagaggaaaagagggaacatacatagctagctcacgaaagaaagcttgcaactact

SEQ ID NO: 48289 - DNA, 712 bp, Oryza sativa
ataccacaggggagtaccatctcaccggtccttatgaacagctttccccactgaatcattagatcacccgcttatgttccctagttgtccaggtgtgacctagtttgcttagtaagtatggaaggacaaaagacgagtacagatgactactattctccggcagaaagtcactcatttcctcttaaaggcatatttccctgaaaaaaagatatgagtaaaaaactcttccaaatcaaagatttgcctattcttcgtagtacgagaatactcttacttctcattgacacagacgagaaagaagtagaataaaggcagaatgttagtaaaaggaaaagaaaaatccattatatatgctatatctcattcactgagtagtgcaataagcaactattcgttgacatcgactcacttatacttgaagacaggaacatagtaaagtcagctaatccattgacacattgtctattctaagacaagaaaaaagagtaactgaagaatagtactctttctattgtcatttcctatgaatctttcttcattgaaaagatattgtgcatttaccggatttcctgtcatagatagtctagtgaagctagcttactaatgccaagaactactacttaccaaacctatccttactaataaacggctatatgaaatcttattattctatttctatattaactcatattctagtttcggaaagctatac

SEQ ID NO: 48290 - DNA, 716 bp, Oryza sativa
ctctctagtgatgtcttcagatcaggcagttgtctatgccgctttgcatcattgtcagataagggcttgtccgtatctccgtatgttgtcattcagagatctctcttatttatgtttgattggatatggggcacccgacaccagatacattgatatatacaacattcgtttcatactataagccgttttgactttttttttaagtcaaccttatttagctttggccaaattttataaaaaaaatataataatttttcaacataaaacaaagaagctattaaaatatatttaatggtagatttaataaaactaatttaatgttataaatgttactgtatttttctataaacctagtaaaacttcttaacttagttaatttttttaaaaaaatcaaaacgacttataatattaaacagagggagtagacgagtagtgtatattgataagtgatgagtccagcctacctgaataattcttttgagttaatatggaatgaattatgtaggaggtatccatttggacaccacttcagagttcaagttgatgtcaagtgctccattaagcacactgatgtagtcccttttctgtagtaagaaaaaggcaataagctagataaccttccattgcaattgtaatgctactcatagctaatgctgtagggacactttgatggtccaccaaatcagaaatattacaatgacaaaccttgtctgtat

SEQ ID NO: 48291 - DNA, 687 bp, Oryza sativa
atgatattgcatattttcatgaggttaaatatttaattattgctagtgggtgatgatgtagaatggttgtatgttaagctttggattgagtgggttgtaactttatgaaaaagctttggagtgagtgggttgtaactttatgaaaagtatagatttatcttcttggtatttatggcagaatcagatcatattgttacaatcacaaatttaaaatatcaccaatttccaccttttggttttgatcgtgttgtgaacatgtagtttacagtcatgcacacgtctcctggagcatacaaatgtttgcattgtcactatatggagatgtagcattaagaaattccaacaattcatgtacaaattctgacgggcgaacacttcagacttcggagcgagacaaaagaaagactattaatcagagtttgaaggaatctcttatgagaaccccctaatcctttttccatagtagttattgcaacggatacggaaataaaagagtttatgttgtgttgttttgagatatcgacttaaaaagaaacttatctcaaactatcgatatgtggaagagtgcattgttatcgatgtgaattggtttttaaagtagttaagatatactatttagaagacactgagcaataattgctataaagagtcagatcaatgtgttcgatgttggattatcaagcctac

SEQ ID NO: 48292 - DNA, 726 bp, Oryza sativa
  unsure (1)..(726): unsure at all n locations
agaggttgtgctaagtcatagtgtcgtccatcgtgaacgcggtggatcgatcgatctggccggtcggtgtagtaggatcgatctggcggcccaatctgtgaaccgcngcntgcaccgggtcaccgcgaaccctagccaatgacgcaatanttccctttccctttcagaaaataattcattattgcgtcataattcaattaaaatctatataagtgttttaaaccgatttaatctttgaaaattcataactaattcatcttagctcggatttagttggttcaagtctctaaatttttctaaaattgagatctacatgttaaaaatatctacatgtactgttcatgcttgttaatgtgctgttttggtgttttgctcctttctgtttagattccgacgtttccggagagtccgttttcgcaggagaagaatttgaagagttccaaggccagcaagtgtcacgccctgaagtacccctcccttactctaaattcataaaataaatcattcgaagaaattgtttaatttaacctagagatgaatccctaagtaataaatgcaaataataatcggaatcgacatgtagaatttctcttggattctacatgtcaaaatatgctaacaggatttttagtggaattttcagagccttggaaataattttaaccaattaaaataagcaaagtgcaatattaaatccctggaaaatcttttcttctttttcttttt

SEQ ID NO: 48293 - DNA, 677 bp, Oryza sativa
ttgaacaaagtggcgtaggactgcaatatccctcagattcagaccagcatctcaatctaggaaatgacaacacatgaaagaaaattcatcttgaaccagagtgctaaatcagctagtatttcatatgcacgccccttcagaaaacatcaagttgatgactctcaaatttattaatgggtaggctggtagcaacctcagcctgcatctggcttcagttggtgggcacgccaaatgtgccaattcacagtacatcgcaatcaagcaaatcgctgcctcaagcatagcgcaggagcaggttcagtaaacccgggcgcttacctcatttctcccaacttcctccttccaatgatcggcgccccattcgccaacccgcgatgctccagagcacatcatcacgtcgaggtcagtgtactcacgaatcacctcgaattgctacagcacaaatgcagagcaaccagctcccgatcagaacacatcgtccacactccatttgttcacatgttgatgaaaaaaaaaaagaaaaagcaacctgatggacgaggtgcacggtgggcgcgaggaacaccacgatcccgcgcggggccttcccggcgcgcacccggcgtgcgtgctcgcgcgcgagcatgacggcgaccatggtctttcccgaccccgtgtcgagcaccgcgatggtgttc

SEQ ID NO: 48294 - DNA, 751 bp, Oryza sativa
ttttccttgggaatgagaagcaatgttatatagcgttgttgggaccaatttgtggtgttcagctcagattatgagcggtgacttactgttgcgttaattagtgctattatttgtatacaactgcagaaaatgagaatttctgctttatagattccctatgaactcttgtgggcttcaaaagttgatatcagctgccgtttaatttgctgatcaacacattgcagcatttatagttcctagtggcggtgaagattcatatcagattttgttaactcctgtttagcttcagtagccgatggctagctcatactttatctgaagaaatttcttgtttagatatacgcagcagcagtacgagttgtgtttataatttttgttctcattttactctgcttttatcttgatctgatgataaacatgcctgcttacgttttgctctgatacaaaatgttgtgagattagtctttctcttctcatgtgaaatgttattaagctgataagttcttgcacacaaaactgttgaacctttcatatcgatatataaccaaaattggtcacaaaactgttagtaatcagttcatcataattggtcacctgaaagctgtttatgcagcagaagttacatggctctttaatgtctcagcataatctggtacttcctccatttcataatgtaagtcattctagcattgtccacattcatatagatattaataaatccaaacatatatgtgtctagattcattaacat

SEQ ID NO: 48295 - DNA, 654 bp, Oryza sativa
  unsure (1)..(654): unsure at all n locations
tcaccgagaagtcgttggtggtggtggtaatggtgtagaacggcaccggctgcnacggccggcggttcgagaggcagaaggtggcctgcgcaaccacgggctcggcggtggtggcggactcgtcgccgttgtcgagcgagaggtgaaagnagatgaagtcggtgttgctgggagaccggcctctcggcgcggcgcgnatgcgccaggcgcggccggccgccgacgcggaacgggcgggagaagatgggatgggctggcagctggctcgcctgcacgttcagggtgccggagtacccgtcgatcctgagcaagtggcagcctctcgcggcggaggccccggccgccgcgatcggcgggagcgtcgccgtcggcggcatggtcggtcggtcggcgcgagccacaacttgcggctctggtcgggtttccttccgttttgtagttgttttgctcgttagttttacggtttcaggagcgtttggtctcagaagaaagaaaatcctttgctagctccgaacttgccagcaacaatgaactttgtagctgtgagtggaaagaatgggaatacttgcccggaaaagggccctggtacacaaaggcctggtttagttggggagaaattttagatttggttgtcacattaaataggggaatata

SEQ ID NO: 48296 - DNA, 691 bp, Oryza sativa
atttgaaaatatttttttctacaaacttggtcaaactaaaagctaggatggacagaaaaaaaccgaaccaaaaagatcgaaaccgagaccgaaaaattcagtcatcaattcggtcctaggtagtgaaagaccgaattttgtctaaatgcaacctacaatccactagttcaataggattaaactctaattttcacatccctacttcttctaggtatgcaacctaataagaatctttactcataagtgcttacgatttttttgggtgatttttgtattgaaaatttccattatttctttgcatatatgaaaatgttgttgaatttcggtcaggaccgagaccgaatttgtcggtcctgatatttttacgttgaaattcggtcttcacttttcaaataccgaaagaccgaagaccaaaattttcggtcagaccgaatgcgcacctatactaaaagcagtttgactttgaccaaagtcaaaacatcttataacttgaaacggagggagtagtattttgcccaaggatgaattttgccccccatatttgaattaaaaaatatatatagtgtcaacttttgcagaacattttatcttcatatccattaagtgtactatttagactaccaagtgctttctctaagacgtatctttaatctctccaaacactgaagcacaataaaacatatatagagag

SEQ ID NO: 48297 - DNA, 654 bp, Oryza sativa
  unsure (1)..(654): unsure at all n locations
tagatttagtgtacatacagcaagccattgctagaatgctagaaatgactcaaaatggttacatataataattttaaatgaataggaacctctcaggttaatgctgagcagttgagctaaattaacttgaatccattgtacctattctgattaactggtctgttttctctctaatacctggtccagaattattaactcgaatggcaacaggtacataataggtatttcataattgcatgcatataatatagcgatccaaaagaaacataagtaaaanctttgcgatactaaccaatcctgcgccagcatgatctctaatataagttgcatccatgtagcgctcctcttctattgcactctgcatgccaaaaagattagaaaagagtttcaattatcttgtaattatcaaatatgttcccactattttggccatggaaaataatttggattcattgctctacctacaaaagcaatttatttacatccttctgttatcagtagaagttagacatcttttgctgaataatacagtgggtacaaatatgttagcttggggaaatttggggtgcaagactacgttgttcttccataaattggttatttcagctagtaccaaacttgttagttattatttattattttccatcaaatcaa

SEQ ID NO: 48298 - DNA, 647 bp, Oryza sativa
  unsure (1)..(647): unsure at all n locations
attggttatatagcatcaaaagtttacgttttcgattttatagcaccaaaagataccggttcactttaatagcactcaaagttcaccccgttcctatttttaacacttctgtcaatttccgatcgtttttccgtccacctcgatcgctattgacccagccacgcatgcgatatgacgtttctacccctcacaagtacaagtagaattcatggcatatgaggggtagaaacgtcataccacgtcttcggcgaccgcggcgaccggagcaggagtgccttggggtccaacagcgacgttgggctcctcaacgccggttccccgccatccgccaccccgcgcttcgcagccagcccaacaaacacaaccttggcacggcgaacagcgtcgcgccaccgncggcttgaacccttcccaccttcccgctggcggcgccgtccggatcgaacaccatcctccgcagcatcggcggcaatctaacaaactcacaaaaacgacactttcactttgacatgtgggacccacgtgggtcccacgctaactcagccactacgtaggataaaaccgggtcaaaactacttaaggatctattgtgaccagttttaattgggtggatttagttacacgtaaaattaaaaatttgggtgaaa

SEQ ID NO: 48299 - DNA, 694 bp, Oryza sativa
tggtcgagaaaatttgctaaagaagggtaggtaaattcaatctcatctggaaagacataatgcttttgctgaattgggtcaattattacaagggatggcattctcgatccaccagttaaagtttgcagaagcctataaccaccatcagagaagaagagtgaacccgcaaaatgttcatcaggtatacttggagtttcctgctctgtataatatgtgttatcgcccacaaggctactggaagagcttaatgctgcatgcacaggatatttgctatcactttcttctgatccttcatctagaataaataggttatcctcataaatggcatcctcaattcttcgagattcttgacccaggactgaaaacacagcatcttgctgatttgctgatcctgacttctgttggttaaaattcacatttgtcccatcgggttccaaaatgtctaaagcttctctaactgtttcctcatctttgtgtttgtgtaatatatgaccaacttcattgctggaatgcacatcagtggagacttcttcctgaagatcagcacttgttttgaagcctcagtttatgttcttgttctcccatttttgtatcactacagtcaagatcttctttattgatctacaagaaatttttaggagcattgctactgtgcacatcaacaaaaatatctttctgcagatcaagggcttac

SEQ ID NO: 48300 - DNA, 631 bp, Oryza sativa
tatgcaattatcttgatgacataatgttgtattatatagaaatgacatgtcctggatgcattctatgagtttcttctttctttctgtaatgacctatccagtgacctttcgagttgcatgctatatgtgtagatggatattgatgcaagtggtatcgctacctttcctgcaagtagatcatcggctattctatttattgatagattgtcagattcttcaaaagtcagagatgaaagcaaactatccctcaaactactaagggaatatgtgcagaaaaattatccatctcatttcagtactggtggtctaactagtggtaaatccagaatgagctctaaagctgttccttccctagttagcacaggtagatctgcccatactgaacgaactaggctgaatgattgggcctccaaattaatggaaattggggagaaaatgtcagtaatggtggtcaatgatggagaaagtatttcgtacagaagtgatagccaaggtagtaccgataatccattatatgatattctaacaaaactgatacacaaaacaagaccagcacataggtcaaagaaaacaaagataagttttgttgcaaaagatgttgccataaagaagctgtctgatgattctgaag

SEQ ID NO: 48301 - DNA, 545 bp, Oryza sativa
caatggcatgcgttagcctaattcagtagctgtaattaagtccgataggtactaacatagcaaggatctaagaaattgaaccccaaagttacagaacttcagctactttgaacaaagtggcgtaggactgcaatatccctcagattcagaccagcatctcaatctaggaaatgacaacacatgaaagaaaattcatcttgaaccagagtgctaaatcagctagtatttcatatgcacgccccttcagaaaacatcaagttgatgactctcaaatttattaatgggtaggctggtagcaacctcagcctgcatctggcttcagttggtgggcacgccaaatgtgccaattcacagtacatcgcaatcaagcaaatcgctgcctcaagcatagcgcaggagcaggttcagtaaacccgggcgcttacctcatttctcccaacttcctccttccaatgatcggcgccccattcgccaacccgcgatgctccagagcacatcatcacgtcgaggtcagtgtactcacgaatcacctcgaattgctacag

SEQ ID NO: 48302 - DNA, 844 bp, Oryza sativa
  unsure (1)..(844): unsure at all n locations
caaccagcccgcagcaaacgacacatgtcggcngcgnatccccccgaacatnntgaagcatgaaatnaatgagaacgagacacctnnngttnctccccncncccccccagagcgcnatgaaatgaatgacaacagcagnnagaaacacaaacaaaagcaaggcggcgcacgaggagaaccccagagacccccgggatnggccggagaaagaaagtacagaaagatattaaagaaggggcgaggaagaaatgaggggggggggaacaaaaaaaacgagacgcgaaaggaacaatacaaagggcagcggccaaaacgacgcgactgggaaaaccacgccagaaacgaaaacaggccgacaagagaaaaaaacgagcacagcaggcagaggcagaaagggaagggaaccaccaacagccattcaaaacagaagcgaaaaaggaaagggaaaaagacacgcccgaaatggactgagaaagaaagaggaaaggagaggaaaccgaacaaatgaacaaaacgagaaaacaaaccaaaaaacgccgggagccccacatgaggacacttctaaccacgccacaccagaagggcacccccggacagctggaaattgtgggcccaaaagaaggatgcgcaatagggacattaaagcaccccagaaacaataaaacctagatcaggatgaaaaggaccaaacgaggccaatcaacccgaaaaaaaagggaaaaaaacggggacaaggaaggcaaggaaaagaacaacggaaacaagggggaaaagaaaaaaaaaccgaacacaaccccgaacaaatataagggaggagagaaggaagcagaggaaaaagaaacat

SEQ ID NO: 48303 - DNA, 567 bp, Oryza sativa
cctcccatgtgtacagaccatttatatataatctgataattaatcataatgggcatacatgctcgatggtgggtttactctcgcaggtggccgtagccgcagaagcagcccatccaatccagattagtaattaacagcgacgcagcgagaacaactatctgtgtacgggacaaggagctatctagcgctgacgaaacaatgaactgactagtagtaatgacgtgcagattaaatacgcccatgcatgtgaggtggttgttcataacgctgcttgccttcatgtatcatgattctgatagtgatgatagcttaatgcttattttaatttggaaatatatatatgtggcactacagctcagtgagagtgaacgatttagatgttatgtacagctagggggacacaagcaaaatgtgcatgaattagggtgtttttttaaaaaaaaatgcgaagaattaagcgtgcattttgacagaagaatctgaactgctcgtgatatcaattaagtgggtggtgaaaaggacttgggttaaattaacctgtgaggatgtcgtggaaactaccataca

SEQ ID NO: 48304 - DNA, 733 bp, Oryza sativa
ctaaactaatatggtaaggtggaggggagaagaaaagagagagtgggagttacaacttaacttacatggataaaattaggggtggcatttgcctcttctataaaacttgctcatagacagaaatttttgttaggctcttcaaccaaccgaaattaatttggttataattcggttagcactctcgattaattgacattaggaaatagacctaattatgtatcttgatcggtgttaagttgtaagttaaatctagtcaaaagccatgtgtgttgctgcggcactataggatgaacatatggaaaaatattaattatgcttcacaacactcaatattgtacactaaatgaaaaaacatactccgtaccaaagaaacaaaattgattgtggataacaaatctgcgatctatataacccatgttcttcgggagggctagctgattcttgtcctttcatatatccttttcatatccacatcattacagattaaacaaaaaattccctgtcaaagtttagtgcattagccattaatgcggtaaaaggcaaactaccataataatatcgttgaccgttgtaaacatgtaagaatggttgaaaaatatagtaaattcaaaattaaaatgaattgcatgggacagacccaaatgttcgtaccaaaatgtaaacctacttgatagagtgtgttgcacttaagcaaaatgagtaaccgcacaaaataaaatcaagcaaccaattt

SEQ ID NO: 48305 - DNA, 687 bp, Oryza sativa
cagccttaagtggtgctcgaccccatatcttcttttcttgcctcgcacgggaacatatgaacaatttgtatgataaaagcatgttagcaaaattttgtaataatatcgtgattatattgttttagcttaacacacataaaaaatggatctttgggagaggacctactcaaaattgtgctaattggtcattgacacaatccccatattcttattctcaagagtaaataggcacacctatcacaaaactactggctaagcattttttacataaaaccctaccgttgggggcatgttgtatcctacaacccatatttctttgctctcctcctgccaccggttacatgacctcattccctatttccacaatgaggatgcacttctctgtgctctccgcatcgtcgctaggcgtgaagtattggcgccaacctagcatatttcctgtcatttctctgccctagcccaacagcgcagtacgtgatttaatcgatgcctaatgaatgatcaaggagacctatatgaagggagaagagaagcctgttctgaacttcgcagcaggtaataattcttttcccccacttatttaatgcagatttggctatcttaacaaaccataattgtctatatggatgatggatttgaaatttcccctctaattgcaagtactatgctataaaagtacttattatt

SEQ ID NO: 48306 - DNA, 742 bp, Oryza sativa
caatgcaaacaaactcattgtttataatcatgaatgtatttatttattacatgattgctgcaaactcccgattacacaatgataagtagcgaactgaaaaccacaaacatggctactcattctgattctgaagaggtatagctggcattgttctagtgactgcatccttgattggttctgtgatgatgtgataggactgcatattgctatcattcacaggagaagcttccttctgattgctattcgaagcagagaacggtcttctgcttggtatcgccctcctgagattgattgccctttgctcggcctggagtaggtcggggagagacacaacttcttccatcgatgacaattctttgctgaggctgtcggtgcagagaatggttggtgctgaaggtattattgctatgatttattgcagagtcaggtgcagcaggaggagcattggtgctgtggatgatatcgtcgatgttgctgttggagctaactagctgatgagacaatcgtagggttgttcgttggatttctgcggtcttggtcaacaacacactgagttggcaatccttgggcacatggtttgtaccttcgcacagaaaacatgtgaccttgcgggtgggacattcacctggtggatggtcttccccacaatgagggcagagtgtgagacacatgctagcaatgtgtccaatttctccacaacggttgcatgcttttgattccatctctgatgaactatgtacca

SEQ ID NO: 48307 - DNA, 696 bp, Oryza sativa
tagttcatcagaatcagtgcaggacgaataattcatattatattcttcttttatttacaaattgcaattatgttaccctgcagtcctgcactcctgtctgctatcatgatttcaagattagttgaacaagagcaaacttagtggcatggaatatatttttatattttccaatgcaaccacaggatagtcctgacatgttgtgatttcagtgcaacatgttagaaattccaatgcaaccacaggaaatataattattttattgaagtctagtatatttagctcacatcatctataaaatagttaaaatgtctcgtaaaatccactggtccgacaatgtgtgaaaactatggatttacttttcattaggtttaccaaaattccatgtttaggagatggacttcaggtaattgttgatatagaatttttttggaactggtcatgtactgaaatttccattagatctcaaagtgagtaagctgtcaaattttatatggacttgctaaggaactcatatttgctacaccatgaatagtaataatccactacttgacaccttccataaaccagccttagctctaatactttgcttgtatttgaaatatttcagtcatgaagaaatcgatgttagccatcctgatttttttagcagtgctaaactcaatggatacatccctccaataaaagaggtaacattac

SEQ ID NO: 48308 - DNA, 589 bp, Oryza sativa
tttaaatgtgcctttcacgtgctattgtaccagctggcatactgcctgtcacaaaatagaagtcctattggatcactattgagccttttgatgcaattaaatctcttgcatcctactctgcaggattgtggacagccagaattcaccctgtcagagaggcggcgcttcggcaatatattgtcccagtacgtgaaagctgatacatttctacattggcaacttttcttatactatcttttgaaacttgatgtcaaaaacatattagcactacatgaattaatttcatttttataacgttttagaccataaaagatgatatgttctgatccaacccatcttgttaaaatggatttaaatctgtaatgtagtttacagtgcactggcaaccattatggatttgagtcaaaaatatataatatattggctactagctagtagtcatcacagatatggttcatgctctcgttgaatatgtctcacactcaccttgagctaactttagagaatcttcagtgatagttttattcacatcctcatcctacctaagccatcccttaagatctggctatgagagtgatgaactacttgc

SEQ ID NO: 48309 - DNA, 525 bp, Oryza sativa
cgtctgcccgggtgggaagacgaggtcgtcgatgccggagacggaacccattgcactgatcagcgaaaagcttgacgcaacccctacctggcgcgccaactgtcgaaactagatttcggcaataataaaaggggtggctatcaagctggaaaagtgtatgggtttggagacaaaagatttatacaggttcaggccttcttattcaagaagtaataccctactcctgtccggggatgaatccgccgagtgtcttcttaattgtatgatttggagaaaatcaacatgtgcccctagaggcacccggaccccccttatatatgggaaggagtccgtgttacaaaagataatctatatccctaacggaatatgcagatacagataaaatacagtcgtaaccgactaagtctcaaggtatttccttgatgtacaagttgagaaacaaacccgagacacaaataagatattctatctatatttggtatcctgattcagtccaaataccatcgccgtgtagatatgggatat

SEQ ID NO: 48310 - DNA, 1969 bp, Oryza sativa
ctaacatagccacataattatcaattatattaaataatagtatggttaaaaaatgctcttaatatgaacaggcccttaattaggaaccagatccagaaaccctgaaaggctaagcctagttaagttaattatgtttacacagaaaccaagcagtaggtcattgtcaaatgacaaattaacatggccaaatagatcaacgtcacttcttctgcctgttaaagatcattggttcaattgggatgtaacgtggcagtaactaggtttagttaaggttcacttagtttgacctctttgtcaaagcatccatgatccatgtggctccggcaggaagtacagcaagtgaacaccagttggtacgaaaagatgactacttagttatctaagctcttatttttacaatttaattagcatttgatggaaggcactatccctactggcaatcacgatgagatagaacctttaaactaatcacagagatcacaatcaatcgacgctctggtcaggagttagttatggggaatatagaagtacatgcatatgcagcaaccaattaagagaatcttgtgctttcttaatgctccctcttagacttctttatactctgcttattttttgtgtttttctttttttttctttcgaaacatgacatgttttatgttaaatgaaagagagagaaatattatttggtggccacctttttcaatttagtgctgaacaaaaatactattgtgttcctgataaatcattttcagagtggctgtgttctttgggtgactgtgagtgagtttgtttcgttttccgtatgcacgcttcccgaactactaaacggtgtgtgttttgcaaaaattttctataggaaagttgctttaaaaaatcatattaatctatttttgaagtttaaaatagttaatactcaattaatcatgcgctaatggctcaccttgttttgcgtatcttcccaatcttctctatctccttctcctcaaacacagacgtgtttacttacattaaaattttataaaaaaaaatattctgagttaagcagaaaatatatatttcccctatcactatggtgaaatggtgattaattactgaaaattgtgaaatactcctaccttttagtggatggagtttgaatttgttccatatgcaacaaattaaccaacaaacaaatgtttttagttccggtcttgatcaccctttcataattcagatgagcatccgctccaaagcagtctgagggcgccatcgttttgcagttgctgctgcttttcagcagtactagcctgatgcttataagcatcaacaattatattgttttgcttatggctgattactggatcttctgtgaactgatgcattgcctctgcttgcctacctctgtgtgcgttgtgtgctcgtcagcactgactatagatgcgtggccgtagatagatcccgacatgtatagagcccactaccaatagctgttcgcatttaggccgtaacagcgaaccgatgcgcttctgctgcaaaacagcaaccgcaaaagcgaaccgatggcagcctcacagttagtaagctcaacccttttcttaacaatcctattgtaacatggtcaagaagctttgcaaaattggaaagttctggaataatttcatacaagtagcggtagctgaaacatataaacaaccataacaaaggagcatgatgcaccctgaatttttaaaattctataagctggaaaattctaagcaagaaaaccataataagttaagaagaaaactgcagcagggaacaaaatgcattactcctgttatagggtttagctagtatgggacacagagaaagaaaagtatgaaattaaccccaaaccaacagtattgttagttttaaagacaaacgttgtaataagtaatatatttgatcatgtgactatatataccttcatatttaatagagattattggaaatataagcatttcaccac

SEQ ID NO: 48311 - DNA, 2381 bp, Oryza sativa
gtggctcgctgatcaaaggggatttttctctcttccaccatgggcagaaaagagggagctcggattagggtttcttgttggagctttggatgcggaatgctaggacggatggagggcgcttgtgcgtagcaagatttgggagagatttggtattggattgagtggaaaaggtcaaacctagcttcgacggcgacaggtggtgaacaaaagcgcaaaagttttcaaggaagacaaagcagtggagaagacgacaggtggtgaacaaaggcgctgttacgcattttatttgcaatgcagttggtttagtgctatgcacttgattttataaagtcacgtatacatgttttgtttttcttggactagtatcattggcttaatgctatacagtatatggcattttggttatttaattggcggttggtacttggtaacaccacatatgccgtatttttcgtaatatatgaaatcactcggatgtttaatttcttattcttgactttacgttttgttgctttcaactaatcatgtattcagggctacacctaattaggtgtatctattagttagttttcattattctcatttttttcagataagagctccacatcctcttgcaagcatcatgatgacgggataggagaaaaagcactcggaagattacaatgagaatattggagcacttggctttttattgaacaagcttgggataatatttttttttcgattgtaaaggtctcggggctgttgtggagattatgagtatcccatacccactcggtctgcttatccgactagagataggaggtgggccggatctatgtattatttaataggttaggacttgggaattatattgccttgtttcttactgcatggccatagttcttattagatacaattatgtaaacataaaaagaaaccgatgccatgtctgtctaactcttcctcttcgtaactttgctcccaacctatataagatgaacaagaagcacgactaaatcgtcagatcaatacaacacctgacggattcaatcctcaagcaggagtagggcattacttctcatcgagaaagcttgaacctgtctaaacctcgttccctttactcatcctcttttatagaactcatgcgctactctttttcttattggcgatttctataatcgataattcttttagtagtaggttacttacgttgacattgaggtaccagtgatgacttaatcgatctcaagatatactagtctggaggtgtttataggagtaggatgatgtgtgtgtacgttcataaaatggtgagtcaaacattatatataggccgtgtttagatgagactaaaacttaagtccctatcacatcggatgtttggacactaataataaatattaaatgtagactattaataaaacctatttataatcttggactaattcgcgagactaatctattgaggctaattaatccataattagcctatgtgatgctacagtaaacattctctaattatggattagttaggcttaaaaagtttgtctcgcgaattagtttttattttgtaagaagtctatatttaataattctaaattagtgtctaaacacagagactaaagttaagtccctggatccaaacaccaccataatcgtactcccgtaacataactctaaagataaacaaataaagtaggtgtttagttctctacataaataaaccataagtttgaactggaactcgacaagacaataatccaaacattatctaaaattgtattgtaatatcctgtaataatatataagttcaaaaaacaacctatcacaaaaggtaaataaggcaacaaaccaaaacttagtaaaacaaaggttgtgttttagatccaggtatgaaaatctttgtcatgtcacatcgaatatacggacacgcattcgaagtattaaacacagtctaataataaaacaaattatggatttcgcatggaactgcgagacgaatttattaagcttaattaatccgtcattagtaaatatttacggtagcaccatattgtcaaatcatggagcaattatacttaaaagattcgtctcgcaatttatacgcaatcagtgtaattaattttttttctatatttaatactttatgcatgtgatgtgataggatgaaaaaacttgccagggatataaacaggcctaaacatcgaaaaaaccaatatctatcaacgctaaaaaaaacttcctgtagaagttaaatattgacaaaatttagcatcaaaaccgtagagacaaaacgacagaagttatagggttggtttggtttggggcctaaatatgccttaccaaattttgtcaatgccaaattttggcaagactaattttggtaaggcaaagggctg

SEQ ID NO: 48312 - DNA, 637 bp, Oryza sativa
aatagttactccctccgttttaaaaaaggacaaactctgatttccgtgcgccaacgtgtacaccgttcgggttatttaaaaaaattatgtgagaatactaaaccgaccggtctcgaataacatattaatcatattttagtacctaacagcaatgaaaattcgaattatgaaaaaattttatctacgacggtcaggttaaattgtacacgggagctgagggtttgttttttttctttaagagggggggtccctcatagagaaatatccagtgtgaaaccacatctatcaagtctaaatcttgaaaagcggacctccgaaacctctaggttgataaaagatacacggcgatagtttatataggcatgaattgcattaccacttaatgtctaatacgaaactaaacttcttttttcttacgaaaaataattttcaaggtaatggtgctaatatttccccttccaaagtataacaccctgttaacttaggagcaattttacagacaccgcgtagcattaaaagaccgcaatttttagcgcaacttagtttttttttctaatcacgttgaagataccaggagatacctttttgttagataataaggcaccttcaatgcctactatgaggaccgtaagatcgc

SEQ ID NO: 48313 - DNA, 706 bp, Oryza sativa
  unsure (1)..(706): unsure at all n locations
ccgagaactgaaaccngtgatatcanccangcnanagnnancaaacgnaactgggtaatgtcacatctctccaaaatacattatattatgagtcggagggattacaaatgctttatatttccatatcagcactaacaacccaatgcttggatcgctacaggagtcaacttccaacccacccacttgagttcaactccccaccattcccccttttgttggtgatttttgcctaaatatctagttatttcgagcattcgagttaaatgggccttcttccggcttatttaaacaattcagatgtctaggccagtccgaccaagaccaatttatcacggttcagtaatcaatgccaactatgctcagtagtaatcaatgccaactcgtctctctcctatctctgtcgtcaataacaagagtattaatttactggaaaagctacaaatctatcaacagttttttctctaaatatatttcgatttctagtccattgatcttgtgttaagatccgtgctagttgtatggagaaatagaaacacagcaaccacaagtgtggggattcgatcccaagaccatgatcacacacatcacttcttaacaaagtgagcaatcagacagtttatagaattaaaactagagtgaattcactttggactaggtttaagtacatatgttacaaagtataccaggcataagtaagccttcctag

SEQ ID NO: 48314 - DNA, 694 bp, Oryza sativa
  unsure (1)..(694): unsure at all n locations
acgagttgacgcaacggacgacgacgttcgatcgcacaagcttttggttttgcttgaccggccccgcccggccgcacctattcgtacgctggtttggccgctgaaaacttccaaaagaaccaagctaaaggctaaagccgcttgcacgcacgtgtagacagtagaccacctttattagggtatgtacgatggttatcaacagtggtttaattctttgcattgctaattaggaatacctgttgtctgttgacatggaagaaagagaaagaggaagagccaaacatcgttgttatacataacaacggctcttaatcgagatttctaatgggtgaacgatcgttctaggcgattggtttttttttctttttctctcaaagtaagtttatacgcctaaagtttacacatctaaaatttatccacctaaagtttgtaaagcgaatgtttataagtcaaaagtttatatacccgattcaaattcaaatttgaattcaaatattttatattttcctcttttagtaagtttatacacctaaagtttacacatctaaagtttatccacctaaagtttgtagagcgaatgtttataagtcaaaagtttatatacccaattcaaattcaaattcggattcaaatattttatataaaaatgatgaactnctgtnccatcgagaaggtgcatgtccatggggccatg

SEQ ID NO: 48315 - DNA, 684 bp, Oryza sativa
  unsure (1)..(684): unsure at all n locations
cggcccatgaatgacagatccacagnaccncancaatactactgagtcgagtttgaggtattccctttatgtttgtaccttaaaatggaaaaggggcgtggtgccttttttcgggagctgtaacaccacttggtgcacaaaccaaaccaaccttgtatacccattttaatatccctatcataagggtaatcatgtgaattcccctataactaaaccctagagggtatgagcctatactaggactataaatagccccctaggccatgtaatggggtgatcctaaaatatttttaccaatcaatatattgttttactattgcaacaattcatcgagtttaccatatccttcgacgtgaaacagaagtcattcgacaatagtatccttgaaccacaacaccaaatatcttgacccttcaactattaaaaccgatgcaaaccgactacctttgtttctagagggcagtgtccatgacgatgcctctacatggcaccattgactttgtctataacgtggactggtctgttaaatggtgtcagagtttagatcatatctgtgggatccatgtatcgtccacacacaaaggacaaactagtataaccctacagttcggacttacatgtgcttctagcaaaaccccttgcctctctagcgaaaatatgcaagagtctctcccatttttattt

SEQ ID NO: 48316 - DNA, 691 bp, Oryza sativa
  unsure (1)..(691): unsure at all n locations
cacgtccnatgacatgccactcgcacaggagcncatcaaaggtggggtccataaggtaaaaaaaatcggcactcctcaattccttcacgcgagttctggatcgatccccaatttctttcgttgtttccaccgacgctgccaacccctccgtccccacctatccatgcggcaatccactcccctcacccaaaaattgatgtcgcaaacccctccgcccctctactaacaccggattcctctcccgccacccaatgccgcaatcccctctatatctgccacccgatgccgcattcgctccacccccaccatcgacgctgcaaacccttccttctctgcaactaggcgatgctatcccttcatccgacgccattatctccgttacccgactataggtaaactgtggggattggggaaattatgattgggagaaagtttggggagccttggtttaacaagttcatgaaacttctcttggagggatccatcccagctagcaaagattcacagaaatgtgtttgtgttgaaaagaaatcttgagccatccctgttttttttttgttaaggatgaagatggcaagaagcacataccatgcaacggttggctgggggaggagcaacgacaacttgcagttttaaatttgttgtcaaaaacactgtgcacatgccatttntttttccttcgctactggag

SEQ ID NO: 48317 - DNA, 2497 bp, Oryza sativa
ccccccccccccccgagggggtcaggcctcgtgggcgattgctcctgcccaagcctctagtcatgatactcccggtcccatgtcaccgacaagtggagccaggatcaagttagttatgatgcatagaaatattttttacataaaaattatgatgcacataattttttacatgtttttttcccattatttttgttgtttaacgtcatttttgtaaaagttactatcagctacgtacccatcgccactcttgacgtacataatatagtctttaaacccgttttaaaaatttaattctaactatgaaccgacatatatacttatcaagtacataactagaattaagctcttttttagacggaggatgtataatgcaactcgggcgcttgcgatcacccgaggtatcttttgagttaggggcttagggccaggaagaggccaaaacaaagcagaatccatacagttcgttaattagccttcagcaattaaaggcgctaggtatacattgaaggctgccaaggaccaaaagttaataccacaattagagcaaagaacccccaaaattagctggtgctttataattaagtttgttggagctaagctcttaactaaatgctttcattagcagatcgatctattgtaggcagatatatttactttccatttcaaaatataataagtttattatatatctaaacaatatgcatggatatatatctagatacttaaatacataactaaaagttaaatttagaacgacggtagtaataataaggcctataacaacccaaacactccctaacgtccccttaaaatacataaaataattttgatgagtactacatccgttctaaattaatgaccgcttttttttcttgtaacgtcattttatttaaaaagttaatgtaaatataaaaaaataagttatacttaaagtatttttttaataataaagtaagtcaatcaaaataataataatttcataattttttaaataagacgaatgattaaacattacaaacaaaaactcgacaagtattttaggacagaggaaacaaaaactcgacaagtattttaggacagagatagtaccatcaataatggtcaaagtataagctagaaagggtgcgtgtgcattattttcaaccagaaattcctatgcaattaattagctgccagtacgcccgtacattatccactgattgctcgtctgtgcgctataataaattttctggtagaaccgtatattctcccatcgtttaccctgcacgtcataagacgctactaaaatttaaaattcaaaagttgattttaagttttttatcatagttatttttcacattaatttttaaatcactaaaagtacatataaaatactatattttttctgataagccgtacagcctaaaatcagaattatctaaccgataaaccttcatcatctgcctttttttaaataaaaatagatctaacattgtagttaattttaacaaataaaagcatggtctggttaaattggtatgaagtgcatatactcctttcatcccaaattataatgtagtatctagatgggatatattctaatattacgaatctaaacaagaaccaaattataagaatctagtactggatgggtagaaagcctgtcttaggacgtgtcccatctagtaatattcttatattttggaacagagagagtattaaattggtgattgaaatttttgaaaaatttctcatcccttacatcacaattcaatggttcgcatcactcttacatgacttattaagaacaagagaaatttgtataaactacctcataagtcatctgaagtttatattttaccatgtaagttgtttgtttgtaaatatccaccccctacttagggcccttttgaatcgtaggattgagaaaacgtagaaataggaaaaatgtaggattttgataggaatgtaagtgtaaaacagatgattgcaaaacacaggaaaaacacatgaatggccgtttgattgaaccgcaggaaaaacgcatgaattggatgagagagatacactcaaaggaaagttaccaagagattgaagctcttactaaatttcctccaaaatctctataggattgttcattctataggaattttaaaggaatggattggattcaatcctttatttcaaagggcttcataggaaattatcctataggtttgaaatcctctaaaattcctatgtttttcctccaattcaaatgggcctttagttttgtttgaagaaccaccgtaatacgcatgtgcttaaccggatcgatatgtttttataaattgtgagctgttaatgtggtatttgccaaaattaaatagagtgaaagtgcaccagctgtccctaaacttgtgtgggtgtgtcatttaggtccccaaactctcaaaatgtatttttaggtccccgaacctcgtctagttgtcttgatgtcatataggtccatccgatgacgtggcatgccacggtggcg

SEQ ID NO: 48318 - DNA, 5071 bp, Oryza sativa
tattttctcctctctacctccgcgtcgagctccgccgcctccgctcaccgctcacgctgcggtcctccgctcgccgcgggcgaagcacctgcgccagtcacgtagaggtagtgaggagaaaatatggtttttaattttatttttatacatatgactgaaatgtggggtccccaccgacacgtaggtgccaccgtggcatgtcatgtcatcggatggatctatatgacacccaagacaagtttaggaacccaaaaatacattttgagagttcagggacctagatgacacatccggacaaatttagggaccgctggtacacttcactcaattaaatacttctagtagtgtagtatcaacactttttttttaggttccacaaattgaattatgggtgagagcttaaacgttgtcacaatgagttacgcttatgcacaagtattcaatgaaatataaatgataagtttaatgcaaacacttgatcaagattgactcgtctagcttagcttgtggtgtctctacattagtgaaaacggactgactcggttaagcacgtgcgcactatggtgcaaaacaaaattgagtaggggtgagcatttgtaacaaagtgacttatgagatataatttcaaattttaagtgatttatggggtggtttttacaattcttcctaaaaaaatccccttttttaaaaaagaagtttgaataataaattactccaacctaagcttgaaatacatataaaattcataaaagatatacaaaattacataaataagtattcaaacttagataaaataaaataaaaccatattcaatgaaaaaattatagttaaaatgaactgaaattgcatattgcatagcaccacagttttctaaacttagcaacgtgtaattctaattttgaagcacctgaaatatttttttaaaaaaaaagacaattatagaaacattttggtttcgttttaatgaaatgtaggtgctaattaatgtttcacataaagctagcacatcaacacggttatcctgttgatctataaagctagcacagcaattgtaaggctgtgattaattgggtttagcaatgcgcagttggctggtggtcaccatattttagctgcaagcaacaattaattaagggcacgtttaggacatggaaaaaaatcctataaaaactgaacctttttccttagaaaaatgtataaaattccaatgatacaagtgtacccttacatttggcatggccaaacctgagatttccttcccaagactgatttacgtagcttcttattcttactctcaatcttgttcttactctcgatcacttaagtcggtcttacgcaaatacataggccccttcccttttgccgagttgtttagaaggcgctttctattctacggtcctttggagcgaagggttagggaggtagtacgagccttctgacttccagctatgtgctgtgtgcgattcccgcgaagcgaatgaagggaagctcttcgagctttctccgcctgcggcttatggtgccgctgttttgagcatagcgaaagtagcagaatcctttttttaagaaaagaaaaaaacagggcgaaatcatcttaagaagaccattattgttttactattaattgggctattgcaacctaattcagtacatgtagctgaattttctacagggaatctggtagatccaatctaccactcatgtggtgaattaattaagaaaagagccaaaatatatgtagtgccatcacaatcatcattcatcaactctgtccacgtacgatctaaattttagtccagttgctttgctgtctcatgttaaatgcagtactaccaaaaatccaaatgatgatgaagtatgccggccctaattaattatcacacgatggaaaacagataccaaccatcaaacatacatgcacatttaaacagtttttttaaaaaaaatgtgagaaagaaatttatttaatgtggctcctaattggatgcaggataataattttcttttattagataatggatgaaatccggcctttactttaatagtttagaagctacatctaattattacataattgttggcttaaagcaaaaaagcagctaccgtaagatgaaatggaagacaaataactactctgtcgtggagcctaaaagctacttcctccgattccataactcttaatgttttgaacaatgacacgttatccaaaatatatctttgactatatttttttattataatatatataataaataaatatatttttactttattatgttggtttgtaagataaatcaatatatgttgttttagtgcctttaaacaaaatatttttaaagtcatcagtagtcgaagttataaagatttgacctcaaacttatcaaacacgtcaagaattatgaaaccgaagagaagagttcactgctagagaatgcatctatactcctggttcgcaaccccctttaatcccgggtatgcagccggtatagctgattgcttgagcgagactgaacggtctctcgcttttccattctgcgagaccgcgcggtctcgcactttcaccgcgcgatatcgcctgcgacgtcattttcacgttatttttgcgcaacggttgtgcgataccgacggtatatttctataaaaaatttgcatcccgaatattcctgagaaaaaaatagaatgaacaatatattttcaaattttattcgagggccatcatccgctcgtcccctttctacctgtgagtgctacaattatggacataaattttctacagtaactgttctctctattaaaaaaaatgtgcaatagcttatgaaacgaccttgagctcaaatattatgccttgatcatcaatttatacaatgttgtttgtcacacccttgctctatgaaggatctctaaggcctagttcttttcttcaaatccaaacttcaacttactctttctcgtttgcatgcttttcaaactgttaaataatacgttattttttaaaaaaaatctatatagaagttgtataaaaaagttcaaataaatttatttttcaagtttataattattaatacataattaatcatgtgctaataagatttcttgttttacatatgttaaaaatttctctcttttgaagttgatcgagcgcagcctaaggaggagaaggtagcccaccaatgaaaacgggttgtgtggggatagctttcgtttgagggggaacagatccgtttccctgacatgtaaaatgaagttgtggataagtgcatgattaattaaatattatctataaaaaactaaaaaaataaattaatatgaatttttaaagcaactttttatagattttttttaaaaaatatattgtaacagattgaaaggtgtgctcacggaacacaagagtatgagattggaaaattgactatccaactcagcctaaagaaaatctagaatattttgatgaccatgttctcctatttatgagaatgcttggtatcatcctttgttatatgcaaatcaaatatcccatcttaaatctgaaaacaaactcaaattatcccttggataattttgggaatggtttcaccactattacaattgttgtggttggctccaatagtctcaagtgaaacggcgataacatgaatagacacactttatgaatgcagatagcaatggacactaatatgcatgctattgcttgagtcacctccatttttttttcttggggagtcatctgcatatcagacgctacgctgacaaactacatatataaccactctagaggtttatttgaattggctttctattatagaaacaaaacagtcaattggttgaagagttaaatagtataaccccattgcaaatcaatgtttacatataaatatataactcccagtgaatttgtttaccgtttatttatactatatccgtcctacagtatagtatatagatgattctggcttgttttgaaaaaaagttatgaaggaaggagaaagactataacattctcattaaatgagagacatgaggataatactgggaagatggttagaagtaatattgggagatttaaatgagagttgattgattgaataattaataatctctcatataatgtgacagagtagtataaaggatggtggtttgctagtagaaagtctatatcaagcatggtgctagtatgacttctgaagagcacgtactccatccatctcaaaataaatcaacttctatcttctttctagtgagttcccaactcacctccctcgtgttacacgtgtacgttttttaaactgctaaatggtgcgtttttttacaaaaaaattatatacgaaagttgttttaaaaatcatattaatccattttttattaaaaattaataaatacttaattaatcataagaaaatgtgacgcttcgttttgcatgcgcgggagggtcagttcccaaactcaccgaacacagcctaaaggttttgtggtctttcgttcctctctttaaattcttttttgatgctagtgtaagttatttttgacatagtgagtatgatatattgctatatacacaagtgtatataagcgttgatgtgcacgggtgtaaacagccaaaatttttccgaacgtattttcacaaaactaatatagaaataataacataattatgtattgttactatttctaaagtttgattttcttaatttctgtcagcctcgtataaaatctgacatcgcattaaaattgacactaaatagtgaaaattataaatatggaaatttcccaactgttcattaaaaaaatgatgatatctatgttttatattataagtcgtttgatttttttcttattcaaagttaccgagtttataaaaaaattagcagcatctacaacacaaaattagtttcattacatttaacattgaataaattttgataatacatttgttttgtattaaaaacattagtaggtatcttatataaacttagttaaacttaaaaaaaatttaaaaaataaacgatttataatataaaacggagggattaccatattttactccaacgtgacaagcatgcacaagcttgagta

SEQ ID NO: 48319 - DNA, 672 bp, Oryza sativa
actgaccaagaagggttggtaacaacagcttaattaacctgaccaggagatagaggctaaaagagaaaaaaccaaaaaccaaagagctaagctaaatctaatgcactgagtggagacaagtgggtctccaacgggtgggtcttccagggagtcacagagtcacagagagtttgagctcaggggctactcctgagcagggcttaaattccagctgtttgctgtgtgaccataggcaagtcgcccaccctctctgagcctcattctgctcatcggagatcctgctgttcaccctgtgataatacagtgtaaagctagcagcctgcaacctggaaaagggcccactccagaatctgaccatgctgccaccttaatgtgggacttgcagcctctagaactgggagaaataaatctttgttcttttagacacccagtctgcggcatgtgtgatagcagcccaggcggactaagacagtgctcttatttggataggggtctttgcagatgtaattaagttaaggatctcaggatgagatcaacctggattaggacgggcccaaaccaaatgacaagcgtccttagaagagaagagaaggggaggagacacatccaggcggaaggctatgtgaggacggatgcagaggttggagtgatgaatctacaagccaaggaatg

SEQ ID NO: 48320 - DNA, 1203 bp, Oryza sativa
tctccccctcacctccccacatcaaatccactccatttgaactcatttttcgcaggattttttgtggaaattgaagagaaaggtagactcctccattcccccctcttttttttcgtttttattggttgaatttgtagatcgaagggtaaccctagaaccccttttatgcccaaatttgtgatttttagcatttgttcttgggatttacttgttgtagtgctacatgtttgcaatgtacgcattggtgtcacgatttttttaaccatatatgtggtaatgttaatttttggattgtttggttggatggatggatgaaaaattagggttgaggcatgaaagtaattttaatttgatggacttgatgctatagcctataggttaaacttttaacaattaattatatgaaggggagaaaattttggttgcattatagaaattgattatagttaattagaactaggttgggttgtatgacggagtatttgtaatatttcgatgtataatgcactagtaaacttgttgatagttgtaggtggattaaatattttttttggagtagtagctttgggacaaattaagttatgcattggttataatatgtcggtttggactacgtttataaatgaatatttaatttttgttgcaaagttacatttgattttttggtgtagatggatagacttgttcgtgtttactacggtggtagagtggtggaaccttatgttggtgcacatgttgagttttaggatatgtcattgaagaccattttgtttcccacccacccaactgtagatgaactaaggtcacgagtgaaacaagttcttggatggaccgaggataatgtgtagattcgtttttatgggagatacgatgttggtcaagggcataagtatatattaaatgtcataggtcagttggaatgggaagtttactttgatttggtaaaagagtctcagtttagatctctataggtgtttgcatcaaagttggtacgtaccgtaaaaaatttgaatctaaccaaatctccttcttatcattacgttgagaagaattttgtgacatattcttctcatcgtgaagggggtgcaagtaagactgagttggtacgagaagtacttggagggggaagaagataagaagacccctttgcttggaaatgatttaggggaggcaggatcatcaaagagacattccggtagtgat

SEQ ID NO: 48321 - DNA, 1201 bp, Oryza sativa
atttgaaagtttttgtctcaggggtattttggtcatttggatgaaagtgtacagtactaacggagactaaccggatggcggtggtaaatcgtagaagttaagcaaaaatcgatggcatattatagaacgtgataaagtcagtggcaaattgtagacctatgacaaactcagtggcatacaatggattatctctaatgtaaatgaagaagaagcgattacagcgcctatcttaggcgtgctactccactagctagctaatgaataaaaatgtagaggcagtattctctctctggtttggttttagttgatatacatatactcatccattgtagtacctctctctgtttgggcacggtttggccattgatttttcacataataaacagggtacaaagacaataaggtggcaaaatactttatagtacgaatgtagcagcatatttttttatacactaaacaaagttgtaacttaactaattgttgatgaaattctatgtggtttgatttattttgtttttaaaaagcatgcatgccatacataagagtactgcctccatgcatagatatttatatgcaacattttatttggaaaaagtcttcaacatcacactttaaccattggtttttgatagaaaatattagtcctatttataaaaaatcctttgaaatatgaatctatttcactaaaagtatttgtagtttgactaatcgttgacaagatccataaagtttgaccttttctctaaacgaaatgtatcttaaaaaagtttacagcgggagcacctgaaatttttacattttggtcctttttgaaaacttattttacaaataaacccctgggaaaacttaaaccggaaatggtcctttttggggcgccagagtggctggcgccgtaccccaacatggtggtgccacccacactggcgccgtgcccgtgccaccgtggcactagggctgtcgtggaggtgctgactggtcagaatatgggcgccagccacactggcgccaccccacataccacggcgccaacatggctggtgcgccccttctctgtggaccgaccccttaaaccctgtgggtcccaccacctttctcctcaccagtcccattttcgcccaagaaaaagcccgagctgagcagcagcagctctccaccctctctctccccctcacctccccacatcaaatccactccatttgaa

SEQ ID NO: 48322 - DNA, 606 bp, Oryza sativa
ggccgcttaattaagacggatccccgactacgtagtcgggattcgcggccgcgtcgacgtcgacgcggcggtttctcagtagcttgaggaatagcctatgtgtgtgaaaggaacaaggtcaaaagtcaacacaaagccttcaatgctttaggaaagatgaataaagttagctcaataagatcagaatagatatgaaactaaagtttgttttccagtctttcacaaggcctatgggattctcttctggatacctggagttctggagtatgaatttgtaatttcaggaaataagggaaaaaattgttctgaaatgtataggttggaacattgtttcctgttcccaagctgagtaaatggtcctgtaaaaactctaacttaatgcaatcctgttggtatacccagggttaagagagacaagtgactccgaacgttttcagtacaaaagcaaacaacagatggtgggcagggactatccaaatctgttgggcatacaaaaaaaatctcacaataaggaaattctcttctccctctgccttgttgttacctcaactctaccaacttccagaaagtattcattcgtcgacgcggccgcgaattcttggcctc

SEQ ID NO: 48323 - DNA, 560 bp, Oryza sativa
ccccaaataatgatatcctgtaatctagacaccacgtctaaactaccagatactactctaatatcatcgtcatgacatagagtaattgcatacacaaacattatacctgcaccaaagcatctcccagataagctagcagtatattcagtataacatgaacataatataaagtaggcattcatatactcggaaagtatttcaataccataaatgtataaagaagagtattctaataaaagtacaaagcttacaaaagaggaaaggaaagctactagagtcatacccgaactcttccgaaggcttccggactcctgatttctactctattcttattccactagctagatactactaaactaaacttgagagaatatgagagagctattgcttgaggtgtgtgagtgaagtgagaagagcaactccttttatagcctcccaatgacgattgtgatggttggaatggtcagaaataccctccaaccgtcattgggggataatccacaccgtccaggcgaagccctggatcagatggcgctgatgagggttcggcctaaccccct

SEQ ID NO: 48324 - DNA, 509 bp, Oryza sativa
catttcccattgtgaaggtcagaccatgttacatgaaatcttccattcacatgcaccatcatgtgttcaatgttggtcgtgattgttatcatattgaaactagatttgttgatttattttttgggggtaatgctgactagctgagacaatatgggaaaattatcacctcatgtcatgtttcaatttttaatatgatagccatagttatgagtacaagcatcttctcctttttcatatggttctgtttatattacagtccacatcagcaagcattttctttccatatgtgatttgtctttagccttaagcaaaaaatatgcactggttcagtggtttatccaccttttacgcttttgtgctagcattgaaataatgtctatctttaattaattttcaggaatgggagaaaccaaagcctgggaggaggcctgatatcttcccaaaattcagccctatgaaaacaccattgccccattcattgccagctgatgatcctctggatgatgatg

SEQ ID NO: 48325 - DNA, 739 bp, Oryza sativa
catgcaataaatcacaaattctaaaaaaaaaaattcacaaagacgccggccggccgctgccgcctcctttccacgcgggccggccaccgttgcgccgccgcgccgacccgctctcgctctcgctcgatctggatagagataaggcagcgctctcgctcgatctatcaaaaagaaagagataaggcaggaaagaggaagagagttagagaggaaaaaaagagatagagagagtttgttgtgtggacgatataagaggataagtaatagggattatatagtacgtgttagatttttattcctggttggtaacaccaaccgggaataaagattatctagtcctgttgttcttataaattgggactaaaaatcgtttttactcccgatttttaatggaaccgggactactgtggatttgggtcgaccgagcaaagatggtttctccaccagtgtatgttagtactaccttcttttttttttggcatatatgctccaatgtaatctgccggttcatcaaattgcatttgcctctgactgtccaactttatccttgttcttgttgtctcgtctaggtgcgccctgcgacaatgttcgtgattgtacgtgtgccattcgtcgttgagccatagcgcaatgtatcgcaactcgcaagttgcaacgtatttggcccgcgtaggagtgcttgaacccatgcttcccaaagtcattacacatttttctctatgagagagagaaaaaggat

SEQ ID NO: 48326 - DNA, 1736 bp, Oryza sativa
ccaaataactttctgtacatatcaaatatccaaagggataaaaataaaactacttactacggttatcaatgcagaacatcgtacatgtggaagaagcagagttggtggaggagaacagagaacctgattgaagcattccccagtaataagcgaaggccaaggatgaattcaccatgacgttatgggagcagtaaattgatgtatttgatgacaaccatgaagtctgatctcgaagcagcggtttcgtttctcatgacattccaaagaggaggcgaaaaggctgggaggcggcaggtgggcttgaaccaaaggcagagggagcgccatatagatggagggacacgacgcacgtgggagaggaagtgacgggcaccgccacctcaggtggtgcggtgtatggaactggagggttttcctgaattttttttatttatacttttttttattaaaatatttacaaaaataattttttgtttcgaaaatttacaaatctaattgcctgccgccctcaagaagggcgatttttaaaaatcgccctctcaaagagcggcaagggacctaaatacaaaatttttatttgtgttcaaacccttcccaccggttttaattacttaaaaactaataatgcttattcgatactccaaatgattttaaatggaaaagtgataaactacaaagttatagatctcatcaagatatacaacttttatataaagtttatctccatccaatatcgtttgaaatatagatctgagattttttaaaatgtgttttatattttgtaacgaatatttggatatctaaaacatcttaaatgaaaaagttactaactacaaagttgtagatctccttgagctctacaattttgatataaagttttatttcatctgactttatataatataattttaaattgtaaaattatagagctaacaagttatgctggaaaatttacatttaggtcccttgccgccctgtggaagggcgatttttaaaaatcgcccttcttgagggcggcaggcgattagatttgtaaattttcgaaacaaaaaattatttttgtaaatattttaataaaaaaaagtataaataaaaaaaattcgggttttcctctggttagggatggatacccgttgagttgggccataacatgggcttcttttggcccaataaacaaccggggaactctgggaggctgcttcatggattccctgccgaatgattcagatcgtacggttaatagcaaatggggtgacgtggaagcaccaggaagtagagaattcctagtagtggggatgatttgtatagatatataggatatgttgacagaaaatcccacctcccatctttcaaattttggaccgtcggatatgcttttagattcgtgcagaggtattaaccctaactctccttccgttcccctcccctcgctcattccgtcgccgccactccctcccatcgcgcattccaccgtcaccgccccaccgtgcattccaccgccaccgccccaccgcgtcactacccgcctcaccggctagccgtagggcataaacgcgccagcgagccccccccccccccggccggccccttccccttcctctcctcttctttcctcaagcggatggtggcgtgctgtcccctcgccgtcgtcttccccgtctccggcggcagggcgccaccacctgccgcctcctcctaacacacccttccgctttgcccccgccgcctacaccgac

SEQ ID NO: 48327 - DNA, 1362 bp, Oryza sativa
cttttggcaccaaactttggctatgccctccaaagtatccaacaggtaaaacaagtttgaaggtcacatttcagcagtgttactgagcaaaacatggcatcagtaattcagaatcgtcgcagtactaatgtgctcccaagtgcaaatgcacctataattttaccatttgaatcattgcaataagataacatctataatcctcaggaagcttacatccagcaagaccctttttgtgatgttatcatgttttttttcttgaatggaatcagcacgagattatgctatttcattaaatatagcgagagaaatgtacaacccccctaggagaagaaaggaaaaggctatacaaaactatacgtgtgaaggatgaaactctctaagctttttagctccggccagaacccaagttcatgcttcttcctttattttggccaacagcctaggatgtgttattttccatggtttcccaacccatctcctttgtttttcgcgtgtacgtttttcaaattgctaaacgatacatattttacaaaatgtttatatgggaaagttgctttaaaaaaaatcatattagtccattttcaagtttttatagctaatacttaattaattttgttttaatctatcgctccattttccgtgcggagaggaggggtttccaaccccttcaaaagaacacaaccttaaacttatgttcgaaaacacgctgatttctctccttccttgatgttatcatgttaaatatgttcaaatgacaacacctagagaagtagatctatcgatattggtatatccatctattcgtctcctagtgacaaaattctggcataaaatcgtacccgttcttttcatctctaccctattaaaattctatagaataaaaacttgcaaaaactttgaccacaccaaaaattccagtggtgtgtttggttgggttgatgagcctgtataggagatggtcgtccgagtttttgtagtgtttggttggagggcatggtggatggagcggtccagaatagggaatattccctcaatatgctggatgagtgcatccggccgatttggctggatgaagccatccagttttggactaggtgatgtgtcctattccgattggttgtggttggtttgatttcctgttaagcaagctccaaatgattttgtctcctaaatcgtttatctaatttataatttgattacaccattatatttgttatagttaaatctttaaaacaagatctcggatgattatattttgataaaaaatatatatgacaaacgggtcccactaacttttgactttttccatccatgatatatctctccaaccaaacaagaaattggattgttatatccatataa

SEQ ID NO: 48328 - DNA, 1001 bp, Oryza sativa
ataactttgtcggatgaaaaaataaccaaaataaaagttatagatcttgatgatttatacaactttgttattgatgaattttttagttgaaatcaattattatttgaaaatgctgtttgaagttgttataatttgaaattcaaattcaaactgttcaaacaaagtcatatagaaaaatgaccaaaacaaaagttatagatcttgataagttatacaactttgttgttcacaacttttccatttcaaatcatttattgcttcaaactattatttgaatttcttatattttaaaattcaaattttatatagctcaatcaaacttggatggagaaatgatcaaaagaaaattggtagacctcaatgatctctacaactttgtttttgacaacttttcacatgagttcatttattaccacaaaattagatttaatgttcatttttatctaaaaagtctgatttgcctcctctccctctctaccacttcaaaatttcagcaaccttatctccaaccttatcttctctccaccattatttctcctcaaccccccctctctctctctctcacacacacacacagcaaggtcgcggcgggcgtcggcgacaccgaggaggcacgcggtggcggtggccgagggcggcgcggcgtgaggcgggcggtgggggcgaacgaatctggcaccgtgcggcggcaggctagggtttgggatattttagatttttattttttttgtttgctgaatttattttcacatgcggccggtataagcaaccgcatgcgaaaataggattttcgcatgcggttgggccggccgcatgcgaaaagggtgatttttgcagacccttctcccccatgcggttgccccaaccgcatacaaagatgccttttgcccgtatgcaaaaagcctttctgtactagtgtatttagaaccagatggagctagcacaaggtagtaagggtgtgtttagttcacgctaaaattaaaagtttgattgaaattaga

SEQ ID NO: 48329 - DNA, 837 bp, Oryza sativa
cgggagagggggcaaacggaagaggagaacaaggggaagctttatatggcattggatcgaagagatcgaactccaaacgagaggaatcgattcgggaagaaatcaaactcggttttagggataaaatcaaaacgaattcgattcggagagaatactcaacgattcgttttgattcttgggggaaaagaaagaggagaacgagaggaacaaaacccctaaatcaatcggactcgaggagaccggattggagcggatttggagggggaaaacggcggctcgggcggcttgcgcgacggcggccggaggttgaagacggccctgacatgtgggccccacatgtcagcggctggaggaggagggggcgggcggctcggcttgggccggcatgggccggttcggccgcgcggagagagagagagtattgggccgaattcggcccaatgaccaaagaaggggttttttgaacttttttaaataaaacaatttgtgaaatgttgtttcaattattaaaaatacttcccttgctcaaataattcccagaaaattctagaaaatagaggagcaagcatagtatttaataaaattttatctagctcatttttatgatgaaaattttcctagaaaattagggtttagcttgtaggcttttaaaatagtttctaaaaatgatttaaaatatgcatttttaatttagtcgatttttagggcgtgacaaacctaccccccttaaacagaatctcgtcctcgagattcagaagaactggcgaacagatgaggatgagctgacttcaattcatcttctctttcccaagtagcttcttcttctgaatgattgat

SEQ ID NO: 48330 - DNA, 679 bp, Oryza sativa
ttttaaaatagaacatgattatcattggtttttttctttttagaagtttcagacctttaaaaattggacttgtagttcaattttttataattttaaaaagtctcgtcaaacaatgccattatgctcctctacggcccgtccgccgcctattctttattgtcattgtgattctaaaaatctaacataactatcattggaattcatttttcattttgtggaagtcccgtcaactgtcagcggctctgcaactatactcctatacaccccgcccgctgcttctcctttttattgtcattgagattttaaaaatcaaatatgattatcaatggggtttacattctagaagtcccagcaaccgccttactcgtttgcttcacggcctgcctaacgtccctccttttaatcgtcattaggattctatttggtgttttattaacaatttttatatgtcgtatcaaccgccaccactctactcttttataggcctattacttaatttatctcgtcatgtgttttagatggtcttttctttcaatattctctatttttatcacaagttttagttatttataaattgtattcataattgaaatcttatttttctttttctaatttcagaatttttttaaaaaattttagttaatacgtttttctaatgtttttattttttattttcaat

SEQ ID NO: 48331 - DNA, 520 bp, Oryza sativa
tatataacttatcagccttatcagcctaatccatagttctttttaattttcaaagttggagtataacacaatcgcatgtctatggctaaaattattcaaattaagaaggaaacatggaaaggcaaggtcagagaaattagactaggggatgtggtaatccgaacaacaacctatggtcctatcactagtacagaatatgtcataggtgccggtttgcaagtgtctataggtgctggattttcacccggcaccaattagttggcaccagtagcaaaacccggcacctatacaaaaatagaaccagcacctataagttcacacgagccaaaaaaaaaaaaaggggaagagccggctcgaatcgagccgagctcaccaactgcgttctcacgccctgccccacatggccacatcgattgctcccgacaaattcatccacaaattcacaaaaaaatcattcacaaccatacaaccatactccacaaattcacaaaaattcatccacaaccatacaaccatactc

SEQ ID NO: 48332 - DNA, 506 bp, Oryza sativa
tttttccttctttcttaatgtacactatttgagttttttatttgcaagctattttcctcttgttaggtcagtatttgatgcattggctcacgagctaaatgatcaagctcgagctttgcaacgagtcgagccgagctgggtatttagctcgtgataataactacttaacgagtcgagctaagccaactcgttaattatcttaacgatttagatcgagttgagctgactcgctatccaccctacgcgcggcacagccatgtggcgcgcgaggagaccctggcggcgggagggcgcgtggtaaggtgacatgtggcggttttttctcgcttttcttttttttctaggtttttcttttttcctttttttgttttctaatatttatatatatagcacatatacaaactttgtataagtagcgttcttttggttttttaatacgtacgtatccaaattttatatacgcacataataatgcatatattttttttacacattgaaattttacc

SEQ ID NO: 48333 - DNA, 522 bp, Oryza sativa
gaaaaaaaacatttcaagatataacttaattgggcagtaagcactcatacattccttactgatttgccatgtaacctagctagggtaatcactggtttgtctcataatttagctggggcaatcactcgttcgtttggcagagcccgagcactggcccatgatgtccaggccttggctcgggcactgcaatccccctatctctaacttgggaagcacgtgtatgttccactgaaaggaaaaagtacaccgaagggccctcaacttatcatcgagtcataaaattgtcccccaaccacaaaaccagatatctgacgtcttttaacaatcaaaaccgggcacaatagatccttcggtgaatttgactcgggttttgttctacgtgacgggtgagtcagcgtgagacccggatgtcagccttttattccttcctctctcctgccctttccacgagcgacaggcgtgcacgggaggaggctgggcaggcagctgggtggcgtcgccaggggggggggggggggggcc

SEQ ID NO: 48334 - DNA, 795 bp, Oryza sativa
tttgattaattaaaagacactaaatatctggttttatagttggggaacgacgttgttactcgataacaagttgagggaccttgcgtgcactttttccccactgaaggtaccggagaaaattcttgtattccaaggcctaacccgtgttagaatcacagcccttttaacaaccggaggatagcccattccgctgttttggtcacctcccgcacagatcatggtggattcaactttcacttcttcactaagtagccggctacgctactgtggcattgctcgcaggctgtgtagggttgttcagtttggtaccactttccaccttagcagtttttcgtattacgaaaacattgtaagctaacaaactaaatattttattgccattgataccttaccaaaatttggtatttctagaaactcatacaaacaatccaagaattggtttgacaacaaattaaacacatccaatgctaccaaaaatttgttaacgtcaaaatatgccaactttttgacgaagctaaattttagtaaggttgattttgacaccaaactaaacaagcccatatagcccgtggggccgcttcgcatgtgggcagctataccatctagctagtcgtgcactcatactgcttccagtcagttagcgtaagggtagcaggcgacgacatcctcgaattgccactactacaaaataggtatcacctctgttggttcatttaaaacctatacttattagctattaacatttaattctcaccttatcaagataaaaaaaataaaactgacatgtttgagcaa

SEQ ID NO: 48335 - DNA, 545 bp, Oryza sativa
aatattttgtaacgaataattggttttgtaaatgatttatttgatgaaattggattgtgaatatgcgtggatgttggtgtgagtgcgtataacttgttgacgtcaccaccacaccgaggcaactcaccagaactccagattcaaccgatggtgccacctccacagccaccatttgaaccgcggtgatgggagaaagaagaacccgtcaccaccgtccttgcgcccatgggaacttcggcgacattctcgggtgaaagaaacataaagcaggagccaagaagtcaaagagttgatgcggcaattaccactactagttgtttcattacatttctgccaaaccatcagtagttctacagtacactaaatgatttattgtgtttacaggttcttatattctcattcctcacaacaaatacatccaaaatagagaacaacactcaatatacaaaaacctacaaatgacacaacgaagacaatcaagatagatctactgatcatctagcgaatgttgtgcttaacacggccttattatcaaggctgtaaat

SEQ ID NO: 48336 - DNA, 676 bp, Oryza sativa
ttgaggatttggtgatatcttttgtgctgtgatctgtgttgattgatttggggttgatttgtggatggagtgaaatcattattcgatgttaaaaacaataaaaaaaggaaaaaagaaacctgccgcctggctacatctttagtcccagttggtaaggattcattttaactcccggttattttaaccggcatctttagtcccggattgggcatcctggtttgaaactcaggagtaaaaagagttacaaaccggaagagcctttccccggtagtggaagttctaaaattaaaagtatggtacagcttacaaattaacaagcaaccatggcaattaatttcatgcaatatactaaatttaaataattttccataacacttctttgctaaaataacatgtaggtttacgaaaattgctaaccacgcacaggaaaagttaagggcaaaactatcatgccactaggtttagaaaactatcattttactaggttgatatataaaactaaccgaaatgtcaaataaaggataaaagctgggaatgaggagcattagatcagggagaaccaattttacgtgagcaaatgagggaatcaatcactttcgagagcaaattgagagttttctttaaaaataattaagtagattattgaagtagtatggttccaactgatatataattg

SEQ ID NO: 48337 - DNA, 507 bp, Oryza sativa
ccatttgattagtaattaattacttgattaacaattaaataataatagttagtgattaattatccagattagtgattaattaattattaattaatcgctaatcaggataattaatcgctaattaaatcggctaggaatggtttcgctctttgcttgtgcgatagcgctgattgcttgagcgagaccgcgcggtctcgcactttcactgtatgataccggccacgatgtcattttcacgtcattctcgtgcaatggttgtgcgagaccgatggtatatttgtacaaaagattttgcatcctgaatatttctaacaaaaaaattgaatgaaaaatatatttttaaatttaataggaatttgtacctgtgatattttatttttcgtaaaatgttcccttacattattcccatgttttatataatttcaaattttgttacagcatcacaggttataaaattttcaaaatgcttgggaacttccaaattagtttctaatgacacacaaatcg

SEQ ID NO: 48338 - DNA, 537 bp, Oryza sativa
cccattcaacttgcaaaattcatctaattttgagctctacatgtttgtttagtttttatgtactgtttccttagtttttattagagtttttcctcgttttgcgtgccagcgtgtagtttccgtcgtttcggaggtccgcggtcgcgaggaaaagagttcggaagatcaaagtgaagaagcaaggcaagtcgcacattcccccttgagcatgttgatcctaatttataaatgttttaccgtttgcaaataaatatgcatgttttgctaattacatgggatcagggtttacctatctgctcgcttgtgccatgtttacttgatatctatcctttgtcaaccttgggtgataaatcgactagctcatgttacttatgtgacctagctagaactatatgcttagccatgcttaattaccactagctcagtcgatgggataattgcagtattagacattctagtatcttgttgagccgcgtgctcgagacatctggccatgttttatggtcgtaattatccaactaaaatgcgactgaatgg

SEQ ID NO: 48339 - DNA, 1631 bp, Oryza sativa
  unsure (1)..(1631): unsure at all n locations
ttgcgtgagntcnannnccgtagttagatangttanaantcaccannnnagnannnaaaaanacaccttntaatgcaagtaacataggctgattgtgaatagtttatccacatgaacatactatttttaccatnctccacatnattgttgttttcctatggaagagccaaaatatccccaccccgcataatcttagaacctgacatgtntacttctgcacacaacgtaaaaatattgcaaacattttaatctcagatgaaccgaactgtcattttaatctcaaaagaatcaaattacattttaacctttccaataatttgcaggcaatgagtgaagaatctttgcaaacatgtctttgagcttcccatttgatgtcattgctttcaatatcttgtcattgaatatcactttctgtgaaaagtgaagaatctttacaaacatgtctttgagctcccccatgtgatgtcattgcttccaatatgttgtcattgaaaatcacttcttgtgagattttgaaccctgcaggctgtggtaatgtggtttttccgaaaacaacagtttggacatatgatccttcctagcttgtctatcatatttgactttctcctatgttcctttctgcgattagattgtttgagtacaccaattctatatgcatggcctatcaccttccatacaacatcgatgagaatttcacgtgatgccccaacaagtgtaatgccttcatagaaccaaggttgtttaatctcaaaataatcaaattacatctagatctagtaatagtatggagcttagatcaccattacatggcaacaattaatcccagttttagtattcaagcaataaaccttttaatgcaagtcacatagcctgattgtgaatagtttatccacatgaacattctaagcttaccattctccacattattgtgcttttcctatggagaagccaaaatattaaatattgattaatcttagaacctgacatgtctacttctgcacacaacgtaaaaatattgcaaacattttaatctcagatgaaccgaactgtcattttaatctcaaaagatcaaattacattttaacctttccataatttgcaggcaatgagtgaagaatcttttgcaacatgtctttgagcttcccaattgatgtcaattgcttctaatatctggccatggaaaataactttttgggaaaagggaaaaattttaccaaccttgcttttggcttcccaagggaaggcaatgctttcaatatgtgtggaatggaaataactttttgtgagaattttaaccctgtcagctgtggttatgtggttttttccaaaacacaaagttggacctatgagaccttctagattggtatcatatttgacattctcccaaggtccttttgcgaatagaatggtgagtacacccatttatatgcatgggctattaacttcatacaacaattatgagaatattcgtgatgcgccacacatgtgattctttatataaaccagttggttaactccaaataatccaattcactttgaactcttaatagtgttgggcctttaacaccctttcatgggacacattaatcccgtttaggattctagccaataccctttaaaggacgggcaat

SEQ ID NO: 48340 - DNA, 501 bp, Oryza sativa
cttctcaagatacccgtgggaacatggtgaaaaagcttgagaggggatcaacagtagcttgcaccaagttctatcaagaaaacaataagtccaacaacaagattaagggacaaattcaaagttggatcaaaactcccattacttgcttcatgtctaagaaagtgggacactatgccttgatgtgtttcaacaagattgatgaccaagccacacttccaaagaggagaacaagaagagcaataggaagtgctatggatacaatgagaagggtcatgaagttgcatcatgcccccacatgaaagatgactctgtgtcatcaaagaagaagcttaatagcaaggtagcaagtaagatgcaatatgtggtgaagaagacaccatgtaaagacaagaatcgactttgctacaattaccgtgcaaagggacatattggtaaaaattgtcctctgagtaacatttctaaactaaactcctcatttgattatgatttgcttaggaaggc

SEQ ID NO: 48341 - DNA, 784 bp, Oryza sativa
ttaatataaaaaatagggaacttactttattcaattgttgtacaaaaaacaaagaaagaaaagaaccaatacatgtgttgggatgttcactacctagcacttgcttctgatatagcaatgaaagacatgcattgtggttacataacactgatggtcttatgagagtaggttccagctgctagtagttaaggggacacagttacatttaaaggaatatgggcacgtggaaagagagaatttgaaaattgaggcaggggattgctgaggcacccattctaggaacaattatgtgggtcaatcaagtcggtcagctaatgtaatataatccttctgacatcactttgttcgtcagtttcacaaaaactgcctggtttgactttcctcattctgaagtgaaggcaaccagatcaagcagataaagtcactttgtttttgatgaggacatcaacaccctcggtacatccacatctccacaagtccaacttcatagtcctattacccgtgctcgtgcacgtcaagtcaactatcaggtgagttcattcttgagtccatgttcatcatctttataccccagagacacgtgcactcttgttttactcaggaacaatggagaggatccagaggggagaggattcgcgcaggctggattcggactgcaggacagcaccaacttttgacgatcgccacgacttcatacgaactccgatttggcgtgcaagtacttcatcgaaaacttatcaagtctatttcaaatggatccggcctcatgtcaaagatggtctgg

SEQ ID NO: 48342 - DNA, 684 bp, Oryza sativa
ccctaaaatacccaaacaaatgaagggtctgatttagtttctactacactactacacccagtaataaaatgtactgtaaaaggcccccagaaaaaacaaccaagaggtctgcctgatgaaaagttctctttaacgaaaaatttcgtaactgtccacaaacaagtaggctaaatcactctttatctgcgtgtatctgtggtattcaattatcctttttcttaagaaatcactcgttgtttttacctgtctcttcctgcaggttaaggtagtaaacatgattgtttcgatagactcaagctaataattagaacaagacgaacaaaatactgctaaaattaatctggatggggtaacaattaaaatcatgcagtgataagtttagctagatgcatcctggagcttatcttattttttgtggcagaaaaatagatcaggaagtgaagggttatcagtgagcacagcacactagtggacaggatagcccaccagatgaatcaggtttggagataccctgacaaagaatgtctcgtgaacatgccgtatgcacgctcaatccagcaatagtgtgtgtattgcctatatatctttattcatctgctgttaatcattctctataaaaatattacctgccaactgtctgatagcaggttcataagcttaccgattatggatcagcgcgagtat

SEQ ID NO: 48343 - DNA, 698 bp, Oryza sativa
ttattttgagacggatatagtaactcctcaaatatttattaggttgatgtagtggaggtatgaatctagaaaccgtttggcaaaccaccaaaccagtcaagtactcaagttttgaaaaatctcaagtgaaaatcaaacttcatcgtcaaatttagtctgaaactctgaattcaaccgttttccttggtaactgagcagtaatcacggttcacggttatcgaaaataccgctcacaaagtgttcatgagagtgatcggtgaaaaaacagttatgtaaggatccaggtcctctacaattaaactactaatgtagggtatgatattcagcgatagaacggttctataagagcgagtacaataattgacgataggagcaccacgtaggatttttcactgatgtggagaagagatagttgaagagagagaatgagcggggactaattagtcgctcggctccacgtgcaacccgaggttgtgggcccgctcgccacaacgatggcgcccctgcgctagccacatgccttcgtcttccctcgtcgccacggtcgtcacctgcgtccagcgcccacctcgccccccgtcggccacgtctgcctcagctactgcggatgtcactgcttgcgtccgcctcggccatggccgtcacgtcgtagacatcacccttgtccggtgcagcaacttccctcgtccaccttggct

SEQ ID NO: 48344 - DNA, 743 bp, Oryza sativa
taaatcccctagtttatttgcccatatatatataaacaccaccacctgctttcctacttaattaacttttgaatgggaaagaacctttggaaaaactctttgattggggaagagaacctacagaaaagttgaattagtgtgcagcaaaaaagatagatggttgatcttaattggcttcgaaaataacatcatgtgtaaattaactaaggttgcttatgggttcctaattaaacattggttagctagaaattaaatctccacacaaattaaaaaccatacaaatccgcagaaaataatcatcaccatgtaactgagaagatcatatctcatctcataaaataagaatctcccacccagctgatttgtgcatatatattgcggtcctctataggtcgagtaaagggatttgtgtgcatatatagtgttgtctataataaagaacattaaaaccaagaacaggttgtttttcgcagtaaagaatcttattcatcttaagttgttaacataacaagcagctgcttatgtgcgaagaacatccaaagaaataagtactaattaacagcaaaactcattattcctcaaaaataaatttgaaaaaggaaaaaaaaactcatgcacatgaatgttggcatagttagaatcaagcaaccactttcagactcgaacaatcagtacacaacaaataggcaaatagaaaacctcaagaaacttctatcaacagaaatcaatcgatgagagcaaca

SEQ ID NO: 48345 - DNA, 706 bp, Oryza sativa
tggaacacgggtaaaacatggttttgtaatatgtacagttcgcggcagccggcaactgcgatctgcaacttctagtactatacattgactgccgctgtagttttactgatgtgagagcgtaccagctcagaatgctcatgcctaggtaggcttgtagccttgcagctcggttcgatatgtgagagcgattgacttgcgaactcttgggacagatgagccgaatcgcattatcctaatcgatcattatcacagagaggaaatgccggttgaattctccggcgacttgttactcgtagctataaaagccaaagctgaaattggtaacgattatttgacgcggctcataagagcaaactcgatcagtgctgcatttcgaattaagttgtgagtttctaaaagaacctcatggtaggccaaaacgatgtcagctcaaggatggaaatgcttggtcgaagagttttacttggacataacacgatgttgttaaagttttattatcattatctaattatatatgagaacatctatagtatttagaagtatattattacttattagtaattatcgtgcgcgaaggtagcgtaactcaactggctaggtttcttgtagtggaaccaaaccacccaggttttaagtcctaaacttggcatgagtgctcgtatttatccatcgacagtaagatactcgtgatccatctacagcgaga

SEQ ID NO: 48346 - DNA, 1346 bp, Oryza sativa
catcttatttagaagtgaacagtgcctaactatacatgttctcttgattgttgggttagctttgttatcttaagttgcgttcaatatgcacttttgaagatagatttttagcgtgtggcccgccatgtggaggaggacagcggcgtggcccacgacggggaacgagtgatgacgctctctctcgtggcccgatcttctagtgaggggataattctcgctttaatcgagtgtgacgtttgtgacgtggctaccaaccagaactagtccaggacgccatgcaatcgctacaccacaaacgatatcgtaccaaccgtgacgcgcggtagatgatccctgcaatgcaaacgagagaacactgcaagaataagataagattcaatttaatattgcgaataggtgatgaagcacaaagaaatagttacgattgaagtggtagatctaatcgacacggcaaatcaatacaccaactattgggggctctaaatctatagtcgtcgactaatcgagcgaggactagagacaaggtgaatggcacttggcaaaattcaactaaacaaaacccaattatttttgaggatgtacaaagctatttgtagaggaaaataaagctagggttaagtgctaattcgtggaggtggagggagacacttccgagatggggctagtctattacaaggcccaaggcccaagttcggtttcagcaatagcattgtcttattttggcgattcccgttgactcgagatgaatttggacatgagactggatgtgtttgaaaggtagcgagataagctttccacgaagtccaagatcacccaaatcggagttggcatgaagactctaggtccatttgaagtcagtactgtctccggaggccgagctggacttggacttggaattatcattggaacgtgtgaagttatgagcgtatccgacgaagtgatgtcctcatcatcctccccttcttgaattggagtcgtcctcgactcaatcccatctttttgattgtgtgcactctctcgtctagtggccatccttggaggtatctcatcttgaaaaacattctcatattcctgagtaacagtgggtggcaaagaatataaagtactaggagcagtagcgaatgtgagtataggatctttgcaaaatagagcatagcaacaagaatctggctcatctagtgcacaaatattatatttagaagccaacgaagcacccttcaacttaatttcattctttgtggtacttggttctattttactagttgaagcaagatgtttagcaataatctgattatcacttttcactttcttttcacattcaagtcttgcaagatcatctttcaaag

SEQ ID NO: 48347 - DNA, 663 bp, Oryza sativa
gcaaccatgtcgcctacaccactaggctaacttgagctccttgtttaggtaagactatgcataataaatgatgtttctggtgcaacatcagaccaatcaacccaacggtgcagcattcatcataattatctcaaatgcaattggcggccgacacgcgtatcaacgatcatctcgatgcaattagttgacagctcaaacactcattgcatcgaaacaacatatgtctagcggttattctcagcttataattagtgctggacttctcgtgaaagctcaaggatacaaacatagttgaattgtaaatacaactagcatgtaacaacatttagattttaacatgaagttattctgctattagcatatggttctgttgaataaatgaatcatgtgcattggtttccttgagccacaacttttatgtgttaatatttcttttcttctgagcatgacactcttgttaataatgattataatgatgtttctggtgtcctaatcctaatagagacgggtatattgctttagcaccaacaaaggataatagtgaaatgatttttttcgctttcacccattaactaacaatccgttgattagttatatgtaaattaatctatatccattgatttagaatggaaggattagattgacataatatcacactaaaac

SEQ ID NO: 48348 - DNA, 796 bp, Oryza sativa
cccaagattctcgtattccttcttcgctgtcccaaaaatttcattccccgtgctagattgaatggtcgcaacccctataatctcacgatcctcttccacgttggccagtctctctcgctcacgtgcgcgaaatttccatccaaaactgccaacgatctcatcgggaggcaaacgatgaacacagctaccgtgaatccataatcaataagagctcgttggctttcctgcaaaaaaaaataaaaaaataaaagtagagctcgtcggctttcaagatgtgcaccgcggcgtgagtgcattcacggatggcgacaccttggcccctcgaaggtagacttcgggtgaggtagaatcgaggccatgatgtcgctgtcgtggaggctgtttcgcaatggtgcagcatggatatatgtgcttcttcttgttgtacggcatcatcgcggtaccgcgcaagcaccaccttgcttcagagataaaatacgagccaaaattgatcatacacattgatacaatatgtggactatctgttatttggtgatttctttctaagcagttagctcacatcataacacaactagctacatgcatggatatagccacttttgattgtcaacacttgatatctgaatgcagatttaattgtttgattgataaggtatatcaacacaacagccaacctagtgtactagctagtgctagtattaactctaagatgacatgggagatattggagctaacaaccggatgcactattgaccttgctctgactcatcactgaatgaacaatgtttttggagtt

SEQ ID NO: 48349 - DNA, 677 bp, Oryza sativa
tgcagccaggtaggagtacagatttttcagttgcgtagtcgcatcggcagccggtcgggcagccggcctgttaaatgaatgatccaaacgtttgatgattcttcacatgaaaaaggctacaccagcaaaccaaggggcacctacccactgtctgaattactttatccgtcccacaaaagatcaaggggtatttacaaatttgtcatcggtttttctaatattgcaaggatgcaactcgaatgataattctagtggcatttttgtaattttctggtgataattttacaataacgatttaaaatagtggtaaatttgtaattgccctaaaagattcaatctagaagtttcgtccagatttattataatggattatgttaaattcaattttagattaatttttttttggatggaagaagtgtactccactttattactccttgttactagtagcaccagaaagaagtggcaggttgatcgctcgggcactttgctggctgctgctagtacaggtgttgaagtgtaggtacaagtgttgaagtgtaggcacggtcgtgtgatctgtgtgctgaatcttggactcgtcggtagctctgctcagcttcagcacgctggaaagggaagcagccaagccaaggcaggtctgcaggtggtctgtctgtggatcgctgagcagtaca

SEQ ID NO: 48350 - DNA, 636 bp, Oryza sativa
taatccaaatcgacgtatacatgacatgtcgaccacaaaccgcatattctcagtgcttaataagggcccatagtgtgagaacaacactccaacctcaaagaatacgacattgatcacatccctttttgtcctcaaatccgaaaatataaatcacaccctttttttctcccccaaacaagcacacacaccacgcctagaatccaacaacaatggagcttataaagacgggttctgatcactttcatctcttgtacgtaccgtcgtacgggaccaacacaattacacaaagcaaaacaacagttcgatctgtggcagccacacaagtccgggaagtaaggcctcctttgattcaaaggaaattcatatgaattttagagaattttatttctaaaggaaattttcctatatagtcctttgaatcaaaggaatggatcttatggaatcccataaaattcctatggaatgtctaatgctatgcaagttttggagaaattctaatataaggtagaacctcatggaaactttcctttgagtctttatctctcctctaattcctgtgttttttcttcggtccaatctaatggtcattcctgtattttttcctttgttttgtaatcctctgttttacacttgcat

SEQ ID NO: 48351 - DNA, 715 bp, Oryza sativa
cccctggggaaataatactatccataatactcagtgtagtagtggcggatatgatccgttggatgcaacgaatggatgatccatgtttacccgagggtacagtaaaaaaatcctttttctgggcggactatgttgcaagatggccagttgcagtgagtgcctgaaaatgcatgatttttctttggttgcataggcttgaacaaataaacatgatgtttctctcattctgtgaatgaaaatatttaacctgtattatttgaattgatctctagtgcatgatagggacggatagactcaggtcagaatgaaatgacatacagtgcatataagagaaaggtctagtaggcttaactctgcccatgtgtccagctagctcattgcgacaagaaatcttaggctgtgttagagaaaggggagatagataagattgggaagatacgcaaaacgaggtgagctattagtgcatgattaatcgagtattaattatttcaaatttcaaaaatagactgatatgattttttaaaacaactttcttatagaattttttttgcaaaaaacacaccgtttaatagtttgggaagcgtgcatgcggaaaacgatgtgcaatctatctccaatctcctagaacgaacgctgccttattatctcttaccggtgacagtgtatctccatgcaaaacagaacaaatggagaaccttttcccagacaaaatgag

SEQ ID NO: 48352 - DNA, 794 bp, Oryza sativa
ggcatatatgagctagatattacagaaacatatggggtcactgcgcatcgccgaactgagcttttgctcaaagctactccagtgtatgcatgattggtcggtacacctagtcagatatgtactgtcaagacaaatgtctggtctcttaaggccctctttgtttaggcttaggcttattggcctagacttttaagtcagcttattggtttatatgatttataagccagtggatttaatgtcctaagtttagtggtggagtcatacatctatctcatataagccaaaaaaagcttctccaacctagcttttggcttaatagtgttagagtggcttatggcttaaaaaagccaaatgaaaaagctacttgtttattttggcttagacttttcgacttataagttggcttataagcctaatcaaagagggcctaaacactgtccatgtttgcctacttttgtttatattataaataagaaatgcaaaatgtggccacagcgagtcgatttgagaccctgaagatgtacccaagtttgatgtttgctcaatatagcactcgcaagtcttctctgccatttcaactaggagttatcgggttgtgaaaccaaaaggagctagacatgagtgaagtggtctgaaagcttctcgacacactgatctttgcctagaggcaactcctttgttgccacagcctgttggatcttacgatatttcttgtaggagcactggaacagctagccacgtatctttcagaaagaacagctaaacggtgtgtttgcaagggggtgttcccaaca

SEQ ID NO: 48353 - DNA, 1449 bp, Oryza sativa
ccaatgttttgagattctcaccaacaacttctcataatctcagactcctctaatcaggaccatgtggctagaccaacagtagatttaaccagaccgtggataaccaacagcccgtggagaacctagttagactctaattgacaatagtattgtaattcatagtctaaaataactaaaaagtacaaatgctacctgatgtcctatgcatcggggtagttctatggaggaaacttttttattgtttagactttttatttttctaaattttattaatagaccattccaaaaagtatttatgaaaactaaacctttcggcaacgccagccgagtagctggtgtggccaaccatggtggcgtggccgaacaacatggtcacgccaactgcgcgtggtgcgcgtggcgtgacaaagtttcagatttagaatttttttttgaaatggtctattattaaaaaataaaaattttctctatggaggaatgaccctgccatgtagcgccatgctaccgacgcaaaaaatgtttttttttaagtgcgcacatgataatgtgtatcgccacacaaatattcaccttgacattcaatatatatataaatggagatataaaaacatttaaacaaagaaatactgatgcgtgttgtttgtgtgcactattcagggtatgaatttgttttgttttctctatgtatatatacatgtacgtagaattttgagttggttttttgcgaggtctcgtacatgttatcgtgtccacagtatattttagtgtcgataccacagtagcaatgaacgcgctatgcagtagtacacatgagattctgttgctatggtttgagggctacttatgaatcccaaagtagtttttgtgtaatacaaagtgcatccggtcgtaatgcttccgcaataaaagattaaaataaaacaaaaaggatctctatatattattcatgtaaaagctatatttgcaaagaatatgtcttcttggtactcaacaatatgtgtgatttaattatcttccaaattatgtaaatcaagcagagttacacatgcatgaaaactaagtttcgaatttgtcataatagtacagaactatgttaaatgaaagctctctatatatctgcatgttcatataaagctatatatgcaaggaattttactttttcattagtagtatatgcatacataaaagatgtgatagataaaacattaaacaataaaatattgaataaccacaacaacccaatcaaacaaggaataaatacgtgtcgaccaatgattgaaccacacaataaaaaactatatctagccgtccctctcataaatgcaaacataacatatctttaggacagatcaatcatcgtccacacattgaaatgtggacctagtgacatcaatcaatccgtggataggtgttgccgacgggatgcgccagtaatgacggaaaggcatt

SEQ ID NO: 48354 - DNA, 1312 bp, Oryza sativa
ttcccaacccctcctcccgaaagcagcttctgtgtttgctacgggaggatgggaacatgtatagtgcgtacggaaaacggagtaatctattaacacgtgattaattaagtattagctatttttttttcaaaaatgaatcaatatgatttttttaaaacaactttcgtatataaacttttttaaaaaaacgcaccgtttagcagtttgaaaagcgtgtgcgcagaaaacgagaggaaagtgttgggaacacccccttgcaaacacaccgtttagctgttctttctgaaagatacgtggctagctgttccagtgctcctacaagaaatatcgtaagatccaacaggctgtggcaacaaaggagttgcctctaggcaaagatcagtgtgtcgagaagctttcagaccacttcactcatgtctagctccttttggtttcacaacccgataactcctagttgaaatggcagagaagacttgcgagtgctatattgagcaaacatcaaacttgggtacatcttcagggtctcaaatcgactcgctgtggccacattttgcatttcttatttataatataaacaaaagtaggcaaacatggacagtgtttaggccccctttgattaggcttataagccaacttataagtcgaaaagtctaagcaaaaataaacaagtagctttttcatttggcttttttaagccataagccactctaacactattaagcaaaagctaaggttggagagcttttttttggcttatatgagatagatgtatgactccaccactaaacttaggacattaaatcccctggcttataaatcatataaaccattaagctgacttaaaagtctaggccaataagcctaagcctaaacaaagagggccttaagagaccagacatttgtcttgacagtacatatctgactaggtgtaccgaccaatcatgcatacactggagtagctttgagcaaaagctcagttcggcgatgcgcagtgaccccatatgtttctgtaatatctagctcatatatgcctgttccattaggcaaattccaatcaaaatgataaagaaggcttgcgagtataatctccaaacaacaagtttttttcaaaacaaaagcaaaacaagatcacacaatatctcattgaaacgaaatcacacaacaaaatgattggccactcaaactgcaccagttggatcaagatctaatgtgcatactcttaaatttgtagccattggatcaagatctagcatacatagtctttatttcactaatctagatttaactctctcatccgctcttttcctccaaa

SEQ ID NO: 48355 - DNA, 1256 bp, Oryza sativa
cgcagcgccgcacagcctcgcctgcgtcgcccttcaccacgccccagcgccgcccttcaccacgccgctgcaccgcccagctccacctgcgccactagggttaggggtttgggtggggaatttttcacgagggagagggagagaggggggggagggggagggcagggatatttttatgtaactgccacatcatttgccacatgggtgtgccacgtcggaccaaaggggtaaaatcagtcgaaattggtcgcgggggggattgaatagttcaagggggtattatatctggtatcatagtttaagggggcaaagcgtactttcgcaagagtttaggggggtaaatcggacttaaccctttaaggaataacctatatcacttagttgaaatttggcccatagttgaaagaaaaaagatttacttttcctaatatttgcatgtcaaatatatctccaacacgcattgtaaattaaatacgtgtctaagttttcttttcacacaaggcagtaacttagctttgataaaccacatgaaaaaaaaattgatgggcccgatacatcaacattgtccttatgcacacccatgatgagaatatatgtgtcctattaagacgcacttatagcaagcatttttgaagaaggcaactttgttaaaccacatacctgaatactttgataacatcagttggctttctcagtatttcactcctagcttgttggatttcctacacaaatagaattgtggttgctacacgaaaactaattggatttcccatgcaattttacaggaccaattaaatagaaatgtgtttactacacaaccctataaatagaaatgtgatgacatcgccgttgacagtgttcacctcttgatttcatggaaggtgcgtgaggtgggatgatatggagagcgagggcttccataagataatggcctactttcccgacaatttggtgaatctgccgcctgtccctgatgaggtgcatatgtgcatgtcacaaaccatagatctattctccccactatcctcaccagtgttaaggaggatggtgaccaagctgtttaatagccccactgtgtgggcaccatcacaacggccgccaccattctagcgctaccactgatggtggagcttgacgcctatgtccactacatcatggagtctgtcggggagctactcctcgtgagcatgctctagcactagcatctggtacacaaggtggacaccgtgacaaggtgtttgtcccggtcagaagcc

SEQ ID NO: 48356 - DNA, 2704 bp, Oryza sativa
tattgataactctcaattaaatggcggaaacttgacacacatgatccagcttccgatcaatataattcgaaccctacaatcaaagcaccacatctcctttggttatcaaccgtgccctgcccagttgacctcatcgagaagactaatccctacatgcgaatcgaagaacacgagtaagaacaaggtagattattgcaactcgattgcatatgaattattaagcactcgaatttagggttccacaaaccgaacaagcgacaaaactgcaatgccagaaataatctaagcaaaacccgacctgaaactatgatggctactgaataaatatgattagggatgtcctagggtttacctagggcaccacccccttgggcttagcccatgatacaattacaaggcccaaagccaaatcagactcagactgaatgaagtatatggcttgttttgcagattcccaatggctgagaagaaattttgatgtgggaccaaaaccatctgaaagtagacttcataaaattttcaacaagtactcgtgagccctaagattcattctagatcggtggttaggtccgtttaaagttgatactattaggagacccgaatccgaatccaaaacgtgcagaccttcatctgttaccttttgtagactaaaagtgatgtggtgaggtaggagtaaatttggggaagatcttggtttgttccccagtcaacttttttttgatcatccaagcactttgttatccatcactcctttccttcatcaatcaagtatttctgcaaaccagaatacatgaaactcatagtgcaataacgtttgttcaaatatatagcacataaatctctcatatagatcatgcacacatttggtgtataaatataaggtatgcatggtcatatctgagctagtaatatcctcattatacaacgatcttcaaagatactagcaaaatactcatgtgttgcaccagactcattatagtattagataagttgattaaaactaaatcattgatctcaagttctgaatattgatgataggacaaacagtatgttgtatagtgcatatgcataaagcaaataaagcttctcactttaagtatgttgatcaagaatgataggtccataagataggtgatggtcctcacttgccagatagataggggtggcataacaaccaccaccacaagcatcttttaagatagtatatatatatttagagctttccctttaatatatatgtttctttctaatccgtcactctagtgtctaccagccacaaaatgatctaattctgttgtatattttcatttgcaaaattgtttttcctagttcagctctgcttaccttttgaaggaatatgattttgtacagtttgatcttttgtttcagacaatgtatgaaggattttgtatcccttgaaccttgtctttaatctttattatgaatattgagtttttctttaaaaaaaagaccacaaaatggagtctaaaaggtagtactagccaattgagatttgtccaaaaagaccataaaatggaatcgatacatatttagtgaaaaatctaaaaactattgtaggattaaaaagtggacgtctgagatttatccacatcatcttgagtaaacccacttttagatcctacggtaatttacatattttccatgtgatttgtattatgtattttctctatttttgtatgtactagcaaaatgcctgttacaacaggcgaaggaaattttaattgtttggataaaataaaattttaatcatgcacacattttgtatatgcgtgaatgatattgttatcagcgtagtatagggtgaatctaccatcactataatctagacaggtgggatcataggtcagtcatccctcctctctcccaaccatttcatgtgtattcctccacaccttttattaggagaagacattgcagaatgttgttttggttatttttaaaatgccaaaactcatgtgtctttttctgcttcctaagcaccagcgtccttaaaaggttgtatttgggttattttcctttttcatttcatctaaattccatgatttttgccttcactgatattctaaagttttcttgccgaagggctctcctccaaattcaagtatctattcctttattcaaatactccttccttaaagcaataccgtcaaaaaaaagttcctttaaacttccatttccgaaaataaagcaaaaacccacatattcatagagtccatgaactacatgttaaaatttatcttcaaatcctaaatagcctccaaacaaattcttttgcattgcatcccttttagattctattaaaatcatcccctccaaaatttcagaaaactattctatttcttttgggccgaaatcccttcaaccggtcatccttctttttctctctaccacgttttctccctcctgggttgattccatccccttgatttctgggcccttcaggccttctctcccttacacggcctagccaggatgtggcccagctgatccaaccgtctccttccttccaaagggcccatgtggcacgtgttagcacgtcgttgccgcccctgccgcaagggcactgccaccgttttgccgagtcaagaggaaccaccaccgtgtcgtgctcctcctcatccactgcttttactgcctcccttgctctagcccgttaccatgcctattgccgctacaaaccgtg

SEQ ID NO: 48357 - DNA, 734 bp, Oryza sativa
tcatagtttctgtcaagatttttgttgttttgcaaaatttgctctttaatatttgtacaaatattgtactcatcatccaatcatgtgaatttgatttgtatggagcaatcactactgcagaaagactaggtacaaaaggaacactgctagtgtacttctaaatcaaggttcacacaggggcacatacacgcgattacatacagcgggacgacaggtacaatgccacagaacatttagcacatacttctgtctaaaaaaaaataaactttagctacaaatctggacacgcatgtgtccagattcgtagttaggattggatctttttgggacggaggggtaggccacaaaagtggctcatatataatgactagtcagcatcccgtggcattgcatgagctattattttttttatattataattatttaaattctaattatatatataataaattagttagattagaattagaagagactagctacgtcaattacaacactctgattattgaatttaaatttcgaaactaaattaacaaattaaggtccaagataggtaactctatattcaatatattgattctaaagaattactaatcctaaagcattcatggtagtagaaactaaagagaatctatgatgttttcaatagaccgctttattcttaatattatcaacgttcacaatatatgataaatccaactattaaagggccacatctattttttattaatgca

SEQ ID NO: 48358 - DNA, 641 bp, Oryza sativa
tcaaagtaacttcattgaatcatccaactatctctagtttctatatctaagatatttttatgatcttatttgaggtcacgcgaaaaattgaaaaatagaaaaatgataagagcctatagaggggcaatgaagaagatgaggggggaaagtgctagatagggcagtgagccagtggaaccaagttgagcctaccctataaatgtatacatatactttttttaagctaaacataatgccatattactattacttatttgatcttattactcggttactcattcaaccatatccaaccctatccagcggtacgactatcttttttttatttggttttcttatgtttttcacattcaacttgtgagttgcttattgttacttcgtcactccatcattcattcaatgcctatttctagtgggtttttctctctctatggttctttcactttgtggttggtgactttgtgtaacgccatttaaaagctatttaaatgtttttattattatgaatattatttcgctgatttggttgtgagtttgcatgactaggtgtaagtgggtgtatgagtatattaaagcgagtgtgttttcaccatgaagtatattcaacttccatcacatctttacaaatttctgctttgatg

SEQ ID NO: 48359 - DNA, 538 bp, Oryza sativa
tttacatcctaattatccagtaaagaggtacttctgtttgatgtttttcttcctataacttcagcaaaacccatttagacatgccaattcttttaagcctttctctagaaagaagagaggacctgtacatgttttgcatgaatagtgttcctttttgaaacttagtagtattatggtaatgaacttctggcttggtttctgaagtttcctgcattggttatggtcttggtttgccaatcgtcacatttctgtacatatggcagaacacttgttctacactgacgacagagctcctgctcttatttgaggtcttcccaacagagaagtttgagtctgctcatttccttttactgtattatctgatttggtctactctgtgcctgtggtttgatatttcattcccaatggtatgatcgattgcctttgtggtttgatattttatcccaaggcaggacctgctgcatcatatatatgaatccagagttccattgccgactaatgtggatgatcctattaataggatcaacacaccaaattg

SEQ ID NO: 48360 - DNA, 1222 bp, Oryza sativa
tattgttggaagtgtataattttgttatataagactattatattcatgattttattgtacaaggtattattcatgacaaagtttatttttacataatgacataaaaactaatatttatttacttattaaaagattatatgtagcatttttttatggtagttcaatatttttttcctgtcctatatattatataggaatgcttttcaaaactatgtttatgatttaaagaaaatgctacacatactttttaatatttattaaaatttctatgtacaacaagcttatgaatattataatcacacaataaatttctatgcttccaacaatatagtttacaaatttctacatattcctcacgtattgaagggcaaaactaacttttctatacctattaaatggtcaactagcgatcaattgacggcaagggtatggaagagatccaaatcaaaattcagaggtatacaagcgagtgaagaaaattcagagacatagaagggatcggctaaaattttaagggcattaaagaaattttctctttcgtttagtacatgctctgaatgtatctctgaagtctgataattttatggggttcagaagacttgcaagcttcattactttggtcgtatgtctatcggcgagatcaaagatgtaattaaaccatttaatttccgttatataagaaagatcgatcataacagtaatgctactgtgacatctatatgatacgctaatgcatgatgcagaatcagcacaaataatcctgctacattcataggatcgatccaggatgaattaatacagagtttcagcggcagcttcttgtcactactcatgcccgatcaaaaggtcaattgattgccaatatgaaatggtacggtacccactgcacaataatttgtagggttaagatcacagcaattatggcatatagatgatacatcgtctatatgcgcctggagtcttgtgatgggacgactgatgcatgcgttgatatagacacgcggatattcactgataaggggaaacaaatttttttgtattagtaactttgctagctagaacatgctgcgaatttatattacacactattgcaacaaaagaacaatggtttagtagtatatattattagtctacaaattactcatactgtatattatcttctgattacaaaagtcggcatacaaatggtggaaatcagtcaatcattcaatcattcatttca

SEQ ID NO: 48361 - DNA, 719 bp, Oryza sativa
ctcctttttgtatttgcatttccaattttatccatcacatctagcaacacctgggacactggatatcctaaatgtgtaagctgaatattgcatagaaaatgacattgcatttactagaaagtataaactagaaaggcagtacgaaagtatggatctatgtataaacaaacacatcattaccaaagtaaagcatagcactgcaggtcatgaacacattttaccagaaaaaagtgtagcaatgcagatgaacaaatcgaagaattattggagaaacccaagcatataacagaatacagaatcttcagatcaccctaaaagaaaaaaggtttaaatagttcccagtgttaccataaattcatattttagtatttgcattaagcattaactgcatgtagggagtaagcctgaaatggcactacatcctgtcatcgtacaaatcaacatggcatcttgctttcaacttatctgtcgtctggtattatgaatcacaggccgaactacccaaagcaagattcacagaaagcccaaacaaaatccgagcaaaactcatatgcaaaggaccagctggtatgttggatggactacacatccaaggaatttacagcataaagcaataagaggttgcaaacagtcaaataatgctcaaatcatctcctaatacgatccaatgaaagtcagtgtagaattttgatggatgatcaaagtggtctatttcgact

SEQ ID NO: 48362 - DNA, 740 bp, Oryza sativa
aacctcgagtcgatgggttaatgatgctgctggtgagaaaattactagcggatcccaagatctgcacgccatatggtacttacccgctgtgtgttcttgctgctagctagctgctagctgctagctgcttcttttttacaacctctcttaagaaagcttcaagcttgtgtgtttttgtgctatcatctcatgtgtgctgctgcaaagggggagaaaggacggccatggcagcggctagctagctgtgattattggagaaggttgatgtacactgcagatctggcaacctgcgcacctgccccagaagagaggagagcgtcagtatagcggctggcccagatctggaaactgcgctgtaaacgtatgtatattggttcgtacttgttggcttcgagttggagatcgatcgatctgatcttatatgttgctctcatcgattgatttctgttgatagaagtttcttgaggttttctatttgcctatttgttgtgtactgattgttcgagtctgaaagtggttgcttgattctaactatgccaacattcatgtgcatgagtttttttttcctttttcaaatttatttttgaggaataatgagttttgctgttaattagtacttatttctttggatgttcttcgcacataagcagctgcttgttatgttaacaacttaagatgaataagattctttactgcgaaaaacaacctgttcttggttttaatgttctttattatagaca

SEQ ID NO: 48363 - DNA, 642 bp, Oryza sativa
cttatgttctgaattttgtttcactattgtattggttttgagtactgatatatgaaaataattcactgattttgagaactgatatacgaaaagaaatccactgatttcatgaagaaaaatgaatttaggttgagcctacttatcttctgtattttgttttactattgtattggttttgagcactgatatatgaaaagaattcactgatttgtaacagatgctttgctttagatttaacatttaatttcaataagccgatccttatataaagtataaataaataaaattgcaacaagcgaaatggattgttccatctgttacatcacgattatgtaagctgtaaagttaaataataagcctgtttacctgtgtaatatttgattgttttgagctatgctgcaggcagcaaatcatatctctgatgaccttgtacctcttgttgttccggacaaagctgggacagctagggcagtgcgtgtgatcttcactagttctccagaggataagaaccttctcctgggttgtatctcttcagattggcagcatgtgcttgtataaaataaaaggaaggtgtcacgtattcaggatcccgtcttatggaaattattttcagatggacataaaaaaaatggaggatgaaca

SEQ ID NO: 48364 - DNA, 585 bp, Oryza sativa
tcttgctcgatcaggaccctagctttattgcgagccaaaacagctgcgctattctgttctacaggtagtatgaaatttccccttcctccaccactttactagtctcggcaggttgttcttcctctaggtctctccattcccaaggaagcttgcttcttcgtgggctataagacattaacaactggctctcgagtattcctatcatcaagtttttctatttccattataaagttcgcgggtataagtcaaaaggttagctcgcttatttggctaaaccatccaaacaagaaaaagaaatacggcaccgacatttccaatggtagtcaagttcactggaataggttctttgagctatgatccaccactgtcgaatcagcagtaacgaagtaagtgaattattcatcgagaacttcctatggcattcagccttttccttcagcttagcgccctcactgctacttctctctattaagctgctctctgggtccgtccataagcatgcatactggcgctctcttattggctaggcccctatctaattagcgggttattataacaatataaaaataagataatgtttggagt

SEQ ID NO: 48365 - DNA, 611 bp, Oryza sativa
cccacatccatcaaaggaatgctcgcttgtcaagctatgtgctttctttcctttcaaaactctatgtattcattggctttcttaccaggcctacccaggaaaggggtatagatagaagaagggatcctccgaccataggtctattgaatcgaaaaaacactattttttatccagcagctgcttttattttctctacgaagagagtggctagctagcttctttgccaacttcgagtgactgtgactactcttactggccgtaactcacagaagaggcaggaagactttttactcaaaattgataagcgatcaaaccctttgttgtaaccttctcttgcacccttaggttctttttccaataatgctaaaaaccagtgaaattcacctcttcttgttgtttggttaaggatcgagtgtggactttcgtctttatcaacctgcggctaaggagaatcaagcaccatttagtggtttgttcttagaccgactcaagcgattgagagtaagaacaagaagctacgtacggctataaataaagataaaatcagtcttgggaaggaaatctcaggtttggccatgcccatttatgagcaataaatataagaaagagca

SEQ ID NO: 48366 - DNA, 639 bp, Oryza sativa
accagttcaaatctggttcctggcacagaaaaaaggatctaccgaataggtattgatacaaattactcgagatggattgggatacatattcgttaaaaatatagctagagtatgatttattcatctaagtagagaaatctctaaatagagacacttctttttagagaagggtaaaaatctctggttcttttctttatggtacagaaggaggtgagattaggttcccttttcttcatttttgcatttcttattccgctattccgaatatttttttttctttcttatcttatcttactttcctagttgttccaagtaatgcgcgcggtacaaagttcgtggtagggaacttctttgagtcatcgtatttttctgtttatatgaaggaaatgaatatgtgattttccaaattggagaatcgaaatgaagcccttttttgctcagtctatctggacccttttgtataataggaattaattccaatataataggtattctgtttctagacgaaacagaacgtcaaaatattccttgacttgaataaaatcaggagttgtgttgtataagtgagcatgaatttcttatcattcaatgagcatcttgtatttcatagaaattgggggttatatagtccttacgtaa

SEQ ID NO: 48367 - DNA, 696 bp, Oryza sativa
tgaataagatttttctcgattttagatcggatttggcggcatggccaagcggtaaggcaggggactgcaaatcctttatccccagttcaaatctgggtgccgcctgatcaataaaatacttaggcttatagtactgatccaactcgaaaaattcgtaccccgcataagttggggcaagagaataactaggcccggcgatacttgattttgagaacccacagttctttcctcaaactagggtttgttttggcagtagtggcccaaaccgctaccaatagggatgagatagcgtttccttattcttttattaatttgaattgattcttaattgattcgattcgagaatttaaaactaggaggctaagatgtcagaaatcttggtgggcacctgagcacaagactttttagaaaaggcctgcccgggatgtaccgaaagatagagatgctgcatcgaaacagtcagactaccgaggaaccgctactccataccacgctgaccaacacacggccgcgagagaagaggcaaaccacgcgatcagcaccacgacttcagctacctgatcaaactatgaaagcaggaatcgcgtcgtctgtatccctgctcaatatcttgttttggccacatggattggatataaacaaaaaagcctacacaagactttgggttcactttggccctcgtggaaaggacctatg

SEQ ID NO: 48368 - DNA, 865 bp, Oryza sativa
agtggtaacggatttcaagcaaacggcgaaggtttgaattgactagcttgatccctactattacaaggaagaagtaagcaagcaagaaagaaagtaggttcagtctcttatttcgaagttcgctgtgctcttgtccaatagacattctgctggaactcacctttatctttagagatgatgatgaatattctttagagactcctctaaaataaaagaaatactttacaagaaaataaaaattatgtttatacggacggaattcggtctatcctttattgaatatcattgggcctgcctcctatctatcaactcattactctcctttgttctctggtaagctctcgcattgccttaaaacaagcattctttcgtattcaaagaaggtttgcttgcatgttctagcactggaagagacgaatattggttgccggatgctattcacatgttaaagcacaaaaggtacctcaaagtttatagttctaagctgaagaaatagcctgagtcaacttatcttctttacaacctccaaacaaacgatttaggaaatggaaattggaaccttttggagttacctagtagcattggaaaccttatgttccttcgataccttggcttctttgatttagtgattaagctacctctacctatatgtttgcttcaacaacgttctagcttgcgtattctgatcacacaatggaattcaggtggaccagggtttgggacactaatctttaaattatagatgcattataacatgtcaagggaggcgccgagatatgatatgaccaaaggccttgttgttgttgcgagcccggctcgaactgacgaggagagtggagaggaatacagtagtagtagtcgggcc

SEQ ID NO: 48369 - DNA, 535 bp, Oryza sativa
atggtgtttcacgatcagtattgaaaatgaaagctgaagaagttatcgaaactcggaaccacatgttcaatctttttttagcggtttccccagagatctttatcattaacgcaaccttcattttgctcattcatggagttgtatttagtacctctaagaaagatgattatccaccgttagttagtaatgtgggttggcttggattacttagtgttgcgcgcctaggagggcagcgcgcttggggtgcggaggagctattatcgcccagctccctaacctaatgcggccggaccgcagggaaccttagcatggggggacgtcctaatccttttgccgccgcaaggctggctaatcgtacgcagcaggagcaagggaactcccctggttcaggaaggcacatgagtccgaacgctattatgaatgtgcgaccgacactacactacgtaggtacctgtgcatgcaggtgaggcgtcggtcggtcctaaaaacggcggcagctagcgaggagggtaccgagctcgaattcgcctatagt

SEQ ID NO: 48370 - DNA, 649 bp, Oryza sativa
ccttgaatcagataggaaatcctcacttttccaagacaaaagagaggcaagcacgggatggagcaactagcgcgaaagaacaaggaatgagcgctttgttgctaaagcgcatacgttttctggcttgatttttatacgattttttgagcaactagccgatcacgaaataggctcatgctcactcgtggtccctactgcttatgggactgtgatcgaatccgatctggaaaacagtgctttctgataactaatcactggaagcacccgattctctctactctgtttcacctctctttcttttggcttcttcttgagaatattttcacgttggatgaagggatgggctttcttttgagttggctttgatcgattgcttggtgtcacgctatttactactacggttagctaaattcgtttatgacaccgattcatttctagttgatccattcgtaaggtcgttcagaagcaaaggcctactactatactatacaagtaagctggtcaagtcaaaagaaggttcctgactatctagtaaatgagtgcacgaagaaagggaatttcatgtgtgagcaccttgcctcttttagggaaggctatttaccaagtgagtctgcgctgcatgctacgaaacataagaatcattttgaat

SEQ ID NO: 48371 - DNA, 816 bp, Oryza sativa
gtacttgctcattcttgtgatggatttcttactttacctgaatccgatcttgaaagaattagcacagcgggactgctgagatcacctctccagggcattaagccatgtcttctctatgcggatgatgccccccctcattttcctagatccgaagccgctgccattgctattattaaaggtactaatgaagctcttttaccaaggaaggtcaacctctccaaatcggtgttgttagtgactacggcttgcaatagcgagccacttcgtgtggctttactgcgtcattcagacacaggaacacgcgtaagaaacgaattaattgtactcaaaccatacactatttcctctttatctcatccctccggtgctgccttcatagcagcgcttactcactctacagtgaaatgtgattcttcgtcatgggacttctcgttaagtggttggcaatccatcaggaaactgcgatcttgcccggccccaacctgccaataggaatttcactgtcttcccgcaatccttctacccattttctgttcaatggtttcaatacaataaaaaaagaaaccatgatactgaactgaatcaatggcattccccagctttgtttttgaactctggtggtggcgatgaagtgttgtagccttgtagcacccttggatgcactccatgctctttcttatatttattgctcataaatgggcatggccaaacctgagatttccttcccaagactgattttatctttatttatagccgtacgtagcttcttgttcttactctcaatcgcttgagtcggtctaagaacaaaccactaaa

SEQ ID NO: 48372 - DNA, 684 bp, Oryza sativa
attcttcctagtatggaagaagtaaataaaaagtactgcgtctcgatctatacgaaagggcactggttttttctttcggtttcattgatagcagaagagtacgctagctagcggagcctgaaaacgcttgcttgcgccccaccccgtaagctgactctattgcctatgcttgctgctcgctcagtgtcagtagaagggaagaaaagatggtcacttcttttaggaacacggcgagccttacttacgactgttgcacttcactcgcagctcgttcattcacttgctcatgaactcgctgcttcgccagaagcgactagtcgcctcctttcctccgccgaaagatgcttagccagaagcgacgaaggaggggagctggggaaggccgacgatggcaatgagggggaagctgtcgtagaagctttgccccttgctttacagaaattgttatgaacttactaaatgaccttatttattctcccggaacgctagcaaatctaatagttcccatctgctcttcttaacttaagaacgaaggtccttcttattcaggaaccctttgtttgaggggggcgtatccccggggaggggagagtggccgagcggtcaaaagcgacagactgtaaatctgttgaaggttttctacgtaggttcgaatcctgcctctcccacttgttgtagacttaa

SEQ ID NO: 48373 - DNA, 544 bp, Oryza sativa
ataactgtttgcaagatccacgtatattaaaagaatatataaataaatatgtgcaaacgcactatgaaatccgttatagatattatagtcctaattggaataatatgtgcttattccacaataatatcgaattcaatcaaccaattgtgaggtttcattataattatataagggatatgctttctttaaggagtctctctcctatgaaatttggtgaactctctatgcgaagcagattatggacatctttacaaagattaacagaatcttcaaattatacattgaccgctaaatacacacacaatgtttagtgaatcttatgacaatccaatccaaggatggaacatcgtttgtatgtgggaatttctatgctcttgtcaaatttgggttttatacccgggtatggatcaggtatataccagttagcggtatagaagcggtacccgttgatctgtttccagaaaaatatcatgtctttctcaatgagagggcaaatgtgactgcctataagaaggtagttttcgtgggaacgaaagatcttact

SEQ ID NO: 48374 - DNA, 859 bp, Oryza sativa
ccaataaggataccactcttactagcaaggtgaaggacacatcaacccgcatacccttttaccacacctaccccttgttgggcacgtttacgcatctcttgacccatccacatgacccgcttggctaactaaaagaagcttctcggagcatctatgcatatgagaacggatgccgagtaaagggtggccagcttcgacctttgctttgaacaggggttagcattatcaaaaaccattgctcataaaagggatctctttcctaaaaggcatatctcgtacgctagggaatgtgcttctctcgtacgctagtacgctagggaatgtgcttcggcttcagcctagctacttttttgattggtgactaaactactaaaagcaaactttagctatcaattcttttctctatgttcagaaatcattaacggatgcagaactggatactctgcttaaagcaataagcctcccttggatagatcgaagaaagaagcactgtgcgttaccaggtgtagtggagaaagcaagggcaaaggtttcatcagaaagagatgctcgagcgataccaggatcacgatacgattaatctgatggcgcagcacgaacaggaaatagataacctagccctgggaaggaaagggaacagtttagtccctccgatccgtcaatcaacgatagggttacccagaattctaattaataggaaggttggactacctcgaatggcaacatgctcgctgattcctaccactcctatctacataactgctccagagaagggaaggcagatgtcagtgaaacgggtaataatacaccctcgactactgggtgagtgagaaaagacaacatcctcctccggttacac

SEQ ID NO: 48375 - DNA, 689 bp, Oryza sativa
agataacgaaaggaagctattagtttttcttgtactcgactcggcttttctttactgaccgcttgcgtaaggaaagttgacaataggaaaaccaggtgagaagttttagagcaaccgatgcctaccgtccggcgatgtccctaggtggagctggcttaccacattccgatacctcggaaccttcccttcgtaaatttggaataacgaaagtctcaaccgcttgctggcatgccaaaacacttattatgtttatgtgaagtggattcatcggaagagagaggtaaagcattttaatttcttcgcttttgagcagtaagtatttcgcaaggcggcccaggggtcttcttcgtttaaggggcagttgagcaaccaatcatactacgtagtacgggaattgtagttcacaagtgaagcctcccatgagtgactagtttggtggtatattataaatgggtcagttataaacaaatccgtcttttacggccgaccctagaaatagaacgctctttgacgagaaagccgtctagcacctgtagctggcttgcttcacgtcccgctgtttgcttacgagtttggtagcgagccgaggcagacgtttgtagatcttgcctcgaagcctcttcacagttgatagcatcacctgcgaggtatcagccctgcccctcatcattctttgagaatcataagga

SEQ ID NO: 48376 - DNA, 1833 bp, Oryza sativa
tttgagtgctttgtggcaaaaaacacttcgtattcgccggcgaacttttttgaattaatgccaatattgccataggtgggtgcattgttttagaccggaatgaaaaagttcaaaaagcaccaaaacatgatttttggacatattggagtgtggttggtgcattcgtggaaaaaaatcacttcgtgattcgcgcggcgaacttttgtcaatcactgccaatattgccataggtgggtgcgatgtttttcaccggaatgaaaaagttcaaaaagcaccaaaacatgatttttggacatattggagtgtgttgggtgcgttcgtggcaaaaaattacttcgtgattcgcgcggcgaacttttgtcaattaatgccaatattgccatatattggcacacgtgggtgcgatgtttttcaccggaatgaaaaagttcgaaaagcaccaaaacatgatttttggacatattggagtgtggttggtgcattcgtggtaaaaaatcactgcgtgattcgcgcggcgaacttttgtcaattactgccaatattggcataggtgggtgccatgtttttcaccggaatgaaaaagttcaaaaagcaccaaaacatgatttctggacatattggagtgtgttgggtgcgttcgtggcaaaatatcacttcgtgattcgcgcggcgaacttttgtctattactgccaatattggcataggtgggtgcgatgtttttcaccggaatgaaaaagttcaaaaagcaccaaaacatgatttttgaacatattggagtgtgttgggtgcattcgtggtaaaaaatcactccgtgattcgcgcggcgaacttttgtcaattaatgccaatactgccatatattggcacacgtgggtgtgatgtttttcaccggaatgaaaaagttcaaaaagcaccaaaacatgatttttggaaatattggagtgtgttgggtgcattcgtggcaaaaaatcacttcgtgattcgcgcggcgaacttttgtcaattaatgtcaatattgccatatattggcacacgtgggtgcgttgtttttcaacggaatgaaaaagtccaaaaagcaccaaaacatgatttttggacatattggtgtgtgttgggtgcgttcgtggcaaaaactcacttcgtgattcgcgcggcgaacttttgtgaagtaatgccaatattgccataggtgggtgcgatgttttagactggaatgaaaaagttgaaaaagcaccaaaacatgatttttggacatattggagtgtgttgggtgcattcgtggcaaaatatcgcttcgtgattcacgcggcgaacttttgtcaattactaccaatattggcataggtgggtgcgatgtttttcaccggaatgaaaaagttcaaaaagcaccaaaacatgatttttggacatattggagtgtggttggtgcattcgtggaaaaaaaatcacttcgtgattcgcgcggcgaacttttgtcaattactgccaatattggcataggtgggtgcgatgtttttcaccggaatgaaaatcacttcgtgattcgcgcggcgaacttttgtcaaatactggccattattggcataggtgggtgcgatgtttttcaccagaatgaaaaagttcaaaaagcaccaaaacatgatttttggacatattggagtgtgttgggtgcattcgtggccaaaaattacttcgtgattctggcggcgaacttttgtcaatactaccaatatttgcatagttggtgtgatgttttcacccggatgaaaaagttcaaaaagcccccaacatgattttgtgcatattggagtgggttgggtgcattctggcaa

SEQ ID NO: 48377 - DNA, 2389 bp, Oryza sativa
cgtgattcgcgcgcggaacttttgtgaattaatgccaatattgccataggtggtgcgatgttttagacggaatgaaaaagttcaaaaagcaccaaaacatgatttttggacatattgaagtgtgttgggtgcattcgtggcaaaatatcacttcgtgattcgcgcggcaagcttttgtcaattactgccaatattggcataggtgggtgcgatgtttttcaccgaaatgaaaaagttcaacaagcaccaaaacatgatttttggacatattggagtgtgttgggtgcattcgtggcaaaaagtcacttcgtgattcgcgcggggaacttttgtcaattaatgccaatattgccatatattggcacacgtgttggcgatgcttttcaccggaatgaaaaagttcaaaaagcaccaaaacatgatttttggacatattggagtgtggttggtgcattcgtggaaaaaaatcacttcgtgattcgcgcggcgaacttttgtcaatcactgccaatattggcataggtgggtgcgatgtttttcaccggaatgaaaaagttcaaaaagcaccaaaacatgatttctggacatattggagtgtgttgggtgcgttcgtggcaaaaaatcacttcgtgattcgcgtggcgaacttttgtcaattaatgccaatattgccatatattggcacacgtgggtgcgatgtttttcaccggaatgaaaaagttcgaaaagcaccaaaacatgatttttggacatattggagtgtggttggtgcattcgtggtaaaaaatcactgcgtgattcgcgcggcgaacttttgtcaattactgccaatattggcataggtgggtgccatgtttttcaccggaatgaaaaagttcaaaaagcaccaaaacatgatttctggacatattggagtgtgttgggtgcgttcgtggcaaaatatcacttcgtgattcgcgcggcgaacttttgtctattactgccaatattggcataggtgggtgcgatgtttttcaccggaatgaaaaagttcaaaaagcaccaaaacatgatttttgaacatattggagtgtgttgggtgcattcgtggtaaaaaatcactccgtgattcgcgcggcgaacttttgtcaattaatgccaatactgccatatattggcacacgtgggtgcgatgtttttcaccggaatgaaaaagtttgaaaagcaccaaaacatgatttttggacatattggagtgtggttggtgcattcgtggaaaaaaatcacttcgtgattcgcgcggcgaacttttgtcaattactgccaatattggcataggtgggtgcgatgtttttcaccggaatgaaaaatttcaaaaagcaccaaaacatgatttttgaacatattggagtgtgttgggtgcattcgtggtaaaaaatcacttcgtgattcgcgcggcgaacttttgtcaattattgccaatattgccatatattggcacacgtgggtgcgatgtttttcaccggaatgaaaaagttctaaaagcaccaaaacatgatttttggacgtattggagtgtgttgggtgcgttcgtggcaaaaaatcacttcgtgattcgcgcggcgaacttttttgaattaatgccaatattgccataggtgggtgcgatgttttagaccggaatgaaaaagttcaaaaagcaccaaaacatgatttttggacatattggagtgtgttgggtgcattcgtggcaaaatatcacttcgtgattcgcgcggcaagcttttgtcaattactgccaatattggcataggtgggtgcgatgtttttcaccggaatgaaaaagttcaacaagcaccaaaacatgatttttggacatattggagtgtgttgggtgcattcgtggcaaaaagtcacttcgtgattcgcgcggggaacttttgtcaattaatgccaatattgccatatattggcacacgtgttggcgatgcttttcaccggaatgaaaaagttcaaaaagcaccaaaacatgatttttggacatattggagtgtggttggtgcattcgtggaaaaaaatcacttcgtgattcgcgcggcgaacttttgtcaatcactgccaatattggcataggtgggtgcgatgtttttcaccggaatgaaaaagttcaaaaagcaccaaaacatgatttctggacatattggagtgtgttgggtgcgttcgtggcaaaaaatcacttcgtgattcgcgtggggaacttttgtcaattaatgccaatattgccatatattggcacacgtgtgtgcgatgctttttaccggaatgaaaaagttaaaaagcaccaaaacatgatttctggacatatttgaatgcgttggtgccgttctggcaaaaaattactttgtgattc

SEQ ID NO: 48378 - DNA, 1283 bp, Oryza sativa
agttggcgcgcgcgattccacgaaggtaatttttttttccctatattgccccagccaccatttcatttatgctcagaaaatcttgttttggggtgttgttgacccttttcactccagttgaaaaccttcggcccccccctatgcccataattggtagtatatttccaaaggttcgcggcgtgattcacgaaacattatttttgccacgaatgcacgcaacaccctccaatatgtccaaaaataatgtttggggctttttcaactttttcattccagtctaaaccatcgcacccacttatggcaatatgggcattacttcacaaaagttcgccgcgcgaatcacgaagtgagtttttgccacgaacgcacccaacacacaccaatatgtccaaaaatcatgttttggtgctttttggactttttcattccgttgaaaaacaacgcacccacgtgtgccaatatatggcaatattgacattaattgacaaaagttcgccgcgcgaatcacgaagtaattttttgccacgaacgcacccaacacactccaatatgtccaaaaatcatgttttggtgctttttgaactttttcattccggtgaaaaacatcgcacccacctatggcaatattggcagtaattgacaaaagtttgccgcgcgaatcacgaagtgattttttgccacgaacgcacccaacacactccaatatgtccagaaatcatgttttggtgctttttgaactttttcattccggtgaaaagcatcgcacacacgtgtgccaatatatggcaatattggcattaattgacaaaagttcgccacgcgaatcacgaagtgattttttgccacgaacgcacccaacacactccaatatgtccaaaaatcatgttttggtgctttttgaactttttcattccggtgaaaaacatcgcacccacctatggcaatattggcagtgattgacaaaagttcgccgcgcgaatcacgaagtgatttttttccacgaatgcaccaaccacactccaatatgtccaaaaatcatgttttggtgctttttgaactttttcattccggtgaaaagcatcgccaacacgtgtgccaatatatggcaatattggcattaattgacaaaagttccccgcgcgaatcacgaagtgactttttgccacgaatgcacccaacacactccaatatgtccaaaaatcatgttttggtgcttgttgaactttttcattccggtgaaaaacatcgcacccacctatgccaatattggcagtaattgacaa

SEQ ID NO: 48379 - DNA, 2830 bp, Oryza sativa
cagcgcttgaaatgcactatccagattgtacagtagttcatcacagggcagcgccaacttctgacggccgccacgacttcatgcgaactccgatttgggcgtgcaagtacttcatggaaagcttatcaagtctaatttcaaatggatccagccacatgtccatatctgttctggagcggccgcaattgtcattttactcccgactattttctgtccatggtgctgcgtcatctcttttggcccaatgggctgtgtatccatgttgggcccattaggggcgcgtcctatggttggagcacgaccctatggtcgttcttcccctctttttatacctctagtcgccgccaagaacaggcgggttttgatgatagagatagcttcttgctaccggctcgcagcgcgcgtgttggctaaaccgcccgtctgcctgtaatcggaaccccaccatattgtgtttgatagtgaaactttcatctttatctagcaatttcagtgcttgtcctacttgttcttgcttgttcttcgattgcttgcaggacgagtgtcctcgtggccgggttgacgcgcaccacaagttcgcggcgaccattggagacggtgtatcggttgctaaggcgcaacgtctttggacagttgtagtcgggccgtgaacgtcgacttcatctaatcgagttatcccttacctctcatcgaaagatcgggccacaaaccctagcgggttcgcatcatgcacccaacacactccaatatgtccaaaaatcatgttttggtgctttttgaactttttcattccagtctaaaacatcgcacccacctatggcaatattggcattacttcacaaaagttcgccgcgcgaatcacgaagtgattttttgccacgaacgcacccaacacacaccaatatgtccaaaaatcatgttttggtgctttttggactttttcattccgttgaaaaacaacgcacccacgtgtgccaatatatggcaatattgacattaattgacaaaagttcgccgcgcgaatcacgaagtgattttttgccacgaatgcacccaacacactccaatatttccaaaaatcatgttttggtgctttttgaactttttcattccggtgaaaaacatcgcacccacctatgccaatattggtagtaattgacaaaaagtttcgccgcgcgaatcacgaagtgatattttgccacgaatgcacccaacacactccaatatgtccaaaaatcatgttttggtgcttttgaactttttcattccggtggaaaacatcggacccacctatgcaaatattggtagtaatgacaaaagttcgccgcgcgattcacgaagtgatattttgacacgaatgcactgatgaggacatcaacaccatcgatacatccacgtccccccatatacagcatgatggtcctattacccgcgctcgtgcacgtcaactaaattatcaggtgagttctttcttgagttcatattcctcgtctttatacctcgaagacgcgtgcactcgtgttttactcaggaacgatggagaggatccaaagggaagaggattcgcgcggggtggattcggactgcagggcagcgccaacttctgacggccgccacgacttcatgcgaactccgatttgggcgtgcaagtacttcatggaaagcttatcaagtctaatttcaaatggatccagccacatgtccatatctgttctggagcggccgcaattgtcattttactcccgactattttctgtccatggtgctgcgtcatctcttttggcccaatgggctgtgtatccatgttgggcccattaggggcgcgtcctagggttggagcacgaccctatggtcgttcttcccctctttttatacctctagtcgccgccaagaacaggcgggttttgatgatagagatagcttcttgctaccggctcgcagcgcgcgtgttggctaaaccgcccgtctgcctgtaatcggaaccccaccatattgtgtttgatagtgaaactttcatctttatctagcaatttcagtgcttgtcctacttgttcttgcttgttcttcgattgcttgcaggacgagtgtcctcgtggccgggttgacgcgcaccacaagttcgcggcgaccattggagacggtgtatcggttgctaaggcgcagcgtctttggacagttgtagtcgggccgtgaacgtcgacttcatctaatcgagttatcccttacctctcatcgaaagatcgggccacaaaccctagcgggttcgcatcatgcacccaacacactccaatatgtccaaaaatcatgttttggtgttttttgaactttttcattccagtctaaaacatcgcacccacctatggcaatattggcattaattcacaaaagttcgccgcgcgaatcacgaagtgattttttggcacgaacgcacccaacacactccaatatgtccaaaaatcatgttttggtgctttttgaactttttcattccggtgaaaaacatcggacccacgtgtgccaatatatggcaatattgacattaattgacaaaaggttcgcgcgcgaattacgaagtgattttttggcacgaatgcacccaacacacttcaatattgtcaaaaatcatgttttggtgctttttgaaccttttcatttccgtgaaaaacattacacccacctatggcaatattgggaagaattggcacaaggtcagcgcgcgaattacgaaatgatatttttgcccgatgcacccccacaacttcaaatgtccaaaaatatggtttggggcttttgaaccttttcattctgggaaaaacatgcaccacccatg

SEQ ID NO: 48380 - DNA, 9762 bp, Oryza sativa
  unsure (1)..(9762): unsure at all n locations
aatgcaccccaacacacttcaaatatgtccaaaaaatcatgtttgggtgctttttgaacttttcattctggtaaaaacatcgcacccacntatgccaataatggcagtaattgacaaaagttcgccgcgcgaatcacgaagtgattttcattccggtgaaaaacatcgcacccacctatgccaatattggcagtaattgacaaaagttcgccgcgcgaatcacgaagtgattttttttccacgaatgcaccaaccacactccaatatgtccaaaaatcatgttttggtgctttttgaactttttcattccggtgaaaaacatcgcacccacctatggcaatattagcattaattgacaaaagttcgccgcgcgaatcacgaagtgattttttgccacgaatgcacccaacacactccaatatgtccaaaaatcatgttttggtgctttttgaactttttcattccggtgaaaaacatcgcacccacctatggcaatattggcattaattgacaaaagttcgccgcgcgaatcacgaagtgattttttgccacgaacgcacccaacacactccaatatgtcgagaaatcaagttttggtgctttttgaactttttcattccggtgaaaaacatcgcacccacctataccaatattggcagtaattgacaaaagttcgccgcgcgaatcatgaagtgattttttgccacgaacgcacccaacacagtccaatatgtccaaaaatcatgttttggtgctttttgaactttttcattccggtgaaaaacatcgcaccaacgtgtgccaagatatggcaatattggcattaattgacaaaagttcgccgcgcgaatcacgaagtgattttttgccatgaatgcacccaacacactccaatatgtccaaaaatcatgttttggtgctttttgaactttttcattccggtgaaaaacatcgcacccacctatgccaatattggtagtaattgacaaaagttcgccgcgcgaatcacgaagtgatattttgccacgaatgcacccaacacactccaatatgtccaaaaatcatgttttggtgctttttgaactttttcattccagtctaaaacatcgcacccacctatgccaatattggcagtaattgacaaaagttcgctgcgagaatcacgaagcgattttcattccggtgaaaaacatcgcacccacctatgccaatattggcagtaattgacaaaagttcgccgcacgaatcacgaagtgatattttgccacgaatgcacccaacacactccaatatgtccaaaaatcatgttttggtgcttgttgaactttttcattccggtgaaaaacatcgcacccacctatgccaatattggcagtaattgacaaaagttcgccgcgtgaatcacgaagtgattttcattccggtgaaaaacatcgcacccacctatgccaatattggctgtaattgacaaaagttcgccgcgcgaatcacgaagtgatattttgccacgaatgcacccaacacactccaatatgtccaaaaatcatgttttggtgctttttgaacttttttattccggtcaaaaacatcgcaaccacgtgtgccaatattggtagtaattgacaaaagttcagcgcgcgaatcacgaagtgatattttgccacgaatgcacccaacacactccaatatgtccaaaaatcatgttttggtgctttttgaactttttcattccggtctaaaacatcgcacccacctatggcaatattggcattaattgacaaaagttcgccgcgcgaatcacgaagtgattttttgccacgaatgcacccaacacactccaatatgtccaaaaatcatgttttggtgctttttgaactttttcattctggtgaaaaacatcgcacccacctatgccaataatggcagtaattgacaaaagttcgccgcgcgaatcacgaagtgattttcattccggtgaaaaacatcgcacccacctatgccaatattggcagtaattgacaaaagttcgccgcgcgaatcacgaagtgattttttttccacgaatgcaccaaccacactccaatatgtccaaaaatcatgttttggtgctttttgaactttttcattccggtgaaaaacatcgcacccacctatgccaatattggtagtaattgacaaaagttcgccgcgtgaatcacgaagcgatattttgccacgaatgcacccaacacactccaatatgtccaaaaatcatgttttggtgctttttcaactttttcattccagtctaaaacatcgcacccacctatggcaatattggcattacttcacaaaagttcgccgcgcgaatcacgaagtgagtttttgccacgaacgcacccaacacacaccaatatgtccaaaaatcatgttttggtgctttttggactttttcattccgttgaaaaacaacgcacccacgtgtgccaatatatggcaatattgacattaattgacaaaagttcgccgcgcgaatcacgaagtgattttttgccacgaatgcacccaacacactccaatatttccaaaaatcatgttttggtgctttttgaactttttcattccggtgaaaaacatcgcacccacctatgccaatattggtagtaattgacaaaagttcgccgcgcgaatcacgaagtgatattttgccacgaatgcacccaacacactccaatatgtccaaaaatcatgttttggtgctttttgaactttttcattccggtgaaaaacatcgcaaccacctatgccaatattggtagtaattgacaaaagttcgccgcgcgaatcacgaagtgatattttgacacgaatgcactgatgaggacatcaacaccatcgatacatccacgtccccccatatacagcatgatggtcctattacccgcgctcgtgcacgtcaactaaattatcaggtgagttctttcttgagttcatattcctcgtctttatacctcggagacgcgtgcactcgtgttttactcaggaacgatggagaggatccaaagggaagaggattcgcgcggggtggattcggactgcagggcagcgccaacttctgacggccgccacgacttcatgcgaactccgatttgggcgtgcaagtacttcatggaaagcttatcaagtctaatttcaaatggatccagccacatgtccatatctgttctggagcggccgcaattgtcattttactcccgactattttctgtccatggtgctgcgtcatctcttttggcccaatgggctgtgtatccatgttgggcccattaggggcgcgtcctagggttggagcacgaccctatggtcgttcttcccctctttttatacctctagtcgccgccaagaacaggcgggttttgatgatagagatagcttcttgctaccggctcgcagcgcgcgtgttggctaaaccgcccgtctgcctgtaatcggaaccccaccatattgtgtttgatagtgaaactttcatctttatctagcaatttcagtgcttgtcctacttgttcttgcttgttcttcgattgcttgcaggacgagtgtcctcgtggccgggttgacgcgcaccacaagttcgcggcgaccattggagacggtgtatcggttgctaaggcgcagcgtctttggacagttgtagtcgggccgtgaacgtcgacttcatctaatcgagttatcccttacctctcatcgaaagatcgggccacaaaccctagcgggttcgcatcatgcacccaacacactccaatatgtccaaaaatcatgttttggtgttttttgaactttttcattccagtctaaaacatcgcacccacctatggcaatattggcattaattcacaaaagttcgccgcgcgaatcacgaagtgattttttgccacgaacgcacccaacacactccaatatgtccaaaaatcatgttttggtgctttttgaactttttcattccgttgaaaaacatcgcacccacgtgtgccaatatatggcaatattgacattaattgacaaaagttcgccgcgcgaatcacgaagtgattttttgccacgaatgcacccaacacactccaatatgtccaaaaatcatgttttggtgctttttgaactttttcattccggtgaaaaacatcacacccacctatgccaatattggtagtaattgacaaaagttcagcgcgcgaatcacgaagtgatattttgccacgaatgcacccaacacactccaatatgtccaaaaatcatgttttggtgctttttgaactttttcattctggtgaaaaacatcgcacccacctatgccaataatggcagtaattgacaaaagttcgccgcgcgaatcacgaagtgattttcattccggtgaaaaacatcgcacccacctatgccaatattggcagtaattgacaaaagttcgccgcgcgaatcacgaagtgattttttttccacgaatgcaccaaccacactccaatatgtccaaaaatcatgttttggtgctttttgaactttttcattccggtgaaaaacatcgcacccacctatggcaatattagcattaattgacaaaagttcgccgcgcgaatcacgaagtgattttttgccacgaatgcacccaacacactccaatatgtccaaaaatcatgttttggtgctttttgaactttttcattccggtgaaaaacatcgcacccacctatggcaatattggcattaattgacaaaagttcgccgcgcgaatcacgaagtgattttttgccacgaacgcacccaacacactccaatatgtcgagaaatcaagttttggtgctttttgaactttttcattccggtgaaaaacatcgcacccacctataccaatattggcagtaattgacaaaagttcgccgcgcgaatcatgaagtgattttttgccacgaacgcacccaacacagtccaatatgtccaaaaatcatgttttggtgctttttgaactttttcattccggtgaaaaacatcgcacccacgtgtgccaagatatggcaatattggcattaattgacaaaagttcgccgcgcgaatcacgaagtgattttttgccatgaatgcacccaacacactccaatatgtccaaaaatcatgttttggtgctttttgaactttttcattccggtgaaaaacatcgcacccacctatgccaatattggtagtaattgacaaaagttcgccgcgcgaatcacgaagtgatattttgccacgaatgcacccaacacactccaatatgtccaaaaatcatgttttggtgctttttgaactttttcattccagtctaaaacatcgcacccacctatgccaatattggcagtaattgacaaaagttcgctgcgagaatcacgaagcgattttcattccggtgaaaaacatcgcacccacctatgccaatattggcagtaattgacaaaagttcgccgcacgaatcacgaagtgatattttgccacgaatgcacccaacacactccaatatgtccaaaaatcatgttttggtgcttgttgaactttttcattccggtgaaaaacatcgcacccacctatgccaatattggcagtaattgacaaaagttcgccgcgtgaatcacgaagtgattttcattccggtgaaaaacatcgcacccacctatgccaatattggctgtaattgacaaaagttcgccgcgcgaatcacgaagtgatattttgccacgaatgcacccaacacactccaatatgtccaaaaatcatgttttggtgctttttgaacttttttattccggtcaaaaacatcgcaaccacgtgtgccaatattggtagtaattgacaaaagttcagcgcgcgaatcacgaagtgatattttgccacgaatgcacccaacacactccaatatgtccaaaaatcatgttttggtgctttttgaactttttcattccggtgaaaaacatcgcacccacctatgccaatattggctgtaattgacaaaagttcgccgcgcgaatcacgaagtgatattttgccacgaatgcacccaacacactccaatatgtccaaaaatcatgttttggtgctttttgaacttttttattccggtcaaaaacatcgcaaccacgtgtgccaatattggtagtaattgacaaaagttcagcgcgcgaatcacgaagtgatattttgccacgaatgcacccaacacactccaatatgtccaaaaatcatgttttggtgctttttgaactttttcattccggtgaaaaacatcgcacccacctatgccaatattggctgtaattgacaaaagttcgccgcgcgaatcacgaagtgatattttgccacgaatgcacccaacacactccaatatgtccaaaaatcatgttttggtgctttttgaactttttcattccggtctaaaacatcgcacccacctatggcaatattggcattaattgacaaaagttcgccgcgcgaatcacgaagtgattttttgccacgaatgcacccaacacactccaatatgtccaaaaatcatgttttggtgctttttgaactttttcattctggtgaaaaacatcgcacccacctatgccaataatggcagtaattgacaaaagttcgccgcgcgaatcacgaagtgattttcattccggtgaaaaacatcgcacccacctatgccaatattggcagtaattgacaaaagttcgccgcgcgaatcacgaagtgatatttttccacgaatgcacccaacacactccaatatgtccaaaaatcatgttttggtgctttttgaacttttttattccggtcaaaaacatcgcaaccacgtgtgccaatattggtagtaattgacaaaagttcagcgcgcgaatcacgaagtgatattttgccacgaatgcacccaacacactccaatatgtccaaaaatcatgttttggtgctttttgaactttttcattccggtgaaaaacatcgcacccacctatgccaatattggctgtaattgacaaaagttcgccgcgcgaatcacgaagtgatattttgccacgaatgcacccaacacactccaatatgtccaaaaatcatgttttggtgctttttgaacttttttattccggtcaaaaacatcgcaaccacgtgtgccaatattggtagtaattgacaaaagttcagcgcgcgaatcacgaagtgatattttgccacgaatgcacccaacacactccaatatgtccaaaaatcatgttttggtgctttttgaactttttcattccggtgaaaaacatcgcacccacctatgccaatattggctgtaattgacaaaagttcgccgcgcgaatcacgaagtgatattttgccacgaatgcacccaacacactccaatatgtccaaaaatcatgttttggtgctttttgaactttttcattccggtctaaaacatcgcacccacctatggcaatattggcattaattgacaaaagttcgccgcgcgaatcacgaagtgattttttgccacgaatgcacccaacacactccaatatgtccaaaaatcatgttttggtgctttttgaactttttcattctggtgaaaaacatcgcacccacctatgccaataatggcagtaattgacaaaagttcgccgcgcgaatcacgaagtgattttcattccggtgaaaaacatcgcacccacctatgccaatattggcagtaattgacaaaagttcgccgcgcgaatcacgaagtgattttttttccacgaatgcaccaaccacactccaatatgtccaaaaatcatgttttggtgctttttgaactttttcattccggtgaaaaacatcgcacccacctatgccaatattggtagtaattgacaaaagttcgccgcgtgaatcacgaagcgatattttgccacgaatgcacccaacacactccaatatgtccaaaaatcatgttttggtgctttttcaactttttcattccagtctaaaacatcgcacccacctatggcaatattggcattacttcacaaaagttcgccgcgcgaatcacgaagtgagtttttgccacgaacgcacccaacacacaccaatatgtccaaaaatcatgttttggtgctttttggactttttcattccgttgaaaaacaacgcacccacgtgtgccaatatatggcaatattgacattaattgacaaaagttcgccgcgcgaatcacgaagtgattttttgccacgaatgcacccaacacactccaatatttccaaaaatcatgttttggtgctttttgaactttttcattccggtgaaaaacatcgcacccacctatgccaatattggtagtaattgacaaaagttcgccgcgcgaatcacgaagtgatattttgccacgaatgcacccaacacactccaatatgtccaaaaatcatgttttggtgctttttgaactttttcattccggtgaaaaacatcgcaaccacctatgccaatattggtagtaattgacaaaagttcgccgcgcgaatcacgaagtgatattttgacacgaatgcactgatgaggacatcaacaccatcgatacatccacgtccccccatatacagcatgatggtcctattacccgcgctcgtgcacgtcaactaaattatcaggtgagttctttcttgagttcatattcctcgtctttatacctcggagacgcgtgcactcgtgttttactcaggaacgatggagaggatccaaagggaagaggattcgcgcggggtggattcggactgcagggcagcgccaacttctgacggccgccacgacttcatgcgaactccgatttgggcgtgcaagtacttcatggaaagcttatcaagtctaatttcaaatggatccagccacatgtccatatctgttctggagcggccgcaattgtcattttactcccgactattttctgtccatggtgctgcgtcatctcttttggcccaatgggctgtgtatccatgttgggcccattaggggcgcgtcctagggttggagcacgaccctatggtcgttcttcccctctttttatacctctagtcgccgccaagaacaggcgggttttgatgatagagatagcttcttgctaccggctcgcagcgcgcgtgttggctaaaccgcccgtctgcctgtaatcggaaccccaccatattgtgtttgatagtgaaactttcatctttatctagcaatttcagtgcttgtcctacttgttcttgcttgttcttcgattgcttgcaggacgagtgtcctcgtggccgggttgacgcgcaccacaagttcgcggcgaccattggagacggtgtatcggttgctaaggcgcagcgtctttggacagttgtagtcgggccgtgaacgtcgacttcatctaatcgagttatcccttacctctcatcgaaagatcgggccacaaaccctagcgggttcgcatcatgcacccaacacactccaatatgtccaaaaatcatgttttggtgttttttgaactttttcattccagtctaaaacatcgcacccacctatggcaatattggcattaattcacaaaagttcgccgcgcgaatcacgaagtgattttttgccacgaacgcacccaacacactccaatatgtccaaaaatcatgttttggtgctttttgaactttttcattccgttgaaaaacatcgcacccacgtgtgccaatatatggcaatattgacattaattgacaaaagttc

SEQ ID NO: 48381 - DNA, 879 bp, Oryza sativa
  unsure (1)..(879): unsure at all n locations
acacacactatatgccanaatcagtttgggccttttaacttttcatccggtaaaacatcgcaccctctatgcaatatagcattattgacaaaagttcccgcgcaaatcaggagtgattttttcctcgaatgccccaacacactccatatgtccaaaatcatgtttggtgctttttgaactttttcattcgggtgaaaaacatcgcacccacctatggcaatatgggcattaattgacaaaagttcgccgcgcaattcacgaagtgattttttgcaacgaacgcacccaacacactccaatatgtcgagaaatcaagttttggtgctttttgaactttttcattcgggtgaaaaacatcgcacccacttataccaatattggcagtaattgacaaaagttcgccgcgcgaatcataaagtgattttttgccacgaacgcacccaactcagtccaatatgtccaaaaatcatgttttggtgctttttgaactttttcattccggtgaaaaacatcgcacccacgtgtgccaagatatggcaatattggcattaattgacaaaagttcgccgcgcgaatcacaaagtgattttttgccatgaatgcacccaacacactccaatatgtccaaaaatcatgttttggtgctttttgaactttttcattccggtgaaaaacatcgcacccacctatgccaatattggtagtaattgacaaaagttcgccgcgcgaatcacgaagtgatattttgccacgaatgcacccaacacactccaatatgtccaaaaatcatgttttggtgctttttgaactttttcattccagtctaaaacatcgcacccacctatgtgttgcgttaccatcagacggtcatcaagggcg

SEQ ID NO: 48382 - DNA, 1574 bp, Oryza sativa
  unsure (1)..(1574): unsure at all n locations
cgacaaataatatttaagttattcgccagaagaccttttttgatttaacgccaatagtgcataaggggggtgcgatgtttttgcctgaattcaaaagttcaaaacacacttaaaccatgtttttagcattatttaaagttttttgggtgcataattcgtaacccgctagggtttgtggcccgttcttcattgaaaaggtaaggtataactcgattaaatgaagtcgacgttcgcgggccagtctacaaactgtccaaaaacgttgtcgccttaccaatctatacaccgtttccaatggtcacctcgaacttgtggtgcgcgtcataccgcccacgagaacactcgtcttccaagcaatcgaagatcaagcaagtccaagtaggacaagccctgaaattgctagataaagatgagaggtttcactatcggacacaatatggtggggttccgattacaggcatacgggcggtttagccaacacgcgcgctgcaagccggtagcaagaagctatctctatcatcaaaacccgcctgttcttggcggcgactagaggtataaaaagaggggaagaacgaccatagggtcgtgctccaaccttagaacgcgcccctaatgggcccaacatggatacacagcccattgggccaaaagagatgacgcagcaccatggacagaaaatagtcgggagtaaaatgacaattgcggccgctccagaacagatatggacatgtggctggatccatttgaaattagacttgataagctttccatgaagtacttgcacgcccaaatcggagttcgcatgaagtcgtggcggccgtcagaagttggcgctgccctgcagtccgaatccaccccgcgcgaatcctcttccctttggatcctctccatcgttcctgagtaaaacacgagtgcacgcgtctccgaggtataaagacgaggaatatgaactcaagaaagaactcacctgataatttagttgacgtgcacgagcgcgggtaataggaccatcatgctgtatatggggggacgtggatgtatcgatggtgttgatgtcctcatcagtgcattcgtgtcaaaatatcacttcgtgattcgcgcggcgaacttttgtcaattactaccaatattggcataggtggttgcgatgtttttcaccggaatgaaaaagttcaaaaagcaccaaaacatgatttttggacatattggagtgtgttgggtgcattcgtggcaaaatatcacttcttgattcgcgcggcgaacttttgtcaattactaccaatattggcataggtgggtgcgatgttnttcaccggaatgaaaaaattcaaaaagcaccagaacatgatttttggaaatattggagtgtgttgggtgcattccgtgcgaaaaatcactttcttgattcgcgcggcgaccttttgtcaattaatggcaatattgccatatatttgcacacgtgggtgcgttgtttttcaacggaatgaaaaaatccagaaagccccaaaacatgatatttggacatattggtgtgggtaggtgccttcttgcaaaaactcactctcggatcgccg

SEQ ID NO: 48383 - DNA, 769 bp, Oryza sativa
  unsure (1)..(769): unsure at all n locations
cgggcccttgaaattttgatgacagttgcacatcatctngaactttttcattccggtgaaaaacatcgcacccacctatgccaatattggtagtaattgacaaaagttttccgcttgattcacgaagcgatattttgccacgaatgcacccaacacactccaatatgtccaaaaatcatgttttggtgctttttcaactttttcattccagtctaaaacatcgcacccacctatggcaatattggcattacttcacaaaagttcgccgcgcgaatcacgaagtgagtttttgccacgaacgcacccaacacacaccaatatgtccaaaaatcatgttttggtgctttttggactttttcattccgttgaaaaacaacgcacccacgtgtgccaatatatggcaatattgacattaattgacaaaagttcgccgcgcgaatcacgaagtaattttttgccacgaacgcacccaacacactccaatatgtccaaaaatcatgttttggtgctttttgaactttttcattccggtgaaaaacatcgcacccacctatggcaatattggcagtaattgacaaaagtttgccgcgcgaatcacgaagtgattttttgccacgaacgcacccaacacacttcaatttgtccagaaattatggtttggtgctttttgaactttttcatttccggtgaaaagcatcgcacacacgtgtgccaatatattgcaatattggcattaattgacaaagttccccacgcgaatcaccaagtg

SEQ ID NO: 48384 - DNA, 1033 bp, Oryza sativa
cgccccttgaatttgatgtcacctgcacagactcatactgccatattggcataggtgggtgcgatgtttttcaccggaatgaaaaagttcaaaaagcaccaaaacatgatttctggacatatcggagtgtgttgggtgcgttcgtggcaaaaaatcacttcgtgattcgcgtggcgaacttttgtcaattaatgccaatattgccatatattggcacacgtgtgtgcgatgcttttcaccggaatgaaaaagttcaaaaagcaccaaaacatgatttctggacatattggagtgtgttgggtgcgttcgtggcaaaaaatcacttcgtgattcgcgcggcaaacttttgtcaattactgccaatattgccataggtgggtgcgatgtttttcaccggaatgaaaaagttcaaaaagcaccaaaacatgatttttggacatattggagtgtgttgggtgcgttcgtggcaaaaaattacttcgtgattcgcgcggcgaacttttgtcaattaatgccaatattgccatatattcacacgtgggtgcgatgtttttcaccggaatgaaaaagttcaaaaagcaccaaaacatgatttttggacatattggagtgtgttgggtgcgttcgtggcaaaaaattacttcgtgattcgcgcggcgaacttttgtcaattaatgccaatattgccatatattggcacacgtgggtgcgatgttttagaccggaatgaaaaagttcaaaaagcaccaaaacatgatttttggacatattggagtgtgttgggtgcattcgtggcaaaatatcacttcgtgattcacgcggcaaacttttggcaattactgccaatattggcatatgtgggtgcgatgtttttcaccggaatggaaaagttcaacaagcaccaaaacatgaattttggacatattgcagtgtgttgggagcattcgtggcaaaaaagcacttcgtgaattgcgcggggacctttgtcaaataatgccaatattgccatatattggaacacgtggtggcgatt

SEQ ID NO: 48385 - DNA, 1133 bp, Oryza sativa
  unsure (1)..(1133): unsure at all n locations
atcaagtctaatttcaaatggatccagccacatgtccatatctgttctggagcggccgcaattgtcattttactcccgactattttctgtccatggtgctgcgtcatctcttttggcccaatgggctgtgtatccatgttgggcccattaggggcgcgtcctagggttggagcacgaccctatggtcgttcttcccctctttttatacctctagtcgccgccaagaacaggcgggttttgatgatagagatagcttcttgctaccggctcgcagcgcgcgtgttggctaaaccgcccgtctgcctgtaatcggaaccccaccatattgtgtttgatagtgaaactttcatctttatctagcaatttcagtgcttgtcctacttgttcttgcttgttcttcgattgcttgcaggacgagtgtcctcgtggccgggttgacgcgcaccacaagttcgcggcgaccattggagacggtgtatcggttgctaaggcgcagcgtctttggacagttgtagtcgggccgtgaacgtcgacttcatctaatcgagttatcccttacctctcatcgaaagatcgggccacaaaccctagcgggttcgcatcatgcacccaacacactccaatatgtccaaaaatcatgttttggtgttttttgaactttttcattccagtctaaaacatcgcacccacctattggcaatattggcaataattacaaaaagttcgccgcgcgaatcacgaagtgattttttaccacgaatgcaccaaccacactccaatatgtccaaaaatcatgttttggtgcttttcaaactttttcattccggtgaaaaacatcgcacccacgtgtgccaatatatggcagtattggcattaattgacaaaagttcgccgcgcgaatcacggagtgattttttaccacgaatgcacccaacacactccaatatgttcaaaaatcatgttttggtgctttttgaactttttcattccggtgaaaaacatcgcacccacctataccaataatggcagtaatagacaaaagttcgccgcgcgaatcacgaagtgatattttgccacgaacgcacccaacacactcctgatgnggtactgcgatagtcagcnctcatggatca

SEQ ID NO: 48386 - DNA, 1655 bp, Oryza sativa
  unsure (1)..(1655): unsure at all n locations
aaaaaatccatttcgtgattcgcgcggcggaactttggtcaattaatgtcaatattgccatatattggcacacgtggggcgatgtttttcaccgaataaaaagttcaaaaagccccaaacatatttttgacatattgaagtgtgttgggtgcgttcgtggcaaaaatcacttcgtgattcgcgcgacgaacttttgtaaattaatgccaatattgccataggtgggtgcgatgttttagactggaatgaaaaagttcaaaaaacaccaaaacatgatttttgaacatattggagtgtgttgggtgcatgatgcgaacccgctagggtttgtggcccgatctttcgatgagaggtaagggataactcgattagatgaagtcgacgttcacggcccgactacaactgtccaaagacgctgcgccttagcaaccgatacaccgtctccaatggtcgccgcgaacttgtggtgcgcgtcacccgggccacgaggacactcgtcctgcaagcaatcgaagaacaagcaagaacaagtaggtcaagcactgaaattgctagataaagatgaaagtttcactatcaaacacaatatggtggggttccgattacaggcagacgggcggtttagccaacacgcgcgctgcgagccggtagcaagaagctatctctatcatcaaaacccgcctgttcttggcggcgactagaggtataaaaagaggggaagaacgaccatagggtcgtgctccaaccctaggacgcgcccctaatgggcccaacatggatacacagcccattgggccaaaagagatgacgcagcaccatggacagaaaatagtcgggagtaaaatgacaattgcggccgctccagaacagatatggacatgtggctggatccatttgaaattagacttgataagctttccatgaagtacttgcacgcccaaatcggagttcgcatgaagtcgtggcggccgtcagaagttggcgctgccctgcagtccgaatccaccccgcgcgaatcctcttccctttggatcctctccatcgttcctgagtaaaacacgagtgcacgcgtctccgaggtataaagacgaggaatatgaactcaagaaagaactcacctgataatttagttgacgtgcacgagcgcgggtaataggaccatcatgctgtatatggggggacgtggatgtatcgatggtgttgatgtcctcatcagtgcattcgtgtcaaaatatcacttcgtgattcgcgcggcgaacttttgtcaattactaccaatattggcataggtggttgcgatgtttttcaccggaatgaaaaagttcaaaaagcaccaaaacatgatttttggacatattggagtgtgttgggtgcattcgtggcaaaatatcacttcgtgattcgcgcggcgaacttttgtcaattactaccaatattggcataggtgggtgcgatgtttttcaccggaatgaaaaagttcaaaaagcaccaaaacatgatttttggaaatattggagtgtgttgggtgcattagtagcaaaaaatcacttcgtgattcgcgcggcgaacttttgtcaattaatgtcaatattgccatatattggcacacgttgatgngctgctttcaaagaagcgngtcatgcaattcaaggcat

SEQ ID NO: 48387 - DNA, 918 bp, Oryza sativa
ttggattcctcaggcttttgtcaattcctgccatttttgccctgggtgggtgcgttttttttcaccggattggaagggttcaccacgccccgaaccttgttttttggcctctttggggtgtgttgggtgcattcgcggcaaaaagtcacttcgtgattcgcgcggggaacttttgtcaattaatgccaatattgccatatattggcacacgtgttggcgatgcttttcaccggaatgaaaaagttcaaaaagcaccaaaacatgatttttggacatattggagtgtggttggtgcattcgtggaaaaaaatcacttcgtgattcgcgcggcgaacttttgtcaatcactgccaatattgccataggtgggtgcgatgtttttcaccggaatgaaaaagttcaaaaagcaccaaaacatgatttttggacatattggagtgtgttgggtgcgttcgtggcaaaaaattacttcgtgattcgcgcggcgaacttttgtcaattaatgccaatattgccatatattggcacacgtgggtgcgatgtttttcaccggaatgaaaaagttcgaaaagcaccaaaacatgatttttggacatattggagtgtggttggtgcattcgtggtaaaaaatcactgcgtgattcgcgcggcgaacttttgtcaattactgccaatattggcataggtgggtgccatgtttttcaccggaatgaaaaagttcaaaaagcaccaaaacatgatttctggacatattggagtgtgttgggtgcgttcgtggcaaaatatcacttcgtgattcgcgcggcgaacttttgtctattactgccaatattggcataggtgggtgcgatgtttttcacccgaattgaaaagttcaaaagcccaaaacatgatttttgaacatattggagtgggtgg

SEQ ID NO: 48388 - DNA, 1269 bp, Oryza sativa
ttgggtgcgttcgtggcaaaaaatcacttcgtgattcgcgcggcgaacttttgtgaattaatgccaatattgccataggtgggtgcgatgttttagactggaatgaaaaagttcaaaaagcaccaaaccatgatttttgaacatattggagtgtgttgggtgcattcgtggcaaaatatcacttcgtgattcgcgcggcaaacttttgtcaattactgccaatattggcataggtgggtgcgatgtttttcaccggaatgaaaaagttcaaaaagcaccaaaacatgatttttgaacatattggagtgtgttgggtgcattcgtggtaaaaaatcacttcgtgattcgcgcggcgaacttttgtcaattattgccaatattgccatatattggcacacgtgggtgcgatgtttttcaccggaatgaaaaagttctaaaagcaccaaaacatgatttttggacgtattggagtgtgttgggtgcgttcgtggcaaaaaatcacttcgtgattcgcgcggcgaacttttttgaattaatgccaatattgccataggtgggtgcgatgttttagaccggaatgaaaaagttcaaaaagcaccaaaacatgatttttggacatattggagtgtggttggtgcattcgtggaaaaaaatcacttcgtgattcgcgcggcgaacttttgtcaatcactgccaatattgccataggtgggtgcgatgtttttcaccggaatgaaaaagttcaaaaagcaccaaaacatgatttttggacatattggagtgtgttgggtgcgttcgtggcaaaaaattacttcgtgattcgcgcggcgaacttttgtcaattaatgccaatattgccatatattggcacacgtgggtgcgatgtttttcaccggaatgaaaaagttcgaaaagcaccaaaacatgatttttggacatattggagtgtggttggtgcattcgtggtaaaaaatcactgcgtgattcgcgcggcgaacttttgtcaattactgccaatattggcataggtgggtgccatgtttttcaccggaatgaaaaagttcaaaaagcaccaaaacatgatttctggacatattggagtgtgttgggtgcgttcgtggcaaaatatcacttcgtgattcgcgcggcgaacttttgtctattactgccaatattggcataggtgggtgcgatgtttttaccggaatgaaaaaagtcaaaaagccccaaacatgatttttgaaccttttggagtgtgttgggggcatt

SEQ ID NO: 48389 - DNA, 624 bp, Oryza sativa
  unsure (1)..(624): unsure at all n locations
taccaatattggcataggtggttgcgatgtttttcaccggaatgaaaaagttcaaaaagcaccaaaacatgatttttggacatattggagtgtgttgggtgcattcgtggcaaaatatcacttcgtgattcgcgcggcgaacttttgtcaattactaccaatattggcataggtgggtgcgatgtttttcaccggaatgaaaaagttcaaaaagcaccaaaacatgatttttggaaatattggagtgtgttgggtgcattcgtggcaaaaaatcacttcgtgattcgcgcggcgaacttttgtcaattaatgtcaatattgccatatattggcacacgtgggtgcgttgtttttcaacggaatgaaaaagtccaaaaagcaccaaaacatgatttttggacatattggtgtgtgtttgggtggccgttttcccggtgtgggggccaaaaaaaaaaaaaaacccctttttctaaaacccctttttttttttctccggggtgggggggaaaatatttttttttttttttggngnnccccggggggccccccccggggggggggntctcttgtaaaaaaaaaaaaaaattttggaagaatgccaatattgccataggtgggtgcgaa

SEQ ID NO: 48390 - DNA, 571 bp, Oryza sativa
  unsure (1)..(571): unsure at all n locations
cgcggggtgatgaactnctcgtagtagttcatcaaatgcacccaacacactccaatatgtccaaaaatcatgttttggtgctttttgaactttttcattccggtgaaaaacatcacacccacctatgccaatattggtagtaattgacaaaagttcagcgcgcgaatcacgaagtgatattttgccacgaatgcacccaacacactccaatatgtccaaaaatcatgttttggtgctttttgaactttttcattctggtgaaaaacatcgcacccacctatgccaataatggcagtaattgacaaaagttcgccgcgcgaatcacgaagtgattttcattccggtgaaaaacatcgcacccacctatgccaatattggcagtaattgacaaaagttcgccgcgcgaatcacgaagtgattttttttccacgaatgcaccaaccacactccaatatgtccaaaaatcatgttttggtgctttttgaactttttcattccggtgaaaaacatcgcacccacctatggcaatattagcattaattgacaaaagttcgccgcgcgaatcacgaag

SEQ ID NO: 48391 - DNA, 774 bp, Oryza sativa
ccgatatttagctcgtaatagaaatttctaacctattatatggatataatgctcgggaagagtaaattaaaaacttatgacaacaaaataattatacccgcaaaatagtttaaatcgaaattgggtttgccgtagttcgcagatagtaaagttaataaaaaggaatcgactttcgcatttgactttcatttggatttatttggatttttatttgaattctaaccgaattcaaatcaatttttgcacgtaaccatagagcccgagggagttgcggatccaagcgaaggccaagacccgcaagactttgagcaaggcaagtcatcactattccttgaacatgttgatcccaattgcaaaattgttttgtttacaaataaaattgcatgcaatgatgaacatcctacttgtgattatgccatgccttgattattgtttacccttaaaatccttgtaaccataattacgtatgagtccctagtcaattatgacaattgcttagaaatgccattctagaatcatgcatactcatatttatcaaatgctatatgcttggtcaattacctttgggaaggtaattgagatgcggcatgtggagacatgagcgccacattgccatgatgttgatgacatgatttgtgaaaggagaaataaaattaaacaattgttttcgactggggcggacggaggatttggtggtatctgggaaaggctagtaccgtcccccgtcaattaaagaccgagccatgaagttagcatgaaacgacccccgtacaa

SEQ ID NO: 48392 - DNA, 5170 bp, Oryza sativa
  unsure (1)..(5170): unsure at all n locations
ggaaaaaatccgaattactcccgaactatcacagtcaaccgaattacccctaacttaaataccaaacattttacagtcaactattcgagccagacaaataaccatttgactccatccattcttattttggtcctacgaggcagcaagtagtcaacaacttttttaaaaaagaatcggtgggaccaacctatcagattccctcccctctcacctctctctatcttagcttcctcattccccaccttctctctccctcttctcccctagctcaagagtgcggtggtggctggcccgtcaagctcgccggttgtgcctccatctcgttagcacaataagcatactgccattgtgacactctcccacacgagctcgcccgatgcctgacggtggagcttgcgcagaggtggagcccaacctcgcgtgtaggcggcgacaagactggcgatgtctcaagctttcttgctctcaaggaggctggtgagcttggctcctcctcggccttcgatgtgatgaaactcgcagtcaccgcagctcctcctcgatcttcgcgggcacgcggctcctcctcagcctctgttggcgttcacgtgttgaggctctagtaatatagaacatcaccaatgggacaaattataggtgccgaaaattgtaaaatcaacatctatagacattttcccacctccacaggatggaaaaatataaaccaatacctttaaccaactatgtataccagttccagagaaaactggaccaatactttatgtgcttattttgtaaaaataccaacaactttaatatattataggtgtcggttaaaccagaatatataatatattttaggtgccggtctgttaaaaatccagcacccttaaaattcgagtcacgccaatggttgggagcgagctaaaccagctcctttcgcatccttatcctctcacgcccctcgcttccttgtcctctcatgcccgcgcacctcgtctcatcgctctctcaccgctcattctctcgtcgcctcctccccttgccctccccttccccctcttggtatttgttacgcacacagataaattcacaagagtattccaagcgtatcgaacagaaggaacgtgtgtatctcagaacaggatttaaccaaggacaacaactaaatgataggcttaggacagagaatattcctatggatttaaccaaggtaaaactctatcgaatgctttgggcaccggcccttccctagtctactgacaggctgagttcggccttgaactctattatgactgtcaccacctgctgcctacctcactttctgtgaagcacacaataaatgaagctaacctctaccctaaacactacgtctaagctaagcaaagaagcaaccttttcgtttggtttttgtttaagtcataagtcactcatacactattaatccaaaggctaggttggagaagtttttttatcttatgtgcggtacatgtataaccacaccattaaacttaatactttatatccattggcttataagttatataaaccaaaaaaactgacttaaaaaccgaagccaataataagtctaagcctaaacaaagagactcttaaaaaaaaccaagttaatatggattacctttttttatttattagtgatttcataatgactttatcacttttttgactaactatacttcaccacccagctgccacattatcaaaacttgactggtgtagtctaaagataaagtacggatcatgttgagagtttgcaaagtattactaaatgatttcacaagtgaatttcaaaccaagatcacgtagtttcattacaacggaacccctcatatatgatgggcggtaacccacatctgtaacgggtatatgtcccatctattctcatttgtcagtgacaaagaaaaccttatctatgatggattccataagtcatctatacgtataagttatgtaccgtcactactagtcatgattttttttaattttaaagacaccaaaaatccctaaaagaattttaaattttactaggtatctagtcgtggtcacgcatcactaaccataaatctacgatctttcccgattgagctttgagcctacttggtgtaattccaaaacttcctcttgtataaaagatatcaatacaaactatcggtagtcaaaactaaattggtgccttttgtcttgaatgaagcctgcagcttctctcatgaattcatggttttaaaacgttgaaattaaaaaaagctagctactacatgtctacatctactaggaacagtagtattattactagcagacagataatagctttattgaaaagcattgataaggtcttgagacttgagtaggtcaagcacgatgacaagtatatattgacccataaaaatatctttctacatgcaatgcatcctgtgctaatcaaaccctaccaagctattcgagctcgagctcactaggtttgcgaacctcaacctatgcttaagtttggcttgtctgtagcattcgagtcgtgctcaaattaagctgtaacaaatcaaactcaaacagattgacagccctatctgtagctaccacacttgttagaaatgtcctgtcatctttgatgacgggtcacaactaacacccattatagatggattcacttctaatcttctatgactggtatccacatatgcatatatcaaacgtacgggctacttttagatccgtccgttagatattagccatttgaaatcggtaatattgatccatcacaaatgacctgctgtgcgttcacgaatatgtgagtgtttaggaacaaatatggaatttttgtcccgatatgtacttaatttagtctttcacctttgatacatattgataatcaggggtgctattcccttttatttaggataaacaaattagagcacagttgataattggaaatatgaatgaaacattgatcggtattttctttgtcacaattcagcgacaactttattttattatttataacaattggtagcaatatgtgaactatatttagaaaagagcacctgttgtaataaaaaagctaataagcgcgcttctcggatgaatacttcttcggattttacattaaagagcacatgagctgtggttttcaattctcattggatcatcctatatccaggtttctataggctattgtgtgggtgatgctataacgtgaaaaacaatacgggaattcctgatcatagcgcgcggtttccgattttcaatctgaagtttcaattcctatagcgtacgtttctaattgtcccgtactgtttccactagaaattcatcccaatacactataaaaacgattatttttttacaagaagccctttagattgcaaagagaccgtacgtaactggcggcatctgcaaaaactgatcttcattttcgcatatacttcttccgtttcatattataattaaggctttctagcattgtccgtacaaataaatatattaatgaatctagacgtatatatgtgtttagattcattaacatctatatgaatgtaggcaatattacaaattcttataatatgaaatgaagggagtagctctttataagacctgcatgccaaaatcaattttctctttgcatgcgggtctattaaggagcctcatgcaaaaataagcctattttctcatgcggtcctcttaagaggacatatgcgaaaaggggacctcttaagtgatccgcatgaaaaatatcatccctttacatattttttttatctccctccactctcttttccctctcatcatttatttattttttgaactcctctgctctactctcctaattatttactttcctctctctcgaatgctctctctcttctctctctctatccgagtaggagccaacggccgataggggtaggagtaggtgcggctactatgacagcgggcaccagaagtggctgcggagacgcgccgttgccgggcggtagcgggagatttggcaacgtcaccctcggaagggccggatctgctgccctaggtagcagctcggtgcgaggcggcgagggtttggcgctcggcggcagncggcgcgcgtggatccgacgatgacagtgggcaaccggaagcaggcgcccgaaagcggcgagcagcatcgacaaggcggctgggagtggggccaccccacatggattcggcaacagcgtcaggtgccggcaaccaggagctggcggcagcggctcgtcccctcgcggatctggcaccgacgacgacggcggcgaccgggaacgggcggcgacggcccgttctcggccgcgtggatctagcaccgggggtctttctcgtgtggatctagtgctggtgacacaacagagggaggtgggaccatcggatccgatggcactaacgacgatggcggcgggcggcggatccgaatgacgatggtggcgggcctaggttcacccggtttctatttttatttttattttttctcgccgaatttatttttgtatgcagccggtataggaaaccgcgtgaaaaaaatggaattttggcatgcggttggccacatgaaaaaaaaaatattttcgcagaccttttggttggttgggatggccgtatgcaaagatcgcttttgaccgtttgtagaaatggtttatgtactactgatatattcatcacaaatttgtattgacagttatgaaaattttgttttacagttgtcacaaatattaaaattttgtttcctaactctgtggagttgtaaaacgtaacacgactggaaaacgaagctggcatggcacacgtgtgaaataattagtgtacgtaaagctcacgacgagtcgatcaagaattgaattgactttgactttagtactccctcccaaaatatagcaatctaaaaccggatggaacgtattctagtactacgaatctggacatgtctcatgtctaaatttatagtactaggatatgtctaatccggttctaggttgctatattctgagacggagggagtacagtacagtagtacgttactccaggtctgttgtcgtgtcttctaactgactttgacttgatttctaactgactttgacttgatttctcttagagaaacagtacgttccatctggggcttgaaaagtagagtgctttaatacaactaggtggcccccgcaattacacggctagc

SEQ ID NO: 48393 - DNA, 1080 bp, Oryza sativa
ccaccaaatcactttctatttggtttgatctgttgccgatagcgtttgtgagttaccttgtatcctgccaccactagaaaggaaatagaaccctgattcgagtgaccttccttaaaacagtcatatctttttcatacggactcgaaattaggcttataatatatccatggacatctacagaaaaagttacatccaattcttcccatcttcgccgggttcggcaaatttaaaatcgccaaattccgcttgcaaaattctgttttcgtggcgaaaagctttgggacctattcggatagaactttgaaaaattctacaagcttcatactttgtccgtttgagataagattttctgtggttggttccagtgtgctcctagttgtgcaaaaaatatcaaaaaaataaaaaaaataaaaaaagtcgtgtctctctcctcagccttagagagagaaagcaaaaaaaaaaaggcagaagagaggaagccgacttgtgagcacaccccaccattcccccttggtcaccaccttccaccgttcgagtaaccaccattccccctttatcgttgctgtttggtttgtgttttgtggcatcctttgtggttaggctcacgtctctacttcgactagcctaggaccagcactgtacactatacccttgagcgattattcaacttgctttgactaacgtggtttatagttttctcttgagcattgctttcagcccaccgacagctccaccacaaacccgactacagcttgacaggtcttgttgctacagcactaatacacctcgttccacggttgctaacttgtgtgttaccgtcccctcctgtgtgcaagataagaactgttaagagcttgtgagataggctgcgagtgagcattttgcaaaagctacatcccaatagttgtagggcttatatcacatcctctattgttttgttgtccttcttttctaaaccatggcaggtcccgaggataaagacgaggagggtgcatctcattccccacgcaccaaacgcatcatccaatattttacaaggcaagtgaagcaacacacagaaggacatgatacagatttgca

SEQ ID NO: 48394 - DNA, 1051 bp, Oryza sativa
acaaaggatccttttggttaaaggacattattgctttggttgatgtttttagaggaactgccaaatgcaacataaggacaggcactacagtactattctggacagatctgtggaatgatcaattcaaatgtcagcaatatcagcatctttatgcttcatctctacacaaagacgattcagtacaagctatgtgtgccagaccattggaagattctttcatgttacaactctcttatcaagcctattgtgagtatctcaaccttcaagatgaactgacacatcttcacctggaacaaggaaggggagattcatggtgtttcatctggaataacagctgttttacccccaaaagattctacaaactcaattttgctgcaattcaagcacccagacctctgatttggatttgaaagaccaagtgtgtcatgaaaataaaagtctttgcttggctattcttctaggacagattgaatacaagagattgtggataggaggcactgtgccaaacaagatgatgatctatcatgtgtactgtgcaacactaaccaaagggaaaccagagatcatctcttctttaactgcccatttagcacagcttagtggcaatctctgggaatttcatggaatgctaatctagaattttactaaagaatagcttttgcaagatgacagttcaatcagcctggttttcaggaaatcctctttatggctgcctggcacatttggaaacaacgaaatgggctcatcttcagaaatttgcagccaaccttccattcttggaagtctctctttacaaatgagattcttctgcatctctacataatgaaggacccctgaagcgatctgttgttaattggttacaatctttatagggtttttttacattttctcttgtttcttcctgtaaatattacctataattattccttcaataaatgaaaatcacactgttgggcaaagacctagcagtactttcagtcaaaaaaaacaactgactgacacgaacaacaaagctgcaaagctctgtgttatgcaaagaagtaatattggg

SEQ ID NO: 48395 - DNA, 1183 bp, Oryza sativa
aattttgaacaactgttgtctgtatttgtggcgctaatgtgtagtgtgtgtgaattttgggcagcaaagaggtgagtgggatttgattgactcttgtcaacatgtgcattaatgtcattgtaaactacggaatgtttactctttctttgtgccaatcatttgctggcaagcttgttgtcacgcccagaaatttagcccaaatttccaaactattttgtgtattaaatctctgtccaggaccagccagggtacacaaaacgacaagtaaatatacatatccaaacgtaaataaagcgtaaaatacttacagaagaggcacttagtcctcacactgagatagaatgacagcagcggaaaaggcgatcctagcggggcttcagctctactccacaggcaaaactcaactggggtctgagccttggtcctctaacttcgtcttcagctcagaagcactacacttctgaaaagggggaaccatagcaagactaagtacaaccaccgtactcagcaagccacactaatgatgcagacgtgcaagggcatacaaggacggcttgtggctatttgcataaaggcagttgtaaagcattttattgagcaaaacagtaaaacaatagagtaattaaggtaatattaaatctccactgaacaatgctacaccatgttgaacaggcccaaccattcccacctgaactaataagtgcattgagtcgatttactaggggtgagactaatcacggtgaatctggtcgatctcccataaccgcgggcatggctattcgaatagttttactctggccagaggtgcacaactgtacccacaagacacaatccaccggcatgtcacagtgtcatcatgtgcccatgatgaacaggtcaccacgtcgagtgattgtgagaagacccttcatataaccccctctaaccaatcgcaccacacctcaggtttcgcccccgcccccagcaggcaacgggcagccccccctcgtgccacagtgaatccggaagccgatcaaccgaacaccccagccgacccaacttcatcacgcccaccctagcctaagaacgttagccagaggaaagctattgtcacgcccagaaattcccgaatagaatttcaagcagaatgtgcattaaattccccgtccaggaccagccggggtacacaaacgacaatgttgac

SEQ ID NO: 48396 - DNA, 1018 bp, Oryza sativa
caccacgacacaccggaaagaggccgtgacaggacccttcgcataaccccctctaaccaagcacaccccacctcaggtttcacccccgtccccagcgggcaacgggcagtcccctctcgtgcctaggtgaatccggaagcgacagaggccgtcgcagggcccgccccgctccatcacgcccacccttgcctggatgcgtcgactagaggagagctacactacaagcctagccgttgcccacgctggcttgtggtaagtacgataagttcttccagggcatcccgcgaaccggtccttaactgccatgggtgcgacttgctaaaccatgcacccccagcccaccatgtggttaattttaattaaccaacaccaaagcggtgtcactaatccaacaaagccattagaaccaacagtctaaacattaatgtgattttccccattgtgaactagttgaactaagcatggctaagcaattcctagtccaaagtctattcatgttataacccaagctaacaaaggagcatggtatcaaaatagcatggctgtaacaataggtaaacatcccatagtaacattataaaacaatgcaatatttgaaagaaaacaatagagcatttgcaatataggatcaacatgttcaaatgacaagcatgacttgccttgctctgctgctggagaaacctcggcgactatttcgaagtacaccggagcgtcggaggaaccggaatctagcgacaaacaaagcaaacattgcaaacaggctataagactactgaaacagagaacaaaaccatttttaatggattctacacatttttcttgatttactgagacttgagtgggcttaaacggagctcggatgaattagttatgaattttagaagattcactgtgtttattactatacaagaaaaaccttaaatcatttattgcgcaataaatcccagggctgacgccagcacggagggggcgcggcgccggcaagcgggccccaccggtcagcggctcagggggagcg

SEQ ID NO: 48397 - DNA, 940 bp, Oryza sativa
tggattaatattgtttaattattacttaacagtttcattaaattctgaaatgtttattaaatgctgtttatgcaaataaaaccctactatgccatcctttgttatcctgtgcacttgcatgtttgctgcgtggcttgctgagtatgtcatatactcaccttgcaatcattcatcagaggaagagttctacaatgatgttgatggtgtggaggattaggtgtagccctggtcaagctgcctgtggagtggagccgtctgcgccatttatcttattttccgctgcttagatctttattgattgagaggaactatctacctctgtaatgacattttattcgtttattaattagagtaataattgtactctattatcaatttgttattgtgtgcctcggctgattcctggacgagggattcacacacatgtaagcgtttgaaattttggatagaaattccgggcgtgacacaaggccatatgcaagtacattaatgatcaaccttattatgcaaatgattgcttgacattatattgagctttgtcaaatttatatgactcgtgttagatatctttcatactctcatgatcgaggggtcatttccatttccatttttccacaatatataattaagctaagcttctacactagaagatggctttccacaaaaaaaaattccattcaaataaactcctacattagactatgctttcttctcttggaaaaattcttgccaaaataaaaaaaaaggggaaggaaaggcatggctatgaaaaaaatagaaaagagaaggaaataaagtttgctcccaaaacattgagcaaagttggaaagaacatatagtaatgccccttctatattcatgccgagaaaaccaaaggggagagaaagtataagaaaaagggagattcatttctttattccatcattccacaaaatatttt

SEQ ID NO: 48398 - DNA, 521 bp, Oryza sativa
atgctaggcatcccgtggtcgcccttccctcctccctcctctttttctttccttccttcttttaatgtaaccttctagcccttggctattgtacagtttttccccctaccttaatacaaaatacaagtacaccccgacggggtttaaaaaaaataccctggtgatggtagtaagattatgccctttctattttggattgagatgaacatatgcttgatcatgttcacttcaatcaaaacaggtgaaatgtgtgggatattgtgtgagaaacaactttgaatgtgtacataacttagctttccttgaatttaactttattgagttttactatggtgctcaaatctcttttttcatgccatcagtggttgcggacatatattatgattaaatatgtattgaagtgattacacataattgcgatattaaataaactttttcaaacaaaaatatgatatgctttacttttccttaaatatatttcatattatcatatatgacccaaatcaagtaaagctcatttg

SEQ ID NO: 48399 - DNA, 3702 bp, Oryza sativa
ccatggtgaagaacataatgctaatgtttatttagatggttttgtgatggccagcgttgttttattgatattattggccggagaataatcatggttatggcgggaagtactaaaaaactaaatattttcctctaaatctatatgattaagatagttgattagaagaagagtaggtgccatgatcccagccgtagaagtcagaagaacggttaagattgagccaaatctaccggtggagttggccccaactccaggggatctggacccctaactagtttacgaagagattatgcagggctcaagaaaaggatatggatacaaatacaaaaggctaaggggcgattgatcgcccctagcgatcagccgatcccccctccctcaacgtggttttcttttttggcaccgcattatttttctattttagtaaatttatacacctaaaatttgtacccctaaagtttacacatcaaatgtttagaaacccaaggtttataagtcaaaagtctatatatccgatttaaatttaaatttaaattcaaatattttttaatatagtatttctatacatctaaagtttatacacctaaaatttataaaacctaaagtttataagttaaaattttacatacccgtttcaaatttgaatttgaattcaaatattagtttgtagacccaaagtttataagtcaaaattttacatacccgttttaaatttgaatttgaattcaaatattatttatagacccaaagtttataagtcaaaagtttgcatacccgttcaaatttgaatttgaatttaaatattagtttatagacccagagtttataagtcaaaagtttacatacatgtttcaaatttgaatttgaatttaaatattagtttatagacctaaagtttataagtcaaaagtttacacacccatttcaaatctgaatttgaattcaaatatcaaatattttttatatatagtatttctatacataattttttttaactttgtttttttattttttaaaaaatttatgatgtaataggaagagaagaaggggaggaggaaaggggagaggaggagcatataggagggatggggggtgatcgctccgcctattagccacgcccgatacaaataccattgtccgaaacattgaatttctcctttccggagtactggggtcagtgcatgtagaaaatccgcgttgccctctcatagcatctccatgcaaggtgctacataataaaagcatctttataaatatcctcttctccaatttagaaattcatataccttatggaatattcttttatctaagagccgtgggatcgctgagaaattagggccgccacgtcagcgtattagtctaacagcgatcatgcatcttgcctcttcgtgcatgcacgcggccgccgttgaggaaaaaaaaaaacagcctcgtgcgtgcgttcctaggcctccaatcttattgggctgtattacctgtgccggcccttccttgttcatactaaagcaccacatgtctacgagacccatcggttaccctaaaaaggataacccaaaaccaaaaccaaagtttaaattttaaaacttaattttaagatatttttaacgtaatttattttttcatattagctttaaatcagttttatgcacaaattatcgttttttaataactagaaaaaaatccgtgcgttgtaattggtgaatgctatgttaatcttattattgttatatgatatatatatagagagagagtgagagagagagaataatgagctgtagttagtagtccgatcatctccgattagcatgcgagtattctttttttaaagagatttcttatatgagttcttatgtatttcaaaaaccgactcaaatgcggatatgtatttctaaaagcgaacaaaattaaaagccgactcatacacggatgacgtaccaaagtaccgacaaatacatcaattttcataatagtagagatagagattcgctatcagcgttgcggtttttttttcgcacagaagaaaaagggagtaaatattgcagcagctgaggtttgaaccctgatctccaagatacatcaaaacaccattcaccacaaaaccacacaatgcatcatatgcttataggtctattactcttttcatagtgtttcatggcctcggcatcaatgggcttggtgttatgatattgggcctcaacgccaaggtccatggcgctgaggtgaaggcctatttttaagttatagtttttggcaaggtctacttatagaataagtttgttaaaaatatcaaaatgtcaaaattacggttcaatgtttcagcgccaaagacatcggcgttggcactctcgtcctgtggtagctaagtcacttatgtgaaaaggatttgtgtcaaagagattggcactacggacctatttataatttctttctaaaaaaagtcaaatgtaaataccttttcttataaatagaccctcagttctagtcttttttggatggtaaggatcctaatttagaggaaaaacatagcaattttgaaagatttcaactatagaaaaattttaagtgaggatctttgaaacaaaggattgaatcctgccatatccttttagcattcctttgaatcaaaggattaagaaaatagagaaataggaaaaacatatgattattataggaaaaatataggaatgattgttagattgaatctcagaaaaaacatagaaattatatgagagagataaacacataggaaacgtttcatgaagttggacatcatgttaaaaatcctccaaaacttgtttggattgagacattccttaagaatttcttatgagtttcataagatccaatagttttcaatcctttgtttcaaaagggtcatatatgcagatacatgcactgtgcgtgtacttgctgtgtgtttcgtgcattagtaggagacgagcacaatggttcccgcccccgtctcctcgcgttgcactcgcccccaccatagccgctgccatcgcacttgccttcgccagttcgctgtagtagccttccctgtcgcagtcgctgctattagggccggatccaagcatcatcagcacgcaggttatcatcggccctgtttggatcctccgggctattaaatagcactctagaatcttactatttaaaagtattaaacgtagattactgacaaaatttattccataatccctgggctattttacgagacgaatctaacgaggtatattaatccatgatttgctacagtgatgctacagtaattatccgctaaccatggattaatatacctcgttagattcatcttgcaaaatagcctacgggttatgaaatatgttttgttagtaatctacgtttaatattcctaaatagcaagattttggagggctatttaatagcccggagaatccaaacaagatcatcgtcctatttggctttcgggggccagcccgcctcctccccgatgcctttgcatcgctttgcactctccgcgcccctcctgtgtcttcacgcttttctactcctcctccctcgcccaccatgcctccaccactgacgatgggcccatgagccctctcctctgccgccgccacaatcgtcaaatgaggcaataggaagggggatagaggggaagaatacatatttcactgataggtgggccccactaactgactaagcaagtcaacgctctttaaa

SEQ ID NO: 48400 - DNA, 1089 bp, Oryza sativa
agggagagaaaggggactttttatagtttttctttttataaaatcattttaactttgtttatttcttaataattataatttgtgctctgaaaattccactaaaatttatttacgcattttaggcttttaggaaatatacaaaaatcctccaagccttatttgacttttaactttgcacgttttaattgtgggaggctttcacacggattttaattattctaggcataatttagaggatgtattttagagtcgttttgggacgtgacagcccacatgtcatcctttctcctccctctctctcttttctctcccccttttctcttccccttcagacgccacgatggcgccggcggcctcgtcgtcaccggagctggagtgtcacgaccggaaataacccaacgggcgttccttacgtgcgtgcattattccttgtcctaggaggcaaggtacaccaaaagttgatacaattcagagtttaacaagcggaagcgtaattaattaatttattacattggaggcgaagacccagcacacaagaagacaaacgaaaaacagcggaagactagggcgacgaccacaggcgcttgacggcaggcacgagctagacaccaaagccttcatcttccaggaactcctcttctgggtttgggaaaaattgagcaagactgagtacaaccaccgtactcaacaagacacacccacaagtgtagaataaatgcaagggagtacaagggaaccataatatagggggttagggtttgcagtaaacagcattaaaagacacttagttgctcaaagctattttgtaaacacggtcctagagctatacaatattattaatcaaggctgtgaacccacacgaacctgccttaacccaaggcctacgatgattagaccaaactggcaacccaaccttgggtcccagctcgtcccaagccaacccaggccaaccattccacattttagttgttaagcagcgttttaagaattaaaaacactaacttgggtacattgctcggcttgcccataaccgagggagcggctattcgaataggttatactctgatcagagggggacatctttaccca

SEQ ID NO: 48401 - DNA, 1480 bp, Oryza sativa
gtgtgtttttcgcatcaacaaaccacctattcagcccccctctagtcggcctccttgatcctatagctccgccctctttcctttgcacgccttcctctgcacatcgccacagctgcgcccccgcccagtccgccgccaaatttgcccctcaagccacagcgtccttgcccagatcggcgccggcaccgacctaacgctcgcctttgcgcatttatcaacaccaccatctgcccaccgcaccaactcgccctagcgccatcgccgattcaactttagcgccgtcaccgtttcaccaccgccacgtcgcgtaaatcgtctacccgattcaccggcggtctccggtcccatcaacgacaatgacaaactaatttactgcaacgggtgaaaaacttatatacgtttttcatacataacaatgccaatgacaatatttgtatggatcatttgtagctaagacaataaaaaaatggaacatcttcaatgaaatagcccaacctcgatgatgacaacatcaccgatgcttgctttacctaaaaataattggattattcatgtgataacatgaatataatctaaaaactctttgaatctcattcttgcaaccaataataggatcaatcaaatcctatattgtctcgcatggtcaagtctacacaaaatagagtcattgtgcactcttctctaaataacaattaaaaatatgtttatttttaatattatatccatatcatatgttatcaagaatagtagctatacttaacaaatatagtctgataattgcatatagatacatgcagggtctccaatacaggagaatagatgatgaaacaaaagtcgtgtaggagatggaaaaaaaatcgatggatgctatctaacccaagcatccatcaatttagcatttttttctgacagttttttcatagcagcttgtttttttacgatgttttttcttgcgaggttttttcaaaccagtttttagaaaaatttttcctcgcatgtatttttttaaaatttttacaaatgatggaaatattttttttctcgcccatttttttattttttacggatgatggaaacctttttttagcacttttctctggcctttttttctcacgcgttttttaaccgttttaatttctcacgcctttttttctttttagttgtacgatgaaaacatctaattttaaatagttagattatattagagatagagaagagatatatatgggctactaaaatgaatagaaatcgaacttttttgccgcgcttttttccacccttattattatttttttctccttcgttttttatttttacgaaccgtttttttgccacttccttagggaatcgaacagacctttttagatgtgaattttttaagtagggatgaaagtagagataaagatgtatacaaagtttatatatgaatgcataaaaaaatataaatgtatacaaagtttgtatacgtgtatataaagtt

SEQ ID NO: 48402 - DNA, 559 bp, Oryza sativa
aaagaaatcccttttacaccctcaaaactaaccctactgccagcacattcagtttattcttaaccaaattctttgccaatctagagatcttcaagattcccactgcaatcaattcaaccagatacacaccacaagagcctacattttttctgtcaaaatttcctaggctatgggaactttggccccaagttgtacatgagggggagctgctaacaatgtctatgggggcctgctttttgagacgactgtatactcagtcttggcacattatatttcctagaatcttgaaaagtatccatataaacagaacatcaatgaagcatgcaaaatacaggcagccccacaacacatgggacacacctactcttccagcacttaccaattcagatcattgaaaaggcatcctctcacactgaagcaaataccatgcagcattttaacaatccaaatcctaaaactctaacccgttaccaaaaacaagaaccaaatactgtaaggtacaatgcgtaaagaaactcagcagaggaaacttcactaatagatctacactctaagcaca

SEQ ID NO: 48403 - DNA, 686 bp, Oryza sativa
agtgttttaattcttaaaccctgcttaacaactaaaaggtggaacggatggcctgggatggcttgggacgagctgggacccagggtcgggttgccagttcggtatgaatcatcgtaggccttgggttaaggcaggctcgtgtgggttcacagccttgattaataatattgtatagctctggaaacgtgtttacaaaatagctttgagcaactaagtgtcttttaaggctgtttactacaaaccctaaccctttatatcataacccccttgtactcctttacatttatcctgcacttgtgggtgtgtcttgttgagtacggtggttgtactcattcttgctcaatttttccaaacccagaagaggagtccctggaagatgaaggctttggtgtctagctcgtgcctgccgtcaagcgcctgtggtcgtcgccctagtcttccgctgtttctcgtttgtctttgtgtgtgctgggccctcgctgcccatgtaataaattaactatttacgcttccgcttgataaactctgaaatgtatcaacttttggtgtaccttgcctcctgggacaaggaataatacacgcacgtaaggaacgcccgttgggttaattccggtcttgacagatttgcccccacaaatctcgccggcgctattgatggcggccggacctcccgcgccggttttctt

SEQ ID NO: 48404 - DNA, 656 bp, Oryza sativa
  unsure (1)..(656): unsure at all n locations
cgccgctgattgagcagaggtggcaaattggggcaagatgccagcccctgcgttgaaggttgtcggcagtaaggcaagcgctcttcatcgcacaaaacataaagaatttgcatcgttccgacgcccgggatttccagatgatcttgccaagagcgcagcgagaccgtcccgtggacaaaagtgaataagccgatttgacggagaaagttcccttagagtctggacaccacctcaactcatcgcgcaccccatgatccagctgcactagtgctagaagatcccaaagcgcgaagaactccaggagggcctggacagacaggccgccccgaacgtctcctacccaagaattctcgtgcagcccttccgccaccgattttgtcttgttgcgaacataggagaagagcataagggaacgatttgcgattgagccccctcccgagagccagctatcagtctagaaggatgtttgttcaccattgcccagttgcaccatgcagccagccgcaaagcagtgcgccacttttttgtctattggctacacaaaattaacccagggcctcttaggctagacacggcagagccattgccagcgagttctcaaggcgacgcccatgagacgcaggtccttaatgccgagaccnccgttctcgattggt

SEQ ID NO: 48405 - DNA, 656 bp, Oryza sativa
caacatttacaagtactaaatgattttacttgaaaagttcattaacatcaaagttgtataacttatcaagatctataatttttatttgggtcatttcttcatccgacaaaacgatttataacaatattcacaaaatatacatatgtcttatatagtttataaactataagatagatatgttaattttgtgaacaatgttactatccctttactaaatgaagaaataaccaaaataaaagttatagatattgatgagttatacaactttgatgttgatgactttttcagttgaaatcatttagtatttgaaaatatcgtttgaagttgtcataatttgaaattaaaattcaaagtgtttaaacaaagtcatatagaaaaatggccaaaacaaaagttgtagatattgatgtgttatacaactttgttgttgatgacctttccagttgaaatcatttagtatttaaaaatgttatttgaagttgtcataatttaaaattcaaattttatataggtaaatcaaactcagatggagaaataaccaaaataaaataggtttatctcaataagttatacaactttgtttttgacaacttttccacataagttcatttagtatgataaaattcgattcaaaggtttaatattttaaaattaat

SEQ ID NO: 48406 - DNA, 1741 bp, Oryza sativa
tgtacttttattagaatactcttctaaatacatttctggtattgaaatactttccgaatatatgagtaccaactttacattatgttcatgttatactgaatatgttgctagcttatctgggagatgctttggtgcgggtataatgtttgcttatgcaattactctatgtcatgacgatgatactagagtagtatctggtagtttagacgtggtgtctagattacgggatatcattatttggggttatatattgcggatgagagttgggccggtgatggtgatagctcagtacggggtattcctccgcgcctatatataatcctaagttaatttcctggggagggtattcctccgtatttggccccggttggatggtcatgacgggctgttgtaaggaactcggcagtcaggggtggcttctcgaagtaccaggagggcatcggatagagggtattagctaatatatcagttaactagaatatatgtatactatgtatattagaagtataggaatagattctctttctcttttctttccacctagcttagattatttcttatgaggatgagtagtaatgcttgtgagtcactctacccttggatgatcttaacccctgcttagaatatgattatcacaagtaatatataaattattagttgagttctctctacatgatcttcccacgggataaaataaatacgatactcttggaatactctcgggtgaaatgctacaatggtatatccgtgcgcttgcggatgaactctgtaaccataatataccagaagtatttctttgccattgctggaaattatatttctagcaatgtcgttaagaaataccaacatacaccacaatgccgatctcggctggcccagcaattaccgggagcgagaatggcgtgggtaagaccccggtggactccatgtcgaaagatcctcctgcagaagcggagaacggaacatcgataacatctgaggccgagaaggatcctaacgtggccaaatcttgtccttccgacaagaagcatgagctgactaggataacctccggggcgacaagagcttggtgtcctattcacaggactagcaagcacaccttgcaaacttgttcagtttttctcgatgtataagctgaaatccgtgcctgccaagagcataggattcaatgtactcctccgactcgtgatgtctattatcctatccacaagacgaagactcacgacctctcaagctgaaaagtccttctcagcgctatgaagacatcacctcctaaggtccagcagtcacaaatctctcctagagatgcggacaaggaacaaggagcagcgattatttcagatcgattcgtcggggtaatcgatatcgatccccacgagccgtttgtcctatatctgcttgaagaccaggcctcatcatcgacaagtacaccacacaacgtgtacgctatcgatgggaccagcacatctagaggcgacaacacggtaacggaggatcaatcggttacgccgacgccggcccaacatataaagatcctcaatgcgatattgagcgaaagccctttcgatcccgtcctgaacgctgatctcgatcaatgggcagaacgactatgggaattagtggctaacctcaataacgcatttgcagaagctgccgctagggtaccaccggaagaaccgccgaccaacgggggtaatggggaatagcctgaacagcggacaccaccgcgttaagctacccc

SEQ ID NO: 48407 - DNA, 2921 bp, Oryza sativa
taagggttcacggcccttgtttaataacattgtgtagctcaagaatcgccctaaaaaaatggctttgggcaactaagtgacttttaaatgctgtttactggaaaacttaaccccaatattattatccccttgtacccccttgcattaatcatgcatccgccggtgtggcttgctgagtactgtggttgtactcattcttgctcaatctttcccctcttcagtaagagaagctttggagaagatgtcttaggtggagtcctggcttataccccagttgagcgcctgtgaagatggagccgtaggcccgctagtccgctgctgtttatttttgattgccaggcctgaagcgcctttgtaataatgtaaatattatcgatataataaagatgtgtcttttatatcatgtttgtgtggtgtaccccggcttttcctgggacggggattaatacactagcgttcgggaaaaggcaattttctcggtcgcgacactccgcgactgcccaacacatgagcctcgtcccgacacatgagacgcgtcacggcaaagcttttcgataacctcgcattggcagtacccgctccatgaacataaatcctcatgaactctaggcgtccatgtttctagcagtgagaggagttctggcgctcccgggaaagagaaatctcacatacatattatattagggttcaagttaagttctctctcacacacactcatggcagtcctaccaatggcgacaccgatgtagggctcgcctctcggccctacctcaacggctgttccaccgtagcgcacctgcctcactctggggtgaaccatctatgcagggatactgcctccgctcggctatctagtccgctaggtctatacccatacgagaagtgtggttgtacgggggtcgtttcatgcttaacttcatggctcagtccttaattgaccggggacggtactagccttttccagataccacccaaatcctccgtccgccccagtcgaaaacagttgttcccactttattttcctttcacaaatcatgtcatcaatttcatggcaatgtggcgctcatgtcttcacatgccgcatctcaattaccttcccaaaggtaattgcccaagcatttagcatttgataaatatgagtctgcatgatcctagaatagcatttctaagcaattgtcataattgactggggactcatacgtaaacatggttacgaaggaataagggataaacaataatcaaggcatggcataatcacaagtaggatgttcatcattgcatgcaattttatttataaacaaaataatttcgcaattaggatcaacatgttcaaggaatagtgatgacttgcctgctcatgataatccttattctcgatataatcttgatcaaccttcacctcctggaagttgctgacattgcctcacgactaaccgatacataaattctataatacgcaagaaaaaccaatattcaaacaacaaccaaatatgcacaacaaaatatactattcgtgtctgcttaatggattccaatcacgctaggggctaaggtttcttaatctttctattgtcaacgtggcctatttaggagttaaccaacatagcatttatgggatacatatatttttggctaatcggtggtttagtctatcaaatggctatggaaggattatggctatgtatgcatctatctaaataggacggttatatactagaggttctgttgttagatggatttaggatcaatcaaataattacagtgaatcatttgtattattattttattgatggaagctttactttaattatgaacatattttacttgtcacaataaattataaaaggttaataattatccatgctttgtatgttagatttgtttaggttaatcatattatggttacagattatcccatcacaaaattttacaatgaataatcctaatttacagttgaactataattataattatatgaggtgaagatttataactagtatttatctaatatacatgtttgtcatacactccctctaaattaatatatgcaacacgcaaattaatactataccgtacaactataatgggatgtatagtatatgtgtaagcaacaatattttattattagatcatatatttgagtatttgctttttactgtaagctatacaatacatgttgattttaagatggctctgtttggttaactaatagatatcaaccgactatatatatatattctacttcacatgacattgtatcaactaatttttaagtagtccaaatacaactagctctgtgattactctcctaaacaggttaaagattcatctatgtgtgtttatattttagttacaaaatatgaggctaaactttatgtaagtaatttataagtcatggatttagttatatttggacataggctagtgaatggcactaatattttcctttacacccattaatttgaaggattgattataactaatttatttggttgctacagtgacaagacatattaaagataattatgctactgtacaatatccatttttatttattggcacactatttaggttaactattatctaatcatttgatattaattaatttataattataaatatattttattaaatagtgaattatatatctttggaaagcttatgaatttagatgaatttaggttcaagtttcactcaaatccaagttaaaatgaataagttatgctagtgtaaagattcaaatttgaattaatccgagaaattgcgaaaagctactgttcataaacgattcatttttaatctaagacatatccacagccttgtaccaactgacaagtgggaccccgggtttatttctttttcctaccgaattattttctaaagggaaataggaagagctaatgacaagtggggcccacatg

SEQ ID NO: 48408 - DNA, 659 bp, Oryza sativa
gatacaaggcccataatccgtgacagtttatcgatttcgtcataaaccggcccaaaacctgttacgttataacaatttcgtcgcgatttaaatacttcaaaaccatataagagatatgcaaattttgcaaattttgtgaagaatgttactatcactttatcggatgaagaaatgaccaaaataaaagttatagatattgatgagttatacaactttgatgttgatgactttttcaggtgaaataatttagtatttgaaaatgttgtttgcagttgtcataatttgaaattcaaattcaaattattgaaacagagtcatataccaaaatgaccaaaacaaaagttgtagatattgatgatttatataactttgttgttgatgacttttacttgtaaatgttatttgaaattgttataatttgaaattcaaattcaaattattgaaacagagtcatatagcaaaatgaaaaaaacaaaagttgtagatattgatgatttatataactttgttgttgatgactttttcagttgaaattatttagtatttaaaaatattatttgaagttgtcataatttgaaattcaaattttatatagttcaatcaaactcggatggagaaatgaccaaacgaaaaatggtagactaaatgatttctacaac

SEQ ID NO: 48409 - DNA, 620 bp, Oryza sativa
ttccgcgcaccgcgtgattgtggggtttcacggtctcgggttgtgtgggttttctagggtggaattttgggtggtggccgatgggctgatgggcgcccgggggtttgggtggtggatggattattagtccaagttaggtttaatcagcgtgtggttggtaaaatcgcagtagcttagctttgtttgatgctattgtattggcttagtcagcttagctcatgattcgggaggcctttttcttcgatttcgtctgtggttttgtgaatttgtgtggagcaagtagaaattgctttttcttctttttctttttctgcttttttgtattgtagtcctcacttgttgttttctcgatgggatgatctcgtctgtgatgtgaacagttaaaaagtttccagcgcagtttgatgaactcgctgaatccaaagtggtttagagcggctttggttgctttatggttgactaattcagctcctaattatatctgtttggtgttcaaaccttctaggcgtgttgtacttacttgtggttcagattagtattgagatttttcctctgtgtatgcgtacgatggctttgctagtgtgtgttgacttggtgggaagggaaaattctgccttttg

SEQ ID NO: 48410 - DNA, 942 bp, Oryza sativa
gctgttgacatttgagttgtttatggttcagctaatgcatatgtacctgggcaatcagcgtcttcaactggtatgtgtccactgatatgaaaatagagatctaactgatctattttattacttttgttgtattcagtgataatggctttgctccctttccccactctcctttttttgcttcttcacaagtcctaacataatgttcaaacttgttttcagttagtgctcctaaaccaactttcaagcacataccaaaggtaatactcacctttgtcattgttgattgtggatttactgttattgttaataacttaatgtagtgactgaacagttaacatacatatgaattagcaccctgtaccaagatcttgtaacttgttattttgtaagcacatgggctcgtacacatctgatatatctattatttgtgttaaattggttggtgcttagtgccttagtggaattagctgctactatcattttgtgttgcaacctgtaacctgttgcaattttactcaaaatttgcttatgctttgcagaatggaatgctgacatttgagacggctcagtttgagggaattcttaagaaactctctgaattcaatgcaacactttcatctaatttggtaatttcaaaaatcatttgttggtgaatttgtttcttctgataatttagtattttctcccagaacctgggaagtttagcttggtttataccatcctgtcatcctgtgtactattttgaagtttagaactatgttggtgttttaatgctttagttcgtaggcaatgagttttaagcattgatacagaccattcccaccgtttgagtctcttttttttttctagctgtgtacctagcctgtttggagtgcaggaatgtcctcaattcttgcagggacagaaattttcctatgaaactcctttatttcaacttagtgc

SEQ ID NO: 48411 - DNA, 1571 bp, Oryza sativa
gtcaaaggtaatggtcaatactgaccaattcgtttgcccgtcacaggtatcccgtcagaggtgtgaggatctggcgtagtatgattgatccagctagctgctaaagctagaccccatgaattatatgattctcctctctagccagtacgtacgtagctataatttctgccgcatagcctcaccctcgctggttatatatatgcatgcacatatatatagcgcgccggcctctagctagtatagctagttgtatgcttatgcacactttatttctagacaatttttatggtggtttgtactggtagaagaataaatttattagattgataatattttctcatccaaaatcggccctatctattaatactacctcatcaactactgtatagagtgtaatagcttttcctgctagtaataggattcataaatccatattgaagacgtcttgatgcggatggcccatggccataatcttcagtggccctcccttctttggggcttccttcccctaaagggtgccggcaggcattgatgcaagcagcaacataatgaagtcgtgctttttatggactaatgcgggtggtcctcgacaatcacagtcttttgatcgccggaaactcgagtcgatatgctcgtggcagaaatggccccccggctttattgttttatggtgtttcaaattctgcgtgtgaagcggatgtggttgagatagggtctagcgttagtgattttgatcttggtcaggtgatcttgtaggtggaaaatgtcaaagcttcccctccagagtccagactcttaatcttttgtattctcttctctgtatctctcagtactttctctcatgttatcctcaagggctcctatgcttggaaactctcatgtatctcttcgctgtaagttggttcgaagtaatcccccccccggtgaattttcaaaaaaaaataggactcataaatcaatgacttatattgtttctatagtgataatgctggtagtcgaaatactagtataagctaacgtaaaaatactcctctcaaagacacacacacgcacacacatatatataccccaatatacacgtacacactcatttgtgtgtccgttctagtaaacattatggagacatgagatatataatatttcttaaaaacctcagcaaatttgtactaaaagtatagctatttgtgtatagcatatatggttgttgggatttaaaccctaacagttataatcataatagaaattttttatggtccttgagaaaagtacctagatatatactaaaattttacatacctcgaggtaccaagttttatgctataacatgtggtacattctaataccttctcaagaatgataaaattactttaatcataaacatacaataattaatgtgactttgcaataaccataccaaatgtgctatacctatataggtgcacagttactaaaatgttttagcacacgattaagttaattaaccacagcacgttaactgttaagcatatttgatcttaaagttggcgatgcaaaagcaaacaaaaaaaatatctggtagattttccggtgat

SEQ ID NO: 48412 - DNA, 3974 bp, Oryza sativa
tgtttctcccaacatggacacgcatcagcagtggtggccggtgagctcgagctcgctagctcgtcaatgggaaggtaaaaaccaacgactggtgatgcggtgaggagcttctcacctaggcctcctcgatgctgctgtagaatggggggagaaagagagaggagaggaggcagtggcgactaagcaacagaagaagatgtttgatggcaaaggagagcagaggctaatggctggggaactcgctccttggctgactaccatcgtcaacttgttcttctcactatcggagagagaagatgggagagagaggtgtcgaggaggaagaaagggatgccaatgaagacatgtaggtcctactattttttttaattgttaagcaccacgtaggacgatgaccgggtcaacacgccacgtggggcaccacgttagctaaaaccgcttagggatttaatttgcactggttttaaagttaagggtgctcaatatctacttttggggtcgagggatacgattgaaactcaacccctgttggagggaccaaatgtgaacttttttccttacctactgggctgtatttggtagttactgatcgaccatgggttacttggacctttttggtgtgctttcatgagtttctgtgggctggcctgacagatattcaatccatcaagtaaataggccttagcattggcacgtgtattgcaatactgcataggtcctactgcatatacgtgtttacaatacacggtcctataatagaccctctgaaaataaagacggcatgtgtaattgtgtacgtctccttcagaaaatgcaagtgcagacacgcatagttatccaacattgtgccagttcaacggtgtaaaggaggagcttgattcgcaattacctgaaagagatgacgacccagcaatttgtttgatttaccatagggactccacgcacgttccttcagactccgaaagatggatagatgttgcctccatcagactggtcaaaatgatatttgcaccgtcctttcagttctgtccaaattaaaagataatgacacaaaatggcgacaggacaatgatagtaagaggctaggaaggtcagagctgaagctgtttcacacaggaaaataaaagaaaggaggtgaactggtgcttactacaaaaggtatgtgtagcttgtaagcatctggttgctcttgtccactccaagccatgatcatgcatgcatgcgcgtttcttgagccgctaagcaaaagctcacaagatgacagaccaaatgcatctcctcttacatcacacggccggccagtcaaagatacctaccaactcttcccgcgccatggattaatacaggagaagcaagcagctttcttcacttattcgtatgccccatgtgcaccggagggacactctagcaactcgctccatttccatctccatcaccaacatggattcagacctgccttagaaaaaataaaatcagtttctttggtcatggcctcgtgaggctagaacactcaaaaaaacttcctccatataagccaggcctgcatgtctctatcctacgaatgaaaaaatttaagcactagctcactgcagctattaaccctgatggcatcaaacaaccgtgtcaaaattaacaacacaccggctagaggacgaaaacgacctgaccttgctgtggcttgcattttctccggcaagggcagccatggggcccttaggtgttcccttcagcaagcccattttttctgccagtgcgaatctgtaactccggtcggtggccctgaatgcagatttcatcgatcaatctggacagttaaatgtgccatccaacgatcggaagcaccttatctgtacataatttgaacccggtaaggggaagaaagttgatgaagaactgcttcctggatttcagcaaggatcattacgacaccgacacttgttttctgcaagatgtgcctcatgagtggagccctgcatacaaaggctgagggattattttaggcaaataggtgatcagcatgatataccatcccattaggcttaacagagacggaagagtactcatgtgagcacatacttaacacctaagaggaaaataggggggttaattttcagataaggaagtatactaatctaaagttgcttaatcaagtgagtgttcatgagcaagacaaaggggaagaccccgtgaaccttaactagtgattctagcaatcatgcacacacgtgcatgggggtgtgatctgtccatcatcttgattcttgaccagtctccaagtgggtacaaatcatccgctatactgtaaccaattaatttggtgtatgcgtgcagttaactctagcttaaattctgttatatcattgtttgtcgcggtgcatcttcataatgaagacaaatttgaccgccaagaaaaatcctccacaatcagcacttcagcagcacctgagattcacctttcagttcaggcacaaatgctttctcaaaaacagaaagaaaaggaaaccaatgcttaattacaatcatagtgttaagtgttaacttgttattctacgatgctgtcagttgcttcattttaatattaccattgcttttacaaaaatatttgccggttttactcctgtcgttaccacttatatgaattcgagcgctacatacagcgatgaatcctattattttttaagaagtatgatgttgcaaagatattataagtgttgaaaatcctgcatgtaaatgtctagggaagaaatgcagtacggtgacttgatctttatgacgcagtgaccatttttaggttgagaatcaaaacaatctaacagggtaatccgggggaccaaaccagcagagtttcatgcttaatacatgcaaatcaattgtttcctttataagttttgaatacgagacacccaaaaaaaaagtgaaagtcatattatgtcagcttgtataccagaaccatcacacataagttatggtagcacacattcaactccagtcattcaaggcccgattatcccattatctaaaaaaaactctagtaattcagtttgatcactagtgcaggaaaggacttcgtctcataatcaagtggttttcacttttcatactcaagtagttaaatagtgttagcattatttttctaatgtagtcaatgtcatattgtcatgaggtggtttacataatagttcaacttctaaagcattctattgtgtcatggacgtgcactctttgccagctaacaactataaagacaagcacatgaacaggtgaagttctgaagggctcaaaatgcttttccttgtgacaaaaataaagatgcccatgatgaagttatcatgcattataaactaactgcataaggcactaaaagattgacatgtaatcataaagttccaaaaacaacaaatgatttacgggtccactctaaatacccaactcaccgaccacttcacttggtttcccacagggtgggacccttatataagctccaaaggttatgctgatgcatgcattactaatgtgcaatttggagcaaaagagctctacacgtgtgtctcttcatttcaagatttagcatctaaacttagtttgtgatgggatcatagcaatgcttgatgaaacaaaaatactgaacactgctgataatttctctgtgctagatttgtaacagcatggtacgtacgactacattttacaaaacactacaattgttaaggcactgccaggaacttaggaaaatctcccagtaagcaaattccgtagaaatatttcatagcacaataaccatgtgacagaagaaggtaggactctgggtacaagactataaataccaaaaaaaaaactaactttaagcaggccaaacaaaataaggtttcccttatggaccctgtaggccaatcctgaaacaataggtaccagatcaactatgaaagaaggataagtaattatgagctgtacacaagctgtcaatttgtggctga

SEQ ID NO: 48413 - DNA, 934 bp, Oryza sativa
atatgtagttccatagttagtgaaagtaagttgtttggtttctgcaatactaaaatcgatctgtcctgaaaaaagcatgagttggaggttgagaggaaaaatatgattatggcatgaacattcgcaattgatgtttgcaaaatgggctaaagctcaatgatggaaaaatagttagacgggcgtaatgattgaaaagcctaagcaaatagataaaaggattgcattgcatatagatatagaatgtggaaaggcatatttgaggggaatgtgcagatgaggacgttaggctagcgtgagtgtgtgacaagtcgtggggtgcgagtgaaacatagtatcgagcaggtggtgggcatggcctggcctggccgggccggtaagcacgacataggcggatcgctggtggcagtgcgcagaggagaggaggaggatatcgagtgcgggccggagggaatcaggttaaaatataatataccttgatgccttgtcttccgtcgaggctgcgggctctgctattgctctgcccgcatccctccctcgtctcgtctcgtggattgccgatgaacggaggcaggcagccatccagagacctcttctcttcgtgcacgccgatgaagattgatattacctgcggccgccggcgccgctgtacatgtgcgtgcggatacatagatagcgctgatgagagacgcggcgctcgcctcgaacaccttgcgcgcaggcgcagtggtctaatctaagactggagagattcagaatttcattaatttgatttgaaagggccggcccataaaatggtcaacttgcgtaagcccaagtaattaggaacgagtatatgggcccaatttccatttatgggctggggctgtggaccgccagacttcatcgtctccgtcgtcggcgcagatctccggctcctccatccatcagtctctct

SEQ ID NO: 48414 - DNA, 560 bp, Oryza sativa
tagccaaaccaagttttgtcttgtatcttggagtctaatttatttgtagtagcctgctatcttaattatcactattgcacttggagagttataagagattatatatttttttcttttaagtttggcgtcttggctggatggctggttatccctcacaaaaaaatgatgaatactatcaactggtaacaagctgtggttacaacttctgtaatattgtgaaacctgtttcatctctgttataatatatggagtaactactaggctggtttcctggtagtacttcccataaaaaaaactggctggtttcccgtccgctgtctgtggtgcctcgtgacaccacacatccctcataaatccaaaatcatataggaggaaaaaatacagaaaatcgtggtgatgcaaaaacaaacaaaagaaggggaaaaataaccgcagctagccttcatgaaaaaacactcgtgtaattgggtcaaagtctaatatacgtacactcgtgtaattgggtcaaagtctaatatgcgtagacatgtgatttttggtatgggtaccgagctcgaatt

SEQ ID NO: 48415 - DNA, 850 bp, Oryza sativa
gcattaactcgatctgattttgaagcatcaacatgtagtacttatctattgcttttagtgtgtgcgccactcgtattcactggtgcatcaagtttctgtttctatttgtacatctacattggattttgaagttcttcacccttgcttcctttcattggtgtgaactgtatttgtaaactctgtatcatctgttcctgctcaattgttctatgtatattggtgtttgtttgtcgggtgctaggacccgcgggtgccccgtacccgctgctgggacggggacagtgagaaaccttcccctgagcacggggatggggatggcgaacgggggaatttcatcacctcgggggcggggacggggtagtgaaacccgacgggtgtagccccattgccatccctacagccagcttaggcacatgaaccaaaaaaaaatctgtgagacagacatgtggaccatatatttatagtgaagagtaaaccactacatgagtaagctgagagataggctataaagaactatacagtaagcagctggttgtattattatccttgctctaagagtagtgtgctccgaaccaaattgtaaacaataaatgcaacccttatattgtagtaaatattgtggaagtaggaaataacaaccaccaattgccctacaacttggtagtaaggaataaaaacattattttctcacctatatgtgactctctcctttctatcaattccgccgcgcattgttagattttttgtgtttattggatccacttgattacctcatacatagtagatattaaacttttggatggtatacattgttgtcctaatatctttctttgggagattgatgtgcact

SEQ ID NO: 48416 - DNA, 645 bp, Oryza sativa
tgtccttcctgtcgctgcctctcctaaccttgtgagacgatgacgatcccccatgcaacaatgcgttgtgtttgtttgttaggcaggcagcatgagcacgaggaggcatgctatgctatcacattcacaccacgtctctctgctgcttctcatatcatctcatctccctcctttttagttatagatagatagtacattagagattactgtactcgaagggagagagatactcctagatagagacagggaaagacatgttatgttattattactagggccaggcggcaatcaatgggttgctttcgaacgctgttccgagttggtgcaagtaacatggacggattattggatcatgccaagattcctcctcctcttcctccccctttcaaaagcacaaaccatggcacctgcacactcatcaccttctttcgacttctccatctacaacagctacagtacctactaccactacggactagtactagatcagaagatgtgacgcccttttgcagcacccactcatcaactgcacttgtccactccagtgcccactgcagctcattgccaaatttcaaggaatcctaagctcgggatgattccattccagcttgacattttgtcaggaatgtcagcccgcttcttcct

SEQ ID NO: 48417 - DNA, 1175 bp, Oryza sativa
actatagggcgaattcgagctcggtaccctggtattctagcgaagccaatttaagtgatggtatttctgcaagccaatcttatgcgatggtagatatgcaattttctcgccaaaactagagtttcatttggaaatgtaaagcccctccgatggtccaattcttcatgtggctgcttgcgaaggaaagattgccgacaagagtaaacctccacaaaaaaaacacattgtcccaacaccgatctgtgagctccgaagtggagaagaagagactgcaacacatctctggtggtgtttgggaaggaggggacctctatctgagctgtccatttgctgtttttcgtagtatgacctattccttgctcatattgatcgctaaatacatcgaggacgccatgctttgggtggaacgtctctatagcgaggatagagtagttgtggactcctggtaaggaactcttcccccctccccctcaaatcctatcttactataaagttatcctccactaactccttaagcttaacatgcaaagatgccacatcatcatacactaacaagatgccacatcatcatccactaattaacaagatgccacatcatcatccactaacaatcatcacatttaaacatcatgcaaatatgatatatctttatagtttttataatttaagagcttttcaaatacaaacatgttaaattatcatccaacataattcacataatgtttcaatgtatatctttattatgttttatgatatcctatatacttatatagttcatcctcacttagttagtgcttaaatgattaatctatggtccaaattatttttctccttttttcctctaattaagtcatatacataaattgtttttagcctttagatgattaatctacggtccaaactatctccctacttttcttcttccataaagtcataccaccctattttttacgtttgaatcaccattctacgtactatttaaatttaaattatcataaaccacattaatttacttaatctgatgttatctagctatcttacacgttttttttattgttatcatactaaattcccgcagcaatgcgcggggtttcacctagtctaatgtaatctaatcccctttaacaaacctttgctaatgaaattcacgtggggaagctctccccctgtgaaag

SEQ ID NO: 48418 - DNA, 922 bp, Oryza sativa
ggatcaaaagcagttattcatcggatcgagaaattaagatatggataccaaatattttcgagaccaaatcggtcacacattatcagaacgtaatacgtacttccggtcacaaaaaagatttggcactttcaaaaattgacatgattttctctacgcaacaacgctacagctttgaccaccagttcgatctgtaatacacaagcacaggtaactatataagaaagttattttttcatggtgatcggcacaaaaattacatacatatatatttttagatataaacataaaatagttttcttgaaaggatataaagataatatggctcgactatgtgtgagatatatatatatatatatatatctcacacacatatatatatatatagctagtagcgctctctcgctaggtagctaggaatctaggatgccatgccacttattttaaacattactcgtacccttgtaaatttttcctggtgatcagagatacacacacgcctcgatatatatcaaggtgtttccggtgattatttggatcatcctaaaacgcatttattcctgtaatgaatttgaagcactggtcatccgcaaatcgatgaattcatggaaatactagtgtttaaatggtagaatcttaattaattaatctatatattccatgcatgattacatgctttcactagcatatatttgctctaggttacccaattcttctaaaagttcaataaatatttaagaaaataaaataaacctgacctctacatccaaccggatgtcatccacgaattcatatattaggtagcagagaatatattatgttactgctagcttgcatatccttgcagaaaaataatatattatctaatttattcttgccgcttatacaggcttactgcatccaatattaactatattctgctaat

SEQ ID NO: 48419 - DNA, 1011 bp, Oryza sativa
ttatttaacctataaaattgatgaaggcacgggcgagccggtcactttaatttcttgtctgataatgtatatacattagtattctgacaatatcttttgtagttagcatgagtgttaaattagtagtatagtttttgtatgcaatacctctgttcccatttttaagtgcaattgtgggtttcggtatccagcatttgaccgtatatcttatttgaaaattttatggaataataaaatagtcacaaataaagtattattcatgttttatcatctaataataacaaaaatattactcataaaaatttttaaataagacggacggttataaaaagtgcaaacctatggtctttttgagacgaagataatatatatgtagttacaaaccaccaaccccttgtggtagactttcttagcctctctctctttatatagtatatatatatatatatatatatatatagtttaattagttcctgtggtgcttatccaaaagaaccatatatccaactagggacctcttagtatgccataagcttattgggtttataattaatttggctgactttttctttaaaaatatgtagtttatataatcaagcaacttttgaaccacaaggccaagagaagagtactcacaagtactccaatccacaaaaaccaataaatccaaacaaaatatacgcttatttgagctttacgatttttggcatacaaatcaacttgctaattagtccaaacaaacggatccttaatatatgtatattatccaacggtatttgattgaaataactaatgaataagaatagtgcccacgttttttatatgaaaatagctggaacaaccttttaataatacaagtttgtcgaggagtgaccctctctagcggaagatcgtgagaccctcctttcgtaagtccggccggggaaaaaaactcgcctctagaaatcgcatatccgtccccaaggctcctagctagctcgcacacaaccaaattatatagggtaccgagct

SEQ ID NO: 48420 - DNA, 900 bp, Oryza sativa
cacagggttttgtgttaatgaggtagtaaaaccctttctaggtttgtattgcacataactcaatatgtgaagcaaactttgcagagaaatgaagtgcgtcatatgtactttttttgagaacactgaccctgtcatactcttttggtagctcagaaattccgtctttggtattatggtacaacacgatctaacccaaacattaacttaaaaaatgctccaagcattgttgtatactcaatgatcttatcagacggaacaatttagccctttgcagtagtacgggggtttgtgtaattgaggtttgaaaacctttccaggattgtgttgcacatagctcaattcagcaagtaaactttggagagaaaagaaatacatcatacgtactcttttgagaacgctgaccctgtcatgcagactgtccatagcttggtcattctcatgctcatgaatttgagaagagtaagctgaacttctgatcgcaccctcctcaataccatcaaataaagcagctctgtggctgcggaagtccctgcaaacggccaaatgaatataaaaggcattactaccgtgttctggacaactttagtactgtctagtatgcgtcacttccgttagctgagaaaaattacttccagtgattgaaaagtagcagagtagaaacaaacagtttaattattattattttcatatgtgttgtattttcgtaagtttccatgagattatattataattttttttatgaatcatgacatgttaaatgaaaaagggggtattttaattgtggaaaatcagtaaagactaaagaggcatcatacggtacggtaagattggataaggggataagcatgatgaacgaaatggacaaaatgcatatatgcaagaggcaggggctaagagggg

SEQ ID NO: 48421 - DNA, 1366 bp, Oryza sativa
ttactgctagcttgcagatccgtgcagaaaaataatatattatctaatttattcttgccgcttatacaggcttactgcatccaatattaactatattctgctaataaaggatggatttgcatatatttttttaaagcgaggcccttcacggaaaattaatgatgcctgagcacgcattgtccttcatgcatgcgtatatatatatatatatatatatatatatatatatatatatatatatatatatatatatatatatgtagtacggtatttaacttgttcataaataattataattaagcacactgatcttgtcgtacgtcgaaacttgctgaaagatacatgagcgaccatatatatatatatgcttggtcccaaataattctcccaatgaatcaatatcattacatttgtagggacatggaagaagatctagtagtggcctggtaacaatatatataatctagttgattattagctagtgagcaaaggtgcatgctgagcttctcatcaattgttttgctgatgctgtaagggagaggcatgtatacgtaatcgaaactacgtaagtctagggatgcataaatatataataggtacataaacaagagtaaaattggagacaaattaaaggctttagtctaaaaataattggagataaattaaaggctatatactgccttatagaatactgcacagcgaccatcgattggtgtgccaaagccaaaagaatgaatccatagtgacgaccttttcttaactaatcaattcgctcccttggaatagctctatatataaatatatcattcgatgaataggcatggtttcatattgatttgccgttgtttgcatgcgcatgcatgtatatatacaaattaaaaaatatactgaattattaacctatatagttagctgcagtacactggaggaatcagatgcatttttttgcgctggcattttgttcttgggtaaaggcaaacattttcactcttttgctggatttgcgaatcgtcctcttgtctttttatcctaccttaattatatatgcatgcatggatgtcgtttccagaagaaaccacatacgatgaccctgactaaatcagaaggacatgcatgagcttcaggacgactatagagtcagcagtattgtgttctggtccacctagctagacgacatgctgggctgtatgagctctattgatcatacatattctggcccaaatgatgtagtgttccatgggccatcagcttaatatgggcgttcaatcattgttggtactggcccagatggttgattgacatattatttggggattaagttcacttgactcccttaattagtggtcgaatcacctaattattaaaa

SEQ ID NO: 48422 - DNA, 2651 bp, Oryza sativa
agctcggtaccctgcgctggcattttgttcttgggtaaaggcaaacattttcactcttttgctggatttgcgaatcgtcctcttgtctttttatcctaccttaattatatatgcatgcatggatgtcgtttccagaagaaaccacatacgatgaccctgactaaatcagaaggacatgcatgagcttcaggacgactatagagtcagcagtattgttgttctggtccacctagctagacgacatgctgggctgtatgagctctattgatcatacatattctggcccaaatgatgtagtgttccatgggccatcagcttaatatgggcgttcaatcattgttggtctggcccagatggttgattgacatattatttggggattaagttcacttgactcccttaattagtggtcgaatcacctaattattaaaactggtgtaatttgacttcctcggtggtttttggagggtagtttcactgacatggcgcctatggtgcggtagtaacctggtcttcgttctacgtggtgttgacgtggcgctaatgtggtattagaattaaggggttgtacagattgatgccatttccaaccataccatttttgataaagttgctaaagatgtgcatacatttatttttttaccaaaccttggtaagtatataagaaatcctatcaaaaattgtcaataggtgtcaacttatcaaaaattgataaagtttattttggctacaatctaaacagcctctaaagaatatgtgtgggactcatttgtcattcaataaaaaaaatactgtgggactcgctgacatggtgaaatcaccaggtaaaacgccaaggtgaagagaaatgggagagaaagagagagaagggtgagagggagggaggaggaagaagcaggatgacatgtgggcccacatgtcagtgggtccctcaaatttttttaaatgttaaatgggtcccacacatattttttcaattctaatgccacataatcgtcatgtcaataccacgtggaacgaagactaggttaacaccgctatgtcagcgaaattgtcctccaaaactacggagggagtcaaattgcaccaattttaatagttgtggagagtcgagatatccggtattgtggttcagtgatacgaattagatttggccactagctacgggagttaaattgaacttagtccttattatttgagcgtcatgtttagctagtgtttgtcatattgtagtgttgattatttgaagcccagcaattcaattctattattaattgccgtcatgtttagctagtgtttgggccggccattaggcaattaaacctaataatctatctggtcgtcttcttcattattccatccatcatatctcctgcgtgattgttaacctctgggggttccttcctttgttcgggcatagaattgaattagaggcaggatcaaatcaacatgactgactgtatacagtacagagagattgtttggaaggtaaacatataagacaggcggctaaagaaaataggaaatcattcgacaacttgagtgcgtgtttcatcaaatagtaatagaaaaatcttcatataacagtgacgagttctaaagaaaattcgacagtatatatagagattgttgatcactctatagacgatatacatttctcaatttgatcgacgaatccggcaactaacagaacaaaccctagttgttaacagttacggatccaggaaatttacgttaagtgtgcctatatatttaggatcactccactatatttttttttaaaaaaagaaaacaccaaagatctgacagcaaaattttaacaaattttgatcgaatttttcaaaaattgatcaaattgtggtctagaattcgtgaggaagtctgtaatattcagaagaaaaaaaacagaaataagcagtccactcctgcttcgtcccttgcagttgcagaaaccagttatcagtgaagatggctgtctagtcctctacacaaaaaccgctatcgagccattcctcttctttgttcttcctccaggctttcttctcctgatctgatttcttggagattaattacaggatctccagacaaatcataaccactattatgctccaatattcatcaagaggattccattttagtgacattttactatcatccatgtccataataatttcatactacattattttagtgtttttccataatttgtgggtatgccggtgcatacccgacacccccggtccgctcctggttattaataatactgtattattcatatttagctatgtgtaaatttaggtttgaaattttacgagacggtaaaactgtgccattaattaaatctttattatttccgtaaatatctcattgggaattaaggaagcagaagccccctgggcatacgtgacacagcaaggggaaagtaaagcggagagacttctgaggttaattagttgagaaaaaatggaggtgaagtgggcgcggcgctcaatcatatcatgcatcactgcatctgcgtgcaccacattggaaggctaggaacgaaagcatctccaatctctcattgctgacctctttaaattaacccccttaatttgaccaccctacgtaccagctttcatttcttaatttaattctctggcttctgtatt

SEQ ID NO: 48423 - DNA, 3458 bp, Oryza sativa
acgataaggtttggtctttcgaagttttaagacgacgagatagctatttaataaattttaagtaaaatcatactgaaaaatatatgattttgtttgggggctagccgcgcaattgcgcgggccacccagctaatttttttctaaaaatagctaatacttaattaatcatatgctaatggactgctccgttttacgaaagatgagttgctaacacccaccaacgaacactactcttatatatggatcgatggatgcgtcagtgcactgcatgcgtagtggagacatcggcggccgggtctttttaggtagtatacccgtaagtacgagtaattaaattaattagacatcgagatgcatatctttgatacgtcatgcgcactgatacatgtaatgtgatgaggaggggggaatcgaacaatcattttccaactttcaggtgttgttttggcatgcatttgcatgcgcccgtcgatatatccatcggttaatcgagaattgtgacgttacacggatgcatgattagtgaagcatcaaatcgatgaattgaatcttgtgtggtgtagaagtatagtacttaattttggcgtgcgagagcagcaatcctgataataatatcatgatctccgtcaggggtagagctactgctgtactaacctgtagaataaaggttattggttcgatgtcctccaaccgtctcactccttcatcataattgtatgggggaaggaaacccacccaccttagtgtggtgtgtactcctcatgggccacgacttttcatggcccacacccgacttcatttatgggccggcctgtctggacgacggcccatcacctacctatccatcttctcttgcagctgccctccccgttgccattcgatttatttgtaggtcttcatcactgccgcatgtacatatgtactccctccgtcccataatataatggattttaagtttttacttgtaacatttaaccactcgtcttatttaatttttttaaaaaaattattaattattttatttgtgacttactttattatgcacaagttttcattttttatatttataaaaaaaattaaataagactagtagtcaaacgttgcaagcaaaaactgaaaatcccttgtattgtgagacggagggagtactgtacttcatctagcaggagtacttacttgttggatgttaataactccatcgttttatctttattttttttcccattgcaggtgcagcgagcgaagaagcttaattgtacaggttagtacagcagtagctctacccctgacggagatcatgatattattatcaggattgctgctctcgcacgccaaaattaagtactatacttctacaccacacaagattcaattcatcgatttgatgcttcactaatcatgcatccgtgtaacgtcacaattctcgattaaccgatggatatatcgacgggcgcatgcaaatgcatgccaaaacaacacctgaaagttggaaaatgattgttcgattcccccctcctcatcacattacatgtatcagtgcgcatgacgtatcaaagatatgcatctcgatgtctaattaatttaattactcgtacttacgggtatactacctaaaaagacccggccgccgatgtctccactacgcatgcagtgcactgacgcatccatcgatccatatataagagtagtgttcgttggtgggtgttagcaactcatctttcgtaaaacggagcagtccattagcatatgattaattaagtattagctatttttagaaaaaaattagctgggtggcccgcgcaattgcgcggctagcccccaaacaaaatcatatattttccagtatgattttacgtaaatttattaaatagctatctcgtcgtcttaaaacttggaaagaccaaaccttatcgtccctctatttctaattatatagtttttaaaagtcacaccacatgctacctcttacttttgtcatatccttttttatttgcctactagatctatcactatttctattcattctccttgaaaccttaaaaaattagatattatagttttagagtttattctctcattgggtagtcccgtcaaacgctgccattatactcctctacgacatgtccacagtcttccctctttattgtcattaggattttaaaaatcgaacataattatcgttcggggtttattttttactttacagaagtcccgctaaaccgtcagcagctttgctattgtactcctttatggctcgcccactgcatcgcttctttattgtcattaacattttaaaatcaaatatgattatcattgttattttttttttgctttttagaagttccaaacctttaaaaattggacctttagtttttagagtttattgttttgttgggtttaatttcttataaattttagaagtcccgtcaaacgatgccactatacttctctacgactcatccgctgcctactctttattgtcattgggattctaaaaatcaaacataactatcattggaattcagtttttattttttaaagtcccaccaaccgtcggcggttttgcaactatactgctatacactccgcccgttgcttctcctttttattgtcattgagattttaaaagtcggatatgattatcaatggggtctattttttttactttctagaagtctcggcaaccgctttttatgtttgcttcacggcctacctgtcgccccaccttttaatatgtcgtatcaaccgccaccactctactcctttataggcctggtacttaatttatctcgtcatgtgttttagatggtcttttctttcaatagtctttattttttatcaccaattttagttatttataaatactattcctaactgaaatcttttttctttttctaatttcagaatttatttttttcatattttaattaataccgtatagttttcttttaatatttttattttttttacttttgaatttcagttgtttcaaaattgtattcttacatgaactctcttttaatttttctaactttggatattattttattttttatttaaaattttaattaatctcgtattgagtttcttatatggattcttctttcaatatcgcttatttttaattctgaattttagttaattttaaattgtattcttacttgaactcttcttttctttttgctaatttcggattttttttatttttattttgaatattaattaatctcgtgttgggttcctatatggattcttctatcaatataccttatttttaattccgaattttaattatttttaaattgtatttctacttggactcttcttttcttttataatttcggattttattttgtttttattctgaatttcgattaatctcgtatcgggttcttatatggactcatctttcaatttcagctatttttaaattgtatttctacttagactcttctttt

SEQ ID NO: 48424 - DNA, 3569 bp, Oryza sativa
cttaatggtcaggcataatcccaaaatagtgatgttaaagatattgctgttaaattatagaattctcttatgcaaatgcctattttctaatctgatcttatgccaagaatctttgatgttggtgttgtggtcaagtaaggggaaaaagtgtagcttgaacctcccgatctcagctatttctgacctctaaatttaggtaaaggccaactgaatgaagcaacaagtcgactacaaaattttccaggtcatttcagaaattatacattattcttagaacctttgttttatgtgaactggaactgttgaattgtacaaaatatattttgttttatggtgcctctagctaaatatggagcttaatttcctacacggagggatcactcacctccaccatatcggtacgataacattttgtagtaagatggttcatgtaatcttgtatttagatgtgcttgattttataattgtggaaagaactaatttgtagcttcaaatgcaattgcttcaggtacaacaaagcactgccattttataatctctttcgttgttcacatttcaggagttacatataagtattttcatttgagtataaaaatataataatgtgttgagatgatgattgtgtggtgactagctctgataattgataattttgtttatgctttatacaatgtgcgtttttttagcactgatcaacatgagattgttctactgaccagttaacttttttgcacgcttagtatttatgttgcattgtttatgccttggatgtaaatgcaacaatttgaaaaaaaacctatattgaaatacgtacgtaggaaatggctaccgcatttattaatgtcaaagcagatagttggagataaagaatcattttttatgacatggtttaagttatatatagctttcctcaaggatataattttaaatcatacctattgttggcaactttttgtgacaagtcgacaagcacgattgtaacacctaaatgccttgcggtgatatggagtcgccaaccacctcaatctagccaaagggccaaatcaagatgggttttgcaaaaagaaaagctaaaccggctagcggagccgatttatagatcaaaatcagcctctacgccgatttagatcgatacgaggataactacccgtctcgtgggcaaaacggaaggtttttaggacaaacctacaaagaggtgttgcactctcgcagcggcggcggacggtttacggcgcaaaccgataaagatggactaaaactagggtaaaatagaaaacatagtaaaagaactattcaagtaaattgtattcgggggttttacaatgaaccggtcttgtcccttaaataggggttggttttgccctctacaggcccttctccacgtccaactcgggatagaaaccaaaggaaacacgaaacatgcattcccgagcaaggaaacccaagacccgacgaaaacagactcggactcggaccctgacggtctgaccccccacatacctgcggtcagaccggccctactagctggtcagaccacccacacacctgtggtctgaccggccttatgaaggaaacccgtcactttccaaacaaattgtcttatcctccaactggtagtgtccaccatttgtggtggtgcttgagaggcaagttgatatctatcatcagatatcacgaagaagcaattcattgttcgaaatagacgacattgaacatggtcaaaagtgcaagttggtgggattgaatccattgggttagaatggcatgaaacttggacctcatgagaactatggacacttctggaacttcgacaacagctttggttgcccatgtactattgttcatgtatttaccatgttcatagcaattgattgaaaacaaggatcatcatttgagggtttttgtttatttattgttagatcctatggagttacaaaattatttatgcaaagttgattaattggattgttcaagattcaaatcttatggaatttattgtgtaaatttgtatgcaagaggaactggtgtccttataacaagcgcatatatattgctttaactggcaactggtgcacaggtttggttttgtggcatttgccatctttccatatgtgccaaagatatgcatcttgcccttctgttattttaatttttaggtttgtaaataaaattagttggttgggttaatgattgtgtgtaaactataggaaaaaagctacagatctttcttatcttttcattttctaaagcaatattaagcactatgttatgggcaaaagttatagcacctaaacattttagtatatatctataaaaaaaatctctaggtgcaatatgttcggtttagttcaaatattgatcacaacgtgcattgcatgtgcacgattacttgtggacttgtaaattggcagagtatttgtaatttggctcggctctgtataaatggaccgtataatatggatattgattttggctctgtgtttggactagaaatatacttggactgtaaatgtggatgggacggtatggtgtatattgtataattggtcatttggctataggtcaactcgtgtaataggactgtacatttataattgggactgtatgactggacgttgtatttgtggtgggacggtgtgacttggacagtgctttggaaatgggatttgtggtatgtatagatattccgagaatgcacgagggcagaataaatggattgcaacatgagactttgtttggatggatgcaccgtattgccaaataggagtttagggttaacgcacgataaatgaatttatcggttgttgtaggattattttgagagtgttcgtacaaacgaacgacggtagcgaagaaaggattttagggacaacgcgtagcatacaaatccaatcgtcgcggtaggaatagaatcggagataattgaattgacgcatgataaataaatacgccgatcgattgtagatagtcaagggagagtgttgggtttgaattgatggagtgattttaaataatcgctgggcgagagtttgagagagcaacaatatcgcgataggacaaaaaagttttgggtcattgatttatttagcatcgaagcacataacaaattagaccgcgaaggtaagagaaggtaaggatggaaaaagaaaggtataggaaagggtgtcctttctagagatagggtttaatcaaaatctatggcacaaattctaaacacacacaaataaacaataaatcctaacatgcaaactaggctatacctgagggaaaattagacgttgtgtgagaaggtcatatcttttgaaaatagcctattatgaattatattttgcaaatagggtttttaataaatactttactaatatatattattttgtaattaattttccgaaggcaaattccttttcaaaggttcgtataaaatagccatagctatgtttctttattaaaagggtatttatttcaatatactacccatagagggttttatccaaaacggtaacatgtatttatgtgtagctttattacaaaataattatgctgaaggggttctaatagagaagggtttt

SEQ ID NO: 48425 - DNA, 3374 bp, Oryza sativa
atgaataatgcatgaaactgagtttataaaattatttaatggcataaataaataaattaaatattataaagttgaatagttgatttaaaaagttattagaaatgatgatgaataaagttttttagataaacatatcatttagaagcttaggaggcttgtccttcaatttgtaggtagaaaaagaacgtgaccttaatttctcatatacttgcaaatttatatgataattaatttgaatgtcccaaacgacgtaagcagacagtactcttttgaagtataggaatacttgtttaatttttgtgtgtcgtggtgcatcgatctgcatctgcatgtgagcctcactccctaactatccttttggttaatgtacattataatcgagttcactttacaagttagtggtgtgttgccctttaatttgtctttctcgtgcatcaagctaattaatttaggattgcactacgggtttcacgatcaaatgaaatctcttctttcttccaagctactcctagcttaatttatagtagtaacttttcttttcatgttacttgctaactcagtctgtgtttagttcgtgtaccaatttttttataccgacacatatttaaagtattaaacgtatactaataacaaaacaaattacagatttcatctgtaaactacgagacgaatctattaagcctaattaattcgttattagcaaatgtttactgtagcaccacattgcattgtcaaatcatagcgtaattaggctcaaaagattcgtctcgcaatttacatataaattgtgcaattgatatttttttcatccacatttaatgctctatacatatatctaaacatctgatgtgataaaaaagttaaaagttcaaaagaaaaaagtttaaatctaaacacggcctatttcttcagcggtggcatgcctgcccttctttcctctgtcaccaccgtacagtacatacagagggaaaggaaagctggtcatgctaccgcacgaaccaattttttaattaagttaatggatcccctttcctttaattaaattttgatttttgaatgatctctgttctgtgtacgtaagaccgtagaggccgtccgtccggccggccatacgtactgatagagcttcttcatctgcggtgcaaaaatattgtctgaagatcgaacttattgcatatctcacgtgtatacttcctcccttccaaaataaatcaacctcattctcattgtaaaatatcacatccggtacaacttggtttaggaggtgtttagatctagaggtgtaaaattttagcgtgtcaaatcgaatattatatagggttcgcatgggtgtttggtcactaataaaaaaaactagttacagaatccgtcagtaaaccgtgagacaattttattaagcctaattaatccatcattagcaaatgtttactgtagcaccacattgtcaaatcatatagcaattaggcttaaaagattcgtcttgtaaattagtcgcaatatatataattagttatttttcagcctatatttaatactttatataggtattcaaatatttgatgtgacatgaagtagaatttttaacagggatctaaacatgcccttatattgggatgaagagagtactagctactactagtcctagaatatatatatcacatcatgtatttttttggacaagtatattatttcctcaatcccataatataagggattttgactttttacttgtactgtttgaccattcgtttgattaaaaaaatttggaattattatttattttatttgtgacttatttattatccaaagtactttaagcacaatttttcgttttctatatttatataaatttttgaataagactagtggtcaaacagtttaagaaaaagtcaagatccttatattatggaaggagggagtatttgtctgtcagtcattaactggcttatgcaggttgattttaattaattccctatcactccactaggactccgaggctgtacagacccatattaagggtgcgtttagttcatactaaaattgaaaattgaaagttagttaaaattaaaacgatgggatgaaaaaattggaagttttgatgtgatgagaaagttgaaagtttgaagaaaaagtttataactaaactcggcctaacttactgtccgactgtatacttaccgtcagatatcagctggttgtgatgacgtctttggttatatagttattggtaagtttgtagaagcctaaagcagctttagtttctcacacaatctccagtttcgctaaatagtttagactatcacctagattctaaaaatatgtagttgtacgattcaaaagatgaaaacgcagtttttttcatattattagaaattggctattaaattcatagaatctctaaggctgcgttcattgctgttggttcccaaactccatccgtcttgttttccacgcatacgcttcctaaactgctaaacgatatgttcttttttaaaaaaaagtttatatacgaaagttgcttaaaaaatcatattaatccatctatctatctattatattattaagacagctcgaaaagaaggcaccacgttcaccgtagaggtctagaaattaccacgttaatcggagaaaaagaaaaaaatttcgaccgcttgatcattgatagcctatattttaatggctgagatttaattaaatttttggaagattagacttggtttcacgtagacggacataccaggcactagaaaccagacattcatatcagacacggattgacatgtgcagtagtaataggacaccaatacgattgacatgtgcaggatttttagaatttgtattatgtgtagtatacggattaacagttttgaaaggaggcaccacgttcgctgtgggggttagaaatttccacattaatcggagaggaaaagaaaagaagagtctaagtagaaatacaatttaaaaatagctgaaattgaaagatgagtccatataagaacccgatacgagattaatcgaaattcagaataaaaacaaaataaaatccgaaattataaaagaaaagaagagtccaagtagaaatacaatttaaaaataattaaaattcggaattaaaaataaggtatattgatagaagaatccatataggaacccaacacgagattaattaatattcaaaataaaaataaaaaaaatccgaaattagcaaaaagaaaagaagagttcaagtaagaatacaatttaaaattaactaaaattcagaattaaaaataagcgatattgaaagaagaatccatataagaaactcaatacgagattaattaaaattttaaataaaaaataaaataatatccaaagttagaaaaattaaaaga

SEQ ID NO: 48426 - DNA, 612 bp, Oryza sativa
ttcaaggataaattattccactgttccagcctccaggaggtcccgacgcatcgttaatagtccttagctcactgcaaatattttgttgtgaggaacatggcgcaaagttcactgcaaaatttaccatatgtattttccttagtctatgattcactccttatgtaattaagtcgccccttccctcctatttctctctcgacggactatgatccattgttaataactttttatctttatttttctcctcctaatataaccggcagtcctcctgccatataccatttcaaaaaattagtatgatggttattgcatgtggatgatctgaatatcaaaagtaaacagcgctgcatcttttagcttttgtatgttattggtctcaagattttgcatgctagatcacaatgtaatcttcatatgtgcttatagccattctaaacttactgtacctttgatgtggtttgtctcttcagttgacaggagatatacatgaagaagtggagaatcataaccgaatgctggacagaatggtactaatatcctgcaagatgctatctttctttgcactactctctaatgcatttctttgctattttaggtaatgatatggatgct

SEQ ID NO: 48427 - DNA, 1625 bp, Oryza sativa
ctgggtgtctgaaatttgctgcgtgatgcattgtgggttgtcaaattgtccctcaaacactatgttgttgcgagattttcacagcgtgtaagcgcaagcagcaaaccaaattggttctattccctttgatgagtgattcatgtctatgactgcttgtaggaaggccgagcttgattcggatttgttggccagctgcagtaagttcaatttttcccggaggttattggcattgttgcatcttaggaggatgtgatctgctgattctagtgcaggggcacaaggagctgtggggatcttcattccagtttttgctgaccatattggatttggtgtttagtctgtctttgaatgctagccaaagaaaaatcttacaattttgtggtatggtgtggatccatatataatctgctggtttccaaatggatccatggtatgtcagcaagcgataggcatttgctgctgagactttgggtgcagtatacaagaattctctttgtgtctgttttctctgggatggggcagagattttgcaagatttgcagcagtgcgtgtagttctgattttgcttggtaggaaaggctaggatggagctgtatttgctaggaattttgtctgaattgtgattgaactgtgcaatccttatgcaaagcaaatgagtataaaactgggtaagcaaattccagacgttgatgcagccatttatccttccaaatcagagttgttctgccatttccgagttttacctgtgttgtagagcatagggtctggaattgtgatagaatgagtttccaagtcggtgtatcactggttctgggatgtaattgtaatgtgttttgcatatacctctctctaaaccaattagcgattggatcattcgggcctgcgagcaccttatcttctagctttaaaattaatgctgtgttatgtgtccttaagtccttgatccctaatcctcctttaatggatttttcacctttccaaaagaaagcacgacttattttgtcagttgtctcgatagatttctctgtccaaatacatatagtaagttgggattgctgagataaccgaacttatcattttgatctagttcacctgtctttatcagtttgcgttgtgtcatccgtatttgcagtaactcttttgtggatttgtttccgttctgcatacaacactaggctttgggtgaatcgttaaggtgacccaaaaaagaatgtcaatacaactcattaattaagattgaaactgcggtatttttctgactattaattgccttgggcgacgttagaactagcatatcttgtgtgcaagtttcagcaactaacagcaccacaaaaatcgattgcttttctttttctttaattagttctgtcgaagaataaaagtggagcgagaattaaagaggaagatatttttatgtctcccaccggcaggtgggcccatacagttagtatattatcttttgattgatgatgagaaagaaaaagagagggtccgtggcgccgacaggtggtccccgcatgtcatcgaggtggaaaaacacgaaaccactcaatcgaaacagtagagataaggaggacaattggaaaagagcccctctaagattagaaaattactccactatatat

SEQ ID NO: 48428 - DNA, 1431 bp, Oryza sativa
tttttaaaatttttcataaattttttaaataagacggatagtcaaatgttggacacggatttctacggctgcatttattttgggacggaggtagtactaggactgtcagctgtccggctgcttgcttgatcgtactgttgagctctgtgcagatgcatggagtaaaagtgtactccatctatgacgatatgcacctcctcatcgaaacgtacgtcgatatatctatcgctcctactgctcatcactatgcaatgcacgcggaaactgatctccagcagatgagaccatcatcatcggatcaagtccattgccattatgaagctactactttaccagctagcatgagttaatgtgaataatgcattaatcattcgtgcaggtaagccgtccatatcgatcaccgtaacgcaaactgatccatccatcaggatcgggatcggaatcgggatcgggatcgagatcgagatcgagattgagagagattgctcttccaccggtcgacgatcgatatatcttcatgcatgatcgattggtagtgctggcaagttattggcgtgcgtgtgcagtcgacctgacaatgatgcatttgcaagggtacttcgatgctgtaggccaggatcgaattgacatgccacaaacgccgagttactaggtgttgtctagtatcaaagttactacccactccgtcacatgatataagggattttaaatctaggtgtttcgtcgtgggaattgctaagtaattttaaatatacttcagaagataaagttagaagtaaaaatgatattgttattaacaacaatgatttgtcaaattatatttggagagagataaatttagtatacttcataggaaatcgtagaaaaaaaaattaaaatcttgatcaagatttacgtcgcaagaaacgagagatatggaaaaaaattgatgagaaatcatggtttattagtaagtcaggttttataagtattatcacaatacaaactaaatgatatctttgatgctgaatactatatagataaatgtcctttaagtactataaatcaatgcatatttaaatattatgaaaatgatactccataagttttgatgattgcataagcttgtggattcaataaattatagatgttgtagtatgcttttatgagttttgatatgtaattattagtggtgaatgattatgtggtatatttgcatgatgagttttaagattccgtgggttgatattgatcaatgaaatactccctccgttaaaaaaaatgaaaaatcggatgtaacacattatagtataatgaatctggacagaggtatgtccatatacgtagtcctaggatatgttacatccagtattagtttgattgatatgtcacatccagtataagtttgattttttatgggacggaggaagtattacataactgcagtttgat

SEQ ID NO: 48429 - DNA, 672 bp, Oryza sativa
actttaaataagacgaacggtcaaatgttaaagataaatagtgtaaaaatgtacttattttgagacggagggagtagtatcttttcttgattcgatttctggatccatctcctttattagtattcgtacttgttgcctccctcgatcgatcaagacgtgtcttggatcaccaataaaaattgcaatagcagtgatgcgtttttagatcgacctgtctgcttcctctccttgtctcaagtagtcaacaatcttatgaacccattttgcagcgcttaacaatcttccaacgaacctttgcatcaatgcaaagttgtactgtaaaagtacatactcactcctactacggtatcgtccatccatggctcctcatgcctagagcatcttcaagattcatgctagccatacggctcttcctatcaaattctagcgacattgcattcgcaggctctcgacagctgcaaaagaccagctcccaccaccttacagagatgttgcaggaagaaatgcttcaaaaccacaaagatattagacacacggaagacgggggccgggttggcctagtctgcaccaagcagatttatgaaagtatcccagctcctctaccccctcgccaaaactgagaaaattgcatatctaccattgcataagattggcttcgcagaaatatcatca

SEQ ID NO: 48430 - DNA, 611 bp, Oryza sativa
atctggagggatcgacctcgatctctatctcaagctaagctagcccgctctcctcttgtgtgattaatattctgctcctccgacagaaatgatcccctttaatttttcatccggtttgtgtatggttgcccggccggtgctatatatgggagaagactagctttgctctatcttattatatcagggatttagcgtgtaactaagggtggtttgggggcacttaattgttctattccaagttgtgttggtgtacatggaatatgtgtacaagcatgacatataaaaaaagtaaaagtagggaggaaagagtgaaaaggctacgtacaccctttcagagggtgcaccttacaagtttattaattactatcacgccatgggtagaatgttggacatatgtggctttatttcttgtatcaacgcttgctatggattatttaagctataaaattgatggaggcacgggcgagccgttactttaatttcttgtctgataatgtataatacattagtattctgacaatatcttttgtagttagcatgagtgttaattagtagtatagttttgtatgcaatacctctgtcccaattttaagtgcaattgtgggtttccg

SEQ ID NO: 48431 - DNA, 636 bp, Oryza sativa
ccgacaactgcagcccgcgctccccaacttgcattgccattccatgctttttgcgtcagcctaaacattcgcttactactcgttaatttcttgcttggtgttcaactcattcaatttattgtacttgtcaaggtaattaattagtaatggtgttaagcaaagcatcatattcatgggtgccatactactgcctaccgtgtcatgtgcgcagcagaacgagaacaacaatattctggagtactccactactgtgtaactaacctactactactccccctgttactaaatgctaatgcagcaggcaggcgtgtcagctactcagctggcaagaataattaatgaagggccggagtgttaaggtttaattaagcaaaccgcctggcaagagctcatgactccatgagcgagcggcgagccccatcaaacaagagggaaagaaaagaaaagaaaagaaaacaaaggattgattattgggaggaagaagcgggctgacattcctgacaaaatgtcaagctggaatggaatcatcccgagcttaggattccttgaaatttggcaatgagctgcagtgggcactggagtggacaagtgcagttgatgagtgggtgctgcaaaagggcgtcacatcttctgatc

SEQ ID NO: 48432 - DNA, 581 bp, Oryza sativa
  unsure (1)..(581): unsure at all n locations
cctgtccatgtgcttgtctttatagttggcatgctggcatagagtgcacgtgcatgacacaatagattgctttataagcagaactattatgtaaaccacctcatgactgtctgacattgactacattagaaaaataaggctaacactatttaacgacttgagtcttttggccgaaaanaaaaaaagtgctaactacttgattatgagacgaagttctttcttgcactagagagaaaactgaattactatagctttttgtagataatgggataatcgggctcttgaatgactggaagagaatgcgtgctaccataactaatacgagatggacctggcctacaagctgacatatatgactctgactgggcattcgtggggctcttatgcgaaacttataaaggaaacatttgatctgcatgtgttaatcatgaaactctgctgcgtgcggtcccgcagattaccctgatagatcgtgacgattctaagcctaataatgggaactgagtcatatagatcaagcatccgtactgcattgcttggctagacatttacatgcaggattgtcaagacttataatatct

SEQ ID NO: 48433 - DNA, 505 bp, Oryza sativa
acaccggctttgcaggttggggttagatcgttttgcactatataataccaaggatggagtttttatcgagctggtagaaataaaacggcttaatttggaattatttactgatggcccatgacttgttttcgtgctaactgcagaaggtgactacttatagctttgtacagtaacacggcaagagttgggcactttcttgtgtatttgctagtataaatttccagattgtctgacatatttttctagggagaaatgaccccaattttttccatcgaagaaaaatataaggacggtctgaacatctgaatgtgagatcaacacattcgagaatccaaaatagcattatagaaacagctagaaaagaggaataaagacatatcattcaaggataaattattccactgttccagcctccaggaggtcccgacgcatcgttaatagtccttagctcactgcaaatattttgttgtgaggaacatggcggggtaccgagctcgaattcgcc

SEQ ID NO: 48434 - DNA, 632 bp, Oryza sativa
tcttggagccggccgccgttcgcgggggcgccggttgcgccggtcaccaccgcgccgtcctggggctcgccgcccccggcgctggtcccgttcatctcgtggtcgtggtcgccgcttggctccttggacgccatgtcgtcgtcaccggcgccggtggtgtcgttgttgccaagcccgagggatgggtcggcggctgtcaccggcaggctgagccgcccctcgtcccaccaccggctcgccagcttctacctgcggcctatatatccaggctaggctagggtttaacttcttcttcttcttcttctcggcttccgatcgatcgatagatcccttcaattgattagcttctggctagctagtgcttcttgctcgctgcgccacctggatatatatcatatgtatcgatccattagctagctagtactactagtttaattactattatgctgaaattgattaagctctatctatctatcaatcggaagatgcacatcacaggttgaagatcgagctagctagcttgcagttaatcgattgaggatctcgcaggctagctagaacatcgatccacgagtggaaattaacatcaaattaattgtatatatgtatatcattttgatggaagaaaaatt

SEQ ID NO: 48435 - DNA, 585 bp, Oryza sativa
ttctggtatacaagctgacataatatgactttcactttttttttgtgtgtctcgtattcaaaacttataaaggaaacaattgatttgcatgtattaagcatgaaactctgctgcgtttggtcccccggattaccctgttagattgttttgattctcaacctaaaaatggtcactgcgtcataaagatcaagtcaccgtactgcatttcttccctagacatttacatgcaggattttcaagacttataatatctttgcaacatgataattcttaaaaaataataggattcatcgctgtatgtagcgctcgaattcatataagtggtaacgacaggagtaaaaccgcaaaatattttggtaaaagcaatggtaatattaaaatgaagcaactgacagcatcgtagaataacaagttaacacttaacactatgattgtaattaagcattgttttccttttctttctgtttttgagaaagcattgttgcctgaattgaaaggtgaatctcaggtgctgctgaagtgctgattgtggaggattttgtttggtggtcaaatttgtcttcattagaagatgcacggcgacaa

SEQ ID NO: 48436 - DNA, 521 bp, Oryza sativa
ctaggggtgaaaacagggtgggtatttcctgatcgcctgcccgggtgtattaatttgtgacaattttaggttaaaaattgaggtattcgggagtttttactgttttcaggtccaaatataggtattttctgttggatataagatcgggtttgggatgacgatatcttacatatgcgtgttatctggtataaaacacggatattacctttttaaatatctggattttacccgaatacttgactaccacaaagttcgttccaaccacagccacaaggcccaaatagcccactgctccaccaactcaccagctaaccactaattgtggtctaaccctagccgcatacagctcacgggcaataaggcaggcgtcacaaccatacatctcactccaccgccgtacggccacaaccttccgcatatctctgaaaccttcgtcttagacatcctgcatcgggagaaggcactaataaagatttttggaatcgctcgtgcgactgctcggtgttcgtccacaacgactc

SEQ ID NO: 48437 - DNA, 768 bp, Oryza sativa
cgaaatatgtggcttgtggaatttttcaaagctctaccgaaaaacttctctcctcgaaaacacaatcttgcaagcggaatttggaggttttaatatcgccgaacccagcaaagcgggggaaaattggatgtaactttttctgtaaatgtccgtggatatattattttcctgatttcgagtccgtatgagaaagttacgcctattttaataaatgacacccgaatgatttttcgatagagctttggaaaattctacaagtcacatattttgtctgtttgagtttattttttctatggttggttcttgtattctcctaagtgtgaaaataaaatatcaaaaaaataaaaataaaaaaaactgcatctctgtgtactgtttaacttatggctatcatttcatgtggttatattttgaattagagattaagtaatttcatatagtggtagagtgcattatgtttaacatgttgatcaaagggttttactaaaggagttatggtctaattttgatgaaggtgcaaagtaggctaagtggtatgctatatttcgttcgagtttaaatttttttttgtggctggttgtatcgtgatcctaagtgcgaaaaaacatccgaaaaaataaaacaaaaataaaaaggttacaactctataagaaacaggaatggaggcgaggggtggtgggggatggggcggcgccagcagccctactctctagggcggcgccagccatgttggcgctctcctcctgccacgtcggttcgcgtgtgcca

SEQ ID NO: 48438 - DNA, 803 bp, Oryza sativa
ctcgcaaaatagcctaggggttatggaatcggttttgtcggtaatctacgtttaatactcctaaatagcaagatttctgagggctatttaatagctcggaggatccaaacaaagccacagttacactgcacgagctatagcgatcgatctatcgatcggctcgccatttagggtctgttcactttaatgtcaaaaaaaacttatcaaattttgtcattgctaaaaatttgatatagttgtcaaaattttagtatgatttcttatatagttactaaaatttgacagcgaattaaatatagctattctttttagcaacattaccaaaaattagtaagattgaaaatagcttcaaagtgaacaagcccttgctgtctacgctgggcggcttctggtccggtctggtggttggcgtttcccttgccgccattacttgctgatcgatcgccgaggccttcttcttgggttcttcctcctccgtcacacatgctctgcgcccaaggatatgatcgctccgatccaccgcgcgcgccgcggcggccacggcccacggaccacgtgtgcttccgggcacgcggggcgcgtgtcgtttggatcagaattagctgctgcgttattgtaagctcaagatactgaaagaagctatatagccgctagaagttcttcgagcagggccacagctaaaagagagatagagaggagagtgtctggtcaacatcacattttactactccctccgtctcataataggtgacgtttttgactttttatttgcaacgtttgaccattcgttttatttgaaaaat

SEQ ID NO: 48439 - DNA, 762 bp, Oryza sativa
taattacgtaaattttttgaataaggcgaatggtcaaacatgtgagaaaaagtcaacggcgtcatctattaaaaaacggaggtagtagatagatggccaacaagaggatttctagcccagtagcacattagcccaataaaaattatacatataaactttatatttttacatatacactagcaaatatgcccatgtgttgcaccgggtgaatatgaaacaaatattaatgtttaaaatcttgaatttgtacatacattgcaaatacctcgaaattttatacgggaaaatatcaaaacatatctcatattgtatgcgcgcttaggtcgtatctcaaattttctaatacacgcgtgaggcactccaaattttctgaacatattccaattttcacaaatattcacaaacaggggttgtcacagctgtgacttcatcatcccctgcaaaaagaaaaaagaaaaaaaaggtatccgcaataggaaagaaacatgcactttgtagtatcaaaataaaatcactcaaaaatctagaaatggtttactgagtagcccactattttctcgtttgttgtgatgacccggcgcgtcgagcgccaaatctgcatcggtagttcggagtatttgatgttggtgttggttgatttttcacagtgtcacatcaaatgtttgaacacctgcataaagtataaaatataggctaaaaaataactaattgcacatattgtgactaatttgcgagacgaatcttttaagcctaattgctcca

SEQ ID NO: 48440 - DNA, 1504 bp, Oryza sativa
aaggggaggggaggggagaggagaggagagtgagggggagaggaaaggacttagaaaaaaattcgggccatctgccatgtatatatatcacgctaattttcgcaggcgttgcttaagtggtccgcctgattttcgcaggcgccgcttaagtggtccgcttgcggacatcaaatttcaccctgacttatatttttgtagccggtcatttggctctaaacgtcatgtccgcctgcgaaaataagacccttacgttgggaaaaatgctttttctagtagtgcatgtttcatagtttttctgttaatatttaaattaaaaaatgttagccataccttcacaagaaaaaaaaagtcctagcatactttttaattattgacgcgtcaaaattaactttttaagaaggttacattgttatagcggttttgctattttacttacaatagatttttcagctcttttttttatttttcacataggatcttatatcaagattcaggttctctcgccgtctagcgcgtctcctgtcctgcacccgcgcgcgcgggctgtggccacaggaggaggtagaggtcggttgatcgagatggggtcagaggcggcggcggcggcgagggcggtggtggtggcggtgaacggggagaggtacgaggcggtgggggtcgacccgtcgacgacgctgctcgagttcctccgcacgcggacccccgtcaggggccccaagctcggctgcggcgaaggtgagaactaccatctctctccttctcgatcttaattacggctgtttgcttcgatctcttcttctgcttgctcgtcggaatcttgagctatactggtccatccattaattccatgagatttggtgttcgtcggcatgtttatttcgcgaaaagaaattttttcctcgtgtcacatctgatatatcggaaggggttttcggatatgaatgaaaaaactaatttttcataattcgtttggaaaccgcgagacggatcttttgagctaattaactgtcattagcacgtgagttattgtaacacttatggctaatcatgtactaattaggcacaaacgattcgtctcgcgattttctccctaaccatttaattagtttttttaatctatatttaatatttcatgtacctgtccaaagatttgatgggatgttttttaagaaaaaaaatttgaaactaaactaagcctcattcttcctttgttagtctgtccagtttctagtctgtttttttttgacggtcacttgattaagtctgcgtgtagtttttctcgccaggtaaaatctccatgtaattaagtagttctactgtttttattggtgtttcccggatgtggcaataattagtactttttttagcactgtttagctcacctgatcgctgtacatgtcctccgggaagaggaaattaaccgtacgcaagcacatatcatgcagaatatcgtagcaacgaattcacaacaaaccaagaagaaggtgcccagtagcttactgga

SEQ ID NO: 48441 - DNA, 616 bp, Oryza sativa
  unsure (1)..(616): unsure at all n locations
cctaaacttattgtgcacgcagagatcctcgcgttattgttttattatttaaatacattatgttttcttaattgtgaagctttttaattcatcgaaaagacatataagattacccatgtgtgtagagtttaaattacaatccacaggtaccacctaggtttatattcatctcagtattccataagtcgtagagctacaaaccaatgaaatcaaattaactaactgttctgttttttttaaaaaaaaaactactcttatgcagtataaaaactactagaatacaaaagcaatcttaaaaaacatatatactggaaggtgagatataacttgtgcgtgtgtgtatgttgtgcggggaataaaaaatgaataacaggagttaaaagacttagaatgagatttactgatttaatttgcaatatcaacaattcaaattaagcatcggaaacttccgcgtacctgtcagacattgtacgccgcaatttccaaacccccattttccaaaaaanaaaacccccccaccctataaacagcttctctctgcatagcagcatagtgcatatgcaattaggttgtccagcaaaaataagacaattattcagttacatactactgagaa

SEQ ID NO: 48442 - DNA, 874 bp, Oryza sativa
aattatcaatggggtttacttttttttactttctagaagtcgcagaaaccgccttgcccgttagctccatggcctgcttgtcgttccttctttaatcgtcattaggattctatttggtgttttattaaaagtttttatatgtcgtatcatccgccaccactatactcctttataaacctgttatttaatttatctcgtcatatattttagatgatcttttttttttcaatagtctttattttttatcaccaattttaattatttataatttgtatttctaattgaaatctttttttctttttctaattttagaatttattttttatttttgaatttaagttgtttcaaaattgtattcctacctgaactctcttttattttttctaattttagatattattttatttttcattttgaattttaattaatctcgtattggtttcttatatggattcttttttcaatattgcttatttttaattccgaatttcagtaaattttaaattgtattcctactttgaactcttcttttatttttgctaattttggattttatttttattttattctaaatattaattaatctcgtattgggttattatatcgactcttctttcaatattccttatttttaattccgaatttcaattatttttaaatcgtattcctacattgactctccttttcttttctaatttcggattttattttatttttattccgaattttgattaatctcgtactgggttcttatatggactcttctctcaatattacttattttaattctgaatttcagtaatttttaaattatatttctacttcaactctcctttttcattttctccgattaatgtgggaatttctttttgct

SEQ ID NO: 48443 - DNA, 1357 bp, Oryza sativa
taaaaaaaattaaaatccggttcctatataaaaaatctgcccatgtgataatactccttccgtttcatattataagtcgttcgattttttttaagttaaacttctttaggtttgatcaagtttataaaaaatatattagtattttcaatataagacaaacatatgataaaaatacagttaatgaaactaatttgatattttaaatgttattaaatttatctataaactttgtcaaacttaacaaaaatttgactaggaaaaaaaatcaaatgacttataatgtgaaacgaatagagtagttttttttaaacgaaaggcacaacacaccaattcatcgaatatagaaggagagctttatttacaagtaaaaataaagcgagaaaaaaatatttatagacaaggcagccgcctaaggcaagaactctgctaggtgtttggcttccgccaaagcgccaatgtccaagattttgactcttccttaatgttcgcaataaggaccaatgagaatagtttcttgttccgaaagattctctggtttcactcctttcatacttcccaagaggttaggagaattagggatatggtccctttcttaggtacaccctggcatgttgctagatttttcatcagttctaaactgtggtcacttacgttcagtttgtccacctcatggggtcacagactatctagttgacaatcgcttcccaaattgtccttatgtatgtgcaatccaccattaggtgaagagaggtttcatctgtgcatcagcataatggataactaccattgttctgccagtctcgaatcaccggtctatctgatgtccatactctattctgaataattagccacgtgaaggtttcatggagcctagggtttccgaaataagtggtcgtagtttattttgaacgacccaaagaattatgcctagtaggttgaggtggtggtgtattccccatagttcatgagatttcaagagatatcgtgggtctcgtccagggttagtgtgacatgttgaattgccatccacaggatgacctgctggtcaagttcccttaatttagacctgtgctatttccattcaaatttgtttctaaaatcacatttgattttagacactgtactttgatttgtgtttgccaaatggccggatttctttggaccccggcgacgcgactggatcctttcggtgggccgccggcccggatggtcgatcgtatgatgattgatgaatgttgtgttgccaccgggatcgagcatggccggcgttcgtggcgacgacgacgacccggcctaaaatgtcaaatcaagaacgagtctcacacaagcttggaacaacccgaacggaaatatttgt

SEQ ID NO: 48444 - DNA, 1206 bp, Oryza sativa
cgatcgtatgatgattgatgaatgttgtgttgccacggggatcgagcatggccggcgttcgtggcgacgacgacgacccggcctaaaatgtcaaatcaagaacgagtctcacacaagcttggaacaacccgaacggaaatatttgtctcgtgccgtgcatctacgtagcccgatgattccaaggcaaacgaatcaacaaaatttggagccaatatgggcatgcgactatgaagtgccgccgttggcctgctcctgtttatgcttccgctgttccgcacacatgtacaagtccatttagagatagacctggccatgccattagtaactaatatatatattatgtactccctccgttttaggttataagacgttttgactttggtcaaaatcaagctgccttaagtttaaacaagtttataaaaaaatagtaatattttaaacctaagataaatttattataaaaatataatcaattattgattcgatgaaactaatttagtattataaatattactatatttgtatgtaaatttagtcaaacttaaaacagtttgactttaatcaaagttaaaacacattataacttaaaacgaagggagtactatattaatccaagtgattagtgtactaagcctctatccgtctataaatacatgcaaaagcctctgaacttgccaagccagtgaaactgagcacacaataatctgcagctcgagataagatttgccccctgcaaagtcatctctagctagcttggaacacataatctgcgatcgatcgatggcttccaagcaaatgctcgctgtcgccgccgccgccgtcgccctcgccgtgctcctcccggcgcgcggcgccgccgccacggagcacatggtgggcgacggcaatggctggatcctcgggttcgactacgccgcatgggccgccaccaagcagtttagggtcggcgacacgctaggtaacggaaaagcctcgtcgccgccgtcgttgtcgccgtcggcggcggcggcggcgtgcacacgatcgattctttctcggcgcgcgacaagctagaaactgacggtcgcggcgtgcagtgttcaggtacaagggcaccaaccacacggtggtggaggtgggcggcgcggacttcaaagcgtacaacaagacggcgagcgcgaacgagtggagctccggcgaggatcgcgtcgcgctcgacaaggaggg

SEQ ID NO: 48445 - DNA, 604 bp, Oryza sativa
ttggcataacttttggaacaatcacaattgaatctggatatttaattattcgtctcctctcatagactggaatttgtaaattattcttctacttcctgctcactactttcccaccttttacctaaattattgagtaaattcagacaaaatcaattacatatagcaagcattggcagcaattatttttcactcttaacatacacacaaatgaaaaggttagaaccagattaattttttttagaatgatccaactttgcatcaactctgccaggtcaaatgtagtaggagcaagaacaactactacactatatgcaattctaatatgaaataaagacaaacagtggcatgcaaaatactcaatacatatgcatcatgcatccatatcaagttgttctgagattgcttccatgattgcgtggtggcactcaaaatcacagctaactaagtgcagtttagaggtattatcaatgtttgcacaaatcagtatgataagtatcatttagtggttgaacatccacacccacataatagtatagatcttagtgtccacacaagctagaagtacttacttcagtacgagtagtagtatcatttagaggttgac

SEQ ID NO: 48446 - DNA, 686 bp, Oryza sativa
tgctatacatctcccgggtgattttttttaactgatatttcacgtttttctatccatagaattcctcgctaggatttatgcaataattggtggaggctgcatacgtgaataataccatgcgtcgaatggtaggcttggttcttttccctttacaaatttttgaaactataaaataaaaaataaaatacaaaattccagtcctatataactaaaattacatgtgtatattaggttgatatgatatgtaagcacattgtaattttgtaattttgataaaaatattgtgtaagtagatatgtattgattattttctttaaaatataaaattatagtaatatataactaaaattacatttgtaaatttagttgatatgacatgtaagtacactgtaattttgataattctttaaaatataaaattataatcctatataactaaaattacatttgtaaatttagttgatatgacatctaagtgcactgtaattttgataaagatattgtgtaagtaaatatgtatttattattttctttaaaaatataaaattacagtcctatataactaaaattacatttgtaaatttagttgatataatatgtaagtgcactgtaattttgaaaaaaatattgtgtaagtagatatgtattagttattctcttttatagtcaattggatgtaaatctaa

SEQ ID NO: 48447 - DNA, 599 bp, Oryza sativa
tcattagctgacagctgaatgccatctttttttgacagaacacaatgcaagtagcaggttaaataagattatgatcttaaagttagttttgataaatggcctcacatactaataaccgagatcaacaagtgtatcaaataagtacaacatgcttgcaagttgtaagatgctaaaaaataattgaatgctatagaaaagtagagtagctattgtatgattggtaatttaacctagacaatcacataggttcgtcaaatgtttaccaatgttcttgtttacttgcgattaatacaactatcctacatacgatgaaatcttgatcaccagaaaagaaatgtaatgtttcatggatgcaacaagccaacttgatcaacaatataaaagaatgactatgcatgttcagatgttaatgtttagcacccagatatgctatatcacacataatgcatggatttaaaagaatggaacaaattcaacagtccttaacgatgcttggaaataaaaaaaccacacagaacataaggatactggaaaaaagtttggccaggcttaattgacatccgcgagggtttatgttgcccctttgataagtttttgaa

SEQ ID NO: 48448 - DNA, 3061 bp, Oryza sativa
tacagttgaagaaatcctggacccatcatagtcataggtatgaagtgcagcttgtttctttgttttccttgcatgcatgtccagtaattgttctgtttgctgctcctagattctgcaagttatatatatacgtatgtatatactaatgcatctggggataaagcgagcatacattttctgttggacactatacatgaatgtaggtgacatagaatgatttatatatccactgtccaacaagaaaagtgagttggtttatatatctactttccaagatgatagcaaaaatgcaattagagttttgcaaactttgtaatcagagaaacaaccaatcacatcctgtgtgattaccctttggtttgctttgcttggagtgtaattagggatatatgtggattagggatacccttgcagtataggcaacaaactcaatgtatacactatgtggattagggatatgtatgttaatataaaactaacagaggaaaaagctactgtgttgcagtatagacaacaaagctactgtgacaatataaaattagcagaggaatacattccctttcttactcttaatatacatcggccggctattcgccggcccggcgaaaaaaaaaattagcagaggaaaaagattagttagaatggactttgacaaaaaaaaaggggagtttagcgtgaaatccttttacaaagctattaaaatgcaggcggtagcctctgatataacaggaatgtataaaaaggtgtggaaaattaaggtcccattgaagattagaactttcatttggttaatgataaaaaaacagcatcctgaccaaagataacttgaggaaaaggggattgaagaaaggaaacgataattgtcaattctgtggaaaaaaaaaagaaacgatacagcagttattttttgaatgtcctatggcaagattcaattgaaatgtggtgatttgtgctttcaatttaaaaccagttaaagatctgaagcatatgctttgggttgatgggcactgaatggtgatacaatgacatagctattgttagttggaattgctgctattctttgggcaatttggaaggccagaaatattgcttgttttaaccaaatacttcccattgatcccactgaaattattttatgtgcttgtaattggatttcaacttggtctgttttacagatgtcggaggaaagacagaatgttgctgtaagctacaaatctcagtatggttggaggatgactctgcaaaggttggagtatgtatgacaaagcgcgaagaaaaagctttcaaggaaagggtttctgaagtttttattggtttgaacagatcctggaaatgaattcatatggatggggagctatatcagttgtagaagttctttttttccttaagttttctgtgtttgtcagtttagcctggtagtgatagactgatagatcctgatgatgtagctgtgtgttagtttgaacgattttctgtttttaagctttttgttcgatgccctggaactgtccaggcatgagtgaccttgtagaaactttcacatttcttttaatagaaatggaggggtattgcccttttgataaagaaaaagggatataatatgttgggctggtattcctgttgatttcaattattctttttatagggcaagcaagggttaaatatggtaaaggtcaagtagttgctttgttagctgtcgtgacttgaagcttatgattgattttttttgacgcaaatcgaaatattctgtttgacgcaatgattgatttgaaatgatgtgttttttagcaacaaattccttttcaaacttttgactttggtttttcgtgtattttctctacagatgcagtggaagatgattgaatgtcttcctggaacatgtgcaagaaattgttaatcatctgcacccctcaaggactgagtgttggttaaaagtagttgttccctgcctccctgggagttagggctttagtagagtttagcgttactagttctcaggaggaatgatgtccagtgcctttcgttaagagttgtgtagaaactgaggtggtcgagtaatcttctctgctgagcgttttcgttttttagctggagtacccagcctaaacttggtttccctttaaagctggcaatacaagctgactctgtttccgtttaaagctgccaatacaaagctgactccgttcaagttttcaaacccaattgggtttgaaaacttgaacatcgaacaactgaacatttgcatcatgattttagcagctatcagttggcatttgtggactgagtgagatgattttgtctttgaaaatatcctttttaaaccacctatgcaagtgatacattagatttcttttctacagcgatggaagtctttgcagagaggagaagaccggagcaggttagaagttagaacaactagttgaagaattcctgctaaagtattgcttcaaaaaaaaaaaaagaatcctgctgaagatgagagttgagacatgccgacgtgcggcccgtagatatctaatactactagttctcttttgtttagatcctactatttgagactgatgatgtctggacttgtgtgtggtactcccttcgtcccataaaaattgcatttctagctccaaggctttgtcccacaaaaattgtatttctagccatgtgaggcccaaccaattgattcatctatataagttttcttccatcccacataatttgggctgctaatgcttgtaattttattaagtatgctaattatatgtgttaattctctcaaattctttttaatcatttgtatatatggaatgtgtgcatgtagtgggttcattaaataaggttatcatggtcattttccaatcctactattttgtcctaaattagctagaaatgcaatttttatgggacggaggtagtaactgggttttttgggattgggcctttttttttttggggggggggtagatgctagttaggaggtggtcttttgcaagggctgctcctttttcctttacgccttgatcacttaattcagggaggagatttattccgcacctcgatattggag

SEQ ID NO: 48449 - DNA, 1372 bp, Oryza sativa
ccatataaaaacttttaataaaacaccaaatagaatcctaatgacgattaaagaaggaacgacaagcaggccatggagctaacgggcaaggcggtttctgcgacttctagaaagtaaaaaaaagtaaaccccattgataattatattcgacatttaaaatctcaacgataataaaaaggagaagcagcgggcggggtgaataggagtgtagttgcagagccgccgacagttggctggacttctagaaaataaaaaatgaattccaacgatagttatgtacaattttcagaatcccaatggcaatgaagagtaggcggcggatgggccgtaaaggagtatagtggcatcgtttgacgagacttctaaaaattataaaaaatgaaacccaacaagacaataaactctaaaaactaccagaaccaaattttaaaggttcgtaacttctaaaaagtaaaaaaacaatgataatcatgttcgatgttaaaatcttagtgacaataaagaatggaggcagcgggtgagccgcaaaggagtacaatggcaaagtgccgctgacggtttggcaggacttctataaagtaaaaaaatgaacccgaacgataattatgtttgatttttaaaatcccaatgacaataaagagaaaagacagcggacagaccgtagaggagtataatggcagcgtttgacgagacttctagaaattataaaacgaaacccaacgaaataataaactctaaaaactctaagattcaatttttaaaggtttcaaggagattgaatagaaatagtggtagatcgaacaagcaaataaataaggatatgatagaagtaaggggtagcggttggtgtgacttttaaaaactatataattagaaatatggggatgataaggtttggtctttcaaagtcttaagacaacgacatagctatttaataaattttaagtaaaatcatactaaaaatatatgattttgtttgggtgctagccgcgcagttgtgcgggccacccagctagtttttataatagtagagatgtgggcaacgctagacagacttacattatgaaacggagaaagtagtaagcaacttggctatagatgatttggagctagtagttggctatactattaaacttgctcttagatgcggattcagattaaacgtgggcacgcaaaacaaaatactccttccgtcccataatataagagaaaacggacgatatgccattctataagatgtgttgggataaaatgctactcaatacaaatgcaccggataaaatgccactcctaccggatgaaatgccactttgaagattttgtgcctaaaatgtccctggaaatatagggaacagagggagaggggagggcc

SEQ ID NO: 48450 - DNA, 1407 bp, Oryza sativa
agggacattttgggcacaaaaatctccaaagtggcatttcatcctgtaggcaacgcattgagtggcattttatcccaaaccatcttatagagtggcatatcgttcgttttctcataatataagaagttttagagttggacacggttattaagaaagtaggtagaagtgaatggtggagggttgtgattggatgagtaatggaggtaggtgggaaaagtgaattgtggagggttgtgattggttggaaagagaatattggtgaataagttatattttgggacaaatactaatggctaaaagttgttatattttgggactgagggaatagctattagcgcataattaattgagttttaattattgcaaacttgaaaaatggatatatttgatattttaaagcaactttcatatagaaatttttttgcacgaaacacacccgcttagtagtttacaaagcgtgctaatgaaaaccgaggtaaaatcttaatttgaagccatcaatgatttttctagttttcgctttactttcttcttcttatttgtttcttttttaaaaaaaacagatcttatttgtttcttctcttgtgaaatacctcacaaacccagtgtctatatcggtcgggcgataggacttaggtttttttaggaagagtttgggcggcgtcacgtctgcctctctcctactcttccttatatattgacacttgttaggctcgggggttttatctctaactaaattcgagtccattttataccgatcacacaaaacatatttatctcttttagtttgttttctcgttagaaaaagaaaccggtatttctttactaagggggtgttagattcaggggtgtaaagttttggcgtgtcacatcggatattatatagggtgtcgcctatggtgttcaggcactaataaaaaaaccaacattattaaaccacgagacaaaattattaagcctaattaatctgtcatcagcaaatgtttattgtagcaccacattatcaaatcatggagcaattaggcttaaaagattcgtctcgcaaattagtcacaatatgtgcaattagttattttttagcctatattttatactttatgcaggtgttcaaacatttgatgtgacactgtgaaaaatcaaccaacaccaacatcaaatactccgaactaccgatgcagatttggcgctcgacgcgccgggtcatcacaacaaacgagaaaatagtgggctactcagtaaaccatttctagatttttgagtgattttattttgatactacaaagtgcatgtttctttcctagagcggatacctttttttttttttttcttttagcaggggatgatgaagtcacagctgtgacaacccctgtttgtgaatatttgtgaaaattggaatatgttcagaaa

SEQ ID NO: 48451 - DNA, 1541 bp, Oryza sativa
gcgccgtcccgttggacgacggcgccagccactctggcgccccaaaaaggaccatttctgggataagtttttctaggggtctatttgtgaaataagttttttaaaaagaccaaaatgtgaaaaatccagattaattttacctgctctaagaaaattctatctgacgtggagtccttatcacacactattaattttacctgctctaagaaagttctatcaagttgaaggaaaccatcatcaaactctacggatgtaggctatgtttagttcacgccaaaattggaagtttggttgaaattgaaacgatatgacggaaaagttagggtgtgtttagttggggaaaaggagatttttgagtgtcacatcggacgtttgaccagatatcggaaggggttttcggacacgaatgaaaaaactaatttcagaattcgcctggaaaccgcgagacgaatcttttgagactaattaagctgtcgttagcacatgtgggttactgtagcacttatggctaatcacagactaattaggcttaaaagattcgtctcgcgatttcccccataactgtgcaattagtttttctttttatctatatttaatgcttcatacatatgtccaaagattcgatgtgatgtttttgggaaaaaattttggggaactaaacaggcccttaggtggtgtttggatccagagacttaactttagtccctatatctagacactaatttagagtattaaatatagactatttacaaaactaattacataaatgaaagctaatttgcaagataaatattttaagcctaattaatctataattagagaatgtttactgtagcatcacatagactaatcatggattaattaggctcaatagattcgtctcgcgaattagttcaagattatggatgagttttattaatagcctacgtttaatatttataattagtatccaaacattcgatgtgatagagacttaaaagttttagtcacatctaaataggacgttagaagtttatgtgcaccgaaaaattttgatgtgatgaaaaagatagaagtttgaaaaaatattttgaaactaaacacgtggtaatctccaaatgatttttcactgccatgactggatcacactttacgatgccagcagagtgttgacgagaatgctccttgatgtcctggatgacgcacctccacgaagaccaagatgtatttaggaccagcagatttgacttgcggctttgttcgttgctacctgagtcgcctccttaattaagatggcgtgggggcttacccaaaaacggatcgcagaaaagtaccctatagtttgtttcattttcatacttatggattatcaagaaattttatatccaaatcccatatgtcatgtctaatatgtggccatcaatttattagcgatatactccctatttggctaggttgggtaagcatgtgtgagtgtgtgaggtgattggccattcaaacaggcttaaatcttcaagtctgaggtgattggtgatccataattcaacttggcgtaactcgtg

SEQ ID NO: 48452 - DNA, 696 bp, Oryza sativa
gagtcgatttatccgctctgtcaaacaggagcccaaaagtcttcatcccttaaatgggactgacaaggggcacccctcgtgtcagtcgccatttaatttgacaggccccatcatcaagacgacatgcgcttggcttcccaagttaagagacaagacatgcatttaatgcaaagattgtaatatttctccactaagttaggttgttggacccatgtggtaaccccttaaggtataaaagaagatccaggcctacttagggagggggatggacggattgagggggccagcttctgcccctcatgatcaacaccttctactccaataaggagatcttgtaatttctcccacaatcagcatagcaaaggagtagggtattacgcttctcagcggcccgaacctgtataaaccccttttgtctcatcgtcttggaggggcctaaccctctcaagatcacacagtttcgctctccaagccttcgaatctcacccactgcccccggtcaaacctaaaaagggaggcctcacggttccctggaggaggagttcacccttcgacacgcacgttaacgttgttgtgtactcgtagtcatccgaaaatcagacgatctagttgtgtgtgtagcattttcgaaatatttaatctcggatggacgtcaagatttgtaccatgttatctggcctggaacacatttttagg

SEQ ID NO: 48453 - DNA, 598 bp, Oryza sativa
  unsure (1)..(598): unsure at all n locations
ccatccgtccagcttggcgtgcctgccgcgnaggcggaagcagtggagggagaagcggcgggcggggccagggtgttcggcgagaatcttgaaggcaagggcgacgcgcttccgttcctggccgaagagatcgtaaacatcgaggttgaggggcgcgagcgccacagggggcgccaccggcgggagacgagctgcgtgcgggcgccatacttggtggggaggagcgagatgatttcgccgaggatggcgtcggggaggccgctgatgaggtcgaggccgccgctcccgggtggctcctggctgctggaccgctcgaatctacgcttcttgcctgtgggcggcgccgccgccgccatcgccggcggcaaacgagacgagggatttgggggttttggtggaatggggaactagggtccgagaaggcgagaatgtgtagaggacggcagactggaccatgtgccgttcggtggatctgatgccgttggtgaggtatggatggctgtgattgatcttgtctttcggcgtgcttaaccagggaataataatggagggaaaaagaagcgggaataggaggcgcacgcgcgccaaattttgtttt

SEQ ID NO: 48454 - DNA, 672 bp, Oryza sativa
atcacatgttacgattgggccagcgttaggaatcccggccagtaatggtatatatcaaaattgtgaaagttacaatggcatgaatgcaattaagatttgctaacaatacttaccaataccacataaatattgtcaaaatgttggcattgacataaacttacccatattgcaaatatttttccatggttacaaaccaaataagctcatcgttgcggcatcggtgcaccactctccctgccttttgaaaccaaactcgacaaagaaaaaccattttatgggaaaaaacaacagaagggaaaaatctataattgaagaaaaaaggaaaaacaaagatagaaaatttctaaataagtagaattcggaagaaaaaaaacttttaaactgaaactcaaaaggaaaatattagtatagaaaagataaatgatgaacaattgaaaactcctgaaaaaatcaaaaaggataaatgaatgatgaattacattatgcaatgttctacagtaacagatgttccaaagaactccaagtctacaaacattcagttgatactaattaaagttggatcattttaattattttccttgaatgtggaaattatcagctaccttttatttgttttcacccaaggaacttagtacattaccatttgaaatagggtaccgagctcgaattcgc

SEQ ID NO: 48455 - DNA, 918 bp, Oryza sativa
ctctgaattaacatgacaaattctataataatttatatgcagatatcaatttgatttacctccgtacatgctgcaatagaaaagtgcaggagctgaaatatttcttcgccaggtcaagcagaataggaacctaaacggtcaggtataaccctaaggttctttattatgtttcacccgtgagtggtcatgtggtggtttgtgtgcatctaactactgcatcgactaacagttcaacatgccctattgatccggtgctaatccccaagagctacttgattaagctcactacacaaaacaccgtggatatgacttcatttggtgaatattaatgtatatacattatgtttcgtgatatgtacatatagacatatcaagtaatggttttgttgtttatttgtagttttgttccatactccacaaaagtagaaaatcaatgattaagctcaattatgatttattcctagcagcttggtttatgtgacttgggactgctaaacagtacacagcatattttgtttatagtgctctagataatatggaggctctagacaatggtgtcttggagctccttttggttaaacaacatatccacacaaacaaggtacattatgcttgctctcaggaaaaaaaaaagggttcattttattcagtgattatgcttttcctctagaaatcattagctgtagtgttagattcacaatttcattcatttgcaagatattcaatggaatttctatgtgagtaaattgttgtgcatatgaaggtgcatttgacaaaggtcaaggggaattggcgaactaatcagtacgacaactgttggtcaactaattatactgtcttgtgtttagttttaacaattccattgtttcaggctacccaaacttcagacagaggcagaggagcaggaccacatgaact

SEQ ID NO: 48456 - DNA, 1004 bp, Oryza sativa
gctaatactagtaatatgtatgtccagtgtaatatatgtgatatcataatattcatattttaaaagggtttcatatattgttaattttatagtcattgataatatattataaaaaaattaatggtaatatcgaagacagtgtaaaaaacataagctctttatagtttggtatgcaaggagcacctgctttaagaggaaatcgtcatatgaagatgagggacatcatcttaggaaaatcatggtgagtacagcgccgttctcacagcaaggtgagctactgaggagtttggaggaagaaacagttatacttatatttttagtcaaataaaagctcaccgttcttttaccgatgagtggtccagatttgggctaatgcagagaaggactcatctgctgtagcaagagccaatgcagaggatccgacctctcccacctctccttttgcttgtggatggctatcctcccaccggatctgaacatccctagcttggaggctcatgatctagccaccaaatcccgccaccgcaggaggccgccctagccactgccatgaagtggagcggctgcttcgaccttacccccgacaaggcgcgatggtagcggcaatagccatggagctcgaaaggtgccacctccacgctgacggaagcggctttcccttcccagtcattggagcgcaatggagctcaacatgctaaaatctcaggtatgcttcatctacaagcaagattccttcatcgcactccttggaattcttcattctttcactgatggcgcgtcaagatggccaaagccaatatgcaaccgtatgtttagctgtccaatatttatcaccataggttgtgcatgttaggtgtttgataaattgcttgaatagatatactaggcaaggttggtgatagggatataccaattgcaaaaaatcaagaattttgcctcttcgtatatatatgcagtaatgaaggttgctacttgaaaatccaaagtacattctttgctaattt

SEQ ID NO: 48457 - DNA, 657 bp, Oryza sativa
gtcaagatcatgtcaagactatcctcctagctcaacccaaacagaaggacccgctaaggtttcgccacccgctggtccccgacaaggtaaaggttgctgatcccccgggacgagataagccccctcttgcgccaggtcaaagtcagccttccctggccccaaacctatcataccgatggcctttgttttgagatgatctggacttctagtcaggctttacccattagacttgtggttgcactgttatgcttcgcaacagaggtccgaagaccggtccttacagtggccgaggtgcttctaacaaaaccatgcacctcacgccccaccaaaaataggtttagagagttttgaatgagattccatcatgtccaggctcaaccagccacctaatcatcattctcacatattttagttgttacccacaggttaatgtataaaaagagattctatgtttgatctaagcgtatataagcccaacctaaagcaactaataagtccatcatatagggagccatactagtcattttatcattttactaaggttgtcaagagcatgggtagcaattcaataacatggctatataacaaggatcatatgaatattaactattaaataaataatagtgagcgtcatataatttataaaagcgattcata

SEQ ID NO: 48458 - DNA, 846 bp, Oryza sativa
caaaaattcaaatagattactatctattaaatacattcgaggaatgatggtcaggctattctggatatgccagccaaattactttccacatgtagcataattgtgcgtgtggttttaatttagttcagttggaaaaatgtatggaacaattcaagggcagcaataatattacacatcagaaaataggactgccatagccaagggaatgtattagtggtaaaaacttactaggttgcggctttaaataaagataactcattaacttgctgacatagtacgacactaaaatccaaacaagagaaggtacaaatataacatttgaacataatacaagactgcatgtgtatcatatccgagagcagcatggtcataaagacctatcaaagggatcagatattgacaaatcatgggtgtgcttgttcatactgaaatcactcgtatgggtagttttaaatgtaaattgagcattttgagatgctttcttttctaattgaagccgcctgtgttgattggccaaccatttctgattgcaattgttaaggccagctaactccatttctcttagcgcttttgcattcagaacaaagaacttggcaaagtcgacatctgaccttcttcctccataatttcttatcaccacttttttgagatggaactgaatgcattctattggatttagcgggtcatacctccgcgtatttttaataaccttaaacggttgagactgtaaatggaaagaaccatttgaaagcagttgctaactggttagcaatgtaatacttgacaagagtataataaaaaatgggaaatacttacagcaatatacagcctctccaagcaggggaa

SEQ ID NO: 48459 - DNA, 1176 bp, Oryza sativa
acatagcaatgttaagaataggactcctttgcggcaaccgggctctgccggcgagtgtagtgcggcgccctccgctgggatgtcgtcgagtggagagggcgggcctgcccaatgattgtcctcggtggtgtggggagtccagctcgcgcaacaaggctataagctggatgcttttgctacaaccaggctcagccaacgagcgcggtgtggtgccctccgccaccaccgtggagacaggctcggggttcggcaagattgatgccaagatttacgagctagaaggaattataagtcactagaacggataccctcatctcaatcgggcggtaagccccatctcaatcgggcacagcgtccgtcacagactagaagttactgatgtgaagagttatctcaatcgggcaaacggccgtcacgaatgaatatatctcaatcaggccctaagtaaagcccgtcaccgatagttttaacccagacgaccagtcaaactatagcccatcacagatgacctatctctatcaggccaaacctagcgcccgtcacagatgactactaacctttatcgggcctaaactagagcccgtcacagatgatactcatctcaatcgggcctaaactatagcccgtcatagatgactgatgacctcaatcaggcctaaactagagaccgtcacagatgactgctgacctcaatcaggcctaaactagagcccgtcacagatgactagtgacctcaatcaggcctaagctagagcccgtcacagatgatctcatctcagtcgagcatttagttatggcccgtcacagatgactataatccacaaaaaaaataaattttgttttttggctagcctcaggcctttgctagccatgcctgctgcaaaaatgacagaaacaaacatagatatccaatatccccagctccccagcatcacccattcatacatatgcattcacatatacagacatcaacatatttcacacaaccacacattcacagccatctcatatttcacatccattcacatatttcacatccattcaaatatttatcatatttcacctgcaaaaccgagttaattggatcaaatatttatttagcaagtcttaacataaacatatgaaatatatataaatataagcatcacagttacatcaccacagttgcataataag

SEQ ID NO: 48460 - DNA, 753 bp, Oryza sativa
  unsure (1)..(753): unsure at all n locations
ccacaatgttaaaagcaaaattggatctatagcaaagttatcttttttttgttttgtagcatcgaaagttcattgttcactttagtagaacataaattcctgccttttccctacatagcatttccatcgctccaactccctttctagttttctttgactgaaatcgacaaaaatggcaagacaattgacactatagggccaatttattcttgtccctattttgatgttcaatattaattttgcctctgctttttagggtttttgtttatgcccctggtttcttgaagcgaagccaagttttatctctactttagaaggagatgttagctgtgttaaatttttagcaaaaagacatccatacccttgcttgctactgtacattccgaactttggcagattcaaatcatcaaagaaaatctgacagattctagcgcagcaagaagtggcataagcaataaagcaagcaccagctccacatcttttcttcagctagcaagcaaccagcaactcctcacctcttcagcaagacagttgggcgttggcagcgatgccgcgaggccgtgagagacaacagcatgacgcctcaccgacgttgtgccggcaagcaggaaaggccacgccgaaaccattcacaccacgatggttggacgtaggggtgaaaatggagcgggattcgaccggatagtagtattccatattctaaaccatattntgttagcacattccgaacgggtgccgatagtgtaccgatgt

SEQ ID NO: 48461 - DNA, 568 bp, Oryza sativa
ccatgtgtattttaggaggatagcaaatagtaaattttcctctgtgaattgggatagaggcaaggctgcactatgacaccgatttggcagtgatcttgttagcataatggcaccaactctcggaccttcatagcaaggtcaataagagagcatgttgttagttcagaaaatatctgtcatctataagaaataataaatagcgtatctaatgtcaaaagtatgaataaataatataacacaaatagtactatgaacacaaatagtaccatctcttctactcatctcttctcttcagaacgacgatgactgcacacggatgcgttggacgatggcagcgctcgcggcggctagggtggatgaggacggagctgcagcggaacagggttatggcgatggcggcgcctgatggatgagggcaacggcggcggacgcgacgtggcgagcatagtggacaagctgtagcgacgaacacgatggcggcagcggcagccttggatgaggaccgtagccgaggtggacgaggaccacggcggtggcagcagagggcatcgatgatagccgcgactaa

SEQ ID NO: 48462 - DNA, 709 bp, Oryza sativa
aactttttataaatatgaaaacggacataacgtaattagaaatttgcatttaaaattggttagaacgataaaatttcatgatttcctagctagcttgtagatatcaactcaaccaccaaactcttcagccaacaaattgcacttatatgggctactagctcattataggctggtaatgtttaggattaattggaaccatgccattataacttttatgattttgaaatattttattactattcgtctatttggagaaatgtcactataattttgctgttattcgatagatggcactacttaactcgtgactgtattttctaaaatttttagatcagattgcccatttcttcttccttcatcgatctccctctctatcacatgtagttatgttcatcctctcttcgctcatccaactcgaaatcaaacactcaagaacaagttcttcatccattcaatgaagaaagggagagctagagatggatatatagaggggtgctctgctcacttggatagatacggacctggtcgaattggatatattcgaattgggatcgaacagagatcaatacgagccagtaaataaaatcaaacataatcgaattgggaatcagaagaggagatagcacgaagatctcacggtgctgctgttggtatttcttaacgacattactagaaatataattcccagcaatggcgcagaaacacttct

SEQ ID NO: 48463 - DNA, 580 bp, Oryza sativa
taaaaaccaaaggctgcaactaatgtatctctaataagagttgatctgacagcaaaaaggccaacaccaaggggatgcggagcgtaatgagtgaccataatacccagttcattctagagatggttacaaatctgcaatctgtgaacatcccattcatcttttgcacttggggttcaatcttatcaagcacgtaagcttcatgctgcttttaacgagcaggaaccgtaatgtcagctttgtgcaaacgatttggactaccatcttgaacatgatgaccagctcccacgaatcaccccggattgaagacaatcttaagacctgtttagtacagcttcaactcctaaaattagctccaagagttcgatccaaagtagagttctggagctgtctaaacctagctccacaactctagttcattttgtgagagagctccacctagctccactcccagttttggtggagctgaaactgtttggttgagctccagatctaagagggatggaacatgagctggagctatgccaaacatgcctttagcatggcaagaatttccgacagcatattgaattgagaaggattg

SEQ ID NO: 48464 - DNA, 532 bp, Oryza sativa
aaaagaggaaaaagagaggaaaaagaaaaagaaaaaggaaaaaggattttccctggaattaaaatattgcttgctcaattttaattggttaaaattatttctagagctctgaaaattccactaaaaatcctgttaatgaatttcgacatgtagaactcaagaaaaattccacatgccaaatccgattattatttgcattactttcttagggttttctcttgatttgcacctgcattttcttggggttgtttacaaattaaatttggcttgggaggagaacttcggggtgtgacatccactgccgcccactgagttgcacctccggcatcaccgtgttgtgctactctttctccgccgcccaaccctagggcagtctccacgtacacgcgccgccatggccgaccaattggaagccgaggccgcgccgtccccttctcctccacgcagccgtcgacgtgtactcctcgccgatcttcttcgcagccgacttactccaccgcctatctccgtctataaatggccagcaagctcg

SEQ ID NO: 48465 - DNA, 918 bp, Oryza sativa
catctgagaggaaacagaaaaagtgagctgagctatagctcggtggtggcagccggtcaagctctagttcatccgtctagctaaccaccggtactgatttttcttttttgggcatctgatattttttctttctttttttctccttcacaatcctggatgtatattcaatcgaataggacggagcaacagattttttttccttgcctaagggagcagatagttgggaagtactccttggagatgtattgcttaaattgtttttcctggttttttgctttccttgttttttttcccaattctgatcggcgttatagaaagctgatatcaaagaactgaagaagtcaagcaatatgcaaggagattgtgttcaatttttttcaccaattacttctgccgtgctttttaatcttcttagatttttttttagttttctcaatgtggatttagggtagatatgctatttttttttcacacatgacctgatttatatcgatctgatgatcttagcatgaggctcttgatgtttcaggagggggaacgaatcatgtggaagatagggatcgtaccttttgcattcaactccctttgaatagcaaaatttacagttaggtcctttgcaccatctctacctttgaaggctttgatgcgtcggagcaaatcctagaatcagagaaggggacacgtggcagattttcagatgggccctaacgaaatttataagttggcatgtggcccaatgaaaaacttgatcctgaaccctgcaattggtagtattagagatgtcgatgtccaaagaatagggaccttaaatagacttatttagctatttatatatcacagcccaaagaagagagacataaaatagacttggtgaccctcaaaagtgattgaaatctaatccgtgaccctaagcctcaa

SEQ ID NO: 48466 - DNA, 708 bp, Oryza sativa
ctatatgcttaaaacacgttgcactttgtaaaatctataagaaaatcattataactccattgtttgtgaaccaaatgtgttagtcttagaaaacacatctccacacccctgtaaagtctaatataataaaaatcactttacaaaagtattttataacactacctaagactatactactataaccgaataaaacttctaaaattcataactccctaatggaataagataaaataaaatttctttcacctaaattcattttagaccagtacctaatcactgtgcattaatcatgcattttagaacattttggattttcagctcttttggtgtttaattgcataacgtgcgtgtcctttatctagataattgcataatcggtgaaggagtggattaggtgctaacatttctctgatcaaggcaagttttctcctcccatactttgaacacattgaatcccatgatttgaggaatgaaaatatttgtttgcaaagttgcatgtgaacttagactatatcggtatttgaaattgggttaaggtagttatgacctatttgctgcatatcccaccttgaataatggatcctcttgctgtttgaacccctagaaatggttagagtacactctttatgctcaaatgggtttatatatgctctttgtgcaactacttgcttagccatgcttagaactatgcaaatgctcattccatct

SEQ ID NO: 48467 - DNA, 652 bp, Oryza sativa
tgctgcgggaatttagtatgataacaataaaaaattaacatgtaagatagctagataatatcagattaagtaaattaatgtggtttatgataatttaaatttaaatagtatgtagaatggtgattcaaacgtaaaaagtaaggtggtatgactttatggaagaagaaaagtagggagataatttggaccgtagattaatcatctaaaggctaaaaacaattgatgtgatatgacttaattagaggaaaaaaaggagaaagataatttggaccatagattaatcatttaagcactaactaagtgaggatgaactatataagtatataggatatcataaaacataattaagatatacattgaaacattatgtgaattatgttggataataatttaatatgtttgtatttgaaaagctcttaaattataaaaactattaagatataagcatgtttgcatgatgtttaaatgtgatgattgttaatggaagatgatgtggcatctttgcatgttaagcttaaggaggtagtgggggataactttatagtaagatatgattcgtacattcacatgtgctagtatgggatggccttagctggttaatatatttaggactagccttgcattctggtaagcccgtgtgtatgaattagtc

SEQ ID NO: 48468 - DNA, 687 bp, Oryza sativa
atgttacaaacatacaaattattagtcaggttctctctactatgatcttcccacgggattaaataaatacgatacccttggaatactctcgggtgaaatgctacaatggtatatccgtgcgctttgcggatgaactctgtaaccataatataccaggagtatttctgcgccattgctgggaatgatatttctagtaatgtcgttaacaaataccaacaataccctccaaccatcatagggagtgaatctccaccgttccctcaaagccctggatccaacggagctgttcctggcaggcttcctccttgacctcttctatcttcagacttgtgaattttggcccaattcgatcgtgtcaattcttagttcttggcccgtctttccataagtccgattctcgacatcgttcgattgattgatcgtctattttgatgtcggttctcctccatcttatgcttattttctgcaagaggttagtaatcctagtgctagtggaatatatattattttaacaagaagatgcattgcaaacataactagttctcctttatttcagtaatattgatggcgaaactgatcgataacgaccgtcgacaccctcctctggccccactctgccgactgttgacggttgttgccgacaaatttcgaccgtcaatataactaaaatattggagaagtagctat

SEQ ID NO: 48469 - DNA, 646 bp, Oryza sativa
aacgcatgaagggaggagatgaccgcggctcgacgacgattgctgccgtccttcttcttcgcggccggttacgagattgagagcgccggaggagcagagagccttctccctcggcttcttcggtttgagagtgaggagtagtgatgggtgaagcggctgggagggaagagatcaagagatgttgggtttggagcggcgacacgtctcggccacgcgtcgacgcgccccagagctcggtcggctctctctctctctctcgttctctctttttctctcagtctttagatcggtgggaaggatctgcacagagttggagctagcttgtgacaccgtcaggtgggcccggggcgaagtacactaagctggagtgtggggatgggtagaaaactgtgtgaaagagatttttggacgaaatttcagattattttctcttccctaacttggtaattcatagattaattccaggtgcatatgaggtcgtgaggattttattggagggtaatgaatgtacctagttaacgttttctactcaaaaattatggatagattgctcacagaaattacagaaatttaaagaagatgggcttattggaaacttatttgaatttttaggagaactaagtagagaagattaattcttgaaaaa

SEQ ID NO: 48470 - DNA, 651 bp, Oryza sativa
ccgtcgggttctcgtcgtcgttccgaccgctgtagaccaagccaagccgagccgtcgcgccaacatattctccttgaagtcctcctcaaaacccttcaagaatcccaggcaatggcgcagcaagtgcggagatcggccaccgtcttcttcacctccggtcgccgtcgccattgtcgattccgcctcctccggtgagccattattagattactcgcgcacacaccatctctctggcctcactaacctcatggacacacatgcatgatagttcttggagccgattgagccgtcgccgttcaccccggaggttcttgccgccgccgagccgttacacgagccgccgtcgtcaacctagcttcgccagccttgttttacatctcggtgagcacactggaccccttagaaaagcacatgcatgcactcccttagtcgattcgcgcctatggcacaacatgcctacccatgccaaaacatcctccgctcggactcgccgccggcgttactccgatgtccactaaccgagaaaagtataggaatggaatcacaataacatgatcttcatttttattttggtcgtacccccaaacgagtcatcggttgcccccggcgagctcgagatcgagctcggccatggcgctctgttctcgcagg

SEQ ID NO: 48471 - DNA, 803 bp, Oryza sativa
aatttttgtgtagaggattttaaatggaatttaaaggagatgaaatctataagaagaatgtttgtggactttttgaatttgactagaattcaaaggggaaaaaattctaaaggaagatatttgtgaaccttttgaactttggacaaggaatttaaatagagttaaaggaattttaaactagaggaattttgaaggcagggttttaaataaattaataaattttaaaggagataaaatttaaaagaggaatgtttaagggtctcttaaactttataaaaggaatttgaatataaggtttttgaagcaaaaggagtttaaaatacttataaaataaaatcaagatatttatttttgagatataaatttgaaaaggataaacattaagatgctccaattttaaaagaattcaataagaaccaaatataaaacttatcacaaagattttctttaaaaattaaattaatcaaatgggaaggaaaggaaataatttaatttctaactttggataaatttgggatggtggcaaaaatagatggaggtaaataactaggattttagcctccaaaatatgtggtatggattctcggtgaattatttgtggctaaaggaagttggattttgagtagaagggattggaaataagtttcttagcacaagagcaatcattcaaatatttgtgataatattattctttgtgccaagaatgtgatcaagttataggaatcgaattggtgcatggatcaaaataggaacttaaccacggggatattttggaccgattaaaaggagacaaatgtttttgg

SEQ ID NO: 48472 - DNA, 1616 bp, Oryza sativa
agagattacagaaaataaatggaaaggttttataaaatttaaaagagagcgattaactttgcaaataaagtttaaatccaagttaaaagaaattaacagaaggcaagatcacttcagaagaatcgagaagagtgcaactaaaatatttcgcaaaaatttttcccaaaattttgagtccgttacaatcaagcatgtaagataaaagaagttagatcaggtaagatcggctgaaagtccgatactactctaatcggcaaccagaaagcagactagggattgaaattctaagcacgacttaatagatcaaactcaactgatgtagcattaagtatgaaaagaagaacaatatctagacaatcaagccgctggatgtttcatagagtggtagatatcttatataatctaagccaacctcactatttaacataatcggccgccttctactaacagatgttagccgattatagattagataatgataatgtcagagattatatagaatatatggtaactcgacgaattacataaacaagactagagtatcataaagatggaagcactaatcccgagaacgcaagccatcataataagttttacctcttgttgaagatcgaaaccgatgcagctcaaccttacatatggctcggggtctatttatacccgagaaatacaagatatgtccatattggacacgactcttatctctaacaaactcttagataccataagtctttgcggcagacttttgcccacatttatctctaaggaatttacataaaatatcctaattaatagatacaattgccttctcaggactctatccatgtgcggcaatcatcttgaagcacaccaactcgaacccgatgtcgtacaaaagtcgtattgtcggaatcgactgtatcactcaacccagtctgactcggacttagccgatcccagtcgtagccaatccggactccagccgattcttactctgtttccgcaacaatccttatctccgattccgctttgatcccatcttcatcttcgatgctgatattaccaaatttggtcgttaacacttgatgggataattacagtattagacctttttagtatcagaatgagctgcatgctcgagacatctggccatgcttcatattcgtaattatccaactaaaatacgactgaatggtgggctgtgggtgcatgggtttgctagttgcacccatggcaattaaggaccggttcgcgggatgccttggaagaacttatcgtacttaccacaagccagcgtaggcaacagttgggcttgtagtgtagctttcctctagccgacatacccagacgagggtgggcgtgatggagttgggtcggccggggtgtccgattgatcggcttccggattcaccgcggcacgagataggggctgcccgttgcctgctagggacgggggcgaaccctgaggtgtggtgcgatcggttagagggtgttatgcgaagggtcctgtcacgacctctttccggtatgtcgtggtgtcatgtcggcgcacggaaacgtgtggtggggctgtgtcttgttggtacagttgtacacctctgatcagagtaaaactattcgaatagtcgtgcccgcgg

SEQ ID NO: 48473 - DNA, 1464 bp, Oryza sativa
tgaagcggctgggagggaagagatcaagagatgttgggtttggagcggcgacacgtctcggccacgcgtcgacgcgccccagagctcggtcggctctctctctctctctcgttctctctttttctctcagtctttagatcggtgggaaggttctgcacagagttggagctagcttgtgacaccgtcaggtgggcccagggcgaagtacactaggctggagtgtggggatgggtagaaaactgtgtgaaagagatttttggacgaattttcagattattttctcttccctaacttgttaattcatagattaattcgtgttgcatatgaggtcgtgtggattttattggaggtaaatgaatgtacctagttaacgttttctactcaaaaattatggatagattgctcacagaaattacagaaattaaaagaagatgggcttattggaaactaatttgaatttttaggagaactaagtagagaagataaattctgaaaaaattatatttattcatgataattaacctaatatttgaataaattatttcccctatacacttccatgcagtttaatgcacaattagtgagggtaggtttttagccgattaaggattataattaaactattatttgactggtttgactgatttatttgagatattaaatttagttattaaattgtaccaaaattactatgagttgcatgttttaagtagagcctacatgaattttcccatgattttatcttgcacaaattattttagataattagcaagacttttctttatataggtttccaatttataaatggatctacatagttgtaagaaatttatttagactactcttgacctgaggtggtatcatttgacttcattttcatgtctttataattattgctcaagtgtggttataggtttgcttagtgaatctttatcttttatttatgctcatgggtcctaatatgcaatgccaaccaaaaatccaaatgcataaagaagactcaagttaaaatatgttttatgcaagtatgcatgcttacacttgtgtttgcatctatgctataggttaaagatgaaaaagtttgttctcaaattttattcatgcaagagttagatcaaagtttacctaggtttaaaatggaaatttttggctcccaaaaataaaaaacttaacttccaactattttgacaggaaatttttaaggtctaaaatttgggtatgttacacccaaacccaaaccagatttgctcctccgctccaccatccatcggcgcaaccacacgaccctcacaatcccttcactagtgccagatggaccaccggtgaagcaaagagatagaattggaggactgttattacaaagaacgccatcattttcacccatgcgacgaagtaggtgaaacgaagcccatagccaatcacaccccataaaatagaccaccgagacaagatggatagggacca

SEQ ID NO: 48474 - DNA, 1782 bp, Oryza sativa
tagaaccgaaccacactagagctactaaacatacagcagcagtaaatctccaatccacacgaaaatcctctcaatctattcacaaacaaaagaacctagtttccccagcgccgcacatcaccacaacagaaccgaaccactagagcagcagaggtaaatctccaatccacacgaaaatcctcgcaacgtaaccacaaacaaaagaactagggagaagaattcgagagtggacgaaccggactcctggagataccggaagatgaggaagttgagctcggccgaggtgattgcccccataggcgccggtcgacgaacgcgtggccgccgccgagacgggaaggctccggaggagaggggagaggggagaggggagaggggagagtggccaaggggacgaaaccggcgaagggatggatggtgtgggtataggaaaaattgatggattgagaattttaggtcatctcctgaagtcagtctggacacggtcaggatcgcgtgcagaaaaatcggacggggcatgagccccgtaggcatggacgggcctagaccgttcgtttgctttaagatccgtgcacaactggaatactaaatgctacaatgtaattctattgtatttaataacttttaagatcttgatttttctgttcgtcacacaaggcacacgtcgaccgttgccctttgagcacatagcatgagagcatgaatataaacccaaataatagttcgatatgaagtagatgtcaaattaatagtttcaccatgtataaccagattaacaattttgttggtcatctcgttatcgtcttcttttaagatctatatggcacgactattaaaatttgtcgatggcaaaagtaaatatttagagaggcatacttgttaacatagtcatggtattattccggtgcaaatgggcgcatgtagcacgagatggtatggagaagataatcacacaatattctacatgaatggtgatggcgtgctgtacagaacaagaggacattggtgagtaacataaagatcagcaatttactatcctctagattatgttttcgaattaattttgatcatgcgaacctatatttgctcactagtcaagaacgtctttatatacgatattcctagtgctcttccctgtggggtctacttctttctttggcttggctaaaatccttgttgtttgtcttgacacaccccttaacaatgcgacatacaactgaccatgtgaaaaaataggctatggatgatagatcccaacatttggggctgtgtcttgtgggtacagttgtacacctctgatcagattaaaattattcgaatagcagcgcccgtggttatgggcaatcaaccggattcaccgtgattagtctcacccctagtttagcttaatggaactggttagttcaggtggtggattggccctgtctcaacgtggtgtagtgttgagcagtgattggttaatattgattaattactattacagttttactgctttcaactactgcttttaaatgcctgctttatgcaaataaacctttagcctcctttggatatatcttgcatcataccttctcttctggtatgacttgctgagtgcagtggatagtactcaatcttgctctctcttccccacaccagagctgaagttcttctcagttgggctgtctcagagaagttggtttcgttgccgccgtcaagaatgcctgtggaatggagtcgcctcgctgcaggagtcaagtcttcaagcttagctcgtttttatctttctgttgcatttgtaaa

SEQ ID NO: 48475 - DNA, 1501 bp, Oryza sativa
tgatcatgtctcatggatcatggtatagagataccaaattaataatgtggacacatgttggtgaacatgttgttggatatacccaacatgagacactgcaagagccatatgtgttgtgtcatcattgatctcagttagtgttggtgttgaatccttagacctgagattatcatggttcccaacatgtgtagtagcttacttagggactgctaaacgctactccgtaattgggtagttataaaagtagttttcgggcatgctatgaaacatgtagtgggatatgaataatcaagatgggatttacccctcctatggagagatatctctatcgtgaggcaaagggattcatacaagtatacactagaggttcagccaatatggtttttatgtatgcccggtgggtcaatacgttctgctgggggccgctgttgacgcgtggaccgaaaaggagttttcgggttacagccgagtgtacatgaacctactgggtcgcacacttaatgggccggaataaggagattggatggagatccaatatgagcttaattcggatagggatccgaataggagtcctacgggccttggaggcctgagtgatggatcctatatattcgtgaggggtgtgaccggcggaggtattgcatcacgtgagaaatcctagccgtcactcccctccccgagcaaaaccctagccgcgcgcgggtgctagcacatctgcgcgtggcgttccgtccctgtacgtgtggataccggtagcggcgctgctggtttgcggtgctgatcagcgtaggaatacagcgaggagaacgcacgaggaggagaaggtcgagctggtgcgatcgactacttcttctacatcgacgcacgctacttcgtgagaattccttcgacttcttagcgccttcttccgctgcgcagcacgtcgagtggtaacgatctatgatctaatacttgcatggttcctggtttacgcgatagaaaattttgatttctgctattgtagcctacgcgtaacccaacactaaagtaacagagctagaggcaacaagtgaacttgggtgcacatccatctcctgagaggcagaaatatcaacagggggccacgcagtagagggacttcatcaggagcaaaaatatccagaggggtagggggtagaatagccaggggaactagagaaatcattagatcccctaaagcatgcatgacatcatcaaccactaatagactttttttccatggcccaacttgaggcctcacccacgttgtcccttttaataacaggtggagaacagtcagtgatagctttccttttagggaaaggagcggattgaaaagagcagctatttgaatgggcattgggatgggggctctattttgcaaagagctcaaaagtttcaccctcaaaaggaactcatcaatcttctcctgcatctcaggtgttatagaaaactgtggaaaatatttagtattgtcagccaacattatgatctgcatattttc

SEQ ID NO: 48476 - DNA, 686 bp, Oryza sativa
cgtttgaatcaccattctacatactatttaaatttaaattatcataaaccacattaatttacttaatctgatattatctagctatcttacatgttaattttttattgttatcatactaaattcccgcagcaatgcgcggggtttcacctagtaactttaaatgggtgacacaagttcggtccttatggacttgggcaaacactccccctatcggtatgcaactaacaccatatgcacaccacttgccgcccaagtataaaatcacattttacacattttagttcacaaatacccatcatattcattttattcaagcaaaggttcatgaatcaaaatcacattttaattatagatggaatgagcatttgcatagttctaagcatggctaagcaagtagttgcacaaagagcatatataaacccatttgagcataaagagtgtactctaaccatttctaggggttcaaacagcaagaggatccattattcaaggtgggatatgcagcaaataggtcataactaccttaacccaatttcaaataccgatatagtctaagttcacatgcaactttgcaaacaaatattttcattcctcaaatcatgggattcaatgtgttcaaagtatgggaggagaaaacttgccttgatcagagaaatgttagcacctaatccactccttcaccgatt

SEQ ID NO: 48477 - DNA, 1406 bp, Oryza sativa
tttctttttattttaattgatgcaatgatctttgtgctattaaaactatttctcgagctccgaaaattcacggaaaattccggagagtacattagggcacaaagaatattacaaaatattcccggccaataatttttaaaggaaatttttaattccctcaataattcacttgattaagttgatttaacttttatttaatttctagaaaatgtattattaattgatttttattgccgaacgaaaatcggggcgttacaaatctcccccccttgcaggaatctcgtcccgagattctgggatggctagaaagaaagccagtgctggtgggcgatctgactgatctgcacattgaactgccacattctgcttcgaactgattgattgactggttgatcaaacctgcatgattgaactggctggattcgacctttctgttcctttgctttgccaaaactggactgattggttctgcttgaactgacccaggccagaactgcggatgctcctggaacttacttatcttggactgaaccgttgatgctagcaatttgataacctgacagttcaccaagttggctagagaaggatggagttgttcctgaatcttgcatctggcatttgtaactcattgatcctacatccgcttgaacgggttctgactcgagtgacacgtaattccaggaaacctgcttgacctgtctttcgtctgaactgcaactgtcctcactgttgctcctctaagctaagctgttgaactgggctcatcggatgccctgggatcggcttagttcttctgataccttgcaacatgcttcttcaagtgctaccctgattgcggcactggttgaaccttcaactaaaacagcgacgaagtgaggcaaaactcttctccgagacctaccccccttacaaggagtagtcttactttcgcgtggctgagatcggttgaactgttgtccttcgaatataaccaacacttctctgttttgcgaagagccctgactttgaaaactaaaaacttcgccgatcgatcaaaatagagtaacaacgatgcactttcatcccattaagatttggaacttaaccctcagttgctgataggaaattccacataaagaaattctcatttagctcctgatcttactaactcttaactgactatcccatcagtaataactgctggcatgactgtccttcttctgacctgacttcggtgtcatccacctaaatgggttgtgtagttgatatctcaaaactaaactgaccgactcgcattggaattgacacaacttgaggaactggggtgcctgcgaatagagctgttgtctttgatgaccctaaacgccttgccgtgaaccaaccttgcaagaactgaccttgtaaaccataaccactaataggtagca

SEQ ID NO: 48478 - DNA, 5755 bp, Oryza sativa
tctatgcagctcaacctgaaagcaagaactcgtcgaaacaaaactaaagtaaaaagggtggcgatgcgccaaaattgtattgaacgtgtgtgttatcatttacatagggctcagggtctatttatacccgagaattacaagattgcccataccggacacgaccattatctctaacaaactctaagataccataagtctttgcggcagacttttgcccacatttatctataaggaatctacataaaatatcctaattaatagatacaattgccttcctaggactctatccgtgcgtggcaatcatcttgaagtacattaacttgaacccgatgtcgcgtacaaatcgtattgtcggaatcggcgttatcggcttacttagcctgactcagacctagccaatcctaatcgtagccgatctggactccagccgattcctgctctgtttccgaactcgatctccgcatccgatttcgctttgatccaatcttctttcctgacacagatgttaccaaatttggttgttaacagtattaaaatgattagatgttggtttagggaacgcttagccatgcttagttcaactagtacatagaggggggaattacagtaatgcatagactctgattattggtatagctttggaatagagccaccgcaatggtgttagttaattaaaatacactacatggtgggctgtggatgcatggttttgctagtcgtgcccatagcgattaaggaccggttcgcgggatgccctggaagaacttatcgtgcttaccacaagccagcatgggcaacggctaggcttgtagtgttgctttcctttagccgacgtacccaggcgagggtgggcgtgatggagttgggtcggtcggggtgtccggttgatcggcttccggattcaccgcggcacgaaaggggggctgcccgttgcctgctggggacgggggcgaaccctaaggtgtgatgcgatcggttagagggggttatgcgaaggatcctgtcatggcctctttccggtatgtcgtggtggcatgtcggcgcacggaaacgtgtcgtgggactgtgtcttgtgggtacagttgtacacctctgatcagagtaaaactattcgaatagccgtgcacgcggttatgggcggtcgaccagattcaccgtgattagtctcacccctagttagctaatgaactggtgtagttcaggtggttggttgggcctgttgcaacatggtgtagtgttggacagtgactggttaatactgattaattactacaactgttttattgctttcaactcctgcttttaaatgctagctttatgcgaaagaacctttagcctcccttggatatatcctgcatcatacctcctcttccggtatgacttgctgagtacagtgggtagtactcagtcctgctctcttttccctacccccagagttgaagttcttctcagttggagatgtctcgaagaagttggtttcgtcgctgccgtcaaggatgcctgtggaacggagtcgcccgctgcagcagtcaagtcttcaggcttagctcgcttttatcttttccgctgcatttgtaatcttttatatttttgtaagacgtggatctgtatgtcaacaattgtcatttgtataccctggctagtcctggataggggtttattacacattaagcttagaaattctggttcgtgaatttctgggcgtgacaacatataagagtgaccgatagcatggtagatcattttttcactcttgaaatggatgaccttgttaaaagacttccgattgacaaagctccaggcccagatggctttaatggttgttttattaaaaaattgttggccaattatagcccaaggttaatctagaatgtgttaatgattttaggcctatttctcactcttttaatctagacttgttaacatgaaaaaatgaccgaccggaacttcttttccctttattcattgatatacgtattaaattattgctttttaaaattctccactctcatgttatctaatcctattggatgcatgtattatatttattaggatgatccaaactacgagatgataataattatttcttggtctttgggttaagcgtggttgtgcattatattttggaatagagggagtagctcacacatgttgattgcaaaacaaaaattgtttttgtttttttcttattgtgttgtaggaatgttttgcacacacctgattagggcgttcgtacacatccaactggagaagatccctgttgtctattcctaaagaggtataccatgaaagcaaacagtgacaagtgtgatcgtgagactgcaggaccggatggggtgcatgaaaattacataacaaacatgatgatgattgaagcatttggagtgatgagggcagcatgcaagtcgaaggtcgcatatgaaagagctatggttattttgaaagagttgcgtaggcaggttgaggaggtaccacaagatattcaagttgttgtttgtgttctgtctctcaaccgctcaagacaaggaaggacagtgtctcgtgggaatcaggggtaagggtaagccaccgtgccaaatttatttgatttgagagagagtacacatatcttcttgcacctatacttttgagatatacagcatagtagcaactcctgatcagctaccaagtttttttttgtgagtcctttactcgggacgagcaaaggttcaagcttggggggttttgttgacggtcgttagcgatcaatttcgcccgtcaatattattaaaataaaggagaactagttatgcttgcaatgcatatttcatgtcaaactaaaatatattccactagcactaggtttctaactttttgcagagaatgatcataaatgaaggagaagtgacagcaaaacatacgatcaatcattcagacgctgtcaagaaacaaacttatggataaatgggctgagaacaccaaattcacaagatccaacaagcccaaaattcacaagtctgcggagaggagcaaacggggaggccacctgccaagaactgagccagcccagggttcggccgaaccagccgtagcaccgatggatgtagggtttggctggacggctgggattgatccccaatgatggttggagggcattaccgacctttccaaccgtcattaccagcctatataaacccctcactccctccatttcttcacacacctcaagcaagaagaatcaagctgtctctctagtttagtagtcttctcaagctagtggagtaggaatagaataggagtcttagtccgagaagtcttcataggaatcgggtatggatccggtagctttactttcttttgtaagacttatacttttattaaaatattcttctttatactactctggtattgtactactttccgaatatatgagtaccaattgtatcatacattcaaactatattgattatgatgctagcttatctgggaaatgcaatggtgtgggtataatgatcgtgcatacgattgctctgtgtcatgacaatgatattagagtagtatttggtaatttaagcgtggtgtttagattactagatatcgttatttggggttaaatgctacgaatacatcaaggtgggccgctgatggtgacagctcagtacgggtattcctccgcttgtgtatatactcctaagttactttcctggggaggctactcctccgtatttagcccaggttagatggtcatgacggattgttgtaagaaactcggcaatcaggggtggcttctcgaagcaccaggacggtattggaaagagggtattagctaagtaatcatataacttggatgtatatgtataatatgtatctatattagaagtataagaatagattctttctattctcttcccacttagcttagataatttattatgagagtatataattctcttgctgtgtgtcattctaccctatttataatcttaacccctgcttatactttgattattacaagtaatatataaattattagtatagttctctctgttataatcttcccgcaggattaaataaatacgatacccttggaatactgtcacgcccagaaatttagtccaaatttctagactattttgtgtattaaatcactgtccaggaccagccagggtacacaaaacgacaagtaatatacagttccaaacgtaaataaagcgtaaaatacttacaaaagaggcacttagtcctcgcaccgaaacgaaagcagcagcagcggaaaagggcgatcctagcggggcttcatctccactccacaggcaaaactcaactggggtctgagccttggtcctctaactccatcttcagctcagaagcactacacttctgaaaaagggggaataatagcaagactgagtacaaccaccgtactcagcaagccacaccaacgatgcagacgtgcaaggggatacaaggaggggtttgtggctatttgcataaaggcggttgtaaaacattttattgagcaaaacagtaaaactgttgagtaattaaagtaacattaaatctccactgatcaacgctacaccacgttgaacaggcccaaccaacccacctggactacagtgtattgggtcgatttattaagatgggactaatcacggtgaatctggtcgaccgcccataaccgcgggcacggctattcgaatagttttactctgatcagaggtgtacaactgtacccacaagacacagccccacaacacgtttccgtgcgccgacatgccaccacgacatatcggaaagaggccgtgacaggacccttcgcataaccccctctaaccaagcacaccacacctcaggtttcacccccgtccccagcgggcaacgggcagtcccctctcgtgcctaggtgaatccggaagcgacagaggccgtcgcagggcccgccccgctccatcacgcccacccttgcctggatgcgtcagctagaggaaagctacactacaagcccagccgttgcccacgctggcttgtggtaagtacgataagttcttccagggcatcccgcgaaccggtccttaactgccatgggtgcgactagcaaaaccatgcacccacagcccactattcagttgcattttagttggataattacgaccatgaagcatggccgggtgtctcgagcacgcagctcactctgatactaaagggtctaatactgcaattatcccatcaactgagctagtggtaattaagcatggctaagcatatagttctagctaggtcacataagtaacatgagctagtggattcattacccaaggttgacaaagaacagatatcaagtaaacatggcacaagcgagcagataggtaatacccggatcccatgtaattagtaaaacatgcatatttatttgtaaacggtaaaacatttataaattgggatcaacatgctcaaggggaatgtgtgacttgccttgctgcttcactttgatcttccgaactcttttcctcgcgaccgcggacttccgaaacgacggattctacacgctgacacgcaaaacgaggaaaaactctaataaaaaccaagaaaacagtacataaaaagtaaacaaacatgtagagctcaattttagatgaattttgcaatttgaatggcccaattcggagttcgaatgaattagatatgaattttagaagttttgagccatttaaatgaatttctataattattaacgaattatgacgcaattattatttatttttccaaaggaaaa

SEQ ID NO: 48479 - DNA, 1831 bp, Oryza sativa
ttttgcgaagagccctgactttgaaaactaaaaacttcgccgatcgatcaaaatagagtaacaacgatgcactttcatcccattaagatttggaacttaaccctcagttgctgataggaaattccacataaagaaattctcatttagctcctgatcttactaactcttaactgactatcccatcagtaataactgctggcatgactgtccttcttctgacctgacttcggtgtcatccacctaaatgggttgtgtagttgatatctcaaaactaaactgaccgactcgcattggaattgacacaacttgaggaactggggtgctgcgaatagagctgttgtcttgatgacgctaacgccttgccgttgaacaaccttgcaagaactgaccttgtaaaccataaccactataggtagcacttgttgcctctgggattgggggtgacttagctgtgctggtctgctaaagacttggtggcgtactgtctgaggttgcaggtgcttgctcttggaaaacaaactgactttcgctctgatcctgattccggcttgcatctgagcttgtacttgttgttggagacattgtcgttgcatctgctgctttggactctgcggttgctacatcaatatctggcacatccatcttccaatcttggctaaccagagcgaggtgctctgacttagctggtagcttgttgtcttgaactgatccactgactctgactgcaacacactactgctggagttatttccgctacatttgactaggtgtccaacctgcatctcccacatcgatacacccatcctctgatcttggacaccaaaagttgatcatgagcaggtttcatctggcattggggcaccttgcagctttcaactaacccttgatctgtggcttaaattgatcttatctctcacactgaccatctgctgccaggacgaaagagaggtggaagaaaggggtcgctaaagataaggtactaaaccacttgcctactgatatgttgttaatagatttttattgttcaagttgcttaagcaaacaacctagtatagtcgcatccccaccaatgatgcaaaccatacccctacacacaagcaaacaacacacgatctagaatctaacgaactactcttccgggaaggattaggtttaggtgaacttcgggaaaactcttcttgatcttcgcggaacgatgactctgaactaatcttcccgctccttgcacgaagcttgagactcgacttgacttctggacgggcatgaagctggcggtttctcctacatgtttgacaactaaaagagttggagggacagggaggaaaaattttaataaactgtttcgcaaagaaatgccgaagggcgagaggagacaatttgcgaatagggttttcagaaaacttgtccttagggtttgaccatttggctcaacctacagtcaagttgcctctgataccactttgtcacgcccagaaatttagtccaaatttctagactattttgtgtattaaatccctgtccaggaccagccagggtacacaaaacgacaagtaatatacagttccaaacgtaaataaagcgtaaaatacttacaaaagaggcacttagtcctcgcaccgaaacgaaagcagcagcagcggaaaagggcgatcctagcggggcttcagctccactccacaggcaaaactcaactggggtctgagccttggtcctctaactccatcttcagctcagaagcactacacttctgaaaaagggggaataatagcaagactgagtacaaccaccgtactcagcaagccacaccaacgatgcagacgtgcaaggggat

SEQ ID NO: 48480 - DNA, 575 bp, Oryza sativa
tttgatatcaaatttgctattttaagattttatttgaatttctttaatttattcaaatgccatttgaataaaatttgatttaatcttttaattgaatttacaacttaaacttatatttgctttccaaatattttcttttatttccaaaataccctgtagccactaaaaagccgccggttagaactttacgccttccatggggacgtttgcgcggtctacgaacctcaacgtcggaccgttggttgtaaagctcggcataaaccaaacccaaggttgaagtgctgctcctggcaccccacgccttgatgcgtatagcggtcggagcttcactatcccctcgacctccattgcacgccgcacagttagctctcgggctctgtgtgatccaagccgctccgccgccactcacggttgtcggagtaacacttccgccccactaaacctgcacccacctcctattcttctagccgatatgttgtctatcgacacggctagaaatgatactaaacctagtcgtcatgatgtccaactctagcgacgactagcaaacacctaaaaccctagccgatatttat

SEQ ID NO: 48481 - DNA, 836 bp, Oryza sativa
ccaacgcccacctaaccgcatttaaggcagtgtgagcgagcgcaccacaccgtattaaatacagcacgtggtgcgcctgaccggaccgtgaccagtctgtgaccagtcgaatgaccgatgtgtccagggtagtgcgcctgtgcactggttgcatgtcacatcccctgtcatgtccttagcctctcatcacaaccagccggaggtggtttgtttaacccggtcagggcagggtttccgtttcccgacgcgagtgagaacccaaaagtcttcactcattaaatgacgaatgacatgcgtgtcccccgtgtcagccggatagatttgatagggcccacgccatagcgggcgtactagaggcttctaaggcaagaaacaagacatgcatttaatgtgattatcctccctagatagactcggtggacccatgtggtaaccccttgagatataaaaggaggtccaggcctacttagggggaggggggatgagcccttttttttttctctagatcagttttcatggggatcatcaagagtcgacctccaggcatgcgatcttgtaaatcttcacacgatcagctaagcacaggagtaggatattatgcttctcaacggcccaaacctgtataaacccctttatctcattgttcttgaggggcccaacaccctctacaccacacttctcaccgagtcctcgaatctcacccgctgtccccggccaaaccaacaaagggggcctcactgtcccccgcttgcggagttcaccctccgacagtcagccttctcatctccatgcctccttccttacttttcttataagcccttgactatgcaaatcta

SEQ ID NO: 48482 - DNA, 677 bp, Oryza sativa
  unsure (1)..(677): unsure at all n locations
atgcacagtccgacttggaaatcaacttgattccacaccaaatccgctttgatctttcttctttttctccgaatctaatgcaaaatttcgttgttaatacatgcccccaattccgctgtattatataatacagtggaatttgctcttgttgaacccgcaaaaatttagggttttctgttttaacttttagctcataagtagaggcccattccttcaaaacacctttgtccggctatgtcctcgacaagctcttcattgtagaaatccctaatcctccggcaaccttctccggcgatccagctctccggtagcagattcctctgttcacaagcagcctgcgcagattcgcataaatggcgcacacggtaccaatccttgaggtatatttatcaatctttgttgacggtccttaaatcataatatttgaccgtcaatacctgcatataatgaaataaaacatggtatccaacttagtgatagggattattactaatcaattccactagtgttggtgaaatatgtgtatgcaggtattttaaggagaaaacacacctgtcatacgaggaaacacaccttttgcccatcaaacgcaagcacacggattggagggcccacaaattacgtggaacccgncatggaacaggtcataactaccataattgccataagtgcccacc

SEQ ID NO: 48483 - DNA, 676 bp, Oryza sativa
aggtccttaagtcagtttttgttaaaaaaaataaaaaaaaaagtgagaaaaaaaagggcagaaaggtgcaaaaaaaaaagaaaaaaaaagccgcaccaaaaaaaaatcagaaaagaaaaggaaaaaaaaaagaaaagaagaaagaagaaagaaagaaaagagaaaatattgttttgtttgagctgaacttcatacatcagagtgtgcttgagttgtttctggtgctattttgtggtaccgtttgtgtctaggctcgcgtctctagtacgttctagcctaggaccagcacggtacttgactttgaacaattattcaactttgcattatctgatttgagcatttgctattcctttgctacgtatttaagcctacccagagctccacatatttgattacagccgtaccgcaagtgtttgccaaggcatcgatacatccaaccttcattggggtgcttggttgagtcggtgtatgtcaccattccacttgcattggtaagatcttgtaagagcttggttaaaagcttgagtgtgtgcgatttttgagctgccactacctagtagttaataggaacgcgcatatttttgtgtatgtttcttgttttctactaacaatggcagggatacgcaagataattggggatagctgtgctcaacatcgacatcttcgtcgagacatg

SEQ ID NO: 48484 - DNA, 647 bp, Oryza sativa
cggcttattttttgccgacaagattcagtgccgaggacaaatcacgtctgctctaatgatggatcggctactcaatctatcgggacctcctcttggcagcattgaaaatattgagttggctggattcagaagcaaaaacttcgacagatggtggggtgaatagaagctacatctgtttcatcaatcagccacgatgtatatgacagatctgtcccccgacgtcataccctaggtaaacattgttactatcaaattgcgtagtcaattaatcgatttattacttaaccaatcttttgctcctgctttgcagacaacagagtcctcccctcctcaccaaagcaatagtggcaagaacattgagtatgcttcgggcttaattccaaatggaggtgggctatctccccctgttattggctactatgcccccaagacctcaactctccttcacggcctaactagagaaccagccgatgcaggcccaaaaaggaaaaccagatcctcggctgtgagcacttcaatcttggctccaaagaaaaggccaagttcaagaaaaccaaaccgactgacaagccgccgatgatctgccaccttggatccatctattgaacaagccttagatgaagagataattgagacgaagttgatca

SEQ ID NO: 48485 - DNA, 646 bp, Oryza sativa
ccaatattataatgaattgcttatgctaacaatagtttacataaatttttccatgatttcatcttgcataaattattttaaagaataagaataacctttctttgtatatgtgttcctacttcataactgcacctaatattattataaggattacattaaacttcttttgggctgtgaaaaagatattagaatttaatattaagtccacatgttatcaccctatattaactgtagttttgtttagtaattttaacccttttagtttatgctcatgagacctattatgaaaagcgataccaaaaaccaaatacacaatggactcaagcctaggcatgcattatgcacatgcatgctcaaatgcttgatgatatttctagtctaatattgggaatgaaaagattttattttgttctcaaatttcaatcatgcaatggtttaagttggtcatcacctaaattaaaacggaaatttttggctctcaaaattggagaagttaacctctaactattttgacaagaaattttaagtcctgaaatttcgggtatgttacaaacatacaaattattagtcaggttctctctactatgatcttcccacgggattaaataaatacgatacccttggaatactctcgggtgaaatgcta

SEQ ID NO: 48486 - DNA, 675 bp, Oryza sativa
tcattggacgcatgcaaaaatttatcacatccacaacacaaccctgccacgtcaacaaaagaatgatataagcttatcgctagagtgctagaccagcctccctccataggttttctcctcgtcatccagaccatgcacctctctggacatgcccccatgtcaagctcagttaagccatgtcaagctcactggtgggttcttattagttcctttcatcagttccttctgaattattaagttcttctctaagttaggttacatggagcaaaactggatgagttttggatttgttcttcttacttccactttcatattttagaaaatagaaacgaataatacaagtattccaagaaggagcacatactatcatcaaggctttctatgttgaattgttgaaaaagacaaatactgaaatgggaaataatgtgcatagagagacatatcgtcatgttggcttgtttgcaaaaatggcaatccctctcttggagtctatgtatcgtattcatgcccgtggaaccatatatatcaactgtgggtaacagataaatgagagaatatggcataatattcttcttgactcgttaggcacttctagaacaaaaaagcaccatagtagcacgaactccctatagcttggttctgaactctggagtctgagccatattttactctctg

SEQ ID NO: 48487 - DNA, 670 bp, Oryza sativa
tgttgaccacctcccgttttgtgcatcacagccaccggaacgtgaccacgccaacaacgccctgaagcacgcactggagcgccaccgcttcgacatcattgtcgaccggccattctcgtccatctcgaagcaagccgctgtgccaagaatctcgcctcgactacctcttcaagacgcctcgagaaccccagccggagacgtgaaggacttggagaacgcatcttttcttcccggcgtcgatctaggatcgcctccgccatcatcgtcgattaccgctgcctcggtgagccattgttcgattcctcgcgcatacaccatctccataacctcacgaacctcttggacacgcatgcatggcaggtccttgagttgttcgagccgtcgccgttcacctgaggaggagcgccgccgtcgaacctttccaaccgaaaccgctgctatccaagcttcggtgatttcttcctacagcttggtgagcctcctggacctcttaggaaacacatgcatggatgcatctagcaaaatcaaagcccgtaggcaacatgcagtaacagctcatgtatacctaccgctcaccctccaatgtctcctagccaagaaaactagaggaatggaatcgtgagagcattctcttcattttataatttgacctcattcccaatcgagccac

SEQ ID NO: 48488 - DNA, 661 bp, Oryza sativa
  unsure (1)..(661): unsure at all n locations
tccactttctctttattttatttgataaattcctacaacatgttattctccaagtacaagtggaaatatattatttggaaataaacatgcattgtaagcatagctacttctccaatattttagttatattgacggtcgaaatttgtcggcaacaaccgtcaacagtcggcagagtggggccagaggagggtgtcgacggtcgttatcgatcagtttcgccatcaatattactgaaataaaggagaactagttatgtttgcaatgcatcttcttgttaaaataatatatattccactagcactaggattactaacctcttgcagaaaataagcataagatggaggagaaccgacatcaaaatagacgatcaatcaatcgaacgatgtcgagaatcggacttatggaaagacgggccaagaactaagaattgacacgatcgaattgggccaaaattcacaagtctgaagatagaagaggtcaaggaggaagcctgccaggaacagctccgttggatccagggctttgagggaacggtggagattcactccctatgatggttggagggtattgttggtatttggtaacgacattactagaaatatcattcccagcaatggcgcaaaaatactcctggtatattatggntacagagttcatccgc

SEQ ID NO: 48489 - DNA, 667 bp, Oryza sativa
atcatccatttaaacaagttactagacattcctcgtaaacaagcaattcattaatatttacatttcttgatacccatgtaaccaatcttgtgaggaagaatagagagtcatgcattaaatccgaaaaaatcattaagatgataagttgttgaattgaaatatgcctatcaaaaatttttcagatttagaaatatgactatcaaaagtagatagaggaagtactatacataacagtcagaaaaccaaagctgactaacaaaagcgaccaaaatacctcgttattaattctaaaaccaacttataaaaatcaaaatagctaaaatcaaacagtgaaccttaaccaaataccctcagggaaattctgacgacgatgacatcatagcaactcagtcaaatggtaccatagcaattaagcatttgttatggtaatgacaaagataatctcgaataaacaattgttactaatatagtactaaatacgatgagcattgcgaagacatgatgttggaaagatttcgctctacacataactatatcctatggtcagtttctccgcaaggaaataactgtacaagcactggcaaactaaaggtacctaaaacctagagttaaggcaataatcctgttctccccagctgatcacggaagaacagatagccaagcatct

SEQ ID NO: 48490 - DNA, 658 bp, Oryza sativa
  unsure (1)..(658): unsure at all n locations
tgagccatattatgtaccatggtatgccttgagggataccggtagcggtaggcacgaccggcgactgatgtggccccaggcttgaggtgnatgcggtagtcgatagcccgtgccgacagcaagcctggggttcggcgaagaggtcctctaattccgccaggagatgctgcaaaatatcgtcgatgtcgatcgccactcatcacatcgggccctgatcagcgaggctgtagaacatgacctcgcgtgtgctgcgccatatggccatgcgcatgttcttgaaatcccacagtattggccccaacgtttgcaaccattgcatgcctaggatgatgtcgacagcacacaagtcaagggcgaagcagtcgaccgagaaggcctcgccatcgatgttgagcgcgaggttgcgacacaggcccgggctgacaaggcgatcaccattggccatgacaaagcgaagtccctagcacaccggctcaagatggaggaggtgatgcaccacctgtgcgtcgagccggagtcgacgagtgccacaagcccacaacacgtatgtcggctattgtaaccggaagcctcatggtgctagctccgtcaatgcctgatagcgtgttcacttgtggcaccgcatcgtcgttggctccgtcatcatccgtggagtcat

SEQ ID NO: 48491 - DNA, 706 bp, Oryza sativa
atggacttcccctcccaaggaattgcgctgtgcaccccatgtccttgcccgcacacaccatcatggcgaattatggccctatggggctgcctcgccaacctctccctccccaaactgcaaactgcaagcatgtgtcactctcagactctcctaattgcatttcttccatcatcatccctcatcatccttgcaggccaaagacatcctctggtcagtgacgaggaccaaattgtggcacagctatgcccttaaagagtgcggcagtatttttgccacgtcctacaggagaggtgctctatagagggattggtagttgggtccatctgtttgctcccctctgatctggtggtgtgctcatgaaatacattcccggtgtacccctcgatctccctctagcacgattgctcaatcctccctgctagtattggattggttatctgttatggggaggctacttgatttggtgggttcaatgatgactgcacatactgtccagttgctgatagctatagcgctgcctgttgttgttgctccaatccaactaagagttagttgagttaaatattctcacattgtgcctagaattttcacccaacaagtgtgtaaatgttatttagaacaatattacactaatagtagaaaactcacattatgttgtcaaattaattccagtgttagattatttcctattatgttctttccaaat

SEQ ID NO: 48492 - DNA, 1381 bp, Oryza sativa
actgcttttaaatgcctgctttatgcaaataaacctttagcctcctttggatatatcgtgcatcataccttctcttctggtatgacttgctgagtgcagtggatagtactcaatcttgctctctcttccccacaccagagctgaagttcttctcagttgggctgtctcagagaagttggtttcgttgccgccgtcaagaatgcctgtggaatggagtcgcctcgctgcaggagtcaagtcttcaagcttagctcgtttttatctttctgttgcatttgtaaatcttttatatgtttgtaagacgtggatctgtatgtcaaaaattgtcgcttgtgtaccctagctggtcctggataggggttttaatgtacattcagcttagaaattctggttcgtgaatttatgggcgtgacagtagcgaagtatctgctaaggtttagttgtttgctagtcattgctagagttgggtagcatgatgactgagtttggtatcttctctagccggtgtccacgaatagcatatcggctagaggaataggaggttggtgcaagtttagcgaggcgaaagtattacttcacaatcgtgggtggcgacggagcgactaggatcgcacagagcccgagagttaactgtgtggcgtgttgtggaggtcaagggaatagtgaagctccgaccactgtacacatcaaggcgtggggtgccaggagcagcacttcgaccttgggtttggttctgctggattttacaaccaacggtccgacgtggggcccgtagaccgcacgaacatccccatggaaggcgtaaagttccaaccggcggctttttagtggctaataggtattttgggataaaataaaatatttgaaaataaaatataagtttaaattggaaattcaaatataggagtaaatcaaatataaactcaaatggtatttaaataaattaagaaaattcaaataaaatattaaaatactaaatttggtatcaaaatgtagagtttgaatttatatgaatttaggtataagtttcactataatcggatctacactttaggagatatgggcttctaaagaataggatttgaattaaataaggaaaatacgaaaagttactgtgtaggggcccacctgtcagtatagatggccatgtgggcagcttgtcgggccggcacggtccgaccgacgcaccgggctgtgccgtgccaacccacgtgccgcactcacggcccaggcatggcccaacacgactcgggccgtgccgggccggcccaaaggtagagatggcccatcgtgcttttcctcagaataagactaattttcctccctcctattgggctgtgacatatatattgctaggaataagttcacttggtgaccctca

SEQ ID NO: 48493 - DNA, 1207 bp, Oryza sativa
agaataagactagttttattcttttctcctttttttcgactttcatctcggtgatttctctatgagctttatcagcatgggcaaaacgatatgggccaagagcccaaagagaggtaggttggatatggcagtagtactatgtgtgatttatttctaactcgatttgttcgccaagattttcaacatattgcaaaccccaacgctaggggggcttgggggaaaaaagattgtctaaaatacaatttcatttagaagaatctagaatacaatgggtctccttaacaattagaccaagtgaccagtccgactaggtagattagtcgtgctgtcctaaaacagcgtcaatataacttaatgctatttttctagattacacgacagagccacacatgtacacatcactatatacgcaaatacgcaataccacactgacaaattttgctataacttacaatcgtctaaattacatctaaaacaaaaatttagataaagaatcaattatccaaaatattaagttaattataactatcactgatcgattagtttgatgtatttgtgacatccgcatgcatagtgttactacatacccaccttgatcactacatatatgcatgtactgattaaccggccagcatgccatttggcctaattagaatactcaggagcatttgatatatttcccgtgttctctctttccgtccaacaccaaaactaatactccctccgtttctaaatatttggcaccgttaactttttaagaacatgtttgacctttcgtattattcaaaaacttttgtaaaatatgtaaaactatatgtctacataaaaatatatttaacaatgaatcaaatgaaatgaaaaaaattaataattacttaaattgtttgaataagacaaatggtcaaacatatttaaaaaagtcaacggcgtcaaatatttagaaatggagggagtaaaatagtgggatgatgtccagtagcaaggagccacattataacagtgtgtttctctaaataaatatttacttttacgctacaactaaaccacgaagtcgcaaaatccaataacagattttaccatatttggtgtttcagaaaagattaagtacccaaggataaaagataaatgtggcataaacaatatacatagaaaataaaaaattgttagcatttcatgttcacattgtaaactatttaaatttatctca

SEQ ID NO: 48494 - DNA, 659 bp, Oryza sativa
  unsure (1)..(659): unsure at all n locations
ggataaatatcggctagggttttaggtgtntgctagtcgtcgctagagttgaacatcatgacgactaggtttagtatcatttctagccgtgtcgatagacaacatatcggctagaagaatagaaggtgggtgcaggtttagtgggccgaaagtgttactccgacacccgtgagtggcggcggagcggcttggatcacacagagcccgagagctaactgtgcggcgtgcaatggaggtcgaggggatagtgaagctccgaccgctatacgcatcaaggcgtggggtgccaggagcagcacttcaaccttgggtttggtttatgccgagctttacaaccaacggtccgacgttgaggttcgtagaccgcgcaaacgtccccatggaaggcgtaaagttctaaccggcggctttttagtggctacagggtattttggaaataaaagaaaatatttggaaagcaaatataagtttaagttgtaaattcaattaaaagattaaatcaaattttattcaaatggcatttgaataaattaaagaaattcaaataaaatcttaaaatagcaaatttgatatcaaaatgaatagtttgaatttatatgaatttaggtccaaatttcactggaatcggatctacggtttaggagatataggcttctaaa

SEQ ID NO: 48495 - DNA, 660 bp, Oryza sativa
ctgccattgttagtagaaaacaagaaacatacacaaaaatatgcgcgttcctattaactactaggtagtggcagctcaaaaatcgcacacactcaagcttttaaccaagctcttacaagatcttaccaatgcaagtggaatggtgacatacaccgactcaaccaagcaccccaatgaaggttggatgtatcgatgccttggcaaacacttgcggtacggctgtaatcaaatatgtggagctctgggtaggcttaaatacgtagcaaaggaatagcaaatgctcaaatcagataatgcaaagttgaataattgttcaaagtcaagtaccgtgctggtcctaggctagaacgtactagagacgcgagcctagacacaaacggtaccacaaaatagcaccagaaacaactcaagcacactctgatgtatgaagttcagctcaaacaaaacaatattttctcttttctttctttcttctttcttcttttcttttttttttccttttcttttctgatttttttttggtgcggctttttttttcttttttttttgcacctttcttgccttttttttctcacttttttttttaatttttttaacaaaaactgacttaaggaccttaatgtaagaatacagggacctcaacataaatattaaatttat

SEQ ID NO: 48496 - DNA, 661 bp, Oryza sativa
atatttgcgaataaatgaggaatttgacaaacaaaatgttgaaaaacttgaattttaagtttgggcctcatgtggtatacatatgttgactagttgtataccgatagggggagagtgtgcccagactgatctaaggactatactcaatgtctgttcattatgtttaccgtacatccacatgtgttattatggggtgaccttggcctactaagttaagtgctggtctaaccttgcattcgggaggccgttgtagcattcgggaggccgttgtagtagcgatagtgcctacgagtgaactgtagggctatttgtgtttatgtgtgtattgcaaaggagatgactgtaccaatccgctttttatgtgtatgatgtttatgaggggacgactgtaacgttccgcctcacttttatttatggtttggtagggaacgactgtactgttccgcgtgaggggacgactgtaatgttccgcctcacgtacaacgttgagtgccacataagaagcgattgtaccggcttgcctatggcgttatattggtaaagaccccccaatataatgacattaagattctagaattagtgtggaacaacacctattgtgctcatgcaaggattagacaagacttaatgtaaaagcctcggtgtgacctctagactcgct

SEQ ID NO: 48497 - DNA, 790 bp, Oryza sativa
agaagaagatactacaagcaaagcattggctcctttatctgatgacgtgaagaaaactcaaggaagtattttggatcggctagaggcatcatcactagacagcttagtagttgactgtggctcaatcaggctcggctgcatgagattcaagccttaatcccggatgagttagccgacatccttactccagctgtttaccttgagcaacaccaattcaagctggagaaagccaagttaagattagtcgaacggcgagaatgtaagaacattgaagccactatccaagccagccgacaacttgtgcatgaagagaaatccaagcttgaccaattatctgaaggcccaatcaagtctaacattgatcggcttgaggctcacaagattgacctcttagcacaacttgaagaatgtaacgccgagctggatatggagcgcaagaagctagccgatctccccaagtctattgaagaacagaaagcaagacttaaatcggctatcaagcatgttgctgaactgaccaagtccctaaaagttatccctcgaaccgatgctcaagatgcccaagccatagaagaagtagagcagattaggcagaaggctatttcggccatctagcgatacttatctcagtagtctttatgtaataatacttaagacttttgtaatcggctaaaacattctgatactttattgtcttaacaaccctttgcgccgattaatatgactttgaaatttgctcaaaaaattttggtactgcatactgcattttggatatatatatgccccccta

SEQ ID NO: 48498 - DNA, 687 bp, Oryza sativa
  unsure (1)..(687): unsure at all n locations
agaatatattagtttggatcttttcaccttttancaattgtatattaggcttgtataacaaaatttgtataataaatcgaaagctgttctgtatatcaatttgtacgtgatcgaaatcctagacgatcacgagtggattttcggggcaccaagcctaaattgggtgtcccacattgatcgatatgttaaatctgccctttacattaagattttgttgcatttaagtatattgggcttctgtttggtatattctacttgctttaacatctttatataaagtagtatcggagtattaaccgatacatgctagatctatctgatcggctatgctatgaatatattaaatgatttttaatcccgaacgaaaatcggggcgttacactgggagatctacttaactccagtgcaggtccaaggatagcctcgagtgtgtcaaaggcgtgccagctgatttgatcatgcaatcaacaagaaagacaaaagcataattagtcagtcgatggccgatagcgtatcattggtggtctcagccgatgtagttagaccaaatcggctatggacgggatagatcagggaataaaagaccctaaacatgcctcatcggctgtaacactgcctattaggtttaagaaagaagatttaagacaatattatgaaaatagccaatggaaaaatatttagagctga

SEQ ID NO: 48499 - DNA, 643 bp, Oryza sativa
  unsure (1)..(643): unsure at all n locations
atttcctatacttctaatatacatacatacaaccttagtcaatattatctactatataatcacatagccaaaacccccttacgatgccctcctggtgtttcgagagaccacccctggttgccgagttccttacgacaacccgccatgaccatccaaccggggctaaatatggaggagtaccctccccaggaaattgtaattaggattatatacacgcgcgaaggaatacccgtactgagctgtcaccatcagcggcccacctctacgtatccgcagcatataaccccaaataatgatattcaatagcctaagcacatcgcttatgttaaatgattcacttgatctctcaaagtgtatgaatatgaattcctcaccaaattttcctttttgattcctactctaaagttgatatgtggagcttggtactctaaagtccaaggccaatcgtttcatgaggagggtgttgatgcgaaaaacacgaggcctgggagatctgcttaactccagtgtaggtccaaaaatcttgcccttaggttcgtgagcgtgccaagtgattagatcctgcaatcaacaagaaataaagacaggaaaatagcagttaaattcataaatgatagccgatcagccaatcgncgatgacata

SEQ ID NO: 48500 - DNA, 628 bp, Oryza sativa
ttatttaaaacccctttttgaatttaaattcctttgatttatttaaaatacttctttttaaaccactcatataccatcctttagccaccaaaaaactgctgtggaaactttacgccttccatggagacgttcgtgtggtctcaaaccccgacgtcaaaccgttggtcataaaacccggtataatctaatcctaaggtcgaagtgttgctcttcgcaccccacgcctcgacgcgtatagtggtcggagcttcacttctccctcgacctccacagcacactagctttcgagctctatgcgatcctagccgctctgctgccactcacggcaatggagtaacactttccatcttgcaaacccccacaaattttcccgactctagccgttgtgctgcttaactgtagcatcgactagacgagccaaacatttagctgctatgctacccatccttagcatcggctaaccaactccacatatctagccgtcgtgctgccctattctagcaccgactaaaaaccaatccaccaaatagaccccacctatccaaaattattctttatttgattttattcaatctccaacctgtagaacacctctctttatttttcaaataaaacttattttaaaccc

SEQ ID NO: 48501 - DNA, 649 bp, Oryza sativa
aatgttactttaattactcaacagttttactgttttgctcaataaaatgttttacaaccgcctttatgcaaatagccacaaacccctccttgtatccccttgcacgtctgcatcgttggtgtggcttgctgagtacggtggttgtactcagtcttgctattattccccctttttcagaagtgtagtgcttctgagctgaagatggagttagaggaccaaggctcagaccccagttgagttttgcctgtggagtggagatgaagccccgctaggatcgcccttttccgctgctgctgctttcgtttcggtgcgaggactaagtgcctcttttgtaagtattttacgctttatttacgtttggaactgtatattacttggtcgtttgtgtaccctggctggtcctggacagtgatttaatacacaaaatagtctagaaatttggactaaatttctgggcgtgacagtattccaagggtatcgtatttatttaatcctgcgggaagattataacagagagaactatactaataatttatatattacttgtaataatcaaagtataagcaggggttaagattataaatagggtagaatgacacacagcaagagaattatatactctcataataaattatctaagctaagtggg

SEQ ID NO: 48502 - DNA, 642 bp, Oryza sativa
agtaggttcatgtacactcggctgtaacccgaaaactccttttcggtccacgcgtcaacagcggcccccagcagaacgtattgacccaccgggcatacataaaaaccatattggctgaacctctagtgtatacttgtatgaatccctttgcctcacgatagagatatctctccataggaggggtaaatcccatcttgattattcatatcccactacatgtttcatagcatgcccgaaaactacttttataactacccaattacggagtagcgtttagcagtccctaagtaagctactacacatgttgggaaccatgataatctcaggtctaaggattcaacaccaacactaactgagatcaatgatgacacaacacatatggctcttgcagtgtctcatgttgggtatatccaacaacatgttcaccaacatgtgtccacattattaatttggtatctctataccatgatccatgagacatgatcatcaattaatatatgtgctgatcatctaaacatatttgttccacatatgatatttgatcagggatcctttagaaatagcaacacacaacataaagagcctcatgaaagaatcacatattcattaaccaataatgagttatctatttcaaggaacaaa

SEQ ID NO: 48503 - DNA, 642 bp, Oryza sativa
attttgaattcaaaaatttggaaacgaaatttgtgcggtttttcgcggtaaccgcacggttaccgcagtaaccaccataccgcggggggtcggtaagcccccccaaaacggtaaggtgaaccctggttggaacccattatggttgcgtcgagagggggttacacgaccctaaactctatatatcagtacccgccgccatctttaagtttttgggttttgcttaaattaatctgtcgagatcatttttgccgctagatcggtttgtaagaccccaactcgtgagcttaatcattcatctgcaattttggttattttctatctcgttcttgtttgtgttcttcgattggcaaatagggattagccttctcggcgaggtcatctgtgtttcggcacgggtgataaccagaggagacgtggtgctgcgattgcggggctcaagagcgtgcgcgttcaagaagcctgatcgatttatgtcgcgactccacccaaatcgttgtttatcagaacctttcggaagatcgggaaccctagtgcacatcagctaagtggaagaagaaatagaaagcactcaattcctatacttctagtatacattcaaattctaatttacatctgctaatttacaatcatgtgggcaatatc

SEQ ID NO: 48504 - DNA, 755 bp, Oryza sativa
ttggaattaatccttgaccaaacctttgatctagtcttatctctaattcttctctatcctgacatgttaccaatccttctgtagatattccaatagtcaaattcctttttcgatcgagcctccaatttaatccctatggcttcaacctccccggcacaagaatagtattattacaaattttggaatgattgctcttgtgctaagaaaatagattttaattcatcgttctcatccaaaatctaaattccctattagccacaaataattccccaaatattcatactaccaatttaaggattcaaatccttttttttttgcctctaagtattttccttccttattcccaaaaatatattttgtgagtaatcatattatttatttcccctcctatttgagtgctttaatatttagtccaatgtattctttctctcaaaatattgcactcaaataaactagataatatgtcttttggaaaatctttcttttgtgaatttcctccaaattcaaattctatccaaaccaaattttctaaagcccttctaaaattcagaaaacatttatttgggccgaagtcctctcccttctcccttccccacctcttttccctacggaataagttcatctaaggtcccttaacttgtcaacgaatccgattttcatccttcaatcggaaatccagataccacgggttccctcaacaatcaaaaccggtgcagatgaggtccctcagcggtttagatggcggttttggctgg

SEQ ID NO: 48505 - DNA, 782 bp, Oryza sativa
attatgtttctagggtatcctctagactttcgctctacaagttacatctctagagctatgggtttgtttggaaagagactacttgcaggaggttgatgctatccctggtcgtgttctgtgcaggcatattttgatggtgttgatttggtccaaggaagaattgttcttaaatagattcctaatcatggtggtcaaggggaatcgcggacctttggagtgcttaacttaaataataagtttgctaatccacaaccgcaagatgaagatttgccccctattggtgtacgccaccatcaccaggccccactcaacatcaaggtgcagcttgggatgatattaatgagcagcaagaggatgtagggggatgggataactaggatcaacaggctaagaatcaggggactggtcagtctggtataagctcacatggaggaagtgaaaatatgcagatcataatgttggctgacaatactaaatattttccacagttttctataacacctgagatgcaggagaagattgatgagttccttttgagggtgaaacttttgagctctttgcaaaatagagcccccatcccaatgcccattcaaatagctgctcttttcaatccgctcctttccctaaaaggaaagctatcactgactgttctccacctgttattaaaagggacaacgtgggtgaggcctcaagttgggccatggaaaaaaagtctattagtggctgatgatgtcatgcatgctttaggggatctaatgatttcctcttagttcccctggcta

SEQ ID NO: 48506 - DNA, 608 bp, Oryza sativa
ccacaagagctcgcgcgtgacaattgaatttagatgtgagttcgttcctatgttcttctttatatgattttgagaatagattgctacctaatgattatattatgattaggaacaatggagaggacaaggagacacttaaagagggacttagaggcgtggaggaccagcaaaggcgtccaagtcaagatggaggcccaaaccaagtcgacttcgagtacgtttcggagtccaggactagtttgctctaaaacggacgcgcaggtcatatacgtgtttggattggggcattctttatatggatggaaagctaagaatataaaatttccaatggttctggtcccatgtccaaattctttccgagtcatcgggaatcgaccgaacaaattgacgtccagaatctgtttcggtgctgcgtcgccgtattttgccctttgggccgtgcatcgtgttggagcccattagggttgcgtcaaggggtgttgcacgaccctaagactctatatattagtagccgccacaatctttaaggtttgggttttgcttaaattaatctgtcaataacagttttgccgatccttcggtttgtgagaccccaacttgtgagctta

SEQ ID NO: 48507 - DNA, 1080 bp, Oryza sativa
acacatatttcaccaacactagtggaattgattagtaataatccctatcactaagttggataccatgttttatttcattatatgcaggtattgacggtcaaatattatgatttaaggaccgtcaacaaagattgataaatatacctcaaggattggtaccgtgtgcgccatttatgcgaatctgcgcaggctgcttgtgaacagaggaatctgctaccggagagctggatcgccggagaaggttgccggaggattagggatttctacaatgaagagcttgtcgaggacatagccggacaaaggtgttttgaaggaatgggcctctacttatgagctaaaagttaaaacagaaaaccctaaatttttgcgggttcaacaagagcaaattccactgtattatataatacagcggaattgggggcatgtattaacaacgaaattttgcattagattcggagaaaaagaagaaagatcaaagcggatttggtgtggaatcaagttgatttccaagtcggactgtgcatcgactgagtatcgtatcggctgaaaaccggacagaggcttgacttgatcaatatggcaagcagccgatatagtataacttgggctcgatatgggcctaaattaagataaccgtcactgtcaattagagatagagctcgaataaggcaattgtatctattaattaggatatttaagtcgattttgctagatttggcaagatacccccatatatggtcttgtttgtatgttatctttaggaaagtttgaattgtgaccataatggactaagtttgtactcggggtataaataagaaccctataccactgtaatacgggagacaatccaatacaactttggtgcatcacaacccttttttttcttcttttcggcaagttctctcgataaggggtaacccgtctcgatggtgtgtgccagggttgacgttaccactggtaaccgtgcggttaccaggcttaccgcgggggtacggtaatataaataccatggtaacctccttaaattcaaataaatttaaaaaataatttgaatttttgataaattttgcatggttttgt

SEQ ID NO: 48508 - DNA, 669 bp, Oryza sativa
acttaatcagctaggtctatacccatacgagaattgaggtcgtactcgtatgttgttcacatgtacttggcaattttatatcggttggaacagtactagccaccccgaaattaaccatttctaccatactgtcccaatctaagttaattaaattttatgcataatctaactaggcagggcttagcaaaagctagcatatctggtttgctatgttcaggttatgcatttgaaatcatgtatgacttatgcattgaacagagatatagaatatagggtatttatgctcaaaggagaggaataataacttggcttgcttcaacgcccattaataccaaataggccacctgattatctgatgcgtggaataccataggttggcattcatattaaattgactctactaaaagaagaggaagaacccaattcaattaaagccattacatagccagaaagagataaccggtaggagggctaggtttaaggtatagcttatctcttttatggggtatatggattactggctgatattttatatgtgggttcttaaagagttggtggctggcgtagagaaggaattaaaccgctaaggtcaccctatattttatgtgcacactcttattaagtggtggataggagtatagtggataattgaactggttgagcagatat

SEQ ID NO: 48509 - DNA, 2054 bp, Oryza sativa
  unsure (1)..(2054): unsure at all n locations
actacgccgctgctatcgccaagagtggagagaggagaggagaggcgtgagagagaaaaaggactgagaggagatgctctgcatggaaattttaaagtggaaaaagggatagaggggaggggagaggagagaaagaggggaaattttaaagtgggtgagagagganagagggagttagtatttttgcatgcagctctcttaataggtccgtacgggaaaatcgactcattttcgcgtgctgtccatttaagaggaccgcacggaaaaatcgatttttcccagaagcaacgagttaccgcacgaaaaaattgatttttccgtgccatcctctttaatagaccgcacacgaaaatgagccgattttcccagaagcaacaagataccagtccctgtccaagaaaatcgtttctgtagtagtgattcatgaagttccttctctacttgatcgatccattttctttgtttcttttttggcatagatcgaacacttggtggtgcgctcgtcggcgttcccagtgtccagagcgccaccatcgccccactttgtcattcccgtcgactcgaatcatctccggctgtaccattgcgccactgacgtcgcctaggtcccaggagaacgacgcccacatatgatcaagccaatacgccgccacgaacgcggtcggtcgccgttgctctcctactgcctctgcttctcttgccgccgagtcaccgacatgtgggcctggctgtttagccacttcattaggtgctaaggactttaattagtagaaatttaaatcttgtaaggttctttttgtaaaattgctttgtttgccatgtggacttatggacctaaatgcaattcacctaatgcccagggacttttttgtatagggtttagggcttaccctaaaacatgaaattactatttcatgcattcattacttgatataatagcttaatgagtatattgtactcacccttgctttaacccctctttcagaatcaatttggagtttttgccgaagccaggagtttaatcagataaattggtttcattccaacttagttcccaagtatagattagatagatggtttaattctatagcaaaacattagacttggctcatcctatagcttctacagtaatagttagccactaccctattatttcatgtaaagaaatctcctttggagccttaatcaaatgtatgcgatgaagattcagattgttgaacctgtatcaatctactaatacaggggttgatacagtttaaatatgtcggttaccgaatctttaattttgggacccgacatggtgtgtgggtgggggcccctgcgatttgggagcctagagcggccgtaccgcttgcgccccctcccccctgaggcggccctaactacatgggccttaaaaggccaaatggcatcttatgacgaattctgggcttgatggcgacgaaaatggatgccatagactctatgacgacagaaagatcgtcactagattaatgacaaaaagataagctttctttatagaacgccattagagacgcatgacaggtgacgaatcatattcgtcacacgaatgtcacagatttcatagcatgacttgaaattaaatttttatgacgtaaatgagcgtcacctatcataagattcttgtagtgatggcttgtttggctattagagaggcagtttgagacatacagcacacagtttcataccgtgtgcgtgcctagttggcaactggatcctagtagatgcaaattttgaatcattcaacccaacccaatccttcttctcttaatcttctcttcctacacttgtgtatttgtgtttgtgtgtgtgtgtgtctaagaggctagtagagttagctatcctaaaattttttgcacgttgcagctactaactgtgctgctggcttgtcgtcctctgcttcaacattaaagagagaactaatagatcggtgatccactttggtttcttggatgctatccagccacgtcaccatgcatgcgaattttgtggatggagtcagtggctctgcatgcacggagctgatttaatta

SEQ ID NO: 48510 - DNA, 3634 bp, Oryza sativa
agttttttttattccaaactacgagtagcatgcatgcctttgtcagagagagaaaccgatggaatatgcctcgtttcaaaagtccatgcataatgtgcatgctttgtggattcgtgctgtattttcctgggtagataagaccaaagaatcccacttaccaactaggttttttaaaagtctggtacatcgtgaaccatgctgcttcacgtggtcggacctatatacgttaggatcaaatgtgctcaacgtggtctggcacatcatggaccatgctgcttcatgtggtcggatctagatgtattaggaataatccttttcgtagtagtgaaactaaagaacttcacatgccaattagtttttttagagtccgaacaaagatgaaactttttggaaaggtgctccagatgaccaagttcaattcaccaactgaaatcgcacattggattttacatgaaaaatgcaagatggacaaaaatgatttctttcggttctaaattaatactcccggccatttgggaggagcaatatgtacatatgcatgcatcacacttcagcatttttgtctttttttttccttggagttttaagaatgctcataattagggcatgcaagttgatccattgatatattcgcaatatttgacgatttgtttttcattttaaaaattgttgacgatattagcttaattttggtaaggaaaatatcggttaatttatccccaatttttatcaagagagaaaatgaaccatgagaattggggtgctaattaaccacaagcaaatattcatcttaatttgttgtatatatatatatatatatacacgagcatgcatgtaaagatggaaatatgtgaaaaatataatggtgctagtagatttgtctaaaacacttccataatactatgatcaggacactcgataaggacaaagttcaattttagggattgtgtcattatcaaaattatcaatgaataattggccatagggccgggattagcaagggtctactactgtcctgccatttcattaattaattagattaagtccccgattccttgcatcccaaattggcctacgagaaccgacaaaaatcgcaagatgggaggattgtggtaggttatcttcagcaactgtgcctctcaagtggccataacatattagccagaaggataaataatcatcaatctgccttcacagttttgatcatctcatgagacatatatataaaccacccattagcaagagtctcctaggtgaattaattaactatgttgatacacatatacttaattggtataagaaaaattagtggtcgttaattagtataaaagcatcaatcaaatggagactattagctagctaggagaccgggcaagcaaagcaaagcattgatcttgatgaatcctccagagagattaattgcatattgccagttcctcctgacctattatatgcatgcaagtgctctctgtacttgtgcggtgcacggacgagcaagagtgcgtacgtttatagtagaactgagggggtgcgccttatatacaccggacgagcaacagtgcgtacgtttgtagtgacgtctccaattttagtttctatggtagtaaaatattcgacgtttgacacctcaaactgcagaaaaactggagctgtgaaatgttttcttttttcatatgcgtggagctctaaaatattgacagttttgtttttttctataaaaaaagccaagaacagttaacgacttgatgggtaggcgctcctggatggagggagatgagcttaaaaagttgtagtaaatggacccatgcagtggaaatgcggaatggagtggagcagtaataaaatttaaaatgccacgcgcagggcatctcgaccacgacaggactctccttgagatcttcaaacagtgtgtgcttgctagctgaactgcagcagtggaacagtaataaaatttaaaacggatgtacagtgtgttcacagtggacgagtgtgctctgtgttctctgcatgtgaatagatatggcgatctctgcttgtgaatagatttggcgactactattactgggtatacgtggttaggacagatgttagtttgttctgcttgtttggagatggatttgggagcaaatgtacatggttagggcgcaaatgttagtttattttgctgtggaggggagtgggttttgctagaagtagacccatgaattttgctattccaaaattcctcaactagctatcagcctcatcgtttggcatattttctgaatatgccaaacggcatatttgcaaacgaaaatcaatttgtgaataaaacttttatatatgtgttcttagcgatctaaaagcaaagggtgaaaaataaacttcgatgaaaaaaacctcaaaatcagctccaaatttaatgttaaaaaaaatcaaattttggctgataagcatatgaatatgccaaacgatgaggccctatatatctagctccaacaaatctgtgatgcctatatctcactagtcttgctatgtgctatgtcatgtacacgtgggtaaatacctaatttatgaattttgctgtctcatcatgattatggcaaatatacatatacctaactcatgaatttttctatgcctacttctcaccatttatgctatgtctaagctagaagattttgctatggccatacctactcttaaatttttctatgtcggccttgactcagccgccccaatagaagtgacgaaactactgttgttgcaagagttggattccttcaagaaagtgatagatgaatctgaggcatcaagggagcagcaatcgaagaaaattgaaagtttgattggcctaaatgctccatattttgctctgaaaagttgacagttatgttaccaatcatgtatcattgtcattttcatagccttcatcatggcgttgcgaatattgtgaatattccaatggatcaacttgcatgccctaagtgtgagcattcttaaaactccaaggtaaaaagtcaaaaatgctgaagtgtgatgcatgcatatgtacatattgctcctcccaaatggacatcatgcaggatcgggactggacaacacattaaaggctctcatgctacacgcttcttgcagctgtagttaaacaagggcatcaagcggtagttcgataacaataagattcattggccccaacatacccccatccattccaataaatatggcacgcatgtattttaagatttatctttaaccaagaattagtttaaatttacaaagataattgatagaaaattagcatcatttcaacgtgtttttcaatacgaataccacaattctatttatgcattactagtcatcaacctgtgcacttgcatgggctaaaaaaattatgtgacatcaattaactaacgtggaagctttattggtgcatccaattactaaatatatgatttattctttgtttctcaattctttcggtcaaaaacgtgcatgtgtgttattcatagaaacgtatgtagtatttgtaagaagtacaatatcgaatttccaaaaggtttcgaccttgtgcgataatatacacacacattaacctacataggcaagctagctagacctaaaaatataccatttctaaacctattcggtcact

SEQ ID NO: 48511 - DNA, 1124 bp, Oryza sativa
ccactcatgctaggttgagtgaagtacaagtgggatcatagcctcaaatcactgccaactcctttaaatcgtttctaccgctcatgttgacacctagctctcactttccacctttcctttcaccattcattactacaaccaagatttttctgtgagggctaaaatgatttttgcgtgtgggtaaacggcccgcatacacctaggggtctaggaaaataacgatttttgcgtgcaggtggcgcacctccacgggaaaaaaaaacctgaaaaaacataaattttctttaaaaatgaaaccctagaatctagtggtggcgccgccactcctgcttgccgctgccgcctcctcgtcgtcgtcatcgtcgtcagcggcggcctccgcgccgctcgcctcggatccgtgctcccctctggccgcactgccgccgacgcccctcccctctgccagatctagggagggatggaatgggaggggaggggagctggatgccacgcggggggagggcgcccggctgccggatctgtgcggggacgaccgccaccactggatttttgcgttgatggccgccgccgcaggatccgtgcagggacggccgccacccgccggatcccacgcccaccaccgccaccacgtggaggaggccggcgcgcgcctacgcccaccgcagctgtcgccgcgcgccaccgccgctgccgccatcaggaggacaggacagtagagtggagagaggagaggagaggtgtgagagagagaggactgagaggagaagctctgcgtgcaaattttaaagttgaaaaggggattgaggggaggggagaggagagaaagaggggaaattttaaagtgggtcagagggaaaagagggagttagtattttgcatgcggctctcttaataggtctgcacgggaaaattggctcattttcacgtacggtccatttaagagaactgcacggaaaaatcgatttttccgtgccgtcctcttaaaaggaccgcacgtgaaaatgagctgatttttccaaaagcgacgagttgctgcctgcacggaatctaaaagggtccctgtagtagtgattaatcaagccaactcgccactgtgaacctcatctatttctcatagtgtt

SEQ ID NO: 48512 - DNA, 706 bp, Oryza sativa
cccccaattactaaatatatgatttattctttgtttctcaattctttcggtcaaaaacgtgcatgtgtgttattcatagaaacgtatgtagtatttgtaagaagtacaatatcgaatttccaaaaggtttcgaccttgtgcgataatatacacacacattaacctacataggcaagctagctagacctaaaaatataccatttctaaacctattcggtcacttactcacattggggagcctaactaaactaacatggactcacatggcatgcaagccagccatggtactaactcgtctactacgccatagtacgctacaaacacaactaagttatcttatgaaggactactcaatagtacacttaaaacagtgttactcgttgccttttatcttcatctgacgggtatgagctaagtgtatctgaaaatcatctccttctgtccatcggcgaaaacgtgcaaatttaaaattccttggtacgcaggactagatatgaagagtttgttcagaaattgtgcaacaaacatgtacatccatcaactatatacatgcataggatacatacatacaatgcaggtagccatttgcaccatatccataatatactagtaggcagccatccacaccttatgcataccaggacgatccatttgcacattattcacatcatcacataacgcttctgcctatatataagagcagcag

SEQ ID NO: 48513 - DNA, 3438 bp, Oryza sativa
tctttttataaaatcattttaactttgtttatttcttaataattattatttgtgctctgaaaattccactaaaatttgagggctctttttagaccaaggagattttaacaaaaattatccaggccacatttgaatttttcttgtacgtattttagtgtttgccaatttctttccgaattttaattaattctattattccttttagcgaatgatttttaattttgggatgaatttatcaggacgtgacacatctacctctgacaaatccgtgggatacacaacaaacaaatctaatctctaacctaaacaccacgtctaagttattaattactactctaattcttgcgcaggaacttccttctctatccggagtcctagtactagagcacttagtatgaatactaaataatgaacccgcaaagatggaaatctatcttactcagactaaataattaaataacaaaagaaatgaacacaaatgcttactttatagaagaagttctccgaacctggagcagagtgtaccgacagctctggtactcctccagaattcctcctaggaagctacactcgtcgaggtagaagtcggatgagcgccaaacttccgggcactcctccagagcttcccctcactctctaccttattctaatatacaaaagatacaatagagcctcttgtaattcagctcaaagttgtgtgttggaaatgagagtgagctcctcctttcataggcaggtatgacggttacagcctatgcgaaatgaccaaactaccctggaaccggcattaggatgtgatccaggccgtccacgcaaaatttggcgatcaacggccaccaaaagggttcggctgaactggaggttcagtcgaacccgggacggctccgttcggcccgtttttcatcgtggacacttattttgaggccctcagcccattggcatgatagttgggcccatttggagttgtttaattgacttatggggcctccaatccatgtaaatgtgtcttgaatgcacggaggtgcagtttgtcgcttgacggatgtgttttcttctcaaaatacctgcatacacatatttcaccaacactagtagaaatgattagtaataatacctaccactaagttggataccatgttttatttcattatatgcaggtattgacggtcagatattatgatttaaggaccgtcaatagcacccccacacttaacctttgctcgtcccgcgtgaaagctttggactctacaacagagttatgactttcttactacaaattattcaaagccatacctgtacttgtgggtctttgtagagtctaccatgcgatcctgagcaactgagaaatggaacaatcttgactcatgtcaccctaacttttcatgaagaacaacttgggtttttttttttcaagtaaaacaaaactattactttgctttgctcctcaattgattctctcgatcactcaaagtgtatgattcctcacaaaggcatatgattgtgccttttcttttcctaccacctaataagccttatgtggagctcagggtatggaaaagagtagagcattacttgcatcacatatattgcaaagtcaaataatggatccacggaaatacaagacatactttctggtcaagaatgtgcatgtgtatgtgtatggtgaatttgtgggtggataaaggaaaaataaagataactccttttgtatacctcctcctccatttattttctcttttgaaatttgggagagtgcatggctatttttttctctttggtttttttcttttttttttcatcatcatgctccatacttgtataagcattttttctctctttttgcatagccatgcctctctctcattttttttgaaagaactttagagggagaggcataaatgatatggagtatttattttgtgcaaaatgaatggaatgaatggtaaatgaggaatgctaacttccagtgtagaagtcaagcataagtgggtgtatgtgtaatgtgtgtgaacttgaccatgaaagtatgaaaagcatttcactagtgtgacaaaacttgacaacgctcaatgtaatgacaagcaacgtatgtagcaagctaatcatgaatgatcaacctatggctttagtgggaataaaaatatcaatgagaagtttagcatcgttatatatttttcttttttttttagataaaattcccaagtgagcaacatgaagagcaagatttctatcatcagaccatatctcatttatcaattaccaagatagcatggggtccctattgaatatatcaccacaagcaacaagtaataagcaaagaataataggcgtgcatgttattttaagggagatcatgaactctaattgtaccatccctagcttgagtttaattatcttcgatattttagaattgataatcaaatcaaactcaagatagaatggatgttcaaaggaaaaattgggcaaacctgcactctgtataaaacaaaggacgattcatggtaaaggaggttcagctgaactgagggtttggctgactcctcattggttctgaccacaacaattttccttgtgtggttcgtcatggctcatcacttctggggtgatcttgctttcgttatggcgttgatgtgcaagatcacccccacacttgtatttgtatctgggaggctttattggacacaaaaaagaaaaagaaagacaagagtgaagcaaaaagggctcacttggttggaagaccaagaagccaactttattttattttattcatgaaagctagacctaagataactggagggggggcctaaggactcgttgcattgaaataacataagaccacctgccatctacctctgacaaatccgtcggatacacaacaaacaaatgtattctctaacctagacaccacatctaagttactaattactactctaatacttgcgcaggaacttccttctctatccggagtcccataactagagtacttagtatgaatagtaaacaatgaacccacaaagatggaaatctatcttactcagactaaataattaaataacataagaaaggaacacaaatacttactttatagaagaagttctcccaacccggagcagagtgtaccgacagctccgatactcctccagaattcctcctaggaagctacactcgtcgaggtagaagtcggatgagcgccaaacttccgggcactcctccagagcttcccctcactctctaccttattctaatgtacaaaggttacaatagagcctcttgtaattcagctcaaagttgtgtgttggaaatgagagtgagctccttttataggcaggtatgatggttacagcctatgtgaaatgaccaaactaccccggaaccgccattaggatgtgaccagggccgtccacgcaaaatttggaggttcggccgaacccgggacgg

SEQ ID NO: 48514 - DNA, 954 bp, Oryza sativa
attgaaacaaaaatatatgggttaaagcctcacatgctaaccgtatacttgacactacacaaaagtagaagcgttactacataataggtgcatgttaccacttccaagtagatatgttactgcatgataaatgcagtgttactatgtcatttttacgagatgaagttcgaataggtgggccataggtaaagtttgtaggtggctttgagcaaggtctgaattatgtaggagtgttttgaataattttatacatttggtaaaaccatgttactgcatgtatatacccctgttactgtaaattacacattctgttactgcatgtggagggctaaagttcaaaatgtcaatctttgaaaagcaatatctcacaagatatgtattattttttaaaaccgtttccaccatgatgttatcgtgttactgcatgtggaggattaaacttcaaaatgcatctacgtactcccctcctcaagaaccatttttcctccctcttcttaagaaaattggtttcctccctccaatatagcgttactgcatgtatatgacgttattgcacttttgaccgtaatattgtggtgaattgcagtaattcaggaattgaaacaaaaatatatcggttaaaagtctcagatactaatcatacacttgttactgcacaaaagtaaaagtgttactgcacgacaattacacgttaccacgtgtttatgcagtaacactactcaaaaaatgtagttagacgctttcttactgcaaaacttatagtcttgcagtaccgttatcaagtaattgcagtaagacactatgttacgtgaaaattataatcgttactacatcttgtagtaatgacatgatgtgattgcagtaacgcaaaacaggcagtagtaaaacttttgatatagtattactacttgtggagagttaaatcttcaaaaacaaatctttgaagggtaatat

SEQ ID NO: 48515 - DNA, 730 bp, Oryza sativa
cgatgttcatcgtgcagtaacatcatgtcttacttgcagtaacaatattgaaacgtagtcataatataatcatgacggatctacttttgataagcactttttttctaacatcatggtgcaaatggtttttaaaagtagtacatgatgtgagagatattacccttcaaagattggttttttaaaaatttggctctccacgatactatatcataagtattactgctgatctgctatgcgttactgcaatcatgtaacgccgttactacaagatgtagtaacgattataagtttcatagtaacatagtgtgttaccgcgattacttgataacgttactgcaagaatatgtatagtaagaaaaaaaggtgcagtaacatggagagagagagatgaattggctcggtttacttatggggcaagtgtcacatcctgataaattcatcccaaaattaaaaattattttctaaaaggaataatagaattaattaaaattcgaaaagaaattggcaaacactaaaatacgtatcagaaaaattcgaatgtggtccggagaatttttgttaaattctccttggtttaaaaggagccctcaaattttacttgaattttcagagctccggaaataattattaagcaacaaaaacaattaacaaagtttactaaaagaaaaactaaagaaaataaatccccctcctccctttgggccccaaagcctccctcccttcctctcag

SEQ ID NO: 48516 - DNA, 1376 bp, Oryza sativa
caagctgagcacccgcgcccccgcgttgctctgttcttagccgccgcgaagtttttccggccgcaatcagtcgtttcaacccatctccgtgagttcttccatttcaaccatctgcatactacgtggattccattttagcaatccctttgcactgtcatgccaccccctgagctgcctacgtgagcacggccaccgccaatggaggcgctcgttggcaactatactcagcgccttgccaaaggtcggcaagctgccggaatccctctaggcacctcgtagatgctctagaacccctcccctaaccatgtctaactctcaacacctcgatcgccatctcggccaaaccgtgccaccgctcgccgtcaccggagatccctagcaccctcccctcgtcggctgcaaccactttccccctccatcgccgccgcaatcgccaaccctagcactgccggcctgatttggggaacggctggaggttgaagaagagaagagagagagagagactgacaggtgggacccacacacagtgccatttcacatttaatcgattttaactttagaagcccatatcttttaaaatatagatccaattccagtgaaacgtggaccaatattcttctaaaatcattcctatcttttgagcccctttttcctatttttgcattttattttattttctctatttttcttatttttggattttatttaaactccttttgaatttgaattttatatgtctaaccctaggtcttgaggattcttctgacacactagataatatcaatcaatctcaggacatcgagcaaggcaacttaccatataccttttgattatttaagcctatattttacaaattatttatttatagcctactattcaatattctattttatatgcataattcaatcatagaaacccagataatttagtattgcttactttgcttacaatctggttaaaataccttatacttaggttgggacagtacgtaagatttggctgatttccgggtggctagtgctgtctcgatcgatataagttttaccaggtacttattgtcgcgtcccaaaacgactctaaaatacatcctcaaaattgtgcatagaataagtaaaatccatgtgaaagcctccaacaattaaaatgtgcaaagttaaaagtcgaataaggcttggaggaattttgtatatttcctaaaagcctaaaatgcgtaaataaattttagtggaattttcagagcacaaataataattaagaagaaataaacaaagttaaaaaggttttataaaaagaaaaaaaccctaaaaagtctttttcccccttccccctcttgggccggctcggcccagctccctccctctctctcctctcccccg

SEQ ID NO: 48517 - DNA, 683 bp, Oryza sativa
aagccttacccactagacatgtggaagtacggtagtgctttgcaacaggggcccgaagaccggtccttatgtggccgaggtgctactaacaaaaccatgcaccccgagcccagcctaaaaccattttgagggttttgaatagagggggaggtgtgcatccaattccacaataatccaaccattccatagtgtccaagtgatatgaatattcccaaagtctagagttataaaaccacctaatgttgcctagttaatcagcgaagcatctacctaaattcatactagtggaaccatgaatagagtacccactagttggggttttatttattctagggtgaacaaggtaataataacaatagcaataataatgtcataacaaaggtaaataggcatggctaaataaaacagtgataacgcgggaatttaaataaagcgataatgcattaatttaaatcaaaataattttataaactgggattcaatatgctcaaggatgatgtgacttgccttgctcagagagaacggccttccgaaccttcggcgacgaccgcgaaccacgcttcgagaaccttccggaacgacagaagctacgcgaagcacacaagcaaagctaaaccctataaagaagcaattacaatacataaaaagaaagcacacggttctttagggtataacaaacatta

SEQ ID NO: 48518 - DNA, 1241 bp, Oryza sativa
tatgggttataatttgattagcatgaaccttatatattggtttggttcagctaaatgctatatgtatgtttgcttagccatgcttagaaacattagctaattaaaggggattaaatataaattatattatattattcttattaattatggttatatttaatggtagctcacgatgataattaaaacctggttaaggtgggttgtgagcatatggttttgatggttgtgctcatggtaattaaggaccggttcgcgagctactgttgtgaaacatttaccgtgccaaccacaagccagcatgggcaacggctttaccttttgtatagcatggttcattatagtgtgccagactgtgaagcggcgagaagtccgtgggggtcgctggggagtccatttgcctctggttttgagggggagattatgatccaggaacggtgcactgttttgagttgtgttgtgcaaagagtattgtcacgatttccccctttgcaatgccgtggtggtatttcggggcatggcaacatgtgtggaatcgtgtcttgtgggtacagtggtacacctctggccagagtaaaactattcgaatagccgtgcccgcggttatgggcgagttgagcaatgtttttcgtgattagtctcacactactcatccatgttaataatgtgataattaatttgactcctggtttggaatgaataattcatggtttggaggtttgatctgtacgaccggggttggttgttcaggtttggttgggcctaagcagcatgggtgtgctgtttagtgttgattaaaattgatgattaactactctactgttttacttatcttaaatctttgctaaatgctgcttttgcaaatgagactatattatgccatcctttggaatccttgtgcacttgcatatttgctgtgtggcttgttgagtatgtcatatgctcattcttgcaataatcatcaaacctcagttgaagataaaggatccagaaggagaagacgtttggcttataccccagttgagctgcctgtgggagtggagctgaagccattgctagaccgttaattccgctgctgttttcttttctttttaagtatgtaacgttattattaagatggatttgtatattaaaattgtcagtttgtgtacctcggctgattcctggacgaggattttatgcacaaataagttcggaaattactagtgaatttccgggcgtgacactatgtcatgtcttacgtc

SEQ ID NO: 48519 - DNA, 2033 bp, Oryza sativa
cccttcattgtccccctatattctcgaattcatacaaagaagaacataggaacgaactcacctctaaatttaattgtcgcgcacgagctcttgttatcggtccttgaatgaccgttggaggattgttgtgtgtatccgaagtagtgatgtccgcatcagtatatacggctgctaattaaaaaaagaaatattcactgctacaacaaaaatgtaaggtactccttattatgcaccgctaatacacaaaaaactagtatatagtactgctcatcgcttcaaagagtatatatactgcggcttaaaaaacagtatatactgttgcatactagaaaaggtggggatatctaaggtacgttatcaaatttgaaagcaaatgcatgccaacgatcttgttcaaatttgcacccaatccggtgtgcagctatgccacatgcatgcagtcatttggaaattaatattattaatttttttcacagctaaattgaatgctaatggatcatccattaataaaagggtgtacatacacctgggtgtatgaaagagccgtcctatatatatatatatatatatatatatatatatatatatattatcacctatcatgcgtctctaatggcgttatataaagaatgcttatcttttcgtcattaatctagtgatgatccttctgtcgtcatacagtctatgacgtccattttcgtcaccatcaagcccagaaatcatgataagatgccatgtggcctgttaaggcccatgtagtcagggccggctcgggggggggggagcgggatggccgctctaggcgcccacccacacaccttgtcaggtcccaaaattaaagattcggtaatcgacatgtttaaactgtatcaagccctggatcagtagattgatacaggtttaacaatctgaatcttcatagcatacatttgatcaaggctccaaaggagatttctttacataaaataatagggtatttacaagattgtggctatctattactgtagaagctataggatgagccaactctaatgtttaaactctatagaattaaaccatctatctaatctatacttgggaactaagttggaatgaaactaatttatatgtttaaactcacggtttcagcaaaaactccaaattgattctcaaagagagggttaaagcaaggctgagtacaacatacttatcaagctattatatcaagtaatgaatgcatgaaatagtaatttctatgtagggtttaggacctaccctaaaccctatacaaaaaggtccattggcattaggtgaattgcatttaggtccataggcccacttggcatacaaagcaattttacaaaaagaaccttacaagatttaaatttctagtaatgaaagaccttacgcctaatgaagtggctaaatagccggggcccacatgtcggtgacttggttgctggggagcagaggcaataggagggcaacggcgaccgatggcgttcgcggcggcgtattggcttgatcatattttggcgtctttctcctgggacctaggcgacgtcggtggcgcaatggctcagccagggatggttcgagtcgatgggaacgacgaagtggggcgatggcggcgctctggacaccgggaacgctgacgagcataccaccaagtgttcgatctatgccaaaatagaaacaaagaaaatggattgattaggtagagaaggaacttcatgttcccgtggttggagtgcggtgaagctcaccagagaatacgtgacatggatgaaactccttcgggtgaaaagagtaagtggaagttcttggagattccgaggtagtttttggtggtttgcatagtggaacactatgagaaatagatgaggttcacagtggcgagttggcttgattaatcactactacagggacccttttagattccgtgcaggcagcaactcgtcgcttttgaaaaatcagctcattttcacgtgcggtccttttaagaggacagcacggaaaaatcgatgtttccgtgcagttctcttaaatggacc

SEQ ID NO: 48520 - DNA, 2059 bp, Oryza sativa
acacaaaaatcttggttgtagtaatgaatggtgaaagtgaaggtgaaaagtgagagctaggtgtcaacatgaggggtagaaacgatttaaaggagttggcagtgatttgaggctatgatcccacttgtacttcactcaacctagcatgagtggctgtgtagtggtcccatgtagatgtttccaatgagaagatgagaggtatggtgaagtttgggtgtaaattggactttaactccctctctctctttctttctctctttgaaaaaataatttaggatcaaagagatgattcaccaaggttggttgctgtgtttggacgacaaatgggcccatatatagatctttcctaaaaggcttggagtggtagagtggcattttgagtggaaattgaatttaaacccttctctaaccttttgagaaataaaagaaaatttaaatgagagaagagcagatgatgtgttggctatggttgtatgatatgtgggccccacaaggatttggtcccacatttaagagagatgtagaaggagagaactagaagctctaaattttccatgtgttggcactatcacaccaaactatattactctctttctctcatacatttaatttagaattaaggggggggggggtgtgggggacagggagacggcaaggtagacaaggatttgatggttcaaggtgccaagttccaaagtttacgtaatttatggctctcatttcatgtggttacatttcgaattagactaagccattgcaccagatggtagagtaaagtatgtttaacattctgaccttgagattttgcaagaggatttatggtttaatttcggtgaaggtgcaaagtaggctaattggtatgctgtttccagatttttagctgtgttgaaggatttatttgggttatcaattgatgtgataaattcaaactaaaattgctgggagcttagggtgttgtttagtatttatgggaattttggtaggatttattgctgattcatttatttttaggaattttctttagacaaagcatgcatatgcaacctatttaaaatcctcttcctatcttttggctgaaaccaagccaactcctatccctctccacgcaggcccaaaggccagccgggtaaagtctatctcttttccctcccctccctaaatcgaagccaataagtctagtttacatcggtctacgaaagagccctagtccacccctgccactgccgatgtcgttggtgctgatagatgcgatgcccacacctcagggattcgcgcggcatggtgtgcagccagtgaatcttccgccgcctcctgtccttcagtcgtctgacgaggaaaggttttaattctcctccgattccccccattgctacataagttagtgattcattggtagatctgcttgtgcttgaatgtgcaagaatgcttggtagatctgattgatgttgaatgtgcaagagtgcaagaatgaatggagtgaactaaagcatatgtcctggtatgcatatttcaaagtactgcgcatatctgtattatacacaagttagcatgcgcattgatcttttcctcttttgccgtaggccctagtatgcatatgtgtattataccatattgtattatgtagttatgctgtgaaattatatgtggaattctccattgcatatttgctcttggttaattagtttaggaaaaattgcaaatatggtttgttgtttgtcgatttagttctccgtaatactgcctaaatttaaatgtatgtttcgtgaactgaaatcagatatggttagtgctgtcataattttttaatgactatttgtccttgtgagtaaggttgtcattcctcgactgtattgcctttagtatggctataagtctcccaagactaagaaaacaaggaatgtgatagcagccgagaaattgaccatgtttcctccccccccacctatgccttcctagtaggattcggaatactctttggcatgacaatcttaattatctcccatagtctaaaactcacaaaaacatcagaaatccgctaagaataaattaagtaaagaac

SEQ ID NO: 48521 - DNA, 881 bp, Oryza sativa
cagttcggtctgaatcatcgtaggccttgggttaaggcaggttcgtgtgggttcacggccttgattagtaatactgtgtagctttaggatcgtctttataaaatggctttgggcaactaagtgacttttaaatgctgtttactgcaaaacttaacccctatattattatccccttgtactcccttgcattaattatgcatctccggtgtggcttgctgagtactgtggttgtactcattcttgctcagtctttccccccttcagtaagagaagctttggagaagaagtcttaggtggagtcctggcttataccccagttgagcgcctgtgaagatggagccgtaggcccgctagtccgctgctgtttattttttattgtcaggcctgaagtgcctttgtaataatgtaaatattatcgatataataaagatgtgtcttttatatcatgtttgtgtggtgtaccccggcttttcctgggacggggattaatacactagcgttcgggaaaaggcaattttctcggtcgcgacagcaagggtagagagaaccttcaaagattggtcttttaaaatttaactctccacaagtgttgttactatctattgtacattactacaatcccatcataacattgttatgaaagtgtggtaaattttataagttttgcagtaacaaagcatcttactgcaattcttgaatagtgttactgcatacacttgtggtaacgtgtatctgccatgcagtaacacttacacttttgtgcaggaacaaatatatggttagcatgtagacttttaactcatatatttttttttcgatttctagttaactacaatttcactacgatgttactatcaaaagtgcagtaacatcctatatgt

SEQ ID NO: 48522 - DNA, 880 bp, Oryza sativa
agaacatagttcctgtgaaatgagaccctaggtctcctttgacagtaaacaattatacacataatcccatatcaacatcttccgaaataatcctcatagaacttgtttttattacacatgtctcccttattacatgaatacaaggccttgccttaaacaaaaagggaaggtgcttaacatcggtacattgcatcctcaacatgaatcatccataaccataacaaactcattgtttataatcatgaatgtatttatttattacatgattgctgcaaactcccgattacacaatgataagtagcgaactgaaaaccacaaacgtggctgctcattttgattctagagagatatagctggcattgttctagtgactgcatccttgattggttctgtgatgatgtgttaggactgcatattgctatcattcacaggagaagcttccttctgattgctatttgaagcagagaacggtcttctgcttggtatcgccctcctgagattgattgccctttgctcggcctggagtaggtcggggagagacacaacttcttccatcgacaacaattctttgctgaggctgtcggtgcagagaatggttggtgctgaaggtattattgctatgatttgttgcagagtcaggcgcagcaggaggagcattggtgctgtggatgatatcgtcgatgttgctgttggagctgactagctgacgagacaatcgtagggttgttcgttggatttctgcagtcttgatcaacaacacactgagttggcaatccttgggcacatggtttgtacctttgcacagaaaacatgtgaccttgcgggtgggacactcccctggtggatggtcttcttcacaatgagggcagagtgtgagaca

SEQ ID NO: 48523 - DNA, 1003 bp, Oryza sativa
atgccactgactttatcacaggtctatgatataccattgattttgttacgttttacaatatatcatcgacttttgcttaacttctacgatttaccatcgccatcgacttttgcttaacttttatgttcactgagttagtctccgttagtactgtacaaatttatcgaaatgaccaaaatacccctgggacagaaactttcaaaaattttgaaatatcggattttaagtttttgccaaattttggatatttacaatcttatgtttataatatgatattttagaatttttattcaaatttcggaagtttttttctaggagtattttggtcatttgggcaaaattgtacggtgctaatggaggataaccggacggcgatggtaaatcgtagaatttaagcaaaaatcggtggcatattgtagaatgtgataaagtcagtggcaactcatagatctgtaataaactcagtggcatataatagattctctctttccgaaattaccagaatttcggaaattttgaaactaaaattacaatccctgctccagggctgcattgttcataaggatgtagtacgtcgtagcatcttccactgcaagagtaaagacatgattcgaaagacaacaattagcgacgtgtccattttgcagctttatcggtctataaaattattaagggtgagtaatgctgtgaaaatcaaaattttatagtataaatgtatggacggattaactggtatgaacacgtcctcggccccaaggcccaacagcccaaggctaacattctgtcttggcccattacgcctactttccattgctgtcaagatattcttatggaacttgtcgagaaaacagaaagaaatcagtccagcaaacgcaacaggcagcattatatatcagccttgctaataataaacggcatcaattgtctctaattacagaaataccggctcgggttacaattatctatttatagccagcatcaattacgataattaacattatct

SEQ ID NO: 48524 - DNA, 509 bp, Oryza sativa
ataatgcacttgcatccaacaataatggctgcttccagacaaggttgggaatcataagggcctctcctcacatgtcaaaaattccacagcaccataatcttttgctttttatgagtgggcaaactcaactattggattggtagctagctactagctcctgattcttttattcctcatttcctcctcatctgcatgaattgaagagggaaatgcctccatctcctgcatgcctgctcttcatttatgacaaaaaccattttgcttgtttgcttctgcttgcctgcatgctatccatggagatagatagatagatctcctactccatttatgagggatgcagttgtctttgtcgacatgtagtactgtttgttgtttacttactagtttgccccttctgttcatgacagttgtgttagttcacctgacatacctggttgcagatattatttacttaagtataatttcaggaaaattgatcatatgccaccctttagattgcatccatttat

SEQ ID NO: 48525 - DNA, 696 bp, Oryza sativa
agtcacccggggaaaggtgacgcgagagaagaaagagtttccgattggttgagagaaagtgactgaagcagactaaaatgtaaatataactaatatatacttacatattgggttttgtgtgattaattaatgggttgatgtacatgcttgcatgtaagttttaggagtgctaataaatattatacttgtatgttaagtttatgtgtttaataggtattagctttatagaaagaagagattggatatgccctcagagctcatagatgaccgaagacttgggctaatggtcttaacatgtgcacatctttgtaggaaagagccaaacactcgagactgcaaagtaagtggtcaaggtcttcgacaacgaaagctaatctttaattgagactagggccacatgtcttttggttcttaagaaatcaaatggaatcttttttccggtggatcctcagttccaaagagtacaacggctggactgtttttatgtggaaaatgctctgatattactgtatttttaaataatagataggaatttagcatatacaacattcacaagtggatatacataaccaaagattacacgagtacatactttcctaatctcataactgacataaataacaaacaagcgaaaaggaaatacttaaaaggctgggattaaagcttttcttgcttgcttcaaaacttaagataaaa

SEQ ID NO: 48526 - DNA, 1055 bp, Oryza sativa
cgaattcgagctcggtaccccacagcctatattgaacttattttcagattggaagaaatagacaattagacacacaggcctcttatatatctataaaattcatcttattaagtataggtaatattatttctctattctctcattaagccatatcatctcaattatttctaactcttggatgtttgatatatcgtccaaattatatcatttcctttttttatcttataaaatcatatcaacttagttttgtttttggataattgatttatatacctttttctctttctctcattgagtctcatcatcttagtcttttcttctaaacaattaatccatatatatttaaatgggtgaatagctaatttaatccctcaagtttcaccgaaggtcaattaggtccttcaggtttcattttgtccacgtaggtcctataagtatttgttttggcttaaaatcattcttaggcccacttaatatgccatatggctatttctagtcaatatttctgttagaaaatatcctttttgccaataatttgtatataactatacactagaaaagagaaaaccaagatgaataaataacattgcagaaatacttcccattattttaacatgtgcacatcaaacttaagcaatgtctatcgtatacacttgcaagtacataattattttcgttctacataaattccgatgcattatctataaaaaatttcattgcattcgattttttttctcttatatatgtgaatgagggggttaaagtgtcatttatcaagagagttgttagttatgtttggccatgtggcttctaagtgggttcaaggataaatttgaactaaaataaaaacttgaaggactaatatgtatatattgaaacatcaaggactaatttgagcctccgatgacactttggctattcacgctatttaaattgttataaaccacatcatcaaatgggttataattagccttttttttcaatagtcgaccagagatgaaaattagataaagtccatcaccggtccctaaacttgtaccgctgtatcatcccgg

SEQ ID NO: 48527 - DNA, 541 bp, Oryza sativa
atttacgtcatgcattattgtgaaaggggacaaagatgtttttctaaccacctttgaatataccatttgtgccacaaatgccgctgtcatgttcctgtgcaccagacgggtattctccaacaaacatgtatgttgctcaaccctcgaagctacccataaagtgtcatgttgtggcttgtaaccatgcactctccaaggacatccaccctgtgtgcacttcacgtcatacgtcgtcctatttgaaaccttcaccttgaattcacgcttctggtcaaatgcccacctcttcaccgcatcttgtaagtgacctttgtcatgaaacatctgtccaactttcacctgcttactatcataacaccagtgggcatctaaatcatcgtttaccttcatatgactcattgatatggtcgtccaatcatcgggtatgttagtttcgttgtcccacagtgttgtatcttctccttccactacaagcgcaatgtattcctcgttttccacttccatctaatccactaccgcctcattctcctccgctgaatca

SEQ ID NO: 48528 - DNA, 853 bp, Oryza sativa
ctgtagtagtatctattaagcacaggaatacaaagaaaacttttcaaaaaaatcgttgatggcacctaaaaaatgaaagaggatgaatacacactactacagaacatcaaatagatgctggcactacaggtgccggaagtgctaaaaccggcacctataggcctttttcggcctctacgggctgaaaatacaaaaaaaaacgggcatctttatataactatatgtatcgattctaaagaaaaaccgacacctatactatagatgccggtttttgataaaacccaaaacctttaatttattaaaggtgtcggtttataaccgagccaagccgggtggagacaagccagccgagtgggcatctttttatctctctcgatactgtgtccccaccttatcttttatcctccttccaccggctctctcccactgtctatctcccttatctcttcttctcctcccaccgactctgcggcgggctcgcggaggggacacggcggtgcgcttgctgaggtgaggcggcggtctaaccgcggggaggaggcggcgaccgcaggtggaggagccctcccctccaccagatccggcgggaggggaggcggcaacggacacgacggagctcacagatggaggcggcggtggtctcgccgagggaaggcagcggcggcaggtggaggagccctcccctccaccagatccggagggagggaagacggcggcaggggcggcggggctcgcggatggagatggcggcggtctcgccaggggtaggcggcaacaggcgacgggctcaccaaggggaggcgacacgacaggaggtggcgcacacgcaacggctcgaagacgacgactatgg

SEQ ID NO: 48529 - DNA, 864 bp, Oryza sativa
tcaaatgtgtccaaatacatagagcacaaaattattatattttaagataaagggagtacatagaaattactgggttgcaaatgctagcactcaataccacgcacgcgcaatttcatcaataaccattagagtttagttgttgacaaaaactagctagtttttttcagattatttactattaaatgaattatttgctaaaagaaatacattttctcagaaagctttcttctattaaattgtttggaccacttgttttaagttgtttgttaaatttatttactaaaaaaatatttatctccataatccactagataatccatagcaataatccgcttaataatctatttcaaaccaagccttgaacaaattttactttttatttttgaaaaaatgctcagtaatttgtaaaatatgcaatggaagtagtaggtgggatgggggcaaccaccaccttatttttagtatagtacaatattatatattaaaaatatatgcacacaacatgtcgataacatcaaccgggactaaagatcttcctcttataaactgggactaaaaattatttttagtcccagtttttaatggaaccaggactattgtgaatttgggtcgaccgaccaaaagatggtttctctgccagtgacagcaggttaataaatatgaaggacaaatttgtatgccacacaaatttctgctgaaaatatgatgatttaaataatgataaatgaagtcaagcaaccccacaattataccgtgctccaattcgtagggtgtgtttttattgttcttttcaagtaggatatgatatacatccatccatttcaacaactcgtacacacattgtgagggtgcctcttgtgcaaa

SEQ ID NO: 48530 - DNA, 633 bp, Oryza sativa
cacatcactatataaaagttactttaaaatgtcatattactctatttttcaggtttaaaataatcaatactcaatttaccatgtagttaatggatcatcatctcgtcttgtttacgtatattctcaatcttctcttttcttttcctctcaaacacatccagcaaagtgtacatcaaccatgagttagttgcacatcttctttaatttcacaagtgacccactactgtagctttgcgagttcttatctgcgagtagaagatattactgtgcctaaccctgtaaacagtgcgcccacagggcctacacttgcatgaatcagcaatccacaaacttttagaacaagttcggcagtgatgtttggttactgcggaactccggatgaattaaccattaaaaattaaaaaaagatttatttgatttaaagaaacttatatgtagaaaatgttttcacaaaacgcaccactatactcacggaaaactaggaaattaaagttgcttaagagcaagtttaatagtatagcccactactatctccaaatcatctatagccaatatcatagccaattcatgcaataattgcttactatactattaatacctggtcctacctgtcatccacacattacgtcttgg

SEQ ID NO: 48531 - DNA, 771 bp, Oryza sativa
atgtaattttatttttaagaaaacatattgtttaacagtttagaacgagacagccttattactgtacaatgtaaggaccctggtctgttgtacagtatattgtaatcttgccaagttgtaacgatctggaagcacacactcttctctcttccccgtatcatccggctccacgagacaaccaacaagaccaaaaactttttttttttgggggaaaacaagaccagaaacttgatgagaaggcaaaaataaacccagaaaaaaaaacaaagggaaagatttggccgagttcgagtggattccatcagctcacatgcgctgttgcccgccccacgagagccaatcctgaccgtccaatccgcggcgtcgctagctagaaaattagcggcgcgtcgtcgaggccgcggcagcagcagcagcttgcctgagctgagctgacagatcagtcgtgggtggctcttggcgcgacgccgcgccccgcgcaccgtgcgccgtgcgcgtgcgctgtcgtcaccgcccacgagaggagatccgatcgcccgcgccgcgcgtgttcctgctcttcctcctccgcctgggccggacaaggcgggatcttgcggcgccttcctccaggggatctcgctcgccgcggccgcgcctcgctcgtctcgtcgcccaagaggtggaagaagaggtgggattttactcttttttcttttatcttcgggggtggctctgggcgtagcgggtgggcactaattaaccaaagattagtgtagtaatcaccgggtg

SEQ ID NO: 48532 - DNA, 1266 bp, Oryza sativa
cgcaatgtattcctcgttttccacttccatctaatccactaccgcctcattctcctccgctgaatcaacacgcataggcgaatccggttcttcatcgtctgagtcattggcctcacgattagtaccacgaacaatgacctctccttgtgtattaccctctattacttcttcccctcgaccttgctcagtccgccaaacattttcaacttgtccaccttccaacggagtttcttccaccacggtatgacttgactcccccgatcgatcaacacatgttttcttctacaccactattgccaggctatagcctttctcccttactttactaacaaacttcctaaaactctccggttgacgcaacctccactactctccactgccatccatgttgacccctcactggccacacggcattttatgacaaatttatcatgcactggatctaccccaaacatattatacaaccaccctaacacgtcgttcaaacccatatactccggtgcattcagactagtatcatggaaggcatatacagtcaaatccccccactatcgcatatttgtataggagcatcgccataatacagacgaatgggcatatcacctgacatcctgataaaacatgacaaattgtctgacgttaatcatttaatccttcgataattaccctattacaacttatactacattgccgtgtactaacttacaactattagtaacaaatgactagtttaataatcgaaataaaatataatatctttgtacattttttaacacagaacatattaataacatgtactaactaagaactaatttaaccatacaaatacttacatacctctactaacatttaacaatgacaaatacgtgcaaacaataaatactagcattgaacaatgcgaaacaattaacaaatcacaaaccaattttttattaaactttcttatgcctcatacttagggattactaatgtataccttaacttcactggtggaggggttgccaaccctctcctcccagccggcgcctcctcggcctccactccggcctgctagctcctcccctcactccctccggcgcccacggcgatgaagtggcgactcggcggcggctggcgatgtggtcctcagaaaaatcgaagcagcatcgcgggctgggcgcacagggttttaaaccggcctgtcaaacgtccattgttcaacagggtcggttgcggggcctatcgatcgcccgctgttcgacaggccgcgcggcgctgggtggtggg

SEQ ID NO: 48533 - DNA, 1147 bp, Oryza sativa
cggcggccacgctgaacgtgcggtcgtactggaccaactgctcgagcacctccttcatcgtcggccgcgacgccgggtcttcgccggtgcagatcatgccgagcaggaacaccgccacggcgtcctccaggaacgccgccctgtcctggatgctctcgtcgacaacatcgtgcagctcgccgccgaccttttacctccgccacgcccactccgccaggcaccagtctgcgccgccgtcgttcgccaccctcccgtcgtcagctccagcagcacgacactaaatttgtgatactggccttatcatgtgtagtactttattttgttttagattataagacgttttaggtttttgaatagattagtgcatagaatttatgtatagacttaatacatgtgtttaaaagttatataaatatcaatagatctagacgagaactggaaaagccaaaacattttagatggaacggagggaccgagggagtaggaaagagccaaggactcaagactgcaataggtcaaggtcttcgacaactaaggcgaatcttcttgggcctcttatttcaaatgaaatttgggactatttaggcccacatgtcttttggttcttaaaaataaatggactcttctgctagtggatcctcaggtcgatgccaaagaatactcaggctggacagtttatatatggaaaatggtctgatgttactcctgaatatactgaggctgtgtttagaggtccagggataaaaatttttgctgtgtcacatcggatatacagacatatttaaagtattaaacgtagtctaataacaaaacaaattacagaatccacccgtaaactgcgagacaaatttattaagcctaattaggcttaaaagatttatctcgtaatttacacgcaatctgtgcaattagaatttttttatctatatttaatactttatgtatgtgtccaaatattcgatgtgataggatgaaaaaacttgccaagggatcaccctgaactcattttcattttggaagaactacaacacaaaggtatatatgtaagggtctgaactctgatttccccgaagcaaacaattgtgtccgggccctcatgttccaagaaacgcaaggaaatagactacaattactaagattttacaaa

SEQ ID NO: 48534 - DNA, 5072 bp, Oryza sativa
acaatcacttctcaaatttctcaaattattagcacttaatccatcctataaatgctacatccattcttttttctattttaatataggaatatatcaaaatggttaccgtgtggttttctaaaactttataatcataaagctaggttatatgtcaagtgccaaaatacctaacatttcgtgcaacttgatgcataaataggtgggatttaatgaaatttactctagtaatcacccttaagagctcgggaagcgtttccgttaatctatgtgtccatttcttgaaaaaaaaagacggggtaaataataatacgagctgagatgaagatgtcaaaaatgataaactccgatcagatgacaacatcttgttatgatatcatggcttttgcattagttgtattgacggtaggtaataactaagataatatttgcattttttaggcagaggtatcaacaaaaaaatgacatatggtttcttcagatggccatacatacaacagcttcaaatttcgctccatgaatatctgtaaagcggatagtgacggcaacaacaaaacgcaaaaggttcagcaacagccattctgccgaatgcaaaactaacaagaaatctaatagaagcgtagtagcgtgcagtctgacgaaagaaataagctgtgttcccatcaccagaagcaactgacgctttttaatttggggtactgacatgacgaccaaacaccggcagaaaaacatacgtcaaaatctgacgccgattactcatacgagctaactctgtgtcaactgattctcccttgcaataatactaataaggaagccataatgagcaaacctctttgtcatcctatatatatatatatatatataaagttcatccccactaagtatagttaatgctaattctcttttctctcataaaatcacatcatctcaattgtttttagcctttggatgattcatcaagggtgtaaattacatctcttcacatcacctcaactgtttttaagtttttggatgattcataaaaggtataaatttcatttattccctccaaaagacacaccatacaacccaatcatttataacctatgtataattgataaaggtaaaaaaatataaacacatgaaagaaaaattatatagtaggtaagaaagaaaattttagaagtaatgggtgtgttcggtagcgctactagctggctgccttgcagccagcagccacagtcccaccacaagaaagatactagggaagcagcagcgctgcggctgtacaaccacagttcagcactaccgaacagacctaatatctactatattatcacataatttttgcgcaacaatacgcgaggtacccatctagttagtccaaaattaaaaccgcagtccgaaaattccctgtcatcagtcctccaaattgaaaggataatcggccaaattcttttgtcattagtccaaactgaaaactcaagaaagaacgtgcgtgctccaatcaggggctttcttgatccgagatattttcacaagagtttccagaattgtgaaagcaagctgttatacttttatataactaataagatacccgtatattactgttgcggacattaaattactattgcggggaattttgtgtgttcgcttgtgtgcatcttagttatgcagatatcacaaaaattgtattaccttaatgtaatcgattgagtttaataaaaactttaattatctaacaataattatttttataggccaatggcctatacgattggaaatgggttggtagcgtgatagagtaaaagcgtggttattcagttttttggggatatggttgcacgccatgtgagatgtgaaaggggatgagcggatgactccctttttaaggaagtataaggttttggttttatgattgagatcgtgaaggcaagttcaagcatttcagctaggagtagaagtgaagaaaaaaactgatcagtgagcactgtcctagtgcagtgcaactgaagcgcttagcctaggaaagaaaacctgcagacagaagtttcattttctgaaattattgcagggatcccataaaagaatcaatggaccagagagtgatttgtgatttgaaaacaacaacacaatgagggggccaggccatatcaagatctacattggccacaagatatgtcatcttgtcgtcaggtctctgcaataaataattcaatgatctggagttactgaaaaatagtggcagcatttccctctggaactccttcgagatctttccagctcacgaaccaaatctcctgctcctatttgaacaataattcaataaaatgatgctaagcagagacttgggagcacaagataacaagatctgaaattaatcaacaggtaattaagcaagcatgcatgagttcagcttctgcagcttaacatgtgctacctgttccatcacaaacaatattttcctggatcatggaccaaatcaaatggcacgcatcacaagaggaaaatcacgaccatgatcaatgatcgatagccatggagaccaaactcaactagtttactcccttcggtcccaaatttaaatatttgcatgattcaaatttgtacatgatataaatatttataggacaatgattatttcagtgcatggaaattctatcattttcgaccaaattatctatgttccaaaatataagtatttataggtttagcatagattgatgttgagaagaaaatagtttagtgcccctcaataaataataagatatggatagggtgggagggtagacggggtaagatggaaagaaatttgaagagaaagtgattaataagacaaatggtattatgaataatgctagaaatttttataatttgaaataagatttaattgctagaagttgttatatttagaaagagagagtacttatgaccataatttaagtaattcaaaatttaaaatttgactaaaaatgtaaataaggaaaatctttcgccctgtttttaatctttaaaaaattcttatagtaatatttatgaatggttggagtagcatattcttgagttattttgcttttgatggtgagttcgttcgaagataattagaaaaaaaatcctcgtctttcccacgcacgcctctgttttataaaaagtttagtgtttaatttattgcttaccttattttacttattttttcaatcctatttgttctcctgctctcagtcactgagctagttgcataaccatcgtttcgcggaataagcgaaatggcacatttgtaaaagaaaggtaatttgtgaataaaacttttatatacgtgttcttaacgatctaaaaagaaatgctgaaaaataaacttcgataaaaaaaaccttaaaatcagctccaaatctctaaatttaatgttgaaaatttcaaattttggttgataagcgcccttagcctgtgcgtgtagtgtatgccatgcattgggcttgaaaagatcagcagatcgtgtgacgtactacggccggtctgctgccaaaacaccgttctagggtcaccaataattggatggaatctggcactacgttacatcaaattattggccagatttttttcccctttctttctctcctcgctttcacggtcgacaacagccacggccatggtgctggctggacccgtcgtctcgtccctgtgacaggcctaggcgtcccggtcgccatgggatcctgtttggattctcatgacaagctgctcaacgccgcattttttttttttgcaatacttatgcgaattgtcctaagtattccctccatctctaaatatttaacgccgctgatttttctaaacatgtttgaccgttcgttttatttaaaaaatttaagtaattattaattattttcatataatttgattcattgttaaatatacttgtatgtatacatatagtttacatatttcataaaagtttttgaataatacgaacggtcaaacatatttaaaaaaagtcaatggcatcaaatatttagtagcggagggagtatttgacttcttgtgagaggttttgtccacccttttaggattttgatctccaatagttttctcaaatgcatagtttctttaaagaaaagtgttataataatattataaatttattatatttaatgatcttaaaatttcgaaagattaattgaattttgtcaacattaaatggttatgatcagagagagcagatgaaatttctaagcttaaattagaccctcgatgaatacccgaatgttaaaagtacgatttgacattttatttggtacaaaggtttatttaaagttgcctcggtcgtcatcatatattgttggagaatttctgaggagaccagcagcatattcatggaaagaaaaaagagaaatggaatttacatggccttgcatcttatttatacaaggttggcgaggcatacaagtctccacttgttatggatagttggactctagcgactttcagatctcatcttgtggtttaattttctcccaaaaatatctcatcttgcggtttgcttgctcctagttttggttttgtatatatcctccttcatacatttacacaaaccttgcaatttgctgctaaaatttccgtgaatttttttttagtagaggaagtattcgtgtttctgtacctgtaggtatattaagggtgaataaccgatacggtacgtagagttttgctctagtatcaatttagtttccgatgtttcaaattgcccaaacaaattctcaaaatgtggtacacatgaattcattggacgcacacacatgtgtatatttttcaaaaactggtgaacactatatcgactctagaattaattggaatctcagttgaactggatgcacgaccacacatagccaatttggccaggccagtttccaacttgtagtgttgtttgacgctatttctttcaattcattagatgataatttatttagtgcgagtgacttcaagcgctttattcttcctttttttaaaaaaatcttttcaatttcccaatgcaattacactgggcctaggcgcgagcagtgggcctaggcgagcaggtttttggtccagaagagatatgg

SEQ ID NO: 48535 - DNA, 602 bp, Oryza sativa
cagtggtatttatttgaatcgacatattttcagtggcatatctgtaatttcgatccaaatattttataattgcattgaagatgtacatagtggtatatctgtaatttcggtcaaattgtaatgacatgtctccaaatagacaaatagtaattgcattttataaaaaaaaagttacagcggcgtggatctaattaacccttatatttttaattaaagacaaaaatgaatatgaataactgaaataaatacatattatttcgaatacaaataaatatttaatattggacacaagtatggaaataaatatttcttgaaacatgaaaacctagctaatttcaaataaaccattagataataggctaaatgatgccgattgaattcaacacatacgatcgatataacaagtataaatacatgtgaaattaacgaagcgacataaatacatgcctattaatttagattgctatttgcaagttgaaataatattaacagcatgcgctagtgttgtaggctaaagcaccattaaagaagggtaattttactatttcttcagaaggtaacggaggtatagattttctactgtaaaatttattatctcaagg

SEQ ID NO: 48536 - DNA, 710 bp, Oryza sativa
cctcatgcaatcggcattacaaatccgcaagcaattctccattaagcttaggaaaagattttgatctagaggactgaaatagggttgttgctcccagcactgacaaataaaggcctcacttccatgtgcatatctgtcaaaatttgtgttatccaaaaactatttcatgtgagaataataatgcatgataacctagctaggaacaaacatttctttccattctatctaaagttgttgggtgctagtggatttgtggtggcaacatataaaggaagaaaactcagttgggtggactcatttatccaagcttcatcgcatataatgatttttgtggatggcatacaatggattccgcttatagtttaactagaccaccctatatatgataccttttttttctgaaaagaaaaaacagcggaggatcgaatagccatggtcaaattatgcttgcagttgcagtccactgaggcacatattctcctttgaaattccaaaatcttttggggacaaaattccattgtgtaccatccatgcaattagaaatgcaagcctgaccatgcttgagccacagctgaaaccatgctgttgcctccattggtgcgaacaaatcttacaaccccagttaacctgtcgacagggctacaaataaactagcttaattatgtaggatatattcttctctaaacaggacctagtacggaactagctgt

SEQ ID NO: 48537 - DNA, 1126 bp, Oryza sativa
tctatgtatcttttgaaagatttttataatcatatcacacagatttttaatccttagattaaaatccaatagacacagtaaaaatgcaaaaaacaactaagaaacaccataatggatactatattaccatatcttcagaaaaaaaaagaccaaatccaatataaatttcaaaacttatatgcgaagattcaaaaattacactgtaacttacaaaagttaccgtgcaaatttcataaattatattgtaacttacaagaaaacacactgtaaatttgagtgagaaaatcgagtgagagataagaaaaaatctttcgagtgagatatagcaaaatcgatgttttaatatcaaatccaacattgtcagtagagaagtagagggaatagaaatacaggcaaaaacgctacgatttcatagaaacccttgtcttgttggtggattggagtcgtctgcattttcgttctcgcgttggtgaagtcgtctcgtctgcattttcattttgcacaggcacacagcaccaactgaaccagctgcagagaggagcaacacgagacaatggcaatttgcaaagctgctactgctcctctcctctgccaagaaagcccaaattttgccagccggtcgccacgtggacaagttaatctgcctccaatgcaatgtactactgcaacagtatacacgtcgtcctgtttggtcggtcacatcacaacctgatctcgattactcgtactactcagctcacgtgttgttctaccgatttgtagtatgctaaaggggtgtctacgtgtaaaattttagtgttacatcaattattatatatggtgtcatatagggtgtttagatactaataaaaaactaattatagtatccactagtaaactgcgagaccagtttattaatcctaattaatccgtcattaccatagtttactgtagcactacattatcaaatcatggagcaattatgcttaaaagattcgtctcgccaagtagtcccaatctatgcaattagttctttctaagcctatatttaatacttcatgtaggtgtttaaatgtttgatgtgacagggcgtaaaattttagggttggatcaacatgccctaaggtctcctttgaatcgcaaaaag

SEQ ID NO: 48538 - DNA, 3377 bp, Oryza sativa
tgttttgtcttccccaatcaaatgtttagtttaggccgtgtttagatccatgggtgtaaagttttggcgtgtcacatcggatatacggacacacatttgaagtattaaacgtagtctaacaacaaaacaaattacagaatccgcctgtaaaccgcgagatgaatttattagaattaaatttgaaaatatactgttcattcaattttttctcaggaatattcaggatacaaaaacttgtgcaaaaatataccgtcagtgtcgcacattcgttgcgcgaaaatggtatcacacggtgaaagcgcgagaccgcacggtctcgcggaatggaagagcgagaccgaacggtctcgctgaagcaatcaacgacactgtccaatgggttccatttgattagcgatcgctaatcaggataatgatgaggacatcatccactattacccgctggcaaagatgcaaaagttgggcggcgaccatgtgagcctctgaataatcccaccttgcttagcttgagaggaggaagccactttaaaaggggagagccaccatttccctattggactagtcttttagggagattggacatttccccgagtgggtgtgcctatgaactgttgagatccgggcaaccttaagttatcgagcctcggccaaccccacctgggccggattgttatcagataattaatcgctaattaaatcggcaaggcacggtatcgcagtttgcttgagcgagaccgcgcgagactgtgcgatctcgcactttcactacgcgataccggtcgcaatgtcatttccacgttattttcacgcaatggttgtgcgagaccgatggtatatttgtgcaaaagattttgcataccgaatatttctaacaaaaaattgaatgaacaatatattttcaaatttaattcgaatttattaagcctaaatcatggcgcaattagacttaaaagattcgtctcgtaatttacacgtaatctgtataattagttatttttttcgtctatatttaatactttatgtatatgtccaaacattcgatatgataggatgcaaaatttgcaggagatctaaaccgggccttagtttattgggaaaattgtaacaatgccattataattttgtaaaattgccgataagcacgttgtacgaatggtaggagctggctttgaatgatatcttataaaataatgatctaagatacaaatgtaaaacacaaataatttgaatcacaacgatggtagcatctggacctgcatattttttttaggaatgtgattaatcatacgaaaacttacatgtttagttgccagccacactttaccacaactaacgttagataaattatgacagccacaaaagtgtggtggataaattgctagccaaaaagtttaaaaaaataaatctatggcatatgaaatatattatttaaaaagtatgacaagtcacaactgtgatcataaaatgtggtcatcacatcagcagaagcagtacaggggacggcaggagggccaattgaccgcagataatctttgtgagctgctagctgcgccgtccgtccgtccgtccaaaaggttgacggcgcggcggcggccggcagcacgcgccgcggcggcgctggcccctggccggccacacctacctacctaccttttctttctgcaatttatactcctacatgtattaaggaccaccgtcctaatggcctaaactaaacagaaagtagctagctaaagatggtatcaccgactataccacattttggttgttatatattctcttctcatctaacacacacccacgcctgcatgtattcatgccatgttttttttggatttcttttttctctcggtgaaatctaccaagaataatcttgtagaattgggcattttcaaatttctattctttgttatccgtacaaacttatctagaaaatcctgctattaatcacatgatgatatttctctacttctttaaaagcgtcctccttatgttccctttccttcgtactgatccctccgtcccaaaatatgaacatttttggactttggcacggtctccgagatattactttgaccaacaatatcaatataaaaagtagatgttttaaataaaaaagttaaatattatgatagtttgtttaatgataaatctagtaacatcaattttacatgattgatcttttttattttttggtattaataagaaatgttgaaaatatttgacttgccactatgcttaaaatgattatattttgggacggaggaagtatgtgcatagccacagtaaaatttattgatttattcttagtgatccaaagttttacacaaagccccccctacgtttacacagaactccccatattttgcaagaaaaataacctggtacgaccaacttaactttatttggtattaaaaaaacataaatttattggtgaactagaaaaaagtatccgtgcgttacaacgggtgaatgctattttaatcttattgttgctatacggtttagttatgatgaaattcattgtgagaattcgcttggatagttctttagaaaatcatgagctacaattaggagtccaactttcatcttaagttagcatgcgagttttttaaagagatttcttatacgactctttttatttccaaaagcaaacggacttaaaatccgacttacatacggatatgtgtttccaaaagcgaacaaactgacagactcaaatacggatggtgtaccaagagaccaataaaaacatcttcagtttttataatagtagagattattagtccacccatctagtcaatttctaattatataggcctataccggtgtataatatggacatattacaggttattaggaaaactagagttagaaatgcaacatttgcatagtgctggaggtataccacgaagggccttcggccggacctgccgaaaccaaaaactcgggcaacaggctcagaccggaggcaggcggcgaaggttgagaataaagccatatgggcgtaagccgtggcttgggttacgccagcttcgccaagcggagtccttgccagaaggctgcacgggtgtagatgatgcggcgaaagcctcggcatgaaggcacggtttcgccaaagtacggaacctcgtcgtcgggaagcctagcgggccgctacgtcctcaggaaattttggcagatagatgggccgagccatttaagtccagtaggagcccatatgtgtaaaggacacagtgtgcccttaataatattcctatcataagggtaacaatgaaaattcccctgtaaaatctaaaccctaatagggagaacttgtaatggggctataaatagccccctagggccatataatagggggattccaaaagtttttt

SEQ ID NO: 48539 - DNA, 2447 bp, Oryza sativa
gtaattttgcatgaagtttcaagcaaggttttgcatgatatctaagataactattttttccgcaaattgtgcaatgtgcctttttttttccatgggctcacttcacattctattttcagttgccaacagatgttacaaatttacaaaacaggaaataagaaaaagcaaaagataactccattgagaaagcaacatcaatgtgatcatgggagggagtcgtagatgcataactctattcactgggattcaaatattaatgttatcatttatttttgcagaggccaaaggtaagcatctttttggtttgttgctgcccaaaccaaccctaccaaacttggtaatacccaagtataaattttgttattaccaaaatttgataatattgattatgtttgattggtaggctttaccaaaatatgatagagattttaagagcgaaaaccttcgggacggccaacttttagtaagatagaaatgacaagaacatgtttgatttgttgcattatcaaatcttggtaataccaaaatgctaataccaaaatttggtacaggaacagaatggtcatgaaagttgcaacaatccaaacatgccctatttcttctattatctttgaagggcatttacaatataaaatgagtggtttcatgtttcaacattagatccgagctaccactatcagttgggagagtgatcctgttgagggtgcgcgcaccctattaaatgccttgaaaagtagactattgtgctgagaaatattaaactctctccattttataatatatgacgtcgttgatttttaatgtgacgtttgattatatgttctgtttaaaaagtttatataaatgctatttaattttttatgttttattttatcatataaaactctgacctttacttatatttttaaaaatttacgctaaatttttaataagacgaatagacaaacattatacgaacaaccaacaatgttatatatataaaaagcggaggtagtatttgaaaagagaggaagtatcacacaacataagacccctttctacataaaattctccaacaaaacaactctccattgcttgctccaagaatcaatgcattatgcatgccacacctgcatccctgcaattgtttacaggtgcaacgcaatgcaaggcaccgaaacaaacaaacaaacgaacccagagctagcgatgagtactctgatcccaactcacaagaaaggaagagaaaggcagctttcttgagccaacaacccgtcgtccgttggcatgccaacaaccaccaactcgggagccggcctcgcccgcgcgcaagaagaagaagaggaggaaatcatcaaagccaaagcaatgcaaagcaaagcaaagcatattttggtttggttgtcacctttgcttgcttgcttggccactgtaaccttttcagtgctctgctgcctctgcctctgcctggcctgcagtttttctgcactgcatatttgcatttgcatttgcatttgcccctgaatcctgatgaccctgacgacacacggatagacagacagggcaaccacaacagcaatgtgctcgcggcccaacgcaggcaggcacagaggccatgagagagagtagaaaggaatactagccgaataggaatagtagagtactacaggtctacagcagcggccaaaagagcaggatcctgcaaatcttctccgctgcacgcctaattatccccatcaccatctcattctcacccacctatggccttgtcgcttgctgttctgcctccataatcatcatcatcttcttgctaatactactctattactagctgatgagcttgttaatggcactttaattagtctaaagcaaaaccaccacattattagagcaagtttaatagtataacccactacttagtctaattcatctatagccgatctaatagtcaattcatacaatagttgcttactatactattaatatatggtcccacctatcatacatatattgtgtcttggagtccgtgctgcagctggctacagatctgtagcccactgcttttctttctcatttttatctcattaaaatatatttatagctagcttatgctattttaactgctccatctgccaccttttgagtgagaggaatatagagaaagagagagagagagaatgcagtaggcagcagaagcaaacacgaatctctctctatcagggcatgataggaggagtagcaggataggatgtcatgggcggcatctcagctcagctcaggctcagctagacgctactcgcatcggagcatcacattgccgtgtgccgttgctcgcattgcagctgcagctactactaccattcccacaccttttctagctctctgttccacacctctccctcttgcattgcagccaagacagcaaccagcagcagcagcagctcagctagctagtttctgctttcttg

SEQ ID NO: 48540 - DNA, 963 bp, Oryza sativa
agatctacctttctcccgtacgtatgtacggtttgtcggaaggattagtaactatggttgttagaagttgagattaattagctgtcatattgtgttactactaatcatagctatatttattacatgcacggcaatacacacacacacacacacacacacacacatatatatatatatatatatatatatatatgtaagctaggagatttacaagaagattatacatagctaattaaatcagtttacatggctttaccgtgatattatgtagctaattcgaaccaagcaatccagttaaatcgtccagcttaaataggtgtaattaagattacctttttaagttattataatgactttaaaattaaaaagttttttaaaaaacaaaatacatgataattggtttttgacctaaatgatttagaaaaaaatagaaaaacaaagtcccctccacctcaccctcaccattagatacgcacaacactttctgccccctccacttctctctatattttttgagtagctatgataaagagaaacaaccatggttattttaagctacacatatcatatctaatctaactgttgctctatacataattaaaccaacaatttaaaattcaaaataaattaaaatcgataatacatattaccgtcagaacaaaatcaatgatctttaaaatataactttttaccatataaaaatatattactccacaaatatgtgcaaatataaactagatctataatataaataaaaaatatgaaatcaattatctctaaacgttcatcttttaaattattttaaattatataatcaatttgtgatcccgttgcatttctttaattaaataaaatatttgtgtcttataaaatttatattgcggttctaaatttatataataattaatgttatgataattttaaataatttcatattatattttaggatatcaaatatcactt

SEQ ID NO: 48541 - DNA, 1609 bp, Oryza sativa
cagagaaatgtggccaaatttgtgcaaacgttgatcagggggcctaaactgaggctccaacgtgtgttgcaacttgcaaatggctcatccgatcagtggccaaagctcagatgtttcatgatgcttttatatgctttaattgggttagtaatttaatatagcacattcaattgttataaaacaaatcagagaagtgagttaaattagtttcaatggttaattggactcatgccattgtaatttcttcaattttgaaaaataccattactattcatctatttaaagacatgctgctataatttgaccaaaattagagatatgccactatgtacccctccaatgcaataagaatttacaccaaattatcccttctccttccttcacttccttcttccttctccctctcaataatctatgtcatctcttccaccggtccatccgtgatcccatcgagtccgctggctgcgccctttcaaacccccctctcaagggaggcccaacttctcaccgtccatccccataccatagagccgcgacctctccatcactagccatcccattgagctcgtggtagataatcgcggatctcgtcgtcctcttggatgacagtggtggcggcggggctgccccgatgaaaaccttggtaactgggatgaccatgtcgaggagcggtttgtggtagccccttcaagctcgaatcttgctgtcaccctttttggagctcccctggcggtggtaggggagaaagcaaagtagaggaggacacgagggggtggttcaccttcaacattagtgtgtgggtggcggaggttctagtgtaaggaagaagggggtgaatgaaggaggggtaatttggttcaaaattttttataagtgcattgaaggggtacgtagtggtatatctctaattttagtcaaattgtaatggcatttttaataagtgaatagtaatgtcatttttttttataaccgaagaagttacaatggcatggatccaatagtttcaatgcttaaacatcgacattatgtgagagaaaaagattcacgtttccaaataactgaacactctgtatttggttaaataattcatgcatctgaaagattataaacttatattacattcagctaggaaagacaatttgctagaaaaaatttactagagataagtataggcatgaagtatattaacaccaaataataataagttgaaactcaacctcatttgagagtactactcaccaaaaaattatcttttttctactaccaaataaagttgagttggccctactaggttatttttcttacaaaatatgggggagttctatacttctactagcacagtgctcgtgtgttgtaacggatgaagtcaattttgattttacatacatactctgcacatgcaagttagtggataaggagtcgaaagcgatgacacatcaaccgaaagcaactccactaaatcgaaccttgtattgtggtgcaacgaattgacactcactacactcatacctatttgattgttgctttaaatccagtcgatttatgattataagaaagatattgataccaccttgaaataaaattgctttttattgactcctatatttat

SEQ ID NO: 48542 - DNA, 681 bp, Oryza sativa
ttgggttaaggcaggttcgtgtgggttcacggccttatttaataatattgtatagctctaggagcgtatttacaaaatagctttcagcaactacgtgtcttttaatgctgtttactgcaaaccctaaccctttatattatgactcccttgtactcccttgcatttattctgcacttgtgggtgtgtcttgttgagtatggtggttgtactcagtcttgctcaatttttcccaaacccagaagaggagttcctgtaggatgaaggctttggtgtctagctcgtgcctgccgtcaagtgcctgtggtcgtcgccctagtcttccgctgtttctcgtatgtctttgtgtgtgctgggccttcgctgcccatgtaataaattaactatttacgcttccgcttgttaaactctgaattgtatcaacttttggtgtaccttgcctcctgggacaaggattaatgcacgcacgtaaggaacgcccgttgggttatttccggtcgtgacaagttggtatcagaacccccttgaccctaggacgagccgtagatcccaagccttagcagtattttcgaaataaaaatcctctgttatttgtgaaaaccctctagtctttctctgtcttgctgcttcatttatcgccaaaatctgccctttttaaatgttgcttttctttttgtttgtaga

SEQ ID NO: 48543 - DNA, 677 bp, Oryza sativa
cgagcgaaagccctgtctcggttctctttgagaccttgacggatgggggcggcggtgttttccatcgcttctcttcttgaaaacgtcgtttagacatcccctagcggaaacccccaagcaattgatgcaagctcgctctagatttcatcctcttatggcggcgtcctagacactataagttggtcacatcagagggcctaaggggagaagtgtttcattcttctctctcaccctctctctctaacttctgaagacttggatagagcggggtttgtgttgattgtaagggttgggttttgggcgatctcggctgtgttttgttgttggcctagcggcggtcggtcatgcttagcggcggccggttcggtgctagccttctcctggacctgtgtgttggcgttgccggtgtgtgggtggtggtatactttttttcttttcctggttacgactttccagggttgtaatcttgtaattttttttctgctctatcaataaactttgcaccgtcttttgcgagttgttcaaaaaaaatttacattttatgtcattctaaaactaaacatacatatgctaaattatcaatctcaaatcattttcataatatttcaatccaaatcatttcatcatttttgcaatatctaacatatattctgcagcaaagcgtagagcatcatcta

SEQ ID NO: 48544 - DNA, 871 bp, Oryza sativa
caatcctctagtgattgaaagatgctctgatagagacatgtgagttgtcagttgagcactatgctatcctctttcatccaacttgaatgtatttaagattagaagcatgaaaaggatgatcaccttctggtgtagtacaagacaattacttggaatatgttccgtttgatatatatgcgattatatatcactatgatacggcactcgaaagcaaggacatgcagtgagaatggaaaaaaaaattgccgtttcctagtcgaaatgttcttattctgttctgtcgaaagtttttttatgctttacatacatatgttgttctgtcttttcggcagaaatgggggggggggggggcgagattgtatctactaccgtctcttgtagctgaagaaactcgtgtgattctcgatcgcccatatctgaaactctgaataattggtgcaggttcagagagttcaggacttcaggtatattcgccgcactctgtttctgaattcagtttcgtttcgttgtgcactgtttcttttgccacgtacgtgtgtaaatcatggaattctcacaagatgttattaatcgggacaaaaactaagctctctccaatggagtggtgtcatcgatttttattgatattacgtatggagaagggaaggtatctcacgctcatgatggattttatgttctaacatcaataatttgccacagtagcatactactataaatccggtttttccaaatgtccaattgtggagattatgagtatcccatacccacacgatatggttttccgactgattataggggataacttatatctatggaatatgtaacggatcatgacttgggtattacgtttccctgtttattatggaatagg

SEQ ID NO: 48545 - DNA, 3205 bp, Oryza sativa
aaaattacggaacaaatcacacgacaatatctcctaaactctcaagatgacattctctcgttgtttagaagtcaactaaatagttatgaaaatttttttaaaaaaaattaacaagactgattattatgataaatcactctacaaatatacaagttaaaatttaacttctacaagttccaacagaaaaaacaaattaaactatgactagttaacgtatattcgtaattaatttttttattgcagaagttaaatttgaccatgtttatgaagtggtttatcatatattaatctatcttgttgaatttttttaaaaaaaatcataactaattgggtaacatgcaaacaccgagagaaaatcctgtcaagagtttaaaatagttttgcaatctctatcctttctatacgcaagctatctttgcgacgaatattagccatttagcattatcaaattttagtagggcagagaaccggaagttcgagatattcgcacgtctgcttcagctggttgtggacaaagaggtgactccgtgactccccgtcgtccgcttgtcctattgaagtattgatgatagagcttgatgactgatgagtgaacgacatcggctgaactcgcagaagaattctctaacgccgacgatccagtcataatcagtgcggaaactttaagctttctgctcttataacccactgtcgatctggccatttgtacaaacgaagggacgggtgtgtaaagttttggcattgtcacatcaggtattatgtaggatgtcgcatgagatgtttgggcactaataaaaaaactactccctccgtattttaatgtatgacaccgttgactttataaccaagatttgaccactcgtcttattcataatttttatgcaaatataaaaatacttatgtcatgcttaaagaacatttaatgataaatcaagtcacaataaaataaattataattacataaatttttttaataagacgaaagatcaaacgtttgtcaaaaagtcaacggcgtcatacatataatatggagggagtaattacagaatccgccagtaaaccccgagacgaatttattaaggctaattaatctattattagtaaatgtttattgtagcactacattgtcaaatctagagcaattaggcttaaaagattcgtctcgcaaattagtcgcaatctgtgcaattaattattttttagccaagactacctctatcccatattacttgttgcttggacttttttcttacaacatttgaccattcattttatttgaaaaattagtgcaagcacaaaaataataagtcaaactcacagtgcttttgataatagagcaagtcgcactcaaaataaataatacttccaaaatttttttgaataagacgaatgatcaaacactacaaacaaaaactcaaagcagcaaataatatgggacggaggtagtatttaatacttcatgcaggtattcaaacattcaatgtgacagggtaaaaaacgttcgatgcgatggggtgaaaatttttgggatgggatctaaggtgtgtttaggctgtgtttagttcctgaaattggagaaaagtttggggaaagttgagagtttatgtgtgtagaaaagttttggatgtgatgtgatgtgatgaaaaattgagagttgggggaagtttggtgtgaactaaacagggccttagtttacgccaaaattaaaagtttgattgaattagaacaatgtgacggagaagttggaagtttgtgcgtagtaaaattttaatataatagaaaagttgaaaagtttaaaaaaaaaagttgggactaaacgaggccctaagcagccccgaaaaagagagaacatctctctttatgtcagaaccatggtgcattcagcagcaatcttcctgagggcatgtgcatcactgattcactgtcaccggctggcatgcgtggtggctgtttcgcttgtgaggctgttcgtgtgccaaactttttttaaatatacgaatacaagtaataaatatagactaataataaaataaattacagattccgcctgtaaactgcgagatgaatttattaagtttaattaatttatcattagcaaatgtttattgtaacatcacattattaaattatggcgtaattaggctcaaacgattcgtctcgtaatttacagttaaactgttcaattgatttttttgtctacatttaatacttaatacatgtgttcaaacattcggggctactttggtttgtgacctaaattggccttaccaatttttggcaatgccaaattttggcaagttttgatacgaaaaattttgagaaggcaaagttgtgtttggattgaagccaaaatagcctaagttaactattgaaatagcctattttcttaggcatgccaaaatttagcttcaaatcaaatagacactaaatactattaaaattgtcaaattttggggttaaaaaaggggccaaattaggccttagaccaaaccagtccttgattttacggaaaagttgtgtgtagctgcctgcagtgcaagtgattggtttgtcagaagtcatcaagtcaaagtcttctccaccaataatgtaattgtcattgtcactgtaactgtagttgcagtggcccacctagactattccacttctagaaggatttattttagtgcttaatacttttatcgtaaataaacaaattaaacacgaaaagtaacacatcatgctactgtaagtttggataggctaatatgtgttacagtacatctgtattacatctgtgtttagttccacgctaaaattaaaagtttaaaaaaattagaatgatgtgacagaaaagttgaaagtttatgtgtgtagaaaagttcgatttaacggaaaaattagaagtttgaagaaaaaaaagttaaaatctgaacagagcctatgtttgttcattttaaagagagggagtattaattattgtttgttcattttaaaacagagagagtattgattattgtagggtctacttggaatacatacagcattacttctacttctatgtacagcatgggcaactggcattggtcaccattgacctatttttatattaataaagcactaaaataactagaaaaaaggtgatgctgcaaaaagtattgcccaatggtacataacggtccatatagattattacgaagtactagtggcccggcgaaaaacgaag

SEQ ID NO: 48546 - DNA, 702 bp, Oryza sativa
aattttgtatttaaactcccaccattacaatattccccaaaatatattaactccccatgctcccaaacctacttcccactgtgtgtgtgtgtgtgggagaggaggtcaagaggtggttattagggtggctgcaatccaaggtagacggtgcaaggcccatcgcttgtcttcacaacgacaatcgtgccacactgagttcgtcggattactctcttcctatcacatgatctatctcgactccgaggacctcctattactgacaatcaatgacaccctaatcaccatctctgcatctccacttccatgatcgtatggtggggggtcaatttaaagtacgttctatttggggaagcttctatctactgcacttccagaagttccaaaatttgaaagcataatgtaacacagaagtttgaatgcaaatttcccatcacccgtggatggccacatcaacgcatgagttgcgtcatctgcactttaaacctcaggtgatacattaaacgaagattaaaaacccaaatgtgtatttctacaagctcacatatctagatgacacttagtccatatttaaggaacggttgtgtagtttttactcttttatatattacagtagtatgaggatcatactttatgttgggagaagtcacaagttgataaatccaagctgtagtagtatctattaagcacaggaatacaaagaaa

SEQ ID NO: 48547 - DNA, 637 bp, Oryza sativa
accacttgttttgacaatttaagatttcatgcctaacggaaacagaagatagcttcaaatcctgatgaaacacaacacttttgactaactgcagaatttaagaactccgtaaaatttgaaaaggaagaacaaaaggaagttatttttctaatacctgaacattctgtacttgcaaacttacaaattgatcgatcaccacttctttctttttccagaattggattctagtttcggataattcctcaagttctattcttctcttggtagaatcgtctaacataagctttacttcttctatcctctgttccaactccttacttacttgtgcagccttagtctctaattgctgactgtgtgcctcatgcaatctctttgtttcttcaagctctttcttgagttctgaaattatactgtcattgttttccttgtctgtgagaagcctggccacatcttccttcttagattctaacaacctgcagctctcctcgtatgatgatcttaatgtttccgattccttcttaagtttcaaaatggtattgtaaccatcttctttctccttcatcaacctcattatctcagccttatccttaattgaccttgctgcatcttcatccgcgattttcttcaattcagcctt

SEQ ID NO: 48548 - DNA, 979 bp, Oryza sativa
taggcacggcttagaccagtggatcagtggaccagtaattcagtggattgacaaattcaatggatcaatggattgaacatgcaaaatttaaatttaaacatgccttagttaacaaattcaaatttcacaacttacttgacaaattcaaatttgaacatgccttagttaacaaatttaaattacacaacttagttgacaaatataaatttgaacatgccttggttaacaaattcaaataacacaacttacacaacttaattgacaaattcaaatttgaacatgccttagttgaattcacagttctagattcacatatcacctttacaaaaattcacagatcacagatcaaagattcacagatcacattgacaaaaattcatagatcacttgactaagatcacatatcacatggacaattcacagaagagtttcaaaaatcacagactcacagttgttgattcaaaaatttcaccaagtcaaattacccaaaatcacaaattttcacccaaactttcacccaaaaaacttgacttagatcacagatgacatggacaattcacagaagagtttcaaaaatcacagactcacagttgtagattcaaaaatttcaccaagtcaaattacccaaaatcacaaattttcacccaaactttcacccaaaaaacttgacttagatcacagatgacatggacaattcacagaagagtttcaaaaatcacagactcacagttgtagattcaaaaatttcaccaagtcaaattacccaaaatcacaaattttcacccaaactttcacccaaaaaacttgacttagatcacagatgacatggacaattcacagaaatcacagttctaagattcaaaagtttcacgaagtcaaaaattacccaaaatcataaactttcacccaaaaacttgacacaagtatttcaatgaataaagtagctgtgtagtgcaatggctgcctcgttaaaaacctt

SEQ ID NO: 48549 - DNA, 742 bp, Oryza sativa
agcaaaaagctagctgctaatgacaagaccctggaaaatataaatgttaagctagatggttttgcttatgcattccaaaactagcttagttttaataaaatgatcgaaacctagcaggcacaattagctgctttagtacctgctaatgaatctgggaggattcttggacaacggacccctccgttaaaaatgttaaggcaatcacgacgagggaaggtaagtccacttgcgatctgacatatcctaaccttgtaggagctggcaacaacaatagggaagcaccatctagcgatgcggctgaagaaaaggtttagcaagagaagaccatgccgcaggagtactgcgacacaaggctgctgccattcccccagagatacaacaagccattggtggactagcagttcgcttgttttgttgaggtgatccagaaaatccatattcacgtgccactgttggacgccatgcaagtgcccacctacgcgcgttacctcaaggacatactcaataacaagagaccacttccgacgaccgaagtggttaaactaatggaggaatgcagcaatgcgatactcgacaaactccctgaaaagaagaaggatccggggtgtcccacaatcacttgctcgatcgggacacaaagatttgaccaagacctttccgacctaggagcaagcataagcgtcatgcccaaagacgttttcgacatgctcaacttcacggtgttggcaccaacaccgatgcg

SEQ ID NO: 48550 - DNA, 852 bp, Oryza sativa
cctctgatcagagtataatctattcgaatagccgcgccctcggttatgggcaagccgagcaatgtacccaagttagtgttttaaattcttaaaacctgcttaacaactaaaatgtggaatggttggcctgggttggcttaggacgagctgggacccagggtcgggttgccagttcggtctgaatcatcgtaggccttgggttaaggcaagttcgtgtgggttcacggccttgattaataatattgtatagttctaggatcgcgtttacaaaatagctttgagcaactaaatgtctttaaatgctgtttactgcaaccctaaccctttatattataattcccttgtactcccttgcatttattctgcatttggggtgtgtcttgttgagtacggtggttgtactcagtcttgctcaatttttcccaagcccagaagaggagctccttgaagatgaaggctttggtgtctagctcgtgcctgccgtcaagcgcctgtggttgtcaccctagtcttccgctgtctctcgttagtctttgtgtgtgctgggccttcgctgcccatgtaataaattaactatttacgcttccgcttgttatactctgaattgtatcaacttttggtgtaccttgcctcctgggacaaggattaatgcacgcacgtaaggaatgcccgttgggttatttccggtcgtgacaagttggtatcagagccacctttgaccctaggacgagccgtagatcccaagccttagcaatattttcaaaaataaaaatcctttgttatttgtgaaaatcctctagtctctctctgtcttgctgcttcatttatcgccaaaatctgacctttgaaaaa

SEQ ID NO: 48551 - DNA, 2426 bp, Oryza sativa
ctgagtactgagggtgtactcattcttgctcaatctttcccctcttcagtaagagaagctttggagaacatgtcttaggtggagtcctggcttataccccagttgagcgcctgtgaagatggagccgtaggcccgctagtccgctgctgtttatttttgattgccaggcctgaagcgcctttgtaataatgtaaatattatcgatataataaagatgtgtcttttatatcatgtttgtgtggtgtaccccggcttttcctgggacggggattaatacactagcgttcgggaaaaggcaattttctcggtcgcgacactccgcgactgcccaacacatgagcctcgtcccgacacatgagacgcgtcacggcaaagcttttcgataacctcgcattggcagtacccgctccatgaacataaatcctcatgaactctaggcgtccatgtttctagcagtgagaggagttctggcgctcccgggaaagagaaatctcacatacatattatattagggttcaagttaagttctctctcacacacactcatggcagtcctaccaatggcgacaccgatgtagggctcgcctctcggccctacctcaacggctgttccaccgtagcgcacctgcctcactctggggtgaaccatctatgcagggatactgcctccgctcggctatctagtccgctaggtctatacccatacgagaagtgtggttgtacgggggtcgtttcatgcttaacttcatggctcagtccttaattgaccggggacggtactagccttttccagataccacccaaatcctccgtccgccccagtcgaaaacagttgttcccactttattttcctttcacaaatcatgtcatcaatttcatggcaatgtggcgctcatgtcttcacatgccgcatctcaattaccttcccaaaggtaattgcccaagcatttagcatttgataaatatgagtctgcatgatcctagaatagcatttctaagcaattgtcataattgactggggactcatacgtaaacatggttacgaaggaataagggataaacaataatcaaggcatggcataatcacaagtaggatgttcatcattgcatgcaattttatttataaacaaaataatttcgcaattaggatcaacatgttcaaggaatagtgatgacttgcctgctcatgataatccttattctcgatataatcttgatcaaccttcacctcctggaagttgctgacattgcctcacgactaaccgatacataaattctataatacgcaagaaaaaccaatattcaaacaacaaccaaatatgcacaacaaaatatactattcgtgtctgcttaatggattccaatcacgctaggggctaaggtttcttaatctttctattgtcaacgtggcctatttaggagttaaccaacatagcatttatgggatacatatatttttggctaatcggtggtttagtctatcaaatggctatggaaggattatggctatgtatgcatctatctaaataggacggttatatactagaggttctgttgttagatggatttaggatcaatcaaataattacagtgaatcatttgtattattattttattgatggaagctttactttaattatgaacatattttacttgtcacaataaattataaaaggttaataattatccatgctttgtatgttagatttgtttaggttaatcatattatggttacagattatcccatcacaaaattttacaatgaataatcctaatttacagttgaactataattataattatatgaggtgaagatttataactagtatttatctaatatacatgtttgtcatacactccctctaaattaatatatgcaacacgcaaattaatactataccgtacaactataatgggatgtatagtatatgtgtaagcaacaatattttattattagatcatatatttgagtatttgctttttactgtaagctatacaatacatgttgattttaagatggctctgtttggttaactaatagatatcaaccgactatatatatatattctacttcacatgacattgtatcaactaatttttaagtagtccaaatacaactagctctgtgattactctcctaaacaggttaaagattcatctatgtgtgtttatattttagttacaaaatatgaggctaaactttatgtaagtaatttataagtcatggatttagttatatttggacataggctagtgaatggcactaatattttcctttacacccattaatttgaaggattgattataactaatttatttggttgctacagtgacaagacatattaaagataattatgctactgtacaatatccatttttatttattggcacactatttaggttaactattatctaatcatttgatat

SEQ ID NO: 48552 - DNA, 846 bp, Oryza sativa
gaaaaagggatttattgcgtcatcaaaggcggttcccccggtaaaccgggttcaaagagacggtctacgaaaccaacggccgagatctaatctaagccgaacggacgggcgagatcgatccggtccaccacgggctatggatgacgtcagcaatgacatcagcgatgatgtcatcgccggcggcggctcgagaccacgggctcgacggcgaacggcagcgaggcggcgcaaacggaggacaccaacgggtagagctcgactcggcgaactcaccagcggcttggatgatggcaaacgacgacggatgacgacgttggcgaggttgaagcggcggcggtcttcgggtcggcggtgacggcggcgctccgaagggaaatggcagcaacggaggggtggacgaggtgctgctcctcctcgcgatcctgatggtagcaacggcgaccgaaggcggcggctgcaatagcagtgcggcgcggctgcaacagcggccggaggttgaagacgactgacaggtggaccccacctgtccgtggctgagagagaggagggagggcgcggcggattgggccagctgagccggacgcaagcaggccgaggagagggagggagaaacttgggccgactttcggcccaaagccaaaaggggacttttaaaacctttttcaatttaaattattcatgaaatgatattccattgattaaaaatacttccttggctcaaatagatcccagaaaaatctaggaactatagaaacaagagaagtatttaacaaaattttatctagcccacttttatgttgagatttaacaaattaaaattagatcttctcttttaggcttttaaga

SEQ ID NO: 48553 - DNA, 2942 bp, Oryza sativa
ggttagttcggagagataaactaaaaacgaattcgattcggtttatccgggcaaaaatgatctccgaaactttaggggaaagggagaggataaggaggagatgatttcctttcaagcaatcgaactcggagatggccggctggggcggaatcgaaggggaggcggcggcgctcgggctcggctcggccggccggaggtggaagatgaccccgacatgtgggccccacatgtcagcggcttgagaggagagggtggggcggcggctcggcttgggccggcttgggccgcacggccgcgcgcgaagaggagagttgagccggaaacggcccaacggcctaggggagggttttaaagactttttcaattaaaataattcgtgaaatgatgtttcatttattaaaaatacttcccttgctcaaataactcccagaaaaatctagaaaatagataaacaagcaaagtatttaatggaattttatctagctcaattttatgttgaaatttttcctagattattagagtttaacttgtaggcttttaaaaataatttctaaaaatgcattaaaaattgaattattaaattaggcgattttgagggcgtgacattctttttcctaaatgttgataaaatcatgttctatcatgttattgtgttcttactgctattattttggccatcttttcttttgactttgttttatgaattaaaaagttgaatttcaaaaaatggcaacttcaaataatattttgaagcagtaaataatttcatctaaaaaagtaataaacataaatgtcgtagaactcatcaagatgtacaacttttatttggtcatttcttcatccgacaaagtgatagtaacattgttaacaaaatttacatatttctcttatagtttataaaaccatatgagagagatgtaaaattcgtaaacaatgttactatcaatttgttggatgaagaaatgaccaaaataaaagttatagatcttgatgagttatacaactttgttgttgattgatttttcttatttgaaaatgttgtttgaagttgtcatattttgaaattcaaattcaaactgttcaaacaaagtcataaagaaaaattaccaaaacaaagttgtagatcatgcgttatacaactttgttgttgataatttttctatttgaaatcaattacaacccaaaaaattatttgaatttcaaattgttgatgggtgatacccgtagaccggatgaataggatattggggtacgttggtatgaggatctacgtgatatgacatcaagcaaacaaggagacaaggattttactggttcagtccccttatatggtattgatatggaaaaccacagagatgggaacagatgaattcgacaatcacacaagtcttttttgcacactttgtcctcactcgtggaaagaatttcccggtcggtcacttatcccaaaattgctctaggccaagcatgcttaattcttcccggtcacacttcacgtgctctagctttgtaaactatggtgggtgtgttggcagtgagattcgatgatctgaatccctcagggggtgtcccttttataccgtggatcaccttgttctccaagtagaactcggagacatcggactccacactacatagaaaagaccccatcctctccgagtagtactctgctaatctctttacccgtgagaatattttctacaatatccagtaaatttccttaacgcatacgaaaacaaatcgtatgcgcaaaggtataccgtactcgtatattccgtaagtcattggatagaaggtatgccttattcgtacccatgacagttatattttaaaattcaaattttatatagttcaatcaaactcgatggagaaaagaccaaaagaaaaatggtagatctcaatgagttctacaactttgtttttgacaactttttcatatgagttgatttagtaccataaaattcgatttgaagtttaaagagccacatgcaaaaaatcgatttttgcatgcggacctcttaaggatcagcctatattaggtgatctatactaggtgatttgtctataaatgaaacgagtaaggagacatgcatattagataagatcgattgaaacccgatgctacccctattggcaatcaacaagtaggctagagattatggttctaaggacggcttagtagatcaaacttaactgatgaagcactaagtatgaaaagaaacataatatctagacaattaagcctttgactgatttttttacgtgacctttgactgatttttagggtggtagatgttgtcggactcggctgcggaacgaggagatcgaaacagactcggtgccacatcttggttggattcgtaatctaaaagtgcatcggctagaatcacattggttgaaggtgaagattcgaggtcagaaaagccagagtcaaattaagccgatacatcacaaccagggctcgtgtgggccaaactcggaatatccatcattgccaattagagataaaagctcgtttgtaggcaattgtatctattaattaggatagttaagtcggtgtgttcagttttggcaagaggcggccatatatggtcttgtttgtatcttagagttttagaatgttttgagtcatgtcggtaagggccatgttgttttttgagtctgacaagcaagaccgtacctcctttcgtttagctcatagatttcctacccgtctccggaggttatggagcgggcgtcttctgcttaacttgccacaccttcttcctcttaggtgtggttggcggcatctttggagccgccttctatggttttttggccggtgtaatggattgtaccgatgtcttccaataacgggtcctgggaacagatgatccctttctcaggaaaggttgcataaactttaccaggctatccatcttgggctgctccacttaaaccac

SEQ ID NO: 48554 - DNA, 2542 bp, Oryza sativa
tgccgagatatgtaagcgcgaaaggaggaaacaatgctctagcagtaagagcttctgtatttcattccatatgctgtaattttgggatttttggtcaaaaaccgtatccaatcgattccctactagcgctcccaatagatcgagttcccttattcggattattcgttccccacttctagccactcggtttcattcccaaacccttccctcgccgctctctcgcgcacgtccggcgaaatgttcccgcgcagcttttctcgcccacctcgaccgccgccaccgtcctttttctcacagccgtcggtgttggctttgctccagggggcgacacatggtgtggcaatgccgaccatgccgattggtggagcaggaccatcgctgccaccgcaagccccaccgccatctcgattcggggtgcttccacgatatagcaagaattggtccaacgccccgcaccgccgcctggccgtcgcgttgtaacaccccgaaaattttgactctaaaatacaaaaacgaaattcagaataataaaaataatcttttccaaaattcatttatgctggaatttgttgttttcctcctgtgcttggaacaaaggatgggtgtctgagaatatgcttgtattttagatttcaaaatattatttgttgaaagaaccatgattatgaaatatgttaattaagaaaatatttgcaaatactaacagccttctcacaaatccttttctatggattaaaacccatgggttgtccttgttttgccaaatagtttctatttggagaaaacccttcttgaaggttaactccctaaggaattattttaccaataaaatgtaatattgattatttcctaagaatcctttcctttaaaaggattacgtcatttggcagttatttttcaaataacaattattaataaagtatttcctggaaatcctatttgcgaagtaaatcccaaaaaggttatattaaaagaaaagactttctcagataaagtctagattaccgccttaaaggcctaaacgagcctgcataatagaatttcttatttgagagcatttgtgtgtttgtgccaagatatcgattgaatcaatattactaagccccaaaggatgccttttgatcgacatccttccttgtcctctctcctctcgtctgttttatttagcacttcggtgcaaaactaatccaagttctgaaactctttccttctatcgcgttgtgatatctctctcgagctcatggaattctatgattaaatcgaaacccactccgttaatttgaatcggcctttcccttgaaaacctaaaatcgttcgacggatttatttctcgtgcatcgacccgaatatcctcggttctatctctaaacttgaaacccaaccacgtcgaatggatttgtatgccatacaccgctcttaaacccctctttgttattgtcatcaattcgttctagtgatcgcaaaggaaattctaaatccaatcctcgaacaaccaaattagccaaataatattcgaaagcctaatcaaatgtcccatcatagagtccttttacaagtttcgaatacaattccaaattccaaaccccctagcaaattataaagttacctagcaattatccaagtcccctattacagttgggccacccttctctcttccagccctacccattccacaacacaagtccattatccctctctctgcatgccgagctctctctccctctcagcccgcttccaggccagcacatcgagccgccgtattcatccaaaatgcctaattggtgaacagttgcacgcctccctcttcacgcagcaaggccacgtggtgcgcgcggagagggggcggcggaacggcgcgggagggaggggtccaggtatgatttttttttcgttttttcttccatatgttcttcagttttcgtgtttttttatgtttttttctttccgtatctttttttagtttttttcgtttttaataagtacgtatacaaactatgtatacgtataaatacaaactttgtatatgtgtatataaactttatatacatgtatttttttggttggtatacgtatgcacgtatacaaagtttgtaaacacgtattttttgggcttttatacgtatgcacacaaactttatatacatgtgtatattttctatgcaccccgagacatgggcaatacagtgagggaaatccacaccccgagttcacaaaaccatgcttaccttgcccttcccctcctgtggcgatgtcgacatccaggtcctgcgccgccgccgtccaacctgtgggcgcgtgccacatcgcctcagccctgtgctttttcccccatgcccatgccgctctgtgccgctacacttggttcaccaccccggccaccccgctccctcgcgctctagccgccgcccttgttcgtccacgtcgaaagcgtgagccgagctcacagcgctgcgtcgccgtcctctcctctcctgtgccgccagccttctccttgaaggaaggaagaaccaactcagcaatctccctcctcgccgtggatata

SEQ ID NO: 48555 - DNA, 5633 bp, Oryza sativa
ccagccagcacccctccctcttcctcctttcccgcgtacatccgccgacgaccaccgccgatcccgtcatcgtcatcaccacacccgagtccagctcgagctcgtcgccgaactacaaccgccccgcacagccaagtcggctgcgcgggagccgcctcagcgtacggccaagtcagccgcgcgagcatcgtccgcagcggtttccacctagctccgggccagtgcccagccgagcatggtcgagccactggcactagtacactagtacagaaccttccatttgtgacggcctctaacatgcttgaaattagtggccgtcacaaggaagtcatctcaatcgggccgaaaaagcgcccgattgagataacttaggcccgtcacggatgacacatatcagtgacgggtgccaacttggggcccgattgagatatgaaatgttatctcaattgggcctaaactacggcccgtcacttatatgtatcatccgtgacgggcctgagttttatgcccatctaacatgccttcgagaccatatctcaataactaggcctgtcatagatgactcatccgtgacagactctatactaatgcccgattgagatgacttagtatttttccattttcatatgaaatgtttatatttgtgagttgacatgtagcaaaataattaactgcagtataataattcattttattagtcaaaaataaaatgatttcaaatgaaaaattgtcaacaacaaagttgtataacttatcaaaatttacaagttttattttggtcatttttctatataacttttttgaacaatttaaatttgaattagaaaatatgacaacttcaaacaatattttcaaatattaaatgatttcaaatggaaacaaagttttataactcatcaagatctataacttttattttggtcatttttctatataactattttttgaatagtttgaatttgaatttaaaaatatgacaacttcaaaacaacattttcaaatactaaatgatttcaactaaaaaagtcatcaacaataaagttgtataactcatcaagatctataacttttattttgatcacttttctatgtaacttttttttgaacagtttgaatttgaatttaaaaatatgacaacttcaaacaacattttcaaataataaatgattttcatctaagaaagtcatcaacgacaaagttgtataactcatcaagatctataacttttatttttgttatttcttcatccgataaagtgttagtaacattgctaacaaaattgacatatctgtgttatagtttataaaacaaaatgagagatatgtgaattttgtaaacaatgttactatcactttgttggataaagaaatgaccaaaataaaagttatacaattttgttgtgatgaccttttcaattgaaatcatttaatatttgaaattgttgtctgaagttatcatattttcaaattcaaattcagactgttcaataaattttatatagagaaattaccaaaataaaagttgtaagtcttgataagttatacaactttgttgttgatgacttttctatttgaaatcatttagtatatgaaagttataaaagttatatcttttataactttcatattttcaaattcaaatacaaatagtttaaaaaatgttatatagaaaaatgaccaaaataaaagttatacgtcttgatgagttatacaactttgttattgacaattttcacatttgaaaccatttactacccgaaaatttatttgaatttcttatattttaaaattcaaattttatatagttcaatcaaacccgaatggagaaatgacctaaataaaattggtagatctcaatgagttctacaactttgtttttgacagttttttatatgagttcatttcgtatcataaaattcaattcaaaatttatttttgcctaaatgtctgatttgactcctcatcatgttaatacttgctaaatatatatttgatccaattaacttggttttgctggtgaaatatgtgaaatatgtgataaaatggatgttatgtgaatgtggttgtgttaaatatattgatagttgtgtatgtgaatgaatgtacaacttcttcttcagaagccgaatcccaaagtgctctgaggttaagcgtgcttagggtggagcaatctcaggatgggtaacccgactgggaaattcttccctagaagagcaatttcgggatgggtgaccaaccgaccagcccacgggcatggctagcaaaggcctaaggctagcaaaaaaataaaatttatttatttttagattatactcatctgtgacgggctataatttaggcccgattgagataagagtcatccgtgatgggctatagttcaggcccgattgagatgagagtcatccgtgacgggttatagtttaggcccgttagagatgagagtcatccgtgacgggctataatgttagcctgattgagatgtgtgtcatgcgtgacggccggatgcccgattgagatattttatcacatcagtgatctttgcttagtgaaggggcgttacctgatagagatgaggctttaggcccgttacacatgaccgaacctgctctagtgtggatgccagcgccgtcaagccggccaccccgtccaaccagtgccccgacctcgtcctgcccggtgccgttcccttcctttcctcctctgcccggctccgccctgactcctcccctctgtgccgcctccctctccctacgcgcaaccgcgccgccacgcccggccgccgcccgcgccgtcgcgcgcctgccgcctctcgctcggacgcacacgcacgtgagacgatgggaacgagagagagacataaggcagacaaattgagaagaaaaccatgagagaagaaaaagaaaaaggaagtgggacccacccttttgactcctcaccgtgagccctttttccctctaaaagtctacatcaagtccccctttctcccttgggccacccgattaacaagtctacaaggcattcttcttggccaagcccaggaaatcaattcctacaaaagtctgtattatttccctcctccaaacctcggaccgtagcccatcagcaatcatcacctccaccaaagtccatccctcctccatttcataggataatcttgggaatatttcctccaaattctgggaaatccttttcctccatttataaaaccatttgaacttcggaaatttgtatcttgcaaaccgtaactccgattgggtccattcaacttccaggatttctctaaaatcgacatctatcaaatggcactactgaattggggggttttgtactttatttgtaggattttggatgtttatctcttattgaccgcataggtgatatttttgatatttaacgaacgtggatttctcaaagatattggattctaaaagcaaggcaaatcactacacatccctccttgagcatgttgaacctatctttataaatgtggtgattaaaaataaaattgcatgctatttataaactgcgtacctaaacttgaatgtaacccacccttgatattgttacatttatatatttgtatatccttgttgcatgagtctattatttatacgcggtcaattattgacattgctagcattgcattgtacagacaattatagataccatgtttattatatggatatggatgtgagatcactcgatgcgagtgattaatggtttatggctagagacatgagcgccacccgcgacacaaaaaccttttgcgaaaactaaaacttaataaaacaaaacaattttgactggagtggcatggatagaatatgggtggatctatgaaacggctagtcgccgaccctggtcaattaagcaccgagtcaaaaagctatacagtaaacaaaccgagtacgaccgcacttttcaaatgggtaaacccgacggactaagaaattctcgtggggcggcaccctagtcatggtggttctataggacgttggttttgttgcagtgttgtgatttggataatgtcaacgaaaccaaaaatgcgcctaactatatttaaaatgtaactgcctgttatcccgggagtgccaggactcccttcacttctggctcgaggtagggatggtttgccggggtgaaatgggcgctcattgtccttggagcgggtgccgtaacacgagggtgactgaaaaaccagaccatgacaagtctcatgtgtggggactaggctcatgggttgggtatattatggagtgcgggattaaaataatacatccactgcggtgtgattaaaccaatctattcgaatagccttgctcgcggttaatgagcgccgagacttgtattactctagactagccccataagtttttaatactgcttatattagaaatggaaaggaatgtgtgaccttgcccgatgtgtgggaaggtcgatatggtaaagattttataaaacaggaggcttggggaaggtggatgaaccctcgataattaatgacaacttcaacttaacgacttaacgtcgataatctaagtcatagatttgtgaaatgaattgtgaaaactagctttatgcaaataaaccaagccatccttgaacccctgtgtgcactaaatgcatcctgtagtggtggcttgcttagtatgattggtactcgccattgcttaattaaattttttagaaggagttgttggagccaacatgtatgtatgctatgcaaacaaagattttcaaaaaaaaaacaaagcactgctacaaacctgcgtctaaattgaacatggagatatgtaggttcttcagaaaatagtcattatacaatctccaatgactagccaatctatcctgatcaattactgcatgacctaaaacagacccaccacgcactgtgcactgcgtgacctaaaacagacccatcgtcgaactcactgtgcactatatcaaccgccgaagaaataaattcttcgtcgccattagatgaagactcttcgtcgcatttggaggagggtgctttgatgactcatctctttttttttaccaccaagttggattgcaagggagagacggccaacagagggaatggagaggtggctagcagcagtggggggatatgagagggtgttagtatttcttaacgacattactagaaatataattcccagcaatagcgcagaaatactcctggtatattatggttacagagttcatccgtaagcgcacggatatatcattgtagcatttcacccgagagtattccaagggtaccatatttatttaatcctgcgggaagatcatagtagagaaaacatgactaataatttatatgttatttgtagtaatcatattctaagtagaggttaagaaaatccaagggtagagtgacacacaagcatggaactactcattctcatattaaaatatctaagctaaatgaaaaaaaaatagaaagagaatctattcctatacttctagtatacatagtatacatacatcctagttatctgatatactagctaataccctctatccgatacccttctagtacttcgagaagccacccctaactgccgagtaccttacgacagcccgtcatgaccatacaaccggggctaaatacggatgagtacccgc

SEQ ID NO: 48556 - DNA, 1831 bp, Oryza sativa
atataactccaaataatgatgtcccatagtctagacaccacgcctaaactaccagatactactctaatatcatcgtcatgacatagagtaattgcacaagcaaacactatacccgtaccaaagcatctcttagataagctagcagtataatcagtataacatgaatataatgtaaagttagcattcatatactcggaaagtattccaataccataaatgtttaaagaagagtattctaataaaagtacaaagcttacaaaagagaagagaagagctactagagccatacccgaactcttcccaaggcttccggactccgatttctactctattcctattccactagctttagaacactaaactaacttgagaggatatgaaagaactcttgcttgaggttgtgaagagagtgaggaagtgaagtccttttatagcctcccaatgacggttatggcaattggaatggtcggaaattccctctaaccgtcattggggagaaatcctggacgtccacgccaaaccctacatccaatggagcagatgggctggtccaatccagcccattttcggctggcggcctcctagacatcttctctctgtagacttgtgaattttggctcaattggtcgtgtcatttctgagttcttggcccattcatacataagtctgatcctcgacatcgtccgattgatttatcatctggtttgatgtcgattcctctcccttttatatatggttattttctgcaaaaggttagtaatccaaatattagtggaatattattattctaacatggatatgcattgcaagcataactagttctcatctattttggtaatattgacggtcaaaactgatcgctaatgaccgtcaacagaggggaaggaggaaggaagagctgggcggtgagggtgttgggagatcggcaggagtaatcggcgtcaggaacagaagaaagcgacgctcgcaggaataggaagagattggcgcgccccaccaggaagtcgtgcgtcgcgcgcaagttggagatcgcgcgtgatcgcggacgaggaaaacggatttttgttgttactttaaaggagtgcccattgttagttataggaaatcaaatttaggctctctcttggagatattagttttttcaattcccatattgatgtttaggaaaaccaaaaacttaattttggaaatggatttctgtcattcccttggtgatgctctcaatcccgtcccgcaccgaagcccaatgggattttgccgtgtgaccaatgttaatgactacttggtctctacgtccctatttccctacctcccatattcccaatttccttcgttcttagggctacggccgacgactaagggatgtgcgggcgtgtggggaccgtcgaccagaacaacaacatgcagagcgtgcggctggcacggcagtggcggggcagggcggtgcgacgccaggcttcctgctctgctgcacaggcagatccgcacagtccgcacacaatagctgtatcctgtgttaatttgcagccaaacagtgttacgagcccaagcatttgtttttacatatcttgctcttcgtttcacagattgttgaacgatttcacagattgtctatgctctacaagtttgcgtatttaatgcattgcccaatcttctttgttttatgcttttccgctaaataattacatattccgttgatgtcctgttgctcctttaatctaattcgagttccataatatcatgacattgacagaacaacaatatttttttctcctttgtgttcattctagcattttcatggccatacttcttatttctctcaccctccgcc

SEQ ID NO: 48557 - DNA, 1462 bp, Oryza sativa
  unsure (1)..(1462): unsure at all n locations
gtgggtagatgccgcttttaatgtgtttacccttttagccggcggacctcttaaggtaccgtttgcaaaaatagaccacttaagaggtccgcctgcaaaaatacctctattttttttggcaggcggacaacgatctcgcttcgcgttgttattttcgcaggcggccatttagctccaaaacgcctacccgccaagaaaaaaaatgccatcgtctagaaaaatggtttttctagtagtgtacatgactctaatatttagacatgccctttttccaattattttgactttagttcgagggatctagggggtggatccaacgtgaattctagggggattcgagtcctctctaccctgttggatcaccattgatagaagaagatagaaggggaaggaagagggagaggagctagagtagaaggagatgattcccttccaaattatattctggatccacccctgcagggagcttatttctatttttttgacattaaaaataacctacagagacaaaggcgcgtgacgatgagaagattatgacatccatacgcaagcactcgtgtcatgtgacacgttacatgcttcttcgccccacttcaatttgttcccactttccaatcttgtcctttctaattaaacggttggattttgtttataaatggtgataccaatatcttgaaatactacttgatggaccataacaaacctcaatttatatttaagtttgattgagcaaggcatactacacatttcttttggaataggagatgattcaagcttcctagcctacaccttgattacatggtcagcttagtgcaaaaaatgggacgggccatcgaaccgatctgaccactaggtcgtccagttcgactatagatggccataaggcccgcccggcacggccggcnccaggcacggataggcacggcccgagagcgatcgggccggcacggcctgattgaaatttcgtgccgtgccgtgcctgcccatgggccgcacgtcaggcccaggcacggcccagtagcaatcggnccgtgccgggccgacacgaaggcacgatcagcccattgggcctgggctagcccaggcacggcttaggaccagtggatcagtggaccagtaattcagtggattgacaaattcaatggatcaatggattgaacatgcaaaatttaaatttaaacatgccttagttaacaaattcaaatttcacaacttacttgacaaattcaaatttgaacatgccttagttaacaaatttaaattacacaacttagttgacaaatataaatttgaacatgccttggttaacaaattcaaataacacaacttacacaacttaattgacaaattcaaatttgaacatgccttagttgaattcacagttctagattcacatatcacctttacaaaaattcacagatcacagatcaaagattcacagatcacattgacaaaaattcat

SEQ ID NO: 48558 - DNA, 904 bp, Oryza sativa
gctctctccatcccctctcctttcccctccggggccttatctctccctcccctactctcccagcgcaactaccggagggcggtgacggcagcggctaccggtgatggcggtgagttcgcaaagggtggaggaggcggctgcggagggtggagaaagaggtggcggcggcgttaagggctttcctccctgggcaggagggaaggcagcacatctacaaatagtggcggtgccgagggtggctgatgcggttgcggcgcggacggtccaggcggtggcaccggtggctccctccctcccaaatatggccggagggcggtggcggctcccctctcacatcttcggtggaggcagcggtggagggaagcggtggtggcgcgaagggtcaaggtggtagcaggtcctggcagtggcggcttccctctcctccctccctctcggcggtggcaacgcggctccaggtggtgccagctcccagcggcagcctccctccctcccagatcaggccgaaggggggaggggctgtagcggcggcgatttttttggtagcaattttttttgttcacgtaaactattttcgcaggcgggccgcgcgtgcaggcggaccttcccctcgccaaggaaaatctggaaagacaatttttctagtagtggtagatagttcaaaagaaagatgttgtcgaacgacaactgcgtcacgtcgaagggtgtggttctctcaatagtagttgaaagtagaaacaactgtattacctggtaaaaatttttcagggatcccccattacatggccataagaggctattataactctattgcaggctccctctcttaggttttaggcttacaggggaatttacatggttacccttatgatagtgacattattaagggcacgctatctctttt

SEQ ID NO: 48559 - DNA, 688 bp, Oryza sativa
gaggcagccattgcacaatcacagcttatataaaccccttttatattctaactttctaaggtttgtgattctgagatggacttgatggaaaatagtagatgacttgatgtatgcatttgatgaattgatttgaactgattgtaaatctgtgagactgtgacttgatgaattggtgacttgaagaattgttcatttgtttgtaaatctgtgcttgtaaatctgtgacttgatgtatgcatgatttgataaactggtgacttgatgaattgtttgtgattctttgacttatttgatgaattacatgtgaatttcatgaatttgatgtgttatgtcaatttgttgtgttgaattgaacctttgaaggggttttttgccagggcgtgcctgggccggcacgggcacgatgggcttgccgggccgtcgggccagcccggcacggcccgaggctacttgggccgtgcctgggccgtggttgtagcccgtgggctggcacggcacggcacagcttgttcgtcgggccgtgccggcccgactgacctcggcccaggcccggtcgtgcctgggccgtgccgtgccgggcggcccatatggccaactatagatggaagatatgacatgtgggcccaagggtattttaaaactttcacgtgatttctctcccctctttaaccggaaaatattattttaa

SEQ ID NO: 48560 - DNA, 549 bp, Oryza sativa
aaaaagtttcgtaagtgtagacttttccattggaatttgaatatcaaattataatacttccaaacaacattaacaagtactaaatgattttaactgaaaagttcattaacatcaaagttgtataacttatcaagatctataatttttatttgggtcatttcttcatccgacaaaacgatttataacaatattcacaaaatatacatatgtcttatatagtttataaactataagatagatatgttaattttgtgaacaatgttactatccctttactaaatgaagaaataaccaaaataaaagttatagatattgatgagttatacaactttgatgttgatgactttttcagttgaaatcatttagtatttgaaaatatcgtttgaagttgtcataatttgaaattaaaattcaaactgtttaaacaaagtcatatagaaaaatggccaaaacaaaagttgtagatattgatgtgttatacaactttgttgttgatgaccttttcagttgaaatcatttagtatttaaaaatgttatttgaagttgtca

SEQ ID NO: 48561 - DNA, 832 bp, Oryza sativa
tttaatgagtagtacatatgcaattttctcctccctcgcgggctcgcggcccacctcggcctgctagctttctagcgcgcgcgatgggctgcccctgcctgctcggcatcagccccaatgaacacggtgcacagggatagtcacacgacacggcgcgattgcagtagcactgtacctaccgtccgtcccatctctcgatcggcttatggacaacgtgtatgacgcacgcccgtattaacgtcagttggatgccgatggacggccatgaatccatcggtccagacgcacgcatgctcctttgactctaccagctacgcataccattgctgagagcgtgatatgacgatcttgttgtccactccatattgacactttaacccagctgacgtgcgtaatcgacgctccgactcaggacctgtttagattcatgggttacttttcagtcctctttcaaatagctgcaaataatctaaaagttataaataggtgagctatttcagggctatttgaaaataacacatccaaaaaaactatcccccttaagaatactaattagggctatttcaggtggggcccactaaaaaatgtcttttctctttatctctctccatgagaaagtgcattaaagattaaatagctcttaaaataacccttggatctaaacaacttgagactattttattggatggctatttttttcttaaaaattagtagtttttaaaataactcttagctaattctctatacatgtctcaatcaaccacccaactcgcaccgcaccggttttattttacaataaggtgatattctggatatagtgcatgatgtcagc

SEQ ID NO: 48562 - DNA, 4049 bp, Oryza sativa
accccccttattggggagagtggtgttctctcctattctctttacaatatatatgttaatgaatctagacacacattaacatatatatatcaatgtgggcaatgctagaaaatcttataacctaaaacggaggcagtaatatatttgttcagaaataacgaaatgctctattctcattcatcaaaagttgcaagtaacgattgtggttacgctgttatacccaaattaattaataatggactaaaaagctatggttatcctttaaaatgatttagtagagcgtgtacacatagatggtaacattatctgcaaacgatatatgtaactcgttttccctaaataaataattttaattaagtacaaagacatagaattaaaatttttatgcaattaagcaagagatctgctggttgcctgggcatataaaaggctaaaacaggttagtgcatactgtgttggagtcatgattgtcaatacacatagaaaggagattcatggactgaattgcttgctccaagtatagacaagcatatgaatcagctccattttagaccagaaaatagtgcactatgcatctcgaaacatatgaaagcccctcattcttttttttttccgggttgaaagcctctcattcttcattgttaagataatgttgtgctgcttttatactgaataaggtgtgtagatcaacgtcagcttacagttgaataggacttagcaaattggtaaatgatccaagttaatgagctagttttgcaatttgcagtacattcagttattcagacgatcgcacccgaacttgcagccatatatagtacgccaaaagaaaatccgaatctcattctgttggacatacctggtccaaatcgaatttctagaaactaatctagacagcaatgagcatttgtttcttttgcaaggacccatgaacaacttacagaaagggcatatcaaacattaaagtatcaaagtaagattaatactattgttttagactaatagagctttgatagccacccatcaagaggtacaaggcaatctatgaattaagaagacctaaattataaaacaagaaacacatatatattacatccaaatcaaggtctccaaaatactgctacgtacttatttgcaaatgcatatccacatgggaaaaaaaaacgtgaacagtgatttgacaaactgatatttgcactaagttaagatagacaaggttcggcaaaaccctgatcaatctagtttgtgaaattaatctgaattatttctctaaaaaaattaatctgaattctgaagctctttatacaaggagcagatcatgatgatatatgccatagacaaatcactacttgcagtgcttctcccctacttacatactcatttactcacacagaactcaacacttcctgaagactgcacagatcaatattcatgtttctcaattctgaacattaccgatcgatttgactttcttaccggaaccatcatacagttttgtagaagtgattttagcaggtatagacaagcacgatataagctagcacatcaaatggtttggtctaaaagattttaccatgtcccagcagcggaacagcacctcgccatggttcgtgtggaagcccagtgggcgtaccttgacaccaagcatcactgacagaacagatcaggaacatgtaatgggaaggatgccacgatccctcagcatatcaacgaattaaatcaagattacagcaaaagctcatattaaaagttgttggcctataccccataatacaaatgaaatgtacattcagactttaattaagtgccacaactccataatttggttaaactatcccattgcagacatatcaacaaaaagaacgccacaagtcttatctatggcaacccgggcggctaggaaattttgcatgcaacattaagaatcaggttaatttgagataaatgtacctgaccttatccgcaaattccactgctgaagcattatgattttgaaattgcaagatcaaattagtggaagagcaagcagcagccgaccaaggactaaatgtggtggggcgttgcgatctattgaccggcgagttgggtagacaaaaaaccgcttatggcacccgagccgttactcgcatcggtgcaaaagggtgcaaaccatttgtgggttgggttggagtctgggcttgggcattgcgcttgaccctcgccccattctctagcaacagatcaatagggaaaggaggcgctatcggctgtatcggtgacggcgaccaacagattttgaccgtctctccatggtcatcggcaaaggacttgcacgtggcatggtgggcagagagggaaacgagggtgtcgtcgcttcgagtgagggcgacctaggcgcaaaaattcgcgagacaatgaggaattgaggaggcgcaatctgtagcgtggaagacgggaaggaaaggggaggaagaatcgcgtggaagacgggagtcgggttggggttatggtgcgaggtgggaggtggagatgacatggagcgttggatttcacagggatgatctcaaccgttgagtgatgaatgtaagagtgtaagagtgaaagatgagtaaaacaagttggtgaattatagggtagatcagcaggtagccagttagcaattccttttattttactggtcgagttatatggaaagggttaccgacaaaaatgaaaacggaaacaattttgctgttatattttactgtttctaaatgcgccatcatatatatgatctaattctttactcaacccatagtctatagtatcgtcaattcatcaatcaaacccctaatctattgttgaaagaagggcaaattgtaatttacatagtgtccttttgattttatttcatcagaacatatagctatgcaaattgaattgtgatttttatggtcaatgtttctgatatttcttaccggttttccgttgataatcatccgtagtatcagttgtttttttttatattttcgataccgttttctttccagtatttatgttttgaattccgtcttcgagaaaatatagtgatggatacgattgaaacgttttctggccgttttcatccgtagatacagtgttgcctcgttcacaggtgtacacctagcttggagctctctcgcacttgctgcattcaaaagcaaaagcaaggtattattacgtctccaagttgcgccgttgcggcacatctgcatctgtattttcggtggtatacactagtcctacattggtacagaacgtgccaatcaatcactcgctctgcattccctctacggtctaccactctaccggcatacgtatagtactactgcgacctgtccagctgtgtagctggcaaaagaaagacaagccgagagagtttggctaaagcgaaaactaggctggtcccttcagaacaaagtgagcatgcaaaagagggatcaaggcgaaggcaagagcatcatctcgtgaccatctcagctgtttcagtattctgattctactgacccgtgatgaggaggggcaaggcaaaagcctggtcagtcctagtactagtactgatcgatgccttatctcttcggactctctcgtcctgcaccccaaacagtgagatctgtaatagtaataatgtacgagtcgatcaaatggaccacaggtttattgtacctctcggtacacctcttcttattactcggttgatctctgaattaaagccatcaatacatcagtgatctttcagatggcattcattgatttttcaccgtgaggaggaccaaatgaatgaatgatggcattgggcatttgcatttcgatttgaagttaaaagtgagcatcgtccagatcggaagactgaagaaatgcagcagcagcagaacagcagtggaagccgagtaacaattttttacagatacacccccacagagacacagaattacgatgaactaccatcacctaagttcatctgagataaactacctgccatttgatttgctaaccaagaaagaaaccagcagttccatccatcgatccatcctaaccggcgacgagatcgacgg

SEQ ID NO: 48563 - DNA, 2799 bp, Oryza sativa
ttaccggcgttcctctgatctgatcgcctgtcgctaaatgcaacaaccagagatggtatcatatcatcgctgtttcaatttagggcgatgatgcaatcatgcaaggcgttgtttgtaattcattaccgaaagagtcttgcatccacaaactagtcccgtgtgtcccctgtcctgtccaccccttctccactgtgcaccatgtatatttctttttcaggtcaaagtacgtccaccatgtgtttatacacgtctggttgtacgcgcatggctcgagcagtgcaggacgcccgtatcaagattgctagttcccgcaagtcagcgagcgtttcgcgacggcagcgcctcagcttcgcgtctgacatgggcctgctgggcctagtgacttttcaacggtgattaacgatgattcagtcatgtacgtatatatgccccatatgcacgttgagtaacacactcaattagtaatagtatctcctaattgtaattggacaatccacgtacatacatgcacgcagtgattagaacatttaactaaactttttaacagaagattaaatttttaaattgaaaattttgaaaactttcaactcaaaatttgaaaacttttcactcagcatttgaaaactttcgatttaaattttgaaagttttcaactcacaattttagaattttcatctcaaaattcaaaaactttcgattcaaatttgaaagttttcaactcacaattttagaattttcatctcaattcaaaaactttcaactaaaaattcgaaactttcaaatcaaattacaaactttcaagtcaaatttcaaaactttcaactcaatttttgaaacttttactcaaatttaaaaactttcaacttcaattttgaaaactttcaactcaacttgaaaacttctatatcaaaatttaaaaagttgaaatcaaaatttaaaattttcagctcaaatttcaaaatcttttgactacaaatttaaaactttccattacttttctaaaaaaaactggtaactgaattatttacgttgttactgttttaaaaataatactaatgacagtaattaacactaattgccataattagcggcggaagcgcgcgtacaagacgtcgaggagacgcgcgcggctgcgcgaattaagcagtcggcgcgcacgcgcctcctaggaacccccggtaagtccgcgctaatgctagttagcgcgcgtgctgccggcggcgcgcgtttcaggcccaaaaggcccagcgccgctgcgtcggcgcacgcgcgacttctccgcgctttttttcgtttttttaacctttttttccttttctttcctacttttttctgattttttttatctttatcatgttttgagtttgaaagtttataaattttgagttgaaaattttcaaacctaaacttgaaagttttcaaatctcgactagaaagtttacatatctcgatttgaaagttttcaaaattttcaaatctcgagttgaaagttttcaaatctcgagttgaaagttttcgaatctcgagttgaaagttttcaaatctcaaattgaaagttttcaaaattttcaaatctggacttgaaagtttttgaatctcgattctcgagttgaaagttttcaaatctgagttgaaagttttcaaaatttgactttaaaatttaaaacttaaatcgaaagttttcaaatctaacctaaaatattttcaatctgttagtaaaaaaatctcccaaaaaatctccagaatctttcctagttaccaccattagtgttaactatattaactaatatagtggttaagactaaaggggaggagggagtgctcgctgttggcgcgcacgcgccagctagcagcccccgtatcgtatagttgtatgcgccactgttaacaacagaatttggtaagtattcgtatcagtaaaggggatttggtcaagaagagttggaggcggagatcgagttctggaacagagcaagaatcggctggagtctgaatcggctacggttaggatcggctatggctaggatcgcctaatgtcgggttaagctaaataagccgatacagtcgattctgacaaaagaacttgtgcgcgacgtccggctcaggttgatgtgcttcaagatgattgccacgcatggatagagtcctgggaaatcaattgtatctattaattaggattatttatgtaaattccttatagataagtgtgggcaagagtctgccgcaaagacttgtgatagtttagagtttgttagagataatagtcgtgtccggtatgggcatatcttgtaatcctcgggtataaatagaccccgagccctatgtaatttagacagacacattcaatataattccggcgcatcgccaccttttgctttagttttatttcgacgagttcttgctttcgggttgagctgcatcggtttcgatcttcgacaagaggtaaaactcgttatgacgaattatgttcttagggattagcgcttccatcttcatgacactcgtatctcatttatataattcgtcaagttatcatatattttacataatctatagcagtatcattgtctaatctatcttcggcagacatttgcacgcaaaagacagccgattaggttagatctcaacgttgatttagattatataagatatctaccattctatgaatcttctagcggcttgattgtctagatattgttcttcttttcatacttaatgctgcatcaatcgagtttgatctattaagtcgtgcttagaatattgatctctagcctgccacctagttgttgattagaatag

SEQ ID NO: 48564 - DNA, 2316 bp, Oryza sativa
aatcacagcctgtaactgaaatcatgaacaacaaaaaagggggaagaatctcaccagggtttctgactgtcgtgttgacagcatatcccttctgaagcagcatcttgatgagcgccgaagcgatatacccgttcccgccggtcacgcacgccgtcttcatcccaaccgctgacatcgccgtgccgccggctacttcgtcccctccaggctccactacgtcctcctgagagaaatagcttactggaatgaagacggcggttgtaagagtacaagagtacagtcactgtcactgacgttcatctgataggatatgcttgtcagttgtcaccaataagaaatctttgttatttagatgcaaaggtatgtttgtattcagggagtaaactttattccatgtcacattggatatttggatgctaatttagagtattaaacatagaataattacaagactaattgcataaatgagagttaattcacgagacattttttaagcctaatcaattcataattagcacatgtttactatagcatcacatagactaatcatggattaattaggctcaatagattcatctcacgaattagtccagggttatgtaatgagttttgtcattagtctacgtttaatctatctattaatctaaagccagtggttatgccagcttttgattgggccacgtggcgcccctagcttatcaaataaatcatgaattttgtctaaggaaaaaaatacagaagatcaagcaaaatagaaaactacagtgttatgtgataattctaaaagcaagtagtaccttagcagtttcttttaagaaaaagttgtaccttaacaacacagcatccagaacatctagctgttcccacccggtaaaaaaaaaaatcagcttccagaagcttctaactgtacatcacttcgcaataaacatagagactttctagaaccactcaaatataaatcataatttaagataagtctagttaaagtatctagatccatagacttatacatctagattatagtcctttgcaacaacatcactcctagaggcattcaaatatccgatagaagaaaactcagaattattaaaaaaaaaaagggaaatccaataaaaaatatgagcaacagggtcctcagctatcgtatcaccgtgtagcaccaagtcaattgaccatttcaattcctccttttttcagtttccagttaccatcgtatcttatgaaccaagtgtacttcctccactaatataaaatattcccaatctttttcttagagagataagtatggagtgaaaaaactataatgccatttattaaataaaatatagttgaaaaatgacagaatggttagaagtaagacatgaagaaaattaaatcaagaggtgagtgatacgacacgcagtgctcaatttggcaggaccttccagcttttctgtagctaaagctcaacaaagttttttctgctctataaaaaagagagtggagcagactatagtgacctagaaaaatgaggggtggagtgaacacaaagaccgtcaataggccactacttaacttcaaattctacttctagcatttaggagttggatccttccacctaatatttgtggacatcaagagtattatggattattgagagcaagctttgtaagtttacgattttctgtaacttttttttattacaatcactcctttttttaaaaaaatattaatcttctaatatttttttcagagaaccttctattatttaactccacctactttctactttcttaatactttatagtatttaattatatcaaaaatttgttagaaactcaacatctataattaatcgtccaccagaaacatagagaacacacaatcccaaattaacattacaggagattatgctcagaacgatatgcaagagaatacaatatttaatggaacatagaagttgaacgaaatgctaaaaatatcttacaaaattttcatgtttcaaacacacgctaaacaatgtatcgggctataaagaaagtgtgccaaccggcacactaatgttctggtacttctaattagtgtccaaacatccgatgtgacatggcttaaagttttagtccctgatccaaacatttcaaattattttaggacgaggatgcaacactatgtgcggggttggaccatctatggaaagaaggatggaccatttacggaactgtccttacagaactgttcagttgatatgaaagtgggtggttgtttggttgatatctgattgaggagtactcctttcgtctcataaaaaatcaaccaaagtatcgatgtgacacatgc

SEQ ID NO: 48565 - DNA, 601 bp, Oryza sativa
cttttttttttcatgtagtacaactcatttaggactaattaatcctcctctgagcaccattagcttcacgtactgacagtcttaaaccacacttccaaagttactagagcagttactgtacgtagtactccgtaccgtgggggcagtttactgtgctccgctgaacacaattatcagtagtacaagagatgggagaagcacagtgcgagctgcaggctgaagcgtgcacgaacgacgtttacagccagcctcaggtcgttgtcgagcagcggttgcagctcgtgtggtatactgcatacttgaatcggatgcgtcacgagtgcaacgggacaagccgagcaagtccatatcaacctatccaatgccgcggtgaacagcgacgcaccgtggcgggagcaaattttcaccgggacgacgacgaggtaaaaaatgggctcaaaaactgcagcgtccagagcagagcattcgggtcacgttgattggacggccatttatgctgtgaaatgcacggtgctgtgcggataattgtataatatacggtggccgtatatgtacgtacgagtacattcatttctcgtatacataggcgctgtttaggctg

SEQ ID NO: 48566 - DNA, 738 bp, Oryza sativa
agggtttttctttttataaaccttttactttgtttatttcttaataataattatttgtgctctaaaaatccactaaaatttgagggctctttttagacaaggagaatttaacaaaaattctccgggccacatttgaatttttcttgaccgtattttagtgtttgccaatttctttcggaattttaattaattctataattccttttagcgaatgatttttaattcggaatgaatttatcaggacgtgacaaatccaccccccttataagaatctcgtccccgagattcgagaggctagcaagaagataggttgggcggtcttctcttcttgtccgacttcttccgtcgcatcttttataacgaacttgcctaacaaaacttctccactctggactgcttggctcaatctcctgttgcagatggagtcttctcttcacctgacttttccctggttgcacctctagctgacttcgactggattgtggcacttgaagatggggcttcagttccagaactttgcatagttcatatctttggagtcaacctcatacaagttacccacttcatgtcatgcgtcgagatcagctcgtcattactaagataccatgcttgtcatttgcttctaactcgccaccaactgcctcatattagctttcctggtctccgggtgatagctacttctgctatttgatgcaagggtcgataactttgcctttgaattatgcttcccaagagaac

SEQ ID NO: 48567 - DNA, 1075 bp, Oryza sativa
atggattaattactacaactgttttactgctttcaactactgctttgaaatgccggctttatgcaaaagaacctttagcctcccttggatatatcttgcatcatacctcctcttccggtgtgacttgctgagtacagtgggtagtactcagtcttgctctcttttcccccacaccagagttgaagtccttctcagttgaagatgtctcgaagaggttggtttcgtcgctgccgtcaagaatgcctgtggaatggagtcgcccgctgcaggagtcaagtcttcaggcttagctcgcttttctctttttccgctgcatttgtaatcttttatatttttgtaagacgtggatctgtatgtcaacaattgtcgtttgtgtaccctggccggtcctggacaggggtttaatgcacattcagcttagaaattctggttcgtgaatttctgggcgtgacaagttggtatcagagccgaccttgaccgtaggacaagccaactggaaacctaagagccctctgaacccctcttcatctgcatatgctttttgcacttggatttgtttcgggaaaaattttggggttttgttcttctgagtttgtgggaaaaatcttggtcgcttatttaattggatttctcgactagggacagtctagggtttggtaaaagtttatttggagtttatttgacagtcagttgggaatttatcgggtgatatgcattaggtcgtgtctatgttcgatggggcaattttatgcgcatcattttccatgcaacaagtttatgcattaagctatggtttagtcagtcgcattagtgtctttatccgggttcatgaaaaatgttctatgcataaaaatcatcatgctcggcgagttacttagtcatttgttgctttatttaatttggttttgagcatgtgttggttcctatccctctgtactctttagatgtcagacctgttcttcgatcgcaagcgccgctccaagcttcagagtcgccgcccttagcttaatcgtcttcttagttttgtttgcttgctagtttccgtgcttaggtttgttgcttgtgggttagtcgg

SEQ ID NO: 48568 - DNA, 753 bp, Oryza sativa
atctcaagttagcatgcaagttttttaaaacaaatttcttatatgatttcttctgtattaccaaaagtggacgattttaaaaaccgaatcaaatacggatacatatttttaaaagcaaacaaacttaaaaactgacgtatacacatatgacgtaccaaaataccgataaaaacatcttaaatttttataatagtagagatatgttcaatgaaaaaaattaaaataaactctaaaatttaaattttgacagcggttaattctatatagaggaaccaatgggagcctaagctcttttcagttactgtctgttggcttatgatgacacgctttttatactgtttgtaaaaaacttctctatatatatttttaaaatagtcttttaaagaaactataataattaagtatttaattaattataaactaatgatcttctcgtattgcgtaagacaaataagatttgaatacgctctaccgaacgcaacctaaaccggtaaggcacaaggcaattaagtcgtaatctcgcaacttgacgagacgagacaccaatttactaatactaacaaacagcaaatttctaattagcatcgcgtctattgtcagatcattctcaggttccagtgcgcgaggtgactgacaagctagcttaactattcgttgagatttcaggaagaaaaagctgtcaaaagcttaataacaagacgtggcacctctaagctgttgattccggaaaaggacaaagaaaacgaggagagc

SEQ ID NO: 48569 - DNA, 555 bp, Oryza sativa
tttcaatttcaaccaaatttttaattttaacgtaaactaaacgcactccaaggtgaagtatctttggacaagttggaattggaagactgtaattgcgattggctttgcattttacagtcatgtactagtacttgtgtgctttttggacaggttgccgtgctgcacaaaaatacctatccgataaggcgactttgaatctaacatggattaagtatggcaatgcatgccgtggctgatatgggcgcctgcgtttggttgtcttgagctgtttattagtggcgtatatatgctcaagagaaatgtgcgtaatgtatttggtctactcatagtccaaccagatgatttgagaagtcaattttttatatctacaaggctttatccggctgagaagaaaaggattgccatcgatgtatcggagtggggcagtgctgcactgctgcccaagtgcccatagctggccatgcccgacacatccctaatgataaggtttttttttttcatttttatggagaactatgattatttagttcggcagctatatattgagagaagatt

SEQ ID NO: 48570 - DNA, 688 bp, Oryza sativa
ctaatgttctttaagcatgacatagatatttttgtatttgcacaaaaattttgaataaaacgaatggttaaacgttgataaaaaagttaacggcgtcacacattaaaatactgagggagtgctagaatgtgacatatggttttttagacggtgggagtatttcactataaattatgagtttacagaattaccctccaccaatagtataaaaagacaattttatcccctttaattttatactatattatattgaagcaggaggaaaaaataatatttttttcgattatttgtactgtcagtataatactgtaaaagttttcttaaatttatggataagatggagatgtgaaaatgtcaagagaggaacgtcacccaggctagcggcttctccgttctcaggtagtcaacgtcagaccaggattcctcgtccagcacatgcccgtcgccttgcagcggccttctggagatcgctgcgtccgacgatgttatgatcacgcgctttcaccgtccccgccttcgcgcacgatctcatcgcgttgagcgttccattgacggcggcttcaaccaaatctttctgccaccatcaacgtcggaaaaaaaaacgaaatggagagcagtagagcacatcaaagttggatgaacatggattggaaacggacgaaaactagctatctcgtagtcagtaggg

SEQ ID NO: 48571 - DNA, 1253 bp, Oryza sativa
gtgccaatatttctaggaaattgtccctttctaaggacaatttcgtttttccccccactttcatcttcaatattgattttgcccctatcaaaagctttactgctaatccatgtatattcgtgacaaatgtcgactatatattttgtacctgtactttgtcatgttcatgtattgtatctctgcggtcttctcttctaaattgtctgcgcacacacagataatacctcagtttctgatctaggaagcagactgatcatcatcataattttcatgatgaatgcaaacttcagttccattcgcacatccatgaatgctttttgcgaaatatcagttccagttccatgaattgcaaagtaatgtgggttcaagcacggtaatgaataaatgctcattgaaaaggaatcagacgaggtcatttcataaaatgggatagttgatggatcatggatgagaaaggaaaggtccatcagcagggagagttcctcagtgtcagtgaaacgttctgtggttatgcggatttgtgctggcacgacagtccgtcaccgtgtgctccagctctggtatcaacagtccattgctccgccagctcgatccctcaccggcgatagcatctgctacaatcattaccgaagccaagagcgacgccgccaccaccggcatcactgattagccgttggacacaatggccgcgtaagccatgcgagctatcagaatgccttatccgacatatagccatcatttaaaattatgaccagtactatacatgaaagcaaagtagcaactcacgagtgttcagttattgctcagttgaataaaatggcagttattgcttccttgctttatcagctaaccaccatatgatttcctaatagcacaaaggtgacaatatactagtaacagtctagattcatactttttagattataatcatgccaacagttcagaacatgcgaagacacctgaatgactttcatgatcatactaatatggtcaagaggaagtacgattcgtagatagcatcgcgatacatcagatcatttgagtgatacagtaaatagcgaggtaggcaagactgattcgcttcgagggatccatggaacatggtggcccgaggtttctccttcagtactttggtgctggcttttgggttgacagcaacccgaatctcttcttcaacaggtatctctggcgtgagtacttgtcatctgaaaaaaagcgagctgcaacacaagcacaacctcagagatcttttt

SEQ ID NO: 48572 - DNA, 676 bp, Oryza sativa
tcctcaagtcgatgaattagctgctacacatttacaagcgtctatttctgtaggcctatagagaagacattagccccatcaaaatggctactaatctagcaatgagaagaccggaattccctttgcattgaaacttgagcatttcacaagtagttcttctccgacctcaaaatccttgtgtccattttcctgcaaaggtttcaatgtcagtgcaatgaaattaaaatacataaataatgatactacattgttatgtttagctaagtttttgttattgagggcaatggatccatccgatctgatattgcattgtcatgttcaatactgcaaatatggaaacataatttctttcctaactatcaaagatgttatatgtatgcgatagtcatatagcagttctttttcatataatagaaggacaaaaaggacaagcaatgtgatattaatattgcaaattccgaagcaaataaacttgctaactagagagtttaggtatgaaataaccgcaaattatgcatttcacgaaactcatcactaaactcaagtactaatccataagctcgtatttgggtagacctttgttgtaactacgtacccagcttattggacccagacctgaagtttgagggactaaaataggtcaagagggtaccttattttggtctggaatggcatc

SEQ ID NO: 48573 - DNA, 504 bp, Oryza sativa
cgtgttgtttctctcccgtttttgcaatgccacggcggccatggtgggcacatttggtacggtgctcccgcgtgcatggtaaatgggcctcatgtgatttgggctgggcgcctgggcagtatatgggcttgatgggctgggtgtaatatttcttcagcgcacaccttctaatttcaattgccttattcaaaattttccacttatcgggaacacctttgcatattttctacttactccattattaaatcgctgtaacatatgcattattccccaccatccataggcacatcgtcgtttttaaacttctctgtacccatgacggggcatacgatctgtctgctttacgattctagcttctctttaagctaaattactttatatttacaactttcttttagagaatttttctatttactttcatgttccctagctggaatcctattttgtgctgtttttcactgcattccgtcctactatttgtaaagcggaatatgtctgtctaga

SEQ ID NO: 48574 - DNA, 767 bp, Oryza sativa
gttgtgtgttaggtcccatgctttcttctgtccgttgggttttagccggttccccataattaaccgtgcagctgtatggttttcgggcctgatttcccttataaattgggtcgttgtctcttgtctgtacagtttctccctctcttaatataaaaccagcaatgctggcttaggtttcaaaaaaaaaaattgctctataagtaagaccggttcggaaaagctggttgttgcaacgctgctgagcagtatctacagtgctacagcagccagccaacagcggtcgtaggagcttttcagccagtacaaaacaactagctgcattcaaaatagtccagaccgctgcagccgaacggttaggatgtgcatcacagctgagattgacgtggaaacaggatactaaacatgccttaattcgaagttgttccatgttctaccaaacaaaatgtcttatcatccatcacattcatatatatgagcaaagttcttgatcatgtcctttgggacgaacagaaaagattttgcctacaactcaaggtcgtaggcaaagaactgtttctcatgcatcgtgacgcaagcatattagcactgtcttttcgctgggccggcttggagccctgcatgatgcatcaatatttttcttcctctgaaccagcagcagctcgcttgcagcacgggcaaatcatacgtacagatcacgttcagttcgccgaataataaccaaaactagaatactaatgagatcgacccttctagtagtagaaatgcaa

SEQ ID NO: 48575 - DNA, 2660 bp, Oryza sativa
tgtacatgctgcggcggcgccgtgcgtgatcacgctccgagatagcgttactggtttggcggcctgcaacgacgacacgttaatatataccagtaaccgcgtttccccgcctgacaaaacggagttttatacaattctagtgcactaatcaaaggttagcgtgttcaagtgcaagatgttagcacgtaactatatagttttctatggcaggagagctttgctctggtccttctaaagtccagctaaagggcccgtgtttttatctgaactttttttcccatcttacaagctgatgagactaggggtctttctctgatctgccgatagattaagaaggaccggtcggttctgatatgtcaactggtggattgggctttctttgctttgccccatcacgcatgctctttatctttagatcaacaaggtaaatgatgagtgctgaactgatgactgggaggatcgactgtgtatggctccgtagtataccatgaattaattcttttgttattttgaacgaaccgcaactgattgtgcaattcttttgttatgaattaattatgaatatactccctccattatatatttataagccgttacaaattatttttattaaatattatgtaaatatattttgataatatgtttgttttatgttaaaatatggctatattttttgaaaaaacttggttaaacttaaacgtgtttgactagataaatattaaaactacttataatataaaacggagtgagtagatattaggatgtgtgacacagcacaaacacgaatggaagtggttttcattttttactccaaatctttgtgtcatgataaagtgaacgcacgtcactactaagcgattagtttttgttctcttgaactagcgcaacttcattgttatatatccacttgcttctttatatattacattttccttggcaagaagtattgctaagttccggatgcaattatgcagaaaacgacttatcgccttaagttcacaactaaacatggagcatatggccaacttaaatttcatgcacgaataatatagaataaatagcatgatattcttctacatgtgtggttactattacaacatatgtccacacatgttctcattcaggtaataataacctaacttaaagggctgtaaaagttatactgttggacaaagcctgacaaccattcaaatgaaaaataacttaaaagaccactaatctacacgataagaatatattggtatacgcttgattgctagtagtgcttacctaagtggtgtgtttatttaagagtttgaacaattgaacagaaaacaagtatatgcagcatgtttttattgaaaattgcctgattttgcaccaaaaaaaaggcatagcctaacggcaaatctttaaggtcattaaatttctaactaaaacaaacccacatgcgtttactattagcgtgcaccaagatttaatctcaggtgagtgtagtcatacacttcaccatttccacataattcacattataaattagaaaaggacattactttattctttcgacgccacaaattactgtagctacggtgtaaagaaccatacagtttccatgctatactcccgtcaaagctagaaatactgttttaaacattgacaagttcttcaaaatacatttctgttgtaaaacattttaaaaacctaatgatattataatttcataaaatatttttaaaagcaaatgttctacacacatgatttttatacacccatctagtagtaattaaatattgggaaaattgcaaaaccaccccaaatatcactctaagtttgagataccctccctgtaagaaaatttgttgcaaattcccaccttctaatttaccttggttttgatttaggcaccttggtttggaatatatagtgagtttaccatgaaaaacacaatgaaatgaccatgataacacaacgaaatgatcgtcttatacagaacaaacaacataatctcttgctcccgccgagtgggactcggctgattttgccacaagattcttcatgaatcacgtacgtgtggagagaatgtgtctaaatcaaaccaaggtgaattaggaggtggggatttgcaacaaattttcttatggggaggcatctcaaactcagagtgacatttggggtggtttttgtaattttcccttaaatatttaaaaggatgcatgctaattaattagttttgtatagtttgacttaaacaaatttgaaatgatatgatatgtcgtatgtaaaaaagaaaatgatatgaaggaaacgctagtggttttgtgtggatacatgacttaatccactaccactagagtataaaattcttatacccataaaatattcgcatacgcacttgcgctatcaattcagtgatattagtgattttctgctagcctttatctgtttagcactttctccgttttataatgtaagattttttaacattgtctgtatgaatatagatattaatgaatctagacatataaacggaggaagtatgtattagagtacatatattttttatcggaaactagagtacatgcattagcgtgtacgtgtgtgatggtggtgtacgtgcgcgcatctatcttccgtgttatctaaaaacacaacacctgcatatgtcatatctgctacctact

SEQ ID NO: 48576 - DNA, 933 bp, Oryza sativa
actgtacgcaccacgtgcaacacgtaccaagtaccatgttctcaacctaataaaaatcagctaattacctgtgatgatcggtctttccacgcgataataccattgtcacgaacccatcatgcgcaactaacgaaccccgcgccgcgcgaggatgacggatcgctctcatgaaccctacctatccatgaatccatccatccatccagcgaaattcgcttccggcttcatgccatccacgatcccagcggcacaacgcgccacacaccacgggccgctcgtacaagtccgttgtgctgcgtgcagagtgcagcgtgctcctcgacaaggaatctctatctctctcgtcaattctcctctgctctcttttttttgttttttttgtcccatgttaatccctactagtcctaagctaaagcgcgctctgatgggggtgatattatcacatcccgatcccgcgatatcatcagcgcccactcactcacgccgcgcacagccgcgcgcactcgcgagcacgcgcgctttacgctttttcttacggcttaaaccgtgtgaccgagcgcgcgggggtgaccgaccggtggattccacagtgtcgcgcgcgcttgaccccgagtcagcgtgcggtcccgactccgactccgcgggcgcggttgcgcgctgttggttggagtacgccgcggcgaacgacggggagagtggtggactggactggtagcgtgacggtggtggggttaggccccggggctcccgtgttgacgacgcggcgacccggccgaccgtataaagggagacgtactccctccgtactcgtaaagaaaatcatttagaacaatatttaagttaaatcttagaaatataaatcatgaataatcacaagttgttgagtttaaaaatacaaaaattatataaatagatttatcttaaatcattaat

SEQ ID NO: 48577 - DNA, 548 bp, Oryza sativa
tttaatttttttcatagcaacatgttttggtttgtacaaacaaaaaatcattcagtacacacggacacacagctagaggtggagactatcagtccaaagactagtgatgcgtgcacatattgatgctttctctgttggtcatggtctcatggatgacgcggtaagtcgaaaggtccctgtaagacgttagtgcttctcatcagggagtgagggtagtgtgcatgatggcaatgattgggtgcactcgcaagaggaattttcgcttcccctcttgctcccccgcctgtacaaataaagagaggttaagggagtttgtttgggagggtctagcccgtgattagtttcaaagtttttcttccaactttcagcttttctattacatcaaaactttcctatgcacaatctttcgccttttctgtcgtcatcattcccctttcaacctagctttcaattcccccgtgaactaaacacagctctaatgtagctggagtgctggacctggtgcccacaattggtggtgctgatttcctctcttttgtggtgggagc

SEQ ID NO: 48578 - DNA, 693 bp, Oryza sativa
tttgagcacttgagtgacaattaaaccattctcgtgcatcctcttcatgtacagcatacctggaccctaattcaaaatcaaaattaaagttaacttaaatcgctttgacacatttacaaattctttctcttgtttttaagggtcaccattcgtcaatgaatttcttgaataaaactaatgtctacttatttgttaaatacaccaatccattaatcatttttgacatcaattagtcaaaatcctcttagaggacctagatgcacttcaaatttaaaccaacgtaatttccactattaattcatctatctatcatagcggcctccatcagtaccctcctaaccaccggtccatccccttgattttacctaagtaagtgggataagtacttttattttttttctttatttaagaggacatccctcatatcttttcatgccatttaaatagttatatttcttaaaaaaaatgagagcatagataaatatgtgatatgattctatacacatacaagtttaaataaaaggaacaaattaaactctgcgtgtactattcacaatcacatttttttaacttgtatatgttgaatttaaacttgtatatgagtaaagtaatatatcacatattgatatatgatattaaaattattactattttgcatggttgacatgtacaacaacaaacgggaggcgacct

SEQ ID NO: 48579 - DNA, 1013 bp, Oryza sativa
aatttcaattgccttattcaaaattttccacttatcgggaacacctttgcatattttctacttactccattattaaatcgctgtaacatatgcattattccccaccatccataggcacatcgtcgtttttaaacttctctgtacccatgacggggcatacgatctgtctgctttacgattctagcttctctttaagctaaattactttatatttacaactttcttttagagaatttttctatttactttcatgttccctagctggaatcctattttgtgctgttttccactgcattccgtcctactatatgtaaagcggaatatgtctgtctagagctctagggttcttttttatgtcttgggccaccaatgaattgtttacgcatatatgtatgtgtagattcttgagtacatccagaagagtgtagagatgctcagaaatgtaatggattccttttggctttggctctaagattgtagtaaaagagaatccattatattacatgcgggatagagattaattaactcgatcatcaacataggataaagaggcgcaaatataccgttttatattaaagccaaaacataacctaccaaaattttggtgacttaagtagtaaaataaaggaaaaactaaggagttatttagtatggaaatcctacaaggaaaaaaaaactagaaattgctactccctccgtactaaaatataagtgtttttggatggatgagatacatcatagtactacgaatctagatagtctcttgtccaaattcgtagtaatatgatgtgtcacatctactcaaaagccctttgtgtctcgaaattcctatgtttttcatatagtgctatcaaaaaacattttcacaatcttgtggatttactttctatagtatttaatgaggtgtggcatcctattttacaaatttgtgtatttactttccatattattcactgaggtgtggcatcatgttcttgtattttctaaatcctgattttcaaatacctgaatgt

SEQ ID NO: 48580 - DNA, 1268 bp, Oryza sativa
aaaattatatcccaataggctctatgaatattatagtatttataagattttatttgacttgggcttttttatcaatttatattggaatttggataaaacttctcgaaatctcaaacagtttctactttcaagcctcgtcggaacgtcgaaatttcgcttaatccgattggatttcgtcggaatcgtaaaccctgatagcaaaccaaacatattctttggactttcatgctctttgcatggaattttggacttggttggtttgtgccaaaggccctgtttgggggagcttggcccaactatagcttttcccaaaaagctgcttctactagaagctaccccaaacagtccacagcttctaagaatctgtagttacagattctgaaaaataaactaagaagctgggtttcagagctcttccagattctcagaagctggctaccaaacagctgcttctcagaatctaaaagcttccccaaacagacccaaacttacccaagccaaaacaattggcaatgccaaaaaataatcattcacttggtttatgtaaaggtttatgccaaaaaaattgacaaagtgattaggaaatggcctttatttcctgatgcgtacggatgtaccttgcctgcttggcatgcttggtagattcattcaatcgagaacctaaacaagtaaccgcaccagtgtatgacacgaaaaaaacacaacacgtttccatcttactgccataacattgaactatatagaacttgtggtagctcaccatcaagctgcacatcaatgttctcctcccccatcgtcatcatggcagcggtggactagctagcttcggttccgcgcgtcccatcaccatcagcatcgatcgccggcatcttcaggtgtcacgggtgctagtttttttttttcccctggtgatcgtttgtccactatcctaacacgcgccactgttgtacacataaaccgccttctcttctcccccgctgcatcgcacgatttcgcaacgacgatcatacgattattccctctccctctacgtcgcctgctgcacaacggaacaaacagccgttttcatgttcgcgcccgcctactcgtcccagctcgtcctgagtcctgacactggcttgggctgacgcgtcatgtacatgttctcatacatgtacatgttctcatacaatttgttcggaataaaatcctgtggcgctgtgcatatggctggctggctctggctcggctggacctgaatacgtacgtacgtatttgacatgcactgg

SEQ ID NO: 48581 - DNA, 831 bp, Oryza sativa
agtaactacctgacaaatttataagtcttcttggttgactatattccctaataagccacttattaggaaataaaaattaatttatagataaaaattttatatatttattcttagcgacttaaaaaccaatgctgaaaaagaaactaagttaagtatatcttaaatcaacttcaaaattaagtttaaaaattcaaattttggcttttgctctagcttattagcccaacagatgggcctattgtctatgcagtgaacagttccatactacggcacagtaagataaaagtttacaaaggttaccattgtgatttattaaggcttgctgccaagatattattatcaagattcctgtttataatttgcttatttgcacacgctactttatcctggcaaatccattttattctgactgtgatttagtgatgcctatattttgttggcgcctacaatacaatgtagatactactagcatatctgcttatgaactacagatctgcaaatgcaatggatctcaaataattatgcccacggttcccacattagatgcgcacgagtaattaaactctctgcaaaatggttccagaaatgccaacaggacaatgaacaaagcctagtcagtttagcttcaaattcaaacacaaccaatttgcaaggaatagttaatttcggagcaaatactatcgaacaacagaactgcgcagaacattcttcagaggtagtacatggctgatcacaaaggacaatgatgtgaccatgactactatagatacaaccgtcgttcacatcaagatcaagctgtccaagttctgcaatccagttcggtcacctgct

SEQ ID NO: 48582 - DNA, 1139 bp, Oryza sativa
ccaggccagtgtgtgtttttcgcatcaaaacattcataaaaaaattattgtgaacattggtagtcctatctttgtatgaatgcttctcattttttatgactttcttttaaaaaataaatacatatttttttatttatttatctaaaaataaattttgtgataaataatgcatcacacaacaaactcataactctagtagtcttatgcgacaaaattctactgcatttttaacaatgtaattcatgaatttctatgttcatccaaaaggtaaaatagtcatttttattaaaattagacagtcaactaacggttaactgacgggagaagtatggaagggatcaaaatcaaattttggagatatataaagaaataagcaaaattcaagagtatagaaagctaaattttaaaaggtatatatagaaaggattttctcaacaatatagatacagaggcgaagccacgtgggccttccctatgtacaggacacagggtgttaagcttgctcatcacgcaaattttctccgcacaacaattagtgccacttcccttcgtcccttaaaaaaagaatttaatatcggatgtgattgtaacatattctagtactatgtatctgcacatatttatatttatatttgtagtaataggatgtgtcatatccagtactagattaactttttactgaacggaggaagtattatacatgccaaatatgcatataggacactccataatttttattctagattcactgctaaacaccagctaaatagatgatgcaaaacaaccagatcaaccagtgaataaggtaatcacttctttaccacacaaaactcggactacataatacaaatctacaatgaatgcacaccgtacttgagtaaattaatactgttcaacgaacaatcccaaatctctccccaaacaccaaacaagacagcagatcgaggaccgccccattatttaacagctctcatatgcatctgaattctgtaacccgctgcgggcaacggccggacgtgcaatccaccagaccaccaccgaaaccgcccctgtggtcacactcttcctgcaggcgcgcgcatgaacacgatccaaggcggcaagccggcataactacctcccggccggggcacgtaaat

SEQ ID NO: 48583 - DNA, 773 bp, Oryza sativa
tataggaatcagacttcatttttccgtttttaaagtaatcggatctagcctttatttttcaccacttttttttttgccttttataggaatcggatctacggtttttttcgccacttaggggaaacaaaattttattgttgttgtttctcttttttgcagtttttctttttctttttctttttctttttatgcacctgtctgtcattgttctctcccttttattattttttcttaaaaaaacgatctcaagtatcttattgcaagattatagggactcaagtgtaaatataaaaattacagggactcaaatagaaaagtacaaacccaaaaattaaaatcatataaaaatggaatgctctcctccggtaggttccgtttttgcaaacatattttcaatccggcacatcaattttttttcaccaagatgtatgggatatcacggtatagattgaaaccgagaggactgtgcctgggatctcggactcaaactgagaccgagaggagtggtgtgttttattttctgtttttaaggggagaatcggatttagagtcggacttttttttttcgtttctgagagggagtcggacttttttttttggctatttattttgttttgacggatgaaggaaacatttctttttttaagtaaaatagtaagagattttgcaatagtataatcaaagttttttttgcataatttattagtggacatcgaaaaacgtgacatagctgaagaatatattttagaaaattggtaatttgctttgagaca

SEQ ID NO: 48584 - DNA, 522 bp, Oryza sativa
agttccagtttgtcttgtgccatcactttcaaaagaaccaagtggctttagtaccgtaatccgttttttctgaggtggtgctagattggtgtgagaccctaccaactgtcttgagaaaattgagttaggttcttcaagaaatttcagaaacaaatctttgtttgaacttacaaccctaagagcttcttgtaagtcctttgaatgaagcggcttctctgccatgcctaagcattttttctccatgacacttcctcgcaaaatatccactctgttacttgtgttcccagaagaccctcctttctgcgaaattttgtcctgaaaatagctcatccgtgtttgtgcttcagatacttcatacacatcattatattgaactgcttcctgacaaaatgggtggatatcttgtgtcgttgactttatgagacgatgctgctcttgttgctttaagtctttgtttagtgcttttaactggttacatgattgacttttcctgaaaccacttttggcctggtgttaaactgg

SEQ ID NO: 48585 - DNA, 558 bp, Oryza sativa
caagctgctggttgagtacgtgaggcagcacggcgaagggaggtggaattctgtcgccaagatcacaggtaggtgctatagctactgattgagtggtgttcttgcatgttcgtgaccatttcgatgttctctcgcacgttgtcccaaatcaagaagctcgatatatatagccttttaggaagaaattatagctagtagcatcagtttgcatttggtttgttaaattgcacgttggggcagtcaaacatgcaattagtacatgtttaaggttgcatatgtcgcccatgattgtcaagttgcatgatttgattccaattgcggcatttggtacgatcgtgttttcggagaataggcatttggtgcttgctctagcacatgcattaattaattaaaccgcgtatgaactgcatgcacgcgcgtgtaaattcgtcagaaccttttcctagctgtaaccgtggaaatccttttcctagctgagagttagcttcagatgattagcattaaccaagctttactttcttagttaagtacaaatgggagtggtaggtgtgtcatgta

SEQ ID NO: 48586 - DNA, 635 bp, Oryza sativa
tctaatttgcaatacgtaattcaaagtattatatgaagcaccaattcacagtcaaaattagtatatgaggaaaatccacttatctgaaacactggccacttcattttttggtacaaatactagttcaccgatcatttgggtccaaagcaaaaccaaagggattaaatattctattattctgtggcttgatagtaccgcagcatgtaacgatgatgagaatggttgttgctgtgagtcggagaattggctatcctatatactggtagagaaaaaatgatatatgctaaaagatggtgtagaaaaagatgttcataactttactaatttcttgaatctctcaatactcctaattcaggagatcaatgggtttgtcatgttggataaatttgtccagtcctgtaaaagagtcatcctaccatttattttttcattcttgatttttttgtcatatttagctcatgggtttattgtgttctctttgaattgtgtcccccggcagtttgaattgggtcatttggttttgctgggatcaagcctctcaaaaagggataaattttaagttgaggctattagtactactcattactccccctgagcatgctaggaagaaaacaaatcatttatttcttgtgggg

SEQ ID NO: 48587 - DNA, 1296 bp, Oryza sativa
ttatcaaatttagtttcattcccttgtaaccttattccagttgtttcaactttctattgttcccccttacaaaggtcattgcaattgtatcttgtggaagcagataagaagttgtctcggtgtaatcttgttttgtggagtcaaatgtttgcttgtgtgttgcttgggaatattttatccgagatgctcatatttaccttgaaagatagcattattgttatatcttcttttacatcaagttatttcctttcgttcgaaaaaaaaatgcataaagttatttgcacgaagagacaggattatgtgaggtcggtgttggaagtacttaaggctctgtagcttcagtcataaatttttttgcttctgatagaaagaatgggaagagcatgtatgtgttgaatacttgaatctacgaacgtctaagcatgtactgagactgaagcactgtaattgcatcttggttattcttgcaagctgatgctgccaaagtgcttcccgcatactgcaggctagtactagagcacagatttccggcagatgtccagaaaagcttccttggacatgaacatacagccaaaagaagtgcttgtaatgctggagacagatgctttactcagtacttttcttgggagcttttaagtgtccaggaaagatagcatccttgattgatcttgttcgacatatcaacgctgccatctttcacatatcaacgctgccatctttcttgttgttcgatttgcaatgaagaggcaggattgtgtgggtgggtattgcaaagtaagaatacgtgccattctgtttatcaatagctcggtcacaaatatgtgttgtttttctgatgaaaataataatagaacacatgtaattaatctacaaacatctaagcatatatgtattgaaaatcgctgtctctgaataccgaagcactgcaggtggtaccttgatccatcatacgtcctagtcattcttgcaagctgaaactgccaaagtacttactgtatactgctagagatagtactccttcgtttttttaatatatatcatcgttgactttttaaaatacatttgatcattcgtcttattaaaaaatatagtaattattatttattttattatgacttgatttatctttaaatgttctttaagcatgatttatttatatatatatatatatatatatatatatatatatatatatatatatatatatatatatatatatatatatatatatatatttgtgtgaaaaaattgaataagacaaatggtacgggtaccgagctcgaattcgccctatag

SEQ ID NO: 48588 - DNA, 559 bp, Oryza sativa
gtggaggggggtggacgcattttataggctcgggcgttgtcagatgctcgcggagcaaaccctaatgggcccgagagagtagtggacctgggagtgagttcatgggctggaaattcgatgttaatagcctgtgttggataattttgtagttgtgtctaactatatttcgcctacgatttgcaagaaaaatgcacaatgaacgaacaaacatgtgcttgcaaaattttggcaaccttacaaataggtgccaaagttttggagctagcatgattttgggcaagtttgccagacatacctatgactttctatggtagtctgtataaatgcctgcagttgatcaaacttcacacaaccaagagtgaacatgtttggtagtctgtgccttgaggaaagaaattcagttccagtttaactggacagcacaagataatcaactttgttttcagtggtttgcgagtggataggtcgtgcgtgatcaggatcaaatgatcaaatctcacttttatatcacagcaaatttgcaaccagtggcatcacctcatgcatatgcctccagaca

SEQ ID NO: 48589 - DNA, 604 bp, Oryza sativa
cacaaaatatgaaggaaaaagaacgcacgagaatattcttcgatccaatcccagtaagaacgcacgagaatatccttcgatccaatcccagtgaccaccaacttctggtttttgttagttaaggcgatccatggcgcgcgcgcgcacgtacgcagcccacgacgcgccacgggccagaagcacagctgcacaagcaacaaacaagcgaacgccccgcccccgcgaagaaaagaacggcaaacaaacggctcgcaaaggctttttccgcatatcccactagtcccacactctccactctactccactctgcttcactgtctcctccgctccgttgcttaccccctcccaaaacccaccgccgccgccgcctccgccgcgcaagccaagctgctccctcccctccccggccgccggcggcggccaagaatgctccgctgccgcatcaccccaggtgtgcatctagcgattctctctctctctctggatcacaggctcacttaacttcgggcctttcttgtgccgggattcccatgggatgggatgtgatgtgatgtgcctggttggatttgggttgtgctggatggaaaatgggtaccgagctcga

SEQ ID NO: 48590 - DNA, 1251 bp, Oryza sativa
tagatggtattggtagatatacaatgtcacgttctttgtcaatgctagtgctacatgcttacattcttcaaccgtattgatatcgttatgtaaaaaaaaagtttttgattgtttatgaatgtaaaatttagtttttctaatttttgcgggtatggtattgaagttgtcattaaatatactatatgaatataaaaaattcccaatcatacctgtactgttttcttaaaaaataataagagtaaattttacaaaactacacgttttttttatccaagttacagaaaaccacacactgacacttagcgtttaagtacatatattttggtagtgtagttttacaaaaccacactatcaatgaattgattcacctgtgatatggcgtggctgttccacttatgatgaggacatggcatcctattaccagccatcgcacaaaattaataggatgccatattctcgtcctaggtgtaacaaccacgtcatctcacaggtgaatccatttatttactaaaaaatatatatacttaagtgccaagtatcaaagtgtgtgtggttttttgcaacttgatcataaaacgtgcagttttgtgaaatttactcaaataataatgatgatttcgttttgacgttgtgaaatccctgggccctggcacccgacaagctaattctgtctccggtcgtccgccctggaccgcgcacctttgatctgaccgctgagatgcgatcgacgtttttttaataagggtgtggaccaatcccgaagggtgatactaacgcgaggaccaaacgagaaaattgccaaagggcgaaggctttttctcgggttttggcgcgcaccgaccgaggctgcggcggaagcggtggcgagggatcgcctcccgcgtcggaaccctaaaagggtccctttcggctcctcttctatgaagcccccacggcccccgcgtggcccgtccttccaggccccagcggggccgaggccccttccagagccctcctacccaggtatcgcccagctccatcggtggcgcttcttgtttctttctttcttggctttagggatctttttattgccggtgcatgatgcgagctaggatcgtggatcgagggagaaatttctagaaatcgggctggaagagttgggattgagtgggattgggggttcgtgaatgaagacgccgagttcaattaatccggggatcaaaactaaacaacgggcaatgcgaatccttgccctttggcgaatacaaaaga

SEQ ID NO: 48591 - DNA, 1149 bp, Oryza sativa
aatctaccatgagcaagtcaatgcgaaagctttccattctggttgaattcgttttctctgatctcctttatccatgaatgatgcagttttagactcttctaactattaattgtcttctctgcagaacatggcaataatgatacacctcagttgaacccacatgattacttgactgttcatgttcacacacccataactcaggtttcgtttgaagccgtaggaatttcaagaaacactggtgagacattttcatctttcaataagaaatacatagcatagtgactgactactatactgctgttgccggaaattgtcactatgatatatagacatttcctgtgtatggatgttaacttgttttagaaatgcactattttgtagggttatcattccatcataaataatggcgcccatggtagttgaggtttttcttatatacatatactctttgaatgaaaataacagaaattactatcaggcaaggcagtaatcctaggctctttgtattatttatgtttgttttcctcatgctgcctacgacacatcttttctaaagtgtgttggttgctgatatttggtctgcaaccgttggctgatacaagaacatgttactgattccccatgcataaattagtattgcgagatacatatgattagaagtgttctcccagcaatttacgtctgctatatttatctaatgtgctaagctcatattcttttcacttttgatgatagacatagaaccttggagtggacggatcttttcagaaaagagaggaaaattattaaagctagctgcaaaaactatgtcaatggaaagttctgagtttttgcagagaaggttgacattacatattgaagaactcctttactttatattttcatgttgtccgataatggttggcctgatgacataaatttctcagatcagaattttttgctgacatcctgcaaaggctaggcgccaacagcatgataaaaaaggtatcctttgctgaacctatgtaatgcactatcacccactcaaaaatgtttgtctattatttacaagttccatgatttgatttgattttttttttttgctgtaatgtagcaccgtaaggagtccatgagaatgatgaaggtctgtggccatactcctactggcac

SEQ ID NO: 48592 - DNA, 2351 bp, Oryza sativa
cctgccgaaagcgctgcctctgcctagcttagctgcatgcgttttttttggtgttgcttggagtagccacgacaaggacaaaaccaaccatgtttcctactttgtagctaggcagctatttctcctggagggccagatcgctacaatttgcaaaatgattccttttaatcacactcaaaaactcaatcaaccaagtatatatgtgatagtagttacaaatttttcttacggtaggatggaccggggtaccacactttttagtacgaacagagtattgcatctctcggtatttctctaatctagtgttgatgtataaatatatactacacaaatttagtaagaaatttagtacgtgtagcagtgctcctacaaaataaataaataatacaattaagatgaggtgcctcctccttaaggccttaaaatcacttttatttaagggtatgaattttgaaacttaaataactctaatttttaaggtttgcactttgaaactaaatatggtaaggttaattagatccatatcactacaaatgtgttgtttccggtaaataggtgtcaaacggtgtggcatgtactacagggttgtaatgggtcctttcacaatcctactcaggctgtgttcgtgaggtggacctccctgcatgaaaaacgtggtggtttattaatgtatcattaattaagtattagataagaataacttgaaaatgaattaatataattttttaaaataactttcgtatatttttttttaaaaaatacaccgtttagtaggttgaaaagtgtgcacgtggaaaacgagagaggtgagttgaaaaaaaaaaaaaagaactcaatctcaatatatttttgagtaaagaaaatatatagaaattcagtccactccacttcaaatctaaccttcaaatttcgtagaaaataatattaggcccattatcacccctaactgcaacagtaggtccaataggtacttcaacttacccttttttttaacttggccgatttaccaaacaaaattaaaatgagaacatgcttgttaaatcctattgttgagctgagtgtccatgtgttggaagagaagtacaatatggcatatgtagacgtgctagtacatcgacttgacaaaggttatgggtgatttttttttagtaaaagaaaggtgattatttttttccctaaaacatgaagtgtgaatatgtggaaactttagcatgaatatacttgcttgagtatgtgattaatatgagccacatacaagaattggtggattgagtcccaggttgattatgacttatttctaactttcacaaaataaaatttcctaaaaatatagctatgttgtgatgattgttcgatctatgcgtggccttttaggttgaaccaatatatatcttcctttcaagagatgtaagtggtatgcaatatttctatctatctaagaatgtatgcaatatttttgtacacttaagattttagattttagaacaatacagtgcatttacatccatgcaaaacacatacccctccataaaaaaaaaccaatcctaatctggacaaacatgttgggatgaatgtgttttttttaacagagtagtatactagcatgacatgaattgtacgcatttattgctatacaacagttacagctgacaggtagacctcacacatcataaacccacatgccagctgctgttagcttgttactgctatgcactgtgcagtaatggaaaaggatatggatccatactacagtaggatactacacaatactgctatataggtggtgtttagatttaggggtgtaaagttttggcatgtcacattgggtattatatagggtgtttggtaagggtgggcagaaaaggaccgaaccgaaaagaccgagaccgagaaattcggtcatcaagtcgatcctaggcagtgaaagaccgaattttgttcggtgaatttagttagtctcctcggttaaccgaatagatcgaaaagatcgatttatcaaaaaagtgtaaatgcaacttacaatccactatattaaataggattaaactataatttttacatccctacttcttctaggcatgcaacctaataacagtcttaactcataagtgcttataatttttttttgcgatttttgtgttaaaaattttcattatttctttgcatgtatgaaaatattgttgaatttcggtcaggaccgagaccgaaaccgagaccgaatttttcggtcctgacatttttgcgttgaaattcggtcttcacttttcaaagaccgaagaccgagaccgaaattttcagtcagaccgaatgcccacccctagtgttcgggcactaataaaaaactaattaaa

SEQ ID NO: 48593 - DNA, 1247 bp, Oryza sativa
aacaccggccaagaaaaataagaaagaaaaagctgactcttcaaatgatgtgctggatgccattccagagcaaaataaaagtaacatcatgaactattctagtccctcaaacttcaggtctgggtctatgaagctgggtgacgtagttacagcaaaggtctaccagatacgagcctatggattagtacttgagttgagtgatggagttcgtggaatgcataaatttgcggtaatttcatacctaaactctctagtgagcaagttaatttgcttcgggatttgcaatattaatatcacattgcttgtcctttttgtccttctattatatgaaaaagaactgctatatgactatcgcatacatataacatctttgatagttaggaaagaaattatgtttccatatttgcagtattgaacatgacaatgcaatatcagatcggatggatccattgccctcaataacaaaaacttagctaaacataacaatgtagtatcattatttatgtattttaatttcattgcactgacattgaaacctttgcaggaaaatggacacaaggattttgaggtcggagaagaactacttgtgaaatgctcaagtttcaatgcaaagggaattccggtcttctcattgctagattagtagccattttgatggggctaatgtcttctctataggcctacagaaatagacgcttgtaaatgtgtagcagctaattcatcgacttgaggaacatgagaaataatactgcggctccctcgacttttgtcagagtgctaccaaaattgtgtggctgtcgttagtagttttgccctgcaactcacaaacgcccaaacattacgcatcacttggtatctgaatctcttttgcagcagttgtacacttgtatttttgccacgctgtttcttattcatcgttgaaactaaccgtaacagtagcattcatatttctctccactcgtaatcccatataattcatttcattctttaatacagttacttctaccatgagaatctctgagcagcagcttcttgggagttgggatatcttcatttcattcattgttgtgtggtgcgaagtgtgaattgtacatacagaagtacagaactggacgcaaaattgtggccttttctgccaccaggtcccacaacgacgaggcctgtggctccgaggccgcctctgataatcgccaagaaatgaaccaaaaaaacgaaccaaagatgaggtgatagactgactagcactg

SEQ ID NO: 48594 - DNA, 613 bp, Oryza sativa
aaaaatcatatatatcaaattcattgtctactactagctcccaatcaatgtatgcaacagaatcatacttcccatcatagaatggtaacttagatgcaacttgttcaaaattatagtcatgtacctcatatgcatcacatggagaagtcgtcatatctcgtcgaaggtgtagaagtcgatgttctcgtattcccttacacaatcctaccatggttagtagcaaacaagaaacacacaaaaatatgcacgctcctatcaactactaggtagtggcagctcaaatatcacacacactcaagcttttaaccaagctcttacaagttcttactaaagcaagcggaatggtgatgtacaccgacttaaccaagcaccccaatggaggttggatgtatcgatgccttggcaaacacttgctgtacggctgcaatcagatctgtggagctctgggtaggcttaaatatgtagcaaagggatagcaaatgctctaatgagagaatgcaaagttgaataatggttccaagtcaagtaccgtgctggtcctaggctagaacgtactagagacgcgagcctagacactaacgataccacaaaatagcactaggaacaactcatg

SEQ ID NO: 48595 - DNA, 591 bp, Oryza sativa
aatatatagtgatgagggcttttaatttcttcctgtgctctgtaaaaaaaaatgtgattatctctgacctgatcatgatcatcgtcgtcatatactcatatatctctactcgaactcgtggtatgtatggttgttgattcgatcagctgtggtgaactgattgacccgttacaaagattgcaaactggatatgtatctgcggttagagaatgggtggtataatttgagatcttgatgggtgttgcttaagggctccttattttccccctttggaatgaatgatttattgagaacattggagtaagaaaaaaaaaagaacttggaaattagatgtcacggtttgttgtatcgtaatattacgagtctatcggaaatttatagaaaacggcgtttggtaataccattggaaaaacatgtatatcatgtggaatttacacgagacaatgtatatttgagtttatgcaaaattcaaatataatagcctagtactccctccgttttttaatagatgacaccgttgattttttctcacatgtttgactattcgttttattcaaaaaatttatgcaaatgtataagatataaatcaca

SEQ ID NO: 48596 - DNA, 997 bp, Oryza sativa
aaacgttggacacggaaacttagggtttgtattttttttttttttgggacggagggagtacgttctatttagtacatgaggcactgttctgtggaggggggttaggaatggtggatagtaatatgattatttaaaagcagctttttataaagtttctttttttttagaaacgtaacatttaaacatttgttcagaaagcatgcctatgcctatgaaggctgtgtttagtttatactaaaattgaaagtttggtttaaattagaacgatatgacgaaaaagttggaaatttgtgtgtgtaggaaagttttgatgtgatggaaaagttgaaaatttgaagaaaactttggagcaaaacacggcggaaaatgaaaagcgagagagaagttgggaaaataggagaaaaaacttccgtatggaaagcttttgtaaagactgtattctttatatagttcattaaacgtgcatgtgaaaaaacttccgtacggaaaacttttgtaaaaactgtattgtttatatagttcattaaacgtgcacgtgaaaaaggagaaaaaataaagttaaatgaagtagaaaagaacacacaacaaagtaatttacagaacagttcaccagaggttggtgactgcagttatttaggaatcactaggccctcttaccttgaaagcattttaatctgaaattagaaaacaaaaacttgaaataattaaaaaccattttcaaaatttccttatgctggtatttattggattttattttttcttttcctattgtaccattgccaaaaactaattaaataatttcaaaggtaatttaaaaaggaatcaacttcaaattctaaatttgaaataagaaaatgaataattttgatattgggaatatatataccatctttgactctttatgtaattatttatatatattaataattagcaagtcctaattgtcgtgtatacttttttttaaagataatatcagccgatataatttaacaattat

SEQ ID NO: 48597 - DNA, 712 bp, Oryza sativa
cacattaaaagaaaactaaattctattttaccacctaagttgtttcttatcagtttaatattccctccattttagaacataaggtgttttggttttatcctgtattaaactttctgtaagtttaacccagcttataggaaaatatagaaacaaattgttaacgccaaaatttggtaagccccgaggtcatcatcggcctaggaaccgtatcggcttcagagttctagaatcggctaatgggaaatgtcactcgccagcggtcagattcttagtggattcggggcatggcaattacaggaagattatcgagaacagaccaagtttaaagagtatgcggcatggcaatttttgtattaactagatagagtcagttagttccttttatttttaggaaatattgtttagagtctgatcaggacttgtatattttactttatctttaggaaagtttgtgtctttttccagcaaggactaatatctacccatgtgtataaatatgtacatcccgtatccttgtaatatatctctcgatcaatacaattatggcgcatcccaccctttttatttccttctttctcaacgagttcttgtttcaagttaggtttcattggcgtcgatctccgatgaagggtaaggcttgttaaggatgtttgatcggcagggctagggcctcgatactataatcttgtcgatgtaaagggtaccgagctcg

SEQ ID NO: 48598 - DNA, 8038 bp, Oryza sativa
actgaaagctagcttaggagcctagaggagtggtacccatacgagcgtggtaccaccaataaatctgtggtcagatatataatattaggcaaaatctaatccgcgtgcgctctccgttttgccttatcgcgcaacacgctcatcggccgtccgattccacaagtgctggtgcgtccgtacatagcctggtgattcacggacgtggcatcatctagagggatccaaattggaagccatgtgatgctctacactacgccggcttcaaaaataattttctcttaaactaatcatccgatctacgatccgattacaccgttgtgttcgtaagaattgaatctttataacaagatctcacatgattatattttgatgaaaaaatagaaattatttttataatatatctaaattacttttagatttcactaaattacttctcagacacataaaagtatattcaataaagcctaaaagtaatttacatatattatagaagtaacttagaaaaaaagaaagtaactttatcatgacattaaaagtaaatcagttacggaggtaaaaacatgagtctatgtagaaactaaatttaatcagcataaattacatcattgactaaaaatgattatataataaacaactcataacacgaatgtatagatttctttcgatgtcttgacaagttacttcacttttgttacttctataatataggtaaattactttcaggttttattaaattacttttatgactaagaagtgatttaatgaaatctaaaactaatttagatatattataaaagtaatttctatttttttcatataaatatagtgatgtgagatcttgttataaagatttaattattacgaacacaatggtgtaatcggatcgtaaatcggatgggtaatctaagaaaaaattccataaaaagaaaaaaagtgcatgcactcttgagtatactagtaacaactacatatgagactgaggtagctggttattaccatacatagaacggtgtcgttgtattaataccacttgaatctgaccccatgatatagatgcatgcgtgtagagaaacagaagtttctagaacgttgacagcggatggattctttatacggtagctagctatatatacaatatatatccaataatgctccagtataaaaccatatgcacctctagtcatctactagctaactaaactagtagtgtggtacacagaccaagcaggagataggccacaacatggtggtccaacccaggtccagcctctgtctgtcctgctcgctacagcagatcatgccggctggttgataggcacatacaactacaaagctagcctgcgacgataatatctccccggccatgcatggacgcgtggctcgggacctcctccagtttcaatatttttttaacacactctgaaaaaacgtattttacaaatagactctcagggatgccgaggtgggatatctcagcaccatatggtgctgacgtttttattacggcgccaatcaatttggtgctagtctaccatctaggttttgtccaaatcctactgatttgatgctaatttattgggataaaacttacaaattcgatgtatcataattcattaccgcttatttatttttagttaccaaatcttaatatgggggaggatgtatgtccctccctcattatacctaaatcctgtttttttaaatgaatacctaaatcctgttggttagctttggggaaaaaattacaaataatgagtcacaatccaattttgcctcttttcaaaatttaatagcaaatcaagagaatttaggtattgggaggagtgaatgatcgacattcttctctcagattaagctttcactaaaaaagttatcagaatgaactaggatacatcgatttgttaggttttttcttttccaaaaattgatggcaactcaatactcggcctatcgtcaataccaaaacaacctcggcgttcaacatatttagtcttaaggcatcccatcttggtgccaatatccgtagcaccaaggtggttccataccatatctataattagttttctggggacctatatgtaaaacatatattttagaagggctaaaatataaaaaatccaggagtggctggccataagaccgtactgcatgcagttgtgtgctgctgagccattcggtccctccatccatccatccatgtgagttcagctgggcctactgcactgcagtcctcaacggtgcatgccccagttgcccacggcccacacaggtttttcttcagctttaattaacccaccgctgagtattcagcaagagagcgtactggatggtccagttctcggttacgtgaccagtcgtcgactgtatggcgagctactttcatatatgcgaatgtaatctcttatgtgagtgtgtggcgggctacattcgtatctaggaatctaatctcttacctgtgatatctacccgtataaacatcttcgcaagactcgtatctgcgaatctaatctcttacatgtgatttctacccctataagcatcttcgcgagactgagccaatatatcttgagattaataaagtcaccatgggtgtctcgatgtcaatgggtacatcgtctactactgaaagaataatttgccataaatgcgagtacccgtatcaagtctagaacttgaacccggatggattggttccaccacaaaaaaatctaactagttgagttacgcccacttcgcttatgtgtgattttagatgtgtatatattgcgtgatgattcatggtgatcaacttaattaattatttaaaaatcaaatatataatatttatgtgtatatatatagggtgcatttggtttagcatagcttacttaggttagacaagagggtgcatctgatttaaccaataaattagtgacatattttgttgagtccggtgaatcacattgacagggccacctaagcggtgcgtacgttagtaatagatctggcctgtggaggatgaagtcatcacaacaataatgtcgtatccctctgtcgaccccattcattattgctgcatggtttcatttgcaaaattatttctcttagttcaactatacacttacttgcagaagggatgcttttgttctatattatctttaattttaatccaggtgatgtaccggggattttatgtctcctgaacttttcttttcaataagttgctttgttatataaaaaaaaaacctaggctatatcgcatgagaagatctattgtttagggagagcatggacctatgagaaaacaagaatggagcttcgatgctagcttgtaattggagacccaataccattagatccatcgttagatcatctcgtcgccttgttggtatcctatcttactataatattgatgtccactaacttttaaagcttaaaatacaagtgtgtgccacatcgtcacttactatcaattattatttagagtctttaaaatcatatgcaagtgtgccacatcattacttactagcaattattatctagagtattttaaatcatatgtaagtgcaccacatcatcacccactagtaattattatctagactatttcaaatatcatgcaaatatgacatatcatttataattttgttatatttttataactcaatatgcaagcattgtcaaatcattaattatcttcacatcatttttatattatttaaatatatatctaccatttctataatatatagcatgtattcatccacttattctgtagcaaagtgcggggtacgaactaattaccataatttgtaagataggcacagtttagtcacctacccctccgtccaaaaagaatcaatctataaggggatatgggacaggggagtatgttataaagcaaccagtcacttcattatataatttgttttggttatgtgaatcccatggaacatatcaattcacgtgggttgcctgtaaagttggagtcattatggggacgtagctagagtgttggagccatcacacgggaatcaattctttgattgcgcctattccaatggcaattggcaactaagggaatattgttcttgtaagcgcctccactctgtattatgagccacaatatgatcccactgtcaaattgcccgcgctcatcggggcacacagttgttttaatttatttgatcggttaagtcttgtacatgcgttatgccacgattagctcgagcaatttgacagtgggatcaatttgagctagctaatatgttaaaaaacgtactattgcattattgttgactactccctccatcccatttcgagtgaagccataattttctgtgctcaactttaatcgtccattttatttaaaattttttttataaattaaaaaacataagtcaagcataaactactattcatgttctatcattttataacaacgaaaatactaattataaaaattttcaaataagacgaacgatcaaaattagacacggaaacttatatggttacatttaaaaaaggacggagggagtattttctgaatcgcgtgtgatcttgtttacgacaaaagaaatcggtgtgagacttacattttggaaaaaattgggacatggcacatgttggacaagatttccatcgcgaaataagatgagttacttgtttgagcaatttgttttaagataatgcaaatgttttatacacctctaacttctatcatattacacacagccataagctaaaaaaaacaaaatgagatctaaggtgatatatatctcattgagtagcatgggataaatccccgactccctcttactattgagtaacattaaaacaaataatttttttagccagcatattctcattgaacaccacccgtaatgaaaaaaaaatcccatctttgagcaatttatgatatgtgatcaaattttgtctaaatacatacggacatggcatggtgaggcaaattctcattggaccgacttgtgacaaattaaatttttgcaacatagaagagggaagcacatcgttttgtaggggataagcacgagagattgttgtcgtggacagctaaaagtttagagcatgaatatatgcaacatacacacacatagacatagacatatggatatggtgggtagcctagacctgcattatcacatctatcttgatcggcaggcccatgacttttgatgacaaaggttggtggtatctcccattctagttgttccaatttttatacataattggacgcactcggagagcgaatatcttataacgtacggtcgctattgtgcttaaaatatcacttatctgatcaaagcagtcgccctcaaactgctgggattgcagaaaaagatactggtataacaggaacgttttctgctgatatatttaatatatggagaggcattctaaaaaaaggcaaaaattcagcgctcaacagtaaaactaaaaggtaccacttataaggtatttaaatactggcacagttaattaggtagtaaggataaaaagataattttctaggggatagagaaggatataattgtgttaagtattagttctatatgtacatatgtaccgcatcggtacgagtagttatcatctgcaggacgatatttgcgtgctcttttgagatttacattttttttcttaagaacaaattcgcctagtaatcatccatttcattatttacatgttttgtacaattcactaattaacacaattttacatatcttagggaattaaatgacttattttataatgtcatgcatatacttagattttaatattcacctgagaataaccatctccctgatttactttacttcttataaaatggaaaccacctccacattgcaagtccatttattgggcatatatgtgcatgcattttagaaggcaggcaattgccgcaacgtacacaccacatgccaaattgttagtgatatgccttagaggcaatcatagagatgattgtatcatacactatgtttacatatttatccgacattgttctttgaaatagataactccttattggttaatgaatatgtgattcttttatgagactctttatgttgtttgttactatttctaaaggatccctgatcaaatatcatatgtggaacaaatatgtttatatgatcagcacatgtattaattgatgatcatgtcttatggattatggtatagacataccaaattaataatgtggacacatgttggtgaacatgttattggatagacccaacatgagacactgtaagagccatatgtgttgtgtcatcagtgatctcttttagtgttggtgttgaatccttagacctaagattatcatggttctcaacatgtgtagtagcttacttagggattgctaaacgctactccgtaattgggtagttataaaagtagttttcgggtatgctatgaaacatgcagtgggatatgaataatcaagatgggatttgcccctcctatggagagatatctctgggcccctcgatgttgtagattatggaagtgcatggccatgccaaaggtgaatgaggagtcaatcacaagttatataatctattaacaggttcgagtgaataattaagctattagaggatgtcacatatctagccttgagcttaatcgatatcgtgaggcaaaggggttcatacaagtatacactacaggttcagtcgatatgatcattatgtatgtccggtgggttaatacgttctgctaggggccgctgttgacgtgtggaccgaaaaggagttttcgggttacagccgaatatacatgaacctacagggtcgcacgcttaatgggccggaataaggcgattggatggagatccaatataagcttaattcggatagggatccgaataggagtcctacgggccttggaggcccgagtgatggatcctatatattcgtgaggggtgcgaccggcggagatattgcatcacgtgagaaaccctagccgtcacttccctccccacgcaaaaccctagccgcgcgcgggtgctagcatatctgcgcgtggcgttctgtccctgtacgtgtagataccggtagaggcgccgctggtttgcggtgctgattagcgtgggagtacggcgaggagaacgcgtgaggaggagaaggtcgagccggtgcgatcgactacttcctctacatcgacgcgcgctacttcgcgagagttccttcgacttctcagtgtcttcttccgctgcgcagcgcgtcgagtggtaacgatctatgatctaatacttgcatggttcctggtttacgcgatagaaaattttgatatatgctatcgtagcctacgcgtatcccaatagtggtatcagagccaccttttatagtttatgatctagatcattgcatatagttgatatgcggatgtagtagatgagatctattatgttgtatatgagttcttaggtgatcggaacatgcgatgaaccgatagccgcatgggttgatgagatcaatcggtatgtgtgttggtgacttcactggaatgtctagtactcaccaaggccaagggcgattgtgttcatcggatagtccgatgtccacaagaaccgcacgccaatgagaaaaacgagccattgagattgactcggtttcggcataatttgattacgccgttaaggttttcacatggcgaatcgtatgtcgcgaccgggaaaattgccttttcccgaacgctagtgtattaatccccgtcccaggaaaagccggggtacaccatacaaacatgatataaaagacacatctttattacatcgataatatttacattattacaaaggcacttaaggcctgacaatcaaaaataaacagcagcggactagcgggcctacggctccatcttcacaggcgctcaactggggtataagccaggactccacctaagacatcttctccaacgcttctcttactgaagaggggaaagattgagcaagaatgagtacaacaacagtactcagcaagccacaccggagatgcataattaatgcaagggagtacaaggggataataatataggg

SEQ ID NO: 48599 - DNA, 2402 bp, Oryza sativa
ttgtgtgccaaaactcttaggcatatattagttgttgctttggcagactctaagccaactgctctaagatatgctatgatctaaatcagatcatcttgaaacatgtggtgtctgtgtgtgtattttgtgtgtcaaaactatgtggagtgttatcatttgaactgagtgacatttgataatttgatttgagctatgtttcaatttgctgaaattatgtggcttgtactgatctgatctgagatggcatgtaaaaatgttgaagttatgtgcattgtgatgatctgagctgatattatgtttgtgaatttgtatgatctgatatgttgacctgatctaagctgaaatttcaaaatgttctatttggtatcttatgtttgtgagctatatcatgtttgtaatatgaaaatattgtgcaatgtgcaatgtgagctatcttcatcgaaattcactggaattactgaaatttcagacagccatagctgcattcactcaaattccagacaaccatattgcatcttagatgtattcattgataattcagaatattacagctcagttgttgtacacatcaagttattaactaacacctaacacaaatggcagcaataggactagaacaaccaccattgtgacctaattggtgctaacatagtgcacctcatgcgaaagggactatagcctagtggttacaagagcctcaatagcaccttaggtcctgggttcgattccccatgagagcgaatgttctaggatttaacggcattgtgcttcagtggtgggcgatgtactgtcgacagtgaggcgcttgtagtgatttcgtcaatctcaaggatttgccggcccagtctttgaagatgctcataggggtagggtttgcgtgcatgcgttcacaggggtgagtgtctgcgttgtactatgtaattaaaaaaaacatattgcacctcacgtctgaactagtaacacaaccaacatcacaaacacacatgccagcaataacattacaagcacaaatctctgtttctctatcctactgttaattgccctcatagcagccatttttgcatcattctccgatgccacaagcctcaaatttgccacttgatttattgctgcactcagctctgtgcactgctcttcttcctttggcctcagttcttcaacagcacgctctaactcagccttctcccttcttagcgacaacacggcttcaggaagatcattcaacaactccctcaaaaagctgcttgttgggggtcataccacccaaaaagattgcaaccggcgccctgaaaacttgacatacaaaatcacccaaccaatgtgctaggtccaacaaaaaaaaaacaatcaaaacaaatcgcaaacactcaactgattgttgcatctgtagtaccaccggcctgggttgtccatgctccaggagatccactgcgccgcttttgcaccacaccggcacatcaccgctggctgataatcgaattgcccaactcacagcggattgggagcacgattggtgggatgtgacgaacccgacgatcgtttactacaagacctcgccatcgcctagctataactccaattctcgccgccgccactgccctaagctagggtttgagctgagagggagaaggggaaaatgtcgtgccaagataaccccgtctattaacgcctcaacggcgccctgacatgtagggcccacagtgcaccacgtcagcaaaatcgggcaaaaaatgagtcgatattgccatgggacctcctttgaacggtttgtgcgagtttaggggtacacatatctgattttgtggttaagggacctaaaaatattcgacgttaagttgagggacctccggtgaacttgttagcttttcaatcttctgagcccatgttttttttaagaaattcttaacccatgttggtctgggccttttgtgtgagcttattataagatagaaagcccaagcccaacagttatgcgtgccaaaatgcaagtccgggacatatgcaaatgtcagatgctgtcgactacctctccaaatgaatgtcattttagagttatgtacatgaataaagtggttaaaatgatatgtaggtattgcatattggaaataatacatatcatttatacatgaggtgatgagggtggtaacatttataattaataagggcaaattaagaaaaggtgggagacaaatgctttgaagttccataacaacctatatttagagaagaggaaaaaaaacataaaaaaacctacatttgaaaaggggtagacaggaggccctaccaatctccttgttatttcaactttttcttcagattatttgctccatgctttaaaaaaaatgctttctcaaaaaattttattctactgtatacttaaaatatttaatttatccttacaa

SEQ ID NO: 48600 - DNA, 1519 bp, Oryza sativa
  unsure (1)..(1519): unsure at all n locations
tttcataacaatataaattagtatattgcttgattgatgatagtttagttgagccaataatgaaatattgaccccaattttgttcaccagagcgggagaacaagatagtacgagtctgtttggtagagctctaactcttaaagttagagctgttgtggagcagcctagcctaaacctagttccacctctctagttcattttgtgataacactgtggagttgaaactgtttggttggactctagagtgccaaatagaccctacagtattgagattgataatcagttaccaaaacccctagggaacagcccacccttcggccactacaatggccatacttccttccaaatactaaaatacagttttcttcgtgaacttagcataacttaattcgttaagctatttatggtgaaacctacttagccggatttaactccgtatttggctataattgatgtcagggttataaacagtggcaaaatatgcacactacttaaaaaagaggcacatacaagttggcactataggtgccggaacagcaaaaaccgtcacatatagtgcttttcccccttcaaaagatgaaaaaaaaaaccggcacctttaatacactataggtgacggttctataaaagaacaaccatcaatactttaggtgcccatttttttttaaaaaaacaactatatttaatatattataggtgtcggttaattaaataccgataccctatcaaacgagccgagccaagctgagagatggccagttttttttatcgcatggggagggaggataaaacgctgagtgggtggtgagggggcgtccttatccactcgcccccactcctctcacgctcacaccctctctctttnggctctctctccttctccaccgcggtctcttggcggtggcatgcaatggcgtccggtggcgggacggagccagcggcatagcgaacggcggcggaaggaaagccggtaacggcgggcaacaccctcccctccgccagatctagcgggaggggaggcagcggcagcggtggcgccccacgggcagcagcggcgatgggctcccttccgccagatccgacgggaggggaggctatggcagcgatggcagcggcctcccataggcgacagcgggaggcggcggcgggctcccatgggcgatggtggcgggttcccctccgccagatccagcggactcccatgtgttgttgttggttgttgattgtatgatgctgatgtgtagttgtccttttttgatagattttttttttggttcctttgatgcatcggctcggctcaatgtgagctgagctgcatttttttttgcaaattgtatatctcaaaggtgccggtttcaaaactgacacctttgagtgttctaatcagtgctggctccgacaccaatgaccttttctgtagtagtggtaccggttctacatggtgcccaatctctttgtatgtgtggtaggacacacccgcgcgtcgatggatgccgttagtgggatatctcagtattga

SEQ ID NO: 48601 - DNA, 756 bp, Oryza sativa
ctatttttatatagattgatgggctgaataaatgtgtgatgtgtgtggagatgggcaaatgtgttcatgtgggctatatttggcattgaggagacgttcatataggctatatttggcactgagaagacgaagagactcacctggttgggctcaatcctacattccatctaacctctgaaaagcacgaggtttaagcttttggaagaagggattcgtcagtcggtaggaaaagtactaaaattgtctgggccgctgtgggcctcatgcctggctctctttaccgggcctcggcctctatatgggcctaacaggtagacatgtttgctcatctcattcgtcgcgacccctcgcctctgtatatgggcctaacaggtagacacgttcgctcatctcattcgtcgcggcccctcgcctctgaatatgggcctaataggtactccgtaggcacgttcgctcatctgatctcgccggttctctgtaaagtcaaatgctgtgcctaaagaaaagaaaaaccaggcacggcgactatctgttttgccgtttgtttgaagtttgaacagctaataaactactactccctccgtcctaatataaaggattttaagtttttgtttgtactatttgaccactcgttttattcaaaaatttttttgtaaatataaaaataaaaaattatgcttgaagtactttggataataaagtaagtcaaaaaaaataaataataattttaaatttttttgaataagacgagtggtt

SEQ ID NO: 48602 - DNA, 597 bp, Oryza sativa
tcatgcaaattaaaaccaatcaagcaatcatataaaacagagtttaacatgattatctccctacttctgcaaaattgtgacctatgctgtcctaaactccaattttgatctttcttcgtgtcattcctcttcctggactggccatagcaagacttattgccctttctgcgcccgagtgaagcgattgctggcagagctggcagcaagttacaaggctgttgaattggatgtggaaagtgagtggattatttttttttctgttattttctttcttctggttatttttattgtacatactaacatatgctaaatttcgtcttctttgctctccaatctatatacaacatattactccgccgtgctgcatctattttagatatcattggatttattgtagttgagtttagagcaaaactggttgcaataatgagtttaatcaaattgaaatgctgaaaatggctgtaaacttcactcttttgaaagaaaccggccggttatttaaagagaagaaaaaaaagagcaatgcatttgcaaaattctgacaaatagtgcataaaagagaactaaacaaccgaacagagaagaaactacagggac

SEQ ID NO: 48603 - DNA, 754 bp, Oryza sativa
attaggggcggcgggcgtggtggggccgtggccgtgcgatacgggagccgtcacgcgcgcgagctgggggccagcgaacgaacgccagggagacgcgctactgtagtagtactgtggaaacgacgacgcaagaggcggagggaggtggtgccgtggtggtgccgtgggagtgggagcgccacgcccacgtacgtgcggcggcgtccacggtggccgcgtccccgccctccgttgcggatcacgacgaaagccgcgccagcccaccgcggacgtgccaaggcggagaaaaatccagagggaaacgcggctctcacgttttcacgtagtacagaccttgatgggcagcatggcgatacggtggtggctgggctgatgagtaaaagattttgagctaccggacgagacgagtggccggtagagagcagcagctggatggggggtgttttttttttccccgtgttggcaacttgggatgcccattgccactacgccgatccggagagcgactggtcgtggacttgtggtggcggctcgtggcgccggcctagcgctttttctgtagctttgcttttcttgtttgccactggcgatgtacgtggtggcctccgggctccggcagcaaatcggcgatgctgcaaaatgggtttagcgttaacagccctgtcgtttgtttactgatctgttaccagcgctgtaattcagtaattcagcagaatggtaaacacaaccaagatttttgattgcagctctgaac

SEQ ID NO: 48604 - DNA, 1042 bp, Oryza sativa
ggtaatatttaaacatatttgttattttctacttgtattgacccatttagagttatatactgtatcgtttaccacattatatatcgaatcatattgtattgcattcgaattttttgtggctaggcctaccctgggttcaaatcctgggtccgccactgtctactaacacatatcatggaggttacatggaaaagggagggcacactaaattaactagggaaaaataatcgagctcctgagatcaaccaggaaaggagaaaaaggagaaagagtaagttactaagtgccaagaagatctcctagggattgggcaacaccgcaacccaaagcttctcttattgcacgatgcgatcaaccaccatctccgtcgtggaaataatcccctctaagacatgagcattttttctagccacaggtgccaaggaggacgagggagttgaacccctttcttgtgtgatcctacagttgctggcaagaagactcccaccaaactggaagcagagcctgttgacagggtgatagcctcttgacagggtgatagggaggctaacctggcccggttgaacagcaacttgtgctaaacttgtggtgcgaagacacactgcaccaagatatggtcacctagatatctattgattatctctatacaaacaaatcattagtgtttattattccgatgatcagacgggctagaacaatcagcaaaagataggatatgtgcattcttctggtgcatatatatgctttcgggcctgtaagatcactagcactctatataccatgtgcatttaaacttatatactctgcggcaaaattaattatactactctactttaggggtgtttgccttatcaatatatattaaagcagaaaagtagtgagaatatagggagatgagcttctttttcatatggacaaactgaatggaagaactttcttttcctagagacaactgaatagaagaaacttcaagtgcaccggttgcactctccactaataagaatctaatcattaaaaaagaacaaaaacgacaatatgcact

SEQ ID NO: 48605 - DNA, 1115 bp, Oryza sativa
caagagtgtcaattgatccaaaataaagttaaagagggtaccatatcagcgtaattttgtttactggatcctactgcctgtgataggcgagtcagtgttacaataattgttgattttccctgtctgtttccagcatcctctatgtttatatcaattttggggcctaatgatggcaaataactttttatgctatctccaaatggataatttcgtcctgttacggattctatcttcctagcatcagcagttgccaaactctcaaaagaatcaattccagcagtcttcagtgcctgggatgacagtgataacctcaagcattaattatgcagactgcagatacataaacataattacatacccaataaagataataaagttaataacctttgctgtgacaattccaattccaggcaattgcttcagcaaaaatggactactctcccaaagtttttggtgtaagcatttcgcaaggagcatagaacttatggcagacttgtaattctttttgtatataaaatattctctcatgcatttggcaaccctgcatccatttgagcatattgaattcatttcctgcatcaaatcgcaaaaattaaaatatgtcaaaagaataggtgacaaaatcaaatggtattttgaactggacaaacaaattacctggttgagagatagatcatggactagagggtccccagttaaacaatcatttgccagaataaatattttttcttctcttgtttgaatacgcttcttccttttcccatttgcaccaacaacatggaaccaaagccttccctctttgtcagcatttatctcattaaggagcttcttctcatttcgtcgtagttggatcccttgatattacagaaaaaaaatcaaatcgctaatttattatatttaattattaattagaataaactggagttacctacaagtaatctctgcagagtggcagatgatatgcaacagatcttccaaagtgcaacaggcagaagctttgacaataagcttcatagtatcaaatttcagatagaattttgtcatcagcctcccaggttctgagtagaaaatatatatctcagaagagtcatctttaatatgcaaatgaactgagt

SEQ ID NO: 48606 - DNA, 1421 bp, Oryza sativa
gtaatgtatttagcccaaattaatagaaagatttgctatggatcaggttggtggatactatagatggtagtgcttctattctctcctcaaaactgaattgcacaaaagccacagatattaagcaatgctagtgggcacaccatcaaaagcctactttccacaatgtaggtaggtgtgcagatgggaaacacacaaggcgtaccacaaagtgaggacacaccgttttccaactaaagccaaactattttgcagaagcgtggaattggcaaaagactaaacttcaatttgtatagcgtaagcttgtaccaatagacctgtattaatttgtatcatcatttttttaataaaaaaaatagaaaatttacctaatggttttagaaggaaaccatcttcatctgtccaaattagaccatactcccccagctcatggatcttctcaacacatatatctgtaaattgagttcataacgatcaaaatcccatagaaccatgaattctacaaaatccaagaaagatatacctttcatttgcttttcaagaagttcacgtggaatttctttcttaattccgtaatgctgaggattctggtaattcaattcgtcaaagtcagtttatgcatttaagcgaaatggatttaaagatttaataatactaatttgcccatgccttctttatcctgatgtacaaatacgagcacttgagccactcaatagccaaagttatatcagacaccgtcagctgaacaatctctgcatttagatgctcaccggcacatggaagtaacctggtcatagcatctatactcagcgagaagtttgaaatggtatgcagtccatgtcaaagtcaactaggtgaaattattagttttcagttgaacataaaacacttactgagactccaccatctcacatccatttagaaggttctcatatagatgcacctacaagatataacaggttagcacaaaagacctatagagccaattttgcccaataatggtatcaaaatatctcagagttaacaagagtggaaaatatagatcctttactgtctctcttcttgtcatgattataattgttccagtatcatcaaatggtggacgcccagcccttccacacatctgtagatcacccaaataaggggaggggcattgttagaagcaagaggaaaccatatagtataattttataattgaatcacaaaatgctctgaactacaatgctttaaatgcatgttagttttaattaaaaaaatatgatcttacacattacactataaataattgaactagtatgtggcatgaaatttgcacgtccaatttcaagtgttttgcagatataagatcaaatgatgtgttttcgtcaaagaaaaggatcaaacgatatgatgttgtggcaataagtatgtcagaatcaactttg

SEQ ID NO: 48607 - DNA, 585 bp, Oryza sativa
aacagtgaaattaaatttctttacgtttataattttacagggatgttttaggtctcactgttgactgtacaaacatactgttacataattatgtattattccctttcttgttaacattgttttgcatgtttttgtttgaaataaactcttccttttatcaggtgcaattgattatccatcatttcttacgctcctgaaccagctagttcctcccttatctgtccagctgtctggccgacggtctagcatagtaaaacaggtatttgatttaacaccaattcttgaggggctgtcaaattagttcatccaaaaatatttcattttagaagtacatgtgtgttatggaattctgttagaaaaaaaaaaattcttattgaatttgcaatgactgaacaaaccttggtgaaaaaaaattgctgaccaagtttttttccaggcatgccatctactttatatgctatcaaaagaactccttggtgattttgaagcatgtgctaaaatatttattccggtaaccatagaacctgtttcagtgttttgcaacagtaagtcagtactcttatacttcctcagtagggctaacat

SEQ ID NO: 48608 - DNA, 507 bp, Oryza sativa
cgtttttactcccaaactggacgctaaatcggagaggaaaaaaaatgtgtagattcatgtagcctcatatgcttccctgaccctgcaactgtactgcgaattgccgtagagttgccgagttgggcagggagatcgatggaatggtgctcctggccataaaaaaaacaggtccagcaattgattgccttcgatcccaatgctagttaattttatctctccggtggcctccctacgtgacaaaacgatgttgcaataattgacatgctcatgacagaatgatcttgcaataactgccgtgcgtgcaccttgcctcagtgaaggcgcattgaagttcttattttggagttggtacgtggtataaatgtataataaaatccaatgaacatgctgcttttgttttatgactatgaacatgttgttagaaatgtcaaaaatggtcaattgaatgctcccaagaagatagcaaacagggtttacaattcctacatgctctttcgtttcgggcac

SEQ ID NO: 48609 - DNA, 793 bp, Oryza sativa
atcgcaagaaaacaaaagcagagaacatatataaaccgggcgatctcgatctcgatcatctgcaaatgcttaacaaataataacagtagtagcaatccaaagccaacgccctgcaattatatgtgcgcatatgtggatcgcccttccctttccggtcgctgggctttatccgccctcgcccatttaacaatccggcgcgcgggacacctgtcgccggctcgccgcgcgactagcgcgccgtggccgcgggcgacagcgacgccgcgcgtaaactaatcggccgcgggagcttgcccgaaatggcagccattgaacgccggaatagtttagtctccccgcgagcgcgcctcgccagaaagcaacgagccgtacgtcgacgtagcagcggacagcgcgcgcggatggtgggtgtgggtgtgggtcgtggcgtggtgtgcgacggcaaacgtcctggcagggccgtgtggcgtgtggcgagagagagggaccgaatgcgtgagccaggtgggcgcgcgggctggagcagcgcgtcgcatcgatcccactcgccgtgacagctacgccggagataaaataaaccggctgaatcgatcgcccggccgtggctaagctagccgtgtaggaccaagctacttacgggctaggctacagggctctacgtggaggcgagggggctctccggtcttgccggccagccggccaggacggcatcgtgaggctgtgacaaagatgccctttgctcggtccccggttaatttagtgaggtctaaagagaagagtaaaagaacatccc

SEQ ID NO: 48610 - DNA, 748 bp, Oryza sativa
ttaggcttttctacgtagtcctgataaaaatgttgttggtttcatcactggtactatatcacacatttattgagactaatggatcatgtcttttaagaaaaaaaatcaccttaatttggaaacacatgtacttaagaacatactccattcgttctctaatacaagggattttaacattttgcttacactgtttgactattcatcttctttaaaaaaattttaggattattatttatttattttgatttactttattatccaaaatactttaagcacaacttttcattttttttatatttgcacaaattttttgaataagacgagtgatcaaacagtgtaatacataccaaaatcccttatattataggacggagagagtagtagtctagttaatgtttcacaaaaagaatgacatagcagttaataaaaagagaatgacatagcagctactcccttaatctatttttgatatgcatatttccaaatctgaaaaatttatttttgatagacatatttcaatccaacaacctattctcttaatgactttttcggatttgatgcgtgactctccatttttccacacaagattggctacatggcatcgagaaatgtaaatattaatgaatcgcttgtttacgagaaataactagtagcatgtttaaatggatgataaatagaattacttatctttgatttatgtgtcaagataaatatgacattcgaaaggggtaccgagctcgaattcgcc

SEQ ID NO: 48611 - DNA, 606 bp, Oryza sativa
gtttgatccactgtgcgcgcgcgcggggcatgcgccgctatagctagccgcatagccgcgcctgccggagaagggggcccggggcggggggcatctgttgcgcgggcagcaggtggcgtcgtgtgttggaccgtggcgtggcgcggcgtgcgcaacgacaaatgttaagggacggtgcctaactggatggaaacggataggtggcagaggtgttcgcgggtcgtgtgactcgtgagcgccgagccgccgaggcgtggggtggggtgggcttgtgggcttgtggccgtgtggtggttgtctggttgatcttcttgtgggaagaatggcgcgcggttacgttttgctcgtctgtttattccctttgcttaaagtaaggacaaattagttctgtttgtaaatagcacttgtagtacaaagtttttattatattgatactgttgttgtagaaaaggctaatgcacgaacgccttggctttacttttttttttctccctcgagcgaatgctgtgctttcctttctagcgtatgcaccgtcgccgaacttttatacaccgacagtttcttacaattactctcatgccactaattatgtcgtgttgtgtaatt

SEQ ID NO: 48612 - DNA, 653 bp, Oryza sativa
atcaaatgaggtggtggcctagacagaggggattttctacaggatttatatattatgaaagtactgacatttgaaacaaagaattgattcccacaaatttttctagagtaaatttgaagaaaaaaaattatgagatctcatctcatgttttcttcctttggtttcctgtgttttttttgtgtgtcaatcaaacggaagtttcaaaacttcatgaattttaaaatcccataggaatctagtgaacatgacattttattactatggttttttcattaatgcgtgaggagggaaataagaatcatcagttcttctcatttccgttcatcgatcaccaagttaataccaatctcacttcagtgccagtgtggaaattaatttactgtggtccttgtagctaaaacaagtaatctgtaattgcatactgtttgttggtggtcagttcaacttcaaaattctaccccactgttttatgaatttcacatggcatgctactttactgatggaatgcttctgcattgtaataaatggaaggcgggatcaacagtgtcaaaagactggaaggtgtatctttttgtaagttttggaaattaggtgttcgttgaaggcttggagtactgcattggttttactgaagtcgggaaacaggttatcat

SEQ ID NO: 48613 - DNA, 559 bp, Oryza sativa
tgtgtaggcttgtagctatagctagctagcaatttagtaatcgttaagctatagctagtagaaagcgaggcctttatcctgtagcggagggaagctaccccagcagcagccggcgccggcggcgcagtcgatcatcatgtcgtgcaccacgtcgtcgaggttccacaggctgccccacgtggcggcgccgccgtcgagctcctcgcttgagccctcgctcgtcgaggcggcagcgccagcgctggccgccacggcgccgcactcgccgccgccgctgccgaggaggtcgtcgtaggaatagggcgacatgtctcccgggtggtagtacagcaggtcgtccatgtccggcgccatctcctgcattatctggagctcgccgtcgtgggtcagcgaggtggcggctggtggcgcgacctccgcaaggttgtcgtccaccaccgcgctggtggcgtcgtcgtcttgaccgagctgctgctgctggccggtttgcatcagctggctctgctagtgcatctcgcggcgctgcttcaggaaccgagccctcgcgcgctcgatgttc

SEQ ID NO: 48614 - DNA, 581 bp, Oryza sativa
ttgatcgatcagtttgttatttgttcatatccttctttgattttatctcttagcttctcctggcgtcaaatatctaatttgtaattcgctttgtttctctgctgctgggccacagtccggtgataagcgcctcgccagcgctcgcgcgaagtaactaactagatcaagtttgttatagagataaaatcaattggtttgttggttatctcttaattcatctggttttatctcttccgcatattaacttctgaaatcttggcgcgtaggcagctaccgtcttcggccatgggccgagcctatgattaatcactcggatatgcataggttgcttaatcacccaggcatgcacacacatacgaccgtctactgtagtacatgcatgcatgcacgtgattgcctcaccagccaatcttcacacggctagttattggttaattatacatgcacatatactaatccaagtatatatattcccagctgcctgtgcatgcatgtatttgcgtgtatatacatggccgagcattgcgtagaaatgataagctagccaacttacaaactgcttgtttgctttgtccatcatg

SEQ ID NO: 48615 - DNA, 1678 bp, Oryza sativa
atattctatttgacacaacaaaactttacacccctagatctaaacacaggcttaatgtatcccatttccgttctgcaaataggtcgaacagaacatggcttttgtattgctgcaggctcttgaagttgagaccttcttgttgccttatgccgttgagtggaatgatccaaagaatcgcgagtgcatttactgaacactgctgcagtagtacccaagatgaagccatcatccgtgccttgctactgctagtctggctcttcgcgtcggagaaacgagaaaggtggagtttttcaccgtcggagaaagagcacatttgcctgtgctttgcctgcctgctgagctagtccattgtcaccgtgatttggctgtgtttagctcacgctaaaattgaaagtttggttgaaattcgaacgatgtaacgaaaaaatttaaagtttatgtgtgtaggaaagttttgatgtgatgaaaaagttagaagttttaagaaaaatttagatctaaacacggtgtttgttgaactggacacaagaaattcttccagaattagtgattcttcgtaggaccagtatcatcgtcttcatgccgtcctaaaagtgagaaaaggcttcccgatctggtgatacacgagttgaacaatcaacctgtactctttcgccgatcgattgctcctgacatgttttgggtagcagtacaataatactgcggtgatcaatgcagatctgtagctggcacagcgtcggggagattgtcgcgacgaacgcgcgatgttcgtgacggtgagttagctgcgagccacggcgctacgcaggagaaaatggtggctgcgccgtcgcgcggtgcgacccggaccgtgaaaaccgtatgtttatcatgaggattatcaaaaactaagaagattacggtacgcgataatcatgataactcacgctgttttgtaaaccactagccaatttgcacttagcattattatccaggagggcatacggatcggacgaccgatcatgacattagcgtccgatttacgtgcaaaactactttaaattgatttttctcttaaattacttatccaaatcatgatccgattgcaccattaaattcgttgcaattaaatcttcaaaacaagattacacatggatatattccgacgaaaaaagattagcttattattgaattttttataaatgttgcacgatgttccaccagctatatcggaattgtctcactaggtgattgaaaatgtttcactcgtttaaatcgggtgttgtttcaccttatataaaaacaatgtttcagcaaatagcgaaaaaatatttcagttcactgcaacattatatctatatatagtgaaacattgtgattacattaggtgaaacatttttcggtgaaacaaaaaataaaccaaattctcttaatagggggtttccaaaatatgtgggtttttttgttgcaatagaatatttcgttcactgcaacattagatctatacatagtaaaacattgtgagtacactaggtaaaatattttttatggaaaaaaataaaccaaatttcctaatagaaaggtttcccaaaatatgtgcgttttttgttgcaaaagagtatttaaattactggaacatttagatctataaatagtgacccattataaatacattaggtgaaacgtctattgtggaaaa

SEQ ID NO: 48616 - DNA, 636 bp, Oryza sativa
gcattgattggtgtgtcctgcatcgcctttttctttttctttctttctgaagactctgcatcagacatcagttctgtggaggtgaaaacagccaagaagaggcgagcatttggcttgttgtactgtaccaatgtaccgtttcatgtgctcttcgctggcgctgtgatgaaccaattgatgatcagctctaccgccttcaagttacatggagtttggtagtatacgttggtattccatggcgtgacagtgcctgtgcttttacaggagtatctcacattcagtcattcagacatattctcacccaaatgagaagctatgggagatgggaatgtgctttttacctagagaacatatttactccctccgtattaaatataaacatttctaacattcaaaatttatactgcaatataatcatttatgaggtactaattttaatacacgaaaatccatacattttcagccattcacgtacttgaggagatcatactataaaagagaatcttttttccttaacctcaatatatggtatttttcacgaacgcgcaaaatgattgcatgtcatatattagaataaaagagttatagttacatgatgcaatcagtcagaccggcttatgcaaagggaaggggaaa

SEQ ID NO: 48617 - DNA, 509 bp, Oryza sativa
aaattacatgaaatatcctaattaataaatacaattgcctatccgagagctttatctccatcatggcaatcctcgtgaaacacgttgatcgattctagaaacatctttgaaaccattatcatcggaatcggctacatcacctctatcggctgtgtcggatgttatctgtccgatccatctcagtcgatgcagactccagccgatgccttcgtagccaatgcatgctctgttcttcgaatccatctctctaccgaatccgcctcgatttcaatatcgaatctggttcatatattaccaaatttggtcgtcaacagaatgcttccgatcaaaaatatccattgtcctattaaaatttaaaatgaaaattttaatttattacatttgttttatttttaaaatttatgttaaatttttctacactaattatttagtctcattagtttcataaaatgcatatactgtgcactcaaacaaaattttcaatcttttttcaagtttatattcaaaac

SEQ ID NO: 48618 - DNA, 709 bp, Oryza sativa
accactagaacttccttatctatatatttcttttgcagatttggagaagagatgaggccagtgaagttgacaaccaaggattttggtatggttcttgtttctcatcatattgcaaatatttggccaaagcgtaagaattaggacatttgatttacttattatgtcaaagtgagaagaaactgtgtcatgaatacctccatcctacacctgcaacttcctcacagaatcagtcatgaaatgatgttcgaatagatcattatttttgttttactccacaaaatcatgaactcttgaaaatgccactttgattacttagcatgtcctgacagccttacaacacttaaaccagcaatttatatgtttgacctaatctatatctgtttcactgtgctatttaggttatgctccagcaagaaatgacttcctgtttgagagggtatgcattttcttactatctgagaatgttccttctttaaaatgagaagggacaattagggcgtgtgctaagtcagatgtcttcttcatctccttgagctgtactactgtactgataatttgtgcataatcactgaatcgaatctgatatatttattttctttatttctttctacttgtagagactccaaagtttcattttcggtaagttacatctacctatctgtcaattgtactttaagttaagttagcagaatttcaggattcaaaataa

SEQ ID NO: 48619 - DNA, 1642 bp, Oryza sativa
cttgcccctactgagtttaggacaaatcaacgtcgtgcacagtccctagcatatccctctcgtgcacactacttatttcttagttatgtatggtaaacaatttcaaacaaagttctttaattttgttttcgaaaaacaaaggtgatatctgttcatatgcttggcagaacaatatatattcctctatcccattcaccacttgcatgcatattagtcctggactcctagctatagaatccttcagtttagttgtgggccaaaaacaccggcgccaattagctagtcgcctatcagtgtgcacaagctgcaacaggatgtgagcggaacatatatggtcccatttatcaacttatcttgttctattattcgcaagtccaaactcaagtcactttccaaagcatgtgcaccttttttaactatcactactagaaaaaccattttcccaggcgggggaaaatggccttcccaggcagatgcccgctccacctggaccccaacacctgcgaagatcaacacggtcgggaggtccgcctgggaagattattttcccaggcggactagagctaaaggcgtccgcctgcgaagataggaccagtgcgtctaagaaaatttgacagagccgcctatttaattaggtacaagaatttgaaaaaaaaattttacaataataatttgtgataaataatgttccaattaattaattaatttatgcataaaaaatattagtaactagaaaaacatttgatactgacaaatataaatatattgtataagtgaaaagtgtcgtcaagatgttacaatatttataacattgtcacttcgaatacactatctagttgcattatcgcatcgtgttgttccactccggaagattcttgtattcttcgcttgtatccaggatactctctaggtcgaagaaccgtcctttgacatgaaaacactcacggtggatgaagtaacagagatcgcgctgcacatttgtaatagttgtatcgtcaatgcttattcgatgttctattctaggaagctgcatgcatgaaagaagcacaatatatatattagtaggttatagatgtgcagttctccaatgcacttatacgttgagtcgagagacttacatcctctgcgttaaccctgtatctcccattaaccctgaggaattcacatgagtaatacccacagaggaccgagcctctaggttgcttgtgatacttgatgacatatcatagaaggaaaaagttaaattttctaattagtaaaataattggaatacataaactgtgtagactattaccggccaatatgtatgtactagcagcttctcccttgtttgaatccgctctccacccttcttgtagtagttgtatgcacagtatggattttttaccgtttcgtattaaggaggagatttaattgtaatgcattaataattagacatgcaatagtatcagaataacagattgttggaaattgtttgtatgtcttgtgattataatcaagggggtcaaggactgccacggagccgcgctttgggttgataatgaaacatatgtaatgggtgctacatggtaaggaattgatggtgtagctagtcacgaatgagataacacagatatgttaaaagaaacgaaaaagttcgaat

SEQ ID NO: 48620 - DNA, 1003 bp, Oryza sativa
gctagctcgctctcgccgcacgtgaagtgccagcgtcggcggcccacggccacgtgaggcgccaccgccgggggcgacaaggtcacgcgcgcgcgcgcgcggcacgtcgccgtccgcacgccgtggcgcgggccgcgcctcccgtctcgtgtcccccgccccgtgcgcggggcgcacgcgcacgcgcacgcgacgacggcgaccgcgtctacagggccctacgggatacggacgcgcgcgccgtcgccgtcgtgatcgcgaacacacgaccccgcgcgcggacgccggccgtcgccaccgcacgtacgctcgtgcgatgacgtcacactgatcgagcactggaggcgtccagttcgtgcgctagccacgtcgccgccagctggatgtgtattttagctgtccttctcctggcatgatttctctcaccgctgtttatacattgatgggggagtttcgtgctaggaatagattcggaccaacttgtagaaaaatataatggagaaaaaggtttactatagatatccacgtcaatacaggtaaacattaataaaaatacgtttttttacacctattaaattatatatctaaactccatccatacacagggccaaaaaaagcacattcagatgtgataaaaaataatcagtgatctctatttgtttttgcagcgattgaagaataaatgtatataagtgttgagtactccctccatcccataataaggcatgattaaacttggcgcagtcttcaaaactaatatttaacttataatttctcatataatataaagttattgcaacaaaattataaccatcttaaagtaaatttaaatgtcaattcaattaattttagcaaataaaatttaatttatattataataattgttgatcaaatgtttttaatgttgaatcttggaatgtgtgcaaggcttatattatgggatagagggaatagtacatatcgaatgtgcagacaccaaattcacactcacatcaatactgag

SEQ ID NO: 48621 - DNA, 504 bp, Oryza sativa
ataggagtagaggagcctaagttaaccacacagaagaaaggtatgccacaggatgctcacaggttttctgtccgcatgaaatttgtcagagtcagtggctttctccaaatatgaatagatctgttggacaggacaacctgaaaggattaaaatttaaaattatgtatgttctgcaaatagcacaaaccttagagatatacccgaaaaaactaaagatccacaaaagcaaaatgaagcgagaaataaaaaggaatagcaaaactgccaaaacatcttattatcttggaagagcgtaagaataatacaatgttgtgtaatccccccccccccccccccccaaatagagaaaaatggcctttgatagagcaatactgcaaagtattggcccaatggccctagctaatatttccagatgcatagcatatccaatttcccacacataacatagaactaactagatgtagaacacattcaagaagtgccaaatttctgtttcaaaaaaga

SEQ ID NO: 48622 - DNA, 569 bp, Oryza sativa
ttgccagaaaagaactgtcttatgaccaataactaataaatttcctaaattgctacaaaagctcctactaaaatggtggaatccaaagcctctagtgtataaactaagcaaagtaaagatgttgtttctatgtgcatgccttttaccttgagtacctggtaaaaagaggtgcattttaacacatcaaaatgaatttcacaaaaacaggaatgtacagtatttgccaacaattaatacgcaaaatctttcaaggcctatatcagtataattttgtgaaggatcagcatgcatatagaacaaacatgtatatctactacatgtgtttcccttgatctacatgtggcatcagccaatgatctctgcaagaattttaaaatcatgaaccaactaaatcacagttgcatgattatataagaaaaatgacatgtggaaaaaagcactgactcactgtgcatggaaaagatgctaatattgcgttggtagatcagcaccaaattgaggcaatagatttggcaatttgaaagagctatatcaacacttatatgtgttaacacatacttcttccaaaa

SEQ ID NO: 48623 - DNA, 768 bp, Oryza sativa
agctcggtaccctccacggccgcgccggcctccacaccaccggcctcgcctccacgctcctccacgcgccaccaccaccagagccacgcctcctatgctcccgctgccgcctgcatccccgctgccaccgcatccccgctgccacccgcctcccctcccgcacctagctccagatccggcaatggtcgacgcggatccggtgatgcccgaggtcgtagactccgccaccgctgccttcaccaccgcggcccacaccccgccgcctccgcctgccgccgccttcaccaccgtggcccacatcccaccgccagtctctgcctccacctaccgccggccaaccccgcgcccctgcgccgcctgtcgccaccacgaccacctgccgccgtcgcccgcgcgccctgcacgcctccggcctcgacgacagcgccgctccggccggcctccaccctcagattcgcccgcgccggatctagggtggccgccgccacgagccccgccgccaccatcctagcaagctgatggctttgccggccgtttgctcaggcggcggcgaggcagaggggaggggggaagaacggcggcggcggtggcttgggtcgccgcccgagtcgcccgagcgggaggcgacgcgggggccttagagcaaattaagctccaagagtatacattcaggtatttgaaaatcaggatttagaaaatacaagaacatgatgccacacctcagtgaataatatggaaagtaaatacacaaatttgtaaaataggatg

SEQ ID NO: 48624 - DNA, 3259 bp, Oryza sativa
atctacaacaaagcgataaaaataattttagaatatgattttatatttctgttcttagtggtataaaagctaagcctgaaaagataaataaaaaaactccgaaatcagctctaacataaatttctaaaatcaaattatggttacgacctaaatctgcaaccttattactacctccgtttcaggttataagactttctagtattgtccacattcacatatatatatatatatatatatatatatatatatatatatgggttacgctagaaagtcttataatataaaacgaggaagtagttcaatatgttatttgaaacgaacagcttggcttcaatacgaccgagagtcttgaaagaactactactattaagttctaaactcgtaatgctcgctacaagtacaatacaaaacctggcagaagtggtccgtatatgtacgtacaaatgctggtggttagcacgattaatggcgacggttcacctgctggcaggctaaccacaccgtcgtgtgatatgtgatgaagagtcttaactgtagttctcatcgatctgttgagtgttgactggtgaagtggtgattagggatgaaaacggtcggaaatagtcggaaatagtcggaaacggtattattattttattaactttttaaagacaaatagaaacagtcgtaaaattttcatatttatgaattcatcaacttcaatgccacgctgacagaaattaaaaaaactaaattttgaaaatagtaaccatcggtaaaaatattattattatattaattttacggaaacgatatcggtatggtcagaaaatttccataccgttttcattggtgattgcgtcaaaaaaaaagagtgttgacttgtggtggtggtggtgcttgaccccaatcagcttccttttcgggtctgttcactttaatgccattttcaatcttactaaattttggtaaagttgtcaacaaaaaatggctacgggccagtttggtttgcgacctaaattggccttaccaatttttggcaatgccaaattttggtaagttttggcatgacaaattttgggaaggtaaagttgtgtttggattgaagccaaaatagcctaagttaattattgaaatggcctattttcttaggcatgccaaaatttggcttcaaaccaaatagacactaaacactattaaaattgccaaatattggtaagccaaatttaggcctcaaaccaaaccagccctacatttagtttgctgccaaattttggtaactctataagaaatcatgtcaaaattttagtaagttgccaaaattttggcagctattccaaaattttggtaataccaaaatttggtaaggttttttttggcattaaagtgaacccttcttttttacaaaaaggctgcattgtcacaaaggccacgaatcagaaggcccggtctccgttgtgcggtctcccggcccaatatgcatgcggcgtaccaaacggatactactttactactctgaattttctctgaattttctgaagaaataagggtctcaaacgctcaaatggacgcagaggctgaggctctatttatggcgtcagccaacctgcaattgcgatcttttggtggtggcatactatgatcattcggtattttgatgactgatggatatgtgctaagacgtggagaaaagcaagataagataaagaaagcaagcaatgctagctgccacacacacacaaacagagcaaacagacagagagagcaaaacagaccaaacaaacagagagatcgaaagtgattagtgggtgtccggctgctcttcccctcagcctgcgctgcatgctgcagatgcgtcgtcgcgtcagcaggatggagatcgtcttcgtttgcttctgcaggagccgagcggaaatccctttctcctcctgctgctgctggtagcccgacctcatcaatcatcacaactcacaagcatcagagcaagccaggatggaattgtgaattttttgaggttttggaggttcagcttgagcacaatccaatcagctgctgatcgatgcgtcgtcattctctacgggtggcactccagctaccagtcctgactttgcactgagtacctaccaagtaccaactgtttgatgtcagggctctgctccacgctcatcagctcatgcagtatgggcctcttcttcacaccaggctgctatccgcacaacataactaatcaatggcttaattgatcatcattggtgtttaaaggagaagattactcggattagctcacttgctatcaagcccgagaatattgattattggactttgagcaagcaggttactctgtcatgtaccagatgtcgctccgctttgtaagctattaacaacactggacggctcaccagacatgcatgattatcggtttagatggtaagtatactttatgctaataattatatgctcttgtccagataagatatgtctccagtaccaaacgggatttttgctaacgacaataagaagctaattaaatcagggcatcaggcataatttaggcttgaacttgggcagctatgtatggctgtgaaaataatcattttcattctctgatgaacaggtgtaatactcttcttacggtagtgattttcaggagacggtatgtacggataccgttaggctgtagacatcaacgatatctcgagacgactggcggcatctcgatcgatttgtgatgaggagaaaacaagctttcccatactgatccaacggaacagatgaacaaacacactttgccatcatctcgtttgattaatttctgatccattttcccctcataaataagccagcgcgacaattcgctgcatcagaactttccatcatctcgtctgattaatttctgatcgatttttccctcataaacaagccagcgcgacaattcgctgcatcagaacatagttaggtatggtgtatgtagcagtactatatagctttttatcacaacttgtaggagtaggactccaaggattggaagctttatccaacttggtacttattaaacacaacaactttatccaaagccgaatcgaggtcttagtacgctcgtattacagtaccatctcaaatcgagttttttttttgaacgaaatcctcatcgagatttatttgtttttgttctgcggaggaccacctatcatcatgtcaatcataagatgcacttgcaccaactatgatgacattacgcttcaactaatcctagctttatcaccccggctctcctctgttt

SEQ ID NO: 48625 - DNA, 647 bp, Oryza sativa
cacatcaaagataacaaaatcacatatactttcatgaagcaaaactgaataatattattgcatatcaacaatgatggatttactggcggaaatgagacatgatagtatgtatacctgaagaaccatggatctctcatattctacatacagacccttctctttgttgctgaaaaatagaatgaatatcagagaaaaatcattaagatgatagaggctaactcaatcactgaatatttaaaatgaactcacaaaaattgtgttgactttatcaccactgtgtgagcaggtaagttgatcccatgtgccaaagtattcggcgtgcaaagaatttgaatatcacccttcaagaaaagtccctcaacgacactcctatcctttaggcaaagaccaccgttgtgataaccaactgaaaagttgaaataagatatgcatcaccaatcagtgtaatgttaggcaacacatcaaaacatgggaaaccattgtaggttgtgaaggtatcgtggggcgagaacaagattcaacatgacctccatgtacgagacaagcctgcaaatgcttgtcgctacaggttagtgcagcctcctttagatgttcatactgctgcatcgatttcataaatggatttgaatagcctagagaactcgcag

SEQ ID NO: 48626 - DNA, 1586 bp, Oryza sativa
  unsure (1)..(1586): unsure at all n locations
ccatcgctcgagcctggtccggcgaaaggggaaggcggcgcgcccgctcggtcgtcaggcgtcggccgaggtgaaggtggctcggcgtccagccgcccacgccggcacgccccacatgcggacaggccacagtgtcgcgcggcccgtcccttgagtcaacgagccggcgacaccgacgcactgcgcctgctcggccgacagccgctgcgggtgcaatggtgcgcccagccggcggctgcccctgcctggcttgctgccccgcggtcgccggctcgccgccgccgcacgccgcgccagccgccggcttgccgcaacgcacgccgcgcctgccgagtgccgctgcaacgcacgccgccgcctggctccttgcaaatttagggtttgggattggggattttgggagctgcctgggaggggatttttgtttcgaaatgggctcagttgcggcccaagtagaatgcgggccaagtgaaaagggggaaggagtagaaaatttagacccaacacagcagaaatggtaaaacaaggtccaaatgagtagtttaactctttttctttaactttttgcatacatataagaactatatagtatatattctttttgcatacatataaactttttgcatacatataagaactatatagtatatataccaattttttttccaaaaatcttgagtatacatatgaataccgctgaatcatagctagacccgcctctgacctcacatgcctcaagtggctaggagagtatcatcccttataaggagatcttccactcctagaataggtaaggtggtactaaaatccccatgcttactatcccatgagacgaacgttagtgattttttaaagaattaatatttgaataggctaagtcccacctatcaacaagctagggtcacataacaggtttattagattgggttcgaatatatgctagaaagtgcgcaacatatttttttcgattatcagttattaataatttattttttctcttttttttcaggacagaaactgaaagctagcttaggagcctagaggagtggtacccatacgagcgtggtaccaccaataaatctgtggtcagatatataatattaggcaaaatctaatccgcgtgcgctctccgttttgccttatcgcgcaacacgctcatcggccgtccgattccacaagtgctggtgcgtccgtacatagcctggtgattcacggacgtggcatcatctagagggatccaaattggaagccatgtgatgctctacactacgccggctttaaaaataattntctcttaaactaatcatccgatctacgatccgattacaccgttgtgttcgtaagaattgaatctttataacaagatctcacatgattatattttgatgaaaaaatagaaattatttntataatatatctaaaatacttttagatttcactagattacttctcagacacataaaagtatattcaataaagcctaaaagtaatttacatatattatagaagtaacttagaaaaaaagaaagtaccttatcatgacattaaaagtaaatcagttacggaggtaaaaacatgagtctatg

SEQ ID NO: 48627 - DNA, 695 bp, Oryza sativa
taatcgatatcgtgaggcaaaggggttcatacaagtatacactacaggttcagtcgatatgatcattatgtatgtccggtgggttaatacgttctgctaggggccgctgttgacgtgtggaccgaaaaggagttttcgggttacagccgaatatacatgaacctacagggtcgcacgcttaatgggccggaataaggcgattggatggagatccaatataagcttaattcggatagggatccgaataggagtcctacgggccttggaggcccgagtgatggatcctatatattcgtgaggggtgcgaccggcggagatattgcatcacgtgagaaaccctagccgtcacttccctccccacgcaaaaccctagccgcgcgcgggtgctagcatatctgcgcgtggcgttctgtccctgtacgtgtagataccggtagaggcgccgctggtttgcggtgctgattagcgtgggagtacggcgaggagaacgcgtgaggaagagaaggtcaagccggtgcgatcgactaccttctctacatcgacgcgcgctacttcgcgagagttccttcgacttctcagagtcttcttccgctgcgcagcgcgtagagtggaaacgatctatgatctaatacttgcatgggtcctggtttacgcgataaaaaattctgatatatgctatcgtagactacgcgtat

SEQ ID NO: 48628 - DNA, 1241 bp, Oryza sativa
aaaaaataggtatattttcgctgatggtccaattaagaggcctgcctgcaagttttcacacccagccggttcatacttcctttatgatttactcccccgtccatcacctctcctcccgaatctcctctctgtactcctcccctcccctttcctctccctacctcatttggctcctctcagctctaccgatgatgggagcgtgcaagcaagcgccaaccggtggtggcactgtcctcaggagcggcaggaaggggcgacaatgactagggcgatagtgacggaggcagcggcctcaaggcagcggattaggcggcaccacccttggccgcgggagaggtggatccatcaccaccaggcagccccgctatgggatccgcctctgccgacaacacgatgggcggtgacaacaactgtgcggctacggtaactacgatgatagtgaaagcctcaaggggagcggatccactggtcccaatctcgggagcgacgctggtgaaggaaaggcaaggggtggcggtggaggtgcaggatcgaccgcccggccctgcgacgggtggatctatacagggtggtgaaggagtgctgaggagaggcggcaataacttccggtgcaacgacaatgacattggactgcgctggcgacaacgacagtgggaatgggagcacgggtttctgggtttttgattttctggactttttttttttgcagatggatggcattatgcaaaaaatctgttttcgtacacggttcagctacctgtttgggaaaataccgattttcacagacacctcggggcatgtgggcctcatagtcgtttacaaatttatgttttgaccgcttgtaaagatggtttatgtatgagagaacatgacttgtaaaaccatagatgagactatagcacaaagtcacttcctctataaaattttgcatttcaacccttaactatttgaccattttagtccctttattaactaaaaatgttcaaattttacactacaaaccttatggcactaagtactatcatacatgtaccattttcttacccatgccccactggccattgtcaaaagcatcacattttcgtcaccctcatctatctccctcacacaattactctgctcaccgcacattggacaccgatcccaaatcgcctacacactaacaccatcaccatccccatttcttcaaagcacaagcaacattgtgtcccttattagtgatatgctctagaagcaatcat

SEQ ID NO: 48629 - DNA, 1526 bp, Oryza sativa
gctagcagtataatcagtataatttaaacataaagtaaagttggcattcatatactcggaaagtatttcaataccataattgtataaagaagaatattctaaataaaatacaagtcttacaaaagaagaaaggagagctgctagagccatacccaaactcttccgaagacttctggactccgatttctattatattcctactccactagcttgatactactaaactaaacttgagagaatatgagaaagctcttgcttgaagtgtgtggaaaatggaatgagaggagctccttttatagctgctaatgacggttgtggcagttggaaatttcctaactgccctgcaactgtcattgaggatgcatcctggatgtccacgcaaaaccacaggatggaaggcgctgatgggggttcggccgaaccatggcctgggccaaaccagcccatcctcggctggcggtctcctccattgcttctctccgtagacttgtgaattttggcccaattggttatgtcatttttgagtttttggcccattcatacataagtctgatcctcgacattgtccgattgattgatcgtctgatttgatgtcgattctcctccactctgtggttattctctgcaaaaggtcagtaaacctattaccagtggaatattattattctaacacaaatatgcattacaagcataactatttctcctctaatttggtagtattgacggtcgaaactgatcgctaacgtccatcaacaaaaaccccccaagcttgaacctttgctcgtcccaagtaaaggacgaacggaaacaaagacttggttgttgatcaggaattgctactatgctgtatatctcaaatgtacaggtgcaaggtatatgtactctctctcaaattaaataatatttggcatggtggcttacccttacccctaattcccacaagacactgcctttccttgccttgagcggttgaaagatagaacaacaattagagcactaatcacccaatttttattcaacttttattccagaagttttcaaatgattttacaaaagaaatccaagttcctcaaatgattcactcagtctctccaagtgtatcaatatgaattcctcacctttttgcccttttagattcctactctaaggtttgatatgtggagctcagtagggatcaaacatggcatacttgcattcacgtttattactaagtcaaaaacttagactaaaatagatgactaaacatacttaagatcaagatcgtgcaaagtgtgtgtgtgatatatggtggaaatgaaatgtgaagaaaaataaagaaaacgcttctcctttgtgcttactttcttctcccaaaaatccttctttttattaataaggagagggcatggctacattattatcttttttttcttttttttcccatatcatgctcatacttgagagagcataactttattattttcataaccatgcctttccctcttcccttttttttttcaaaaatgattttctttttaggagaagaa

SEQ ID NO: 48630 - DNA, 1201 bp, Oryza sativa
atcaaaatataacatagtacaactaactttagatcacatacacgtatttatcacatactactttctttctagccaaatctggagtatattgtttgtatggatggaatttttatcctgtatatatatactgacaataaataatatatttgtcaagtgtccatcatatattaaatcgatcaattaggcattatctacatctatacctaagtttatatcactaacttaatacataatatatgacatatttattcatgtctcaggcttccttcctttaatactcacaaaaaaggtatattggggtaaagggattttttccgatccttttcatacccaatttttttagtatatgttcaatatgtgtagcttaacctcggaaagtgatccgctgtgcatattttgtgaatcaaatagctaaattaacagagctttaatgtaataattgggtacagctacattaccatataaatgagctgcgatatatagtatccatgtttccaaataattagcttccatgtttccaaatacgaaggaccagtatttagtattacacatacctagtttgcataaaaaaaagtcaatttctccatatactttgtttccatttgtcaccattatataaccatttattcaaacctcaccatgcatgcaatcacgcaagtttccatacttacaagatattatttccaatttcatgggtatttaatgttttcatttttgaaatgtacacacacttatggattcaaaccacaccgagcaatcacgtaattttccatttacttattatccatatacttagtttccaaaaacgaaggatcagtatattgcacgtaactttccatttacttagtttccatatacttactttccaaacacgaaggattagtatttagtattacacatacctagttcgcagaaaaaaaaagtcaatttatccatatacttagtttccatttttcaccattatattaccatttattcaaacctcaccgttcaatcacgtaagtttccgtacttacaagatattgtttccaattttatgggaatttaatgtttccatttttgaaatgtacacgcaattatggaatgtttccatttttgaaatgtacgtgcaatgaactaagtttccttattttagatgtattatttccaattacacggacatttaatgtttccatttttgaaatgtgcatgcaattatgga

SEQ ID NO: 48631 - DNA, 4442 bp, Oryza sativa
ttaactttgcacattttaatttttgaaggctttcacaagcattttaattattctaggtataatttagaggatgtattttagggtcgatttgggacgcgacaactggtacaggtatggctttgaataatttgtttgcatgattattagtaaggaagtcgtaaccctgttgtagagtccatagccttcactcgggatgagcaaatgttaagtgtaggggtgttgttgacggtcattaaatcataatatttgaccgtcaatacctacatataatgaaacaaaacatggtatccaacttagtggtagggattattactaatcaattccactagtgttggtgaaatatgtgtatgcacgtattttaatgagaaaacacacccgacatgcgaggaaacacacctccgaccaatcagacgcgagcacacagattggagggcccacaaatcaggtgaaaccgcccgggaacgggtcataactgccataaccgccatcagggcccaccagtcattgtcccagccaaagcagaggccaggatgtggggcccagggttcggccaaaccaggtggttcggccgaaccaccacaagctcctttaatcctggccttccacgtgtacgctgctgattccttcccaatgatggttgagggcattttggtcatttcccatacatgtaaccgtcatatggaggctataaatagagctctccttcacacttcacaacacacaactttgagctaaattacaagaggctctattgtatcttttgtacattagaataaggtagagagtgaggggaagctctggaggagtgcccggaagtttggcgctcatccgacttctacctcgataagtgtagcttcatatgggtaattctggaggagtaccggagctgtcggtacactctgctcctggttcggagaacttcttctataaagtaagcattcgtgttcctttttttttgttatttaattactttgtctaagcgatatagatttccatctttgcgggttcattgtttagtattcgtactaagtgctctagtaataggactctagataaagaaggaagttcttgtacaagtattagagtagtaattaataacttagacgtggtgtctaggttaaagattacatttgtttgttgtgtatcccacggatttgtcagagatggacggcaggtggtgaggggatcctctagagtcgcgtccaggtatcctccacgttcggatacatcatagagctatagccggaaccacgttggcagaccagcaggggtcgttgcccgaagcaatacataggaaattatctttacttagcgtagataattaaaacacatagaaagtcttctctagcctagcctacctatcatctgttgttgtccttggataatcttagccttaggtagattacacacgttccctgacttcgatatcctttaggagtcacccgaaggtgaagtgctacagcggtattccgtgcgcttgcggatttatctgtggtcataagaaataccaacacccttgacatgcagacgagggagatctagtacgacctcacagaatacatggctcaaatgcaagaatggcaacagactgctgatgctcaattcgccaacttcaacaacatgatgcagcaacagcacgatgaccttcaagcgtacttccgctttcaggggttcaattcttatcaaggaccctgagcgaatgccaagcttggggggagagatgtctctccccccactgagataacttgtatcacattggatatttccctttccaattgcatatttgctttcaaattgcatcttataaaacttgaaaacaatataaaaatttgcaaaatagaaaataccaaaaagataggataggtttgggtcatgctaggtaagacaagctagttctcttcgttgaaatgatgaatagttgctctgttttatatctcttatatatgggttcatggtaagtgctctctcaaaggttaaatataagtagccaacaattatctgagaacttgaggtaaatgggctgtacttgccaatctaagtctaggttgttgcgatatatgacatagtaaataagagttgctatgatcctgatactagtttgaccaaaatagtggagaactagtgatgcttgcaatgcataaatatgttagaacaataatattccactagtgttaggtatactaattaaccttttgcagagaataacactaaagtcgacgagaatcgacatcaacacagacgataaatcaatcggacaatgtcgagaattagacatatgtatgaatgggccaagaactcagaattgacacgatgatttgagccaaaaatcacaagtctacataaaggagcaatggaggaggccgccagctgaaagctgggttggttgggccgacccatggttcggccgaacctccctcgccttcgttggatccatgttttggctggacggttgagatgaagccccaatgaaggttggagggtattaccgaccattccaaccgtcacaaccgtcataactcagctataaaaggagctcctcttctcacttcactcagacacatcaagcaagagctctctcatttctctcaagtttagtttagtagtatctagctggtggaataggaatagagtagaaatcaggagtccggaagccttcggaagagttcgggtatcgctctagtagctttcctttcctcttttgtaagctttgtactttttttagaatactcttctgtagacatttatggtattgaaatacttttcgagtatatgaatgcctactttacattatgttcatgttatactggatatacggctaacttatctgggagatgctttggtgcgggtataatttttgcttatgcaattactctatgtcatgacgatgatattagagtagtatctggtagtttagacgtggtgtctagattacgggatatcattatttagggttatatgctgcggatgagaggtgggccgctgatggtgacagctcagtacgggtattcctccgtgcctgtatatgatcccaagttaattttctggggagggtattcctccgtatttagccccggttgtattgtcatgacgggctgtcgtaaggaactcggcaatcaggggtggcttctcgaagtaccaggagggcatcggatagaggatattagctagtgtatcagataactagaatgtatgtatactatgtatacgagattaagtgctacaatactatgtcggaggaacagttttgcactgtagtgcgtgactcaggttattgttcgtctatgacgttggagcatttagtcagaggagccggttcccatggaatccatcgacgcctaatgtctcctacctctcccttacaccatccgcaaagcatcaaaggtctctataatttcatctccctatatctctcttagactgtgtgcatcttcggtatgcacgaatcgaaagtgttctgaatataattgtatcatcttgatgtaatgtgaaagggcatatagccttctcttaaaaaaaaatcatctctcagtctttctagcctgtactggcgtgctgcacggtcgcctgctcagcacatgcccttatttcgcatccaaaatcaccaagaacgggttcaccaaacacatcccaaagcttcgattcagcggtggccggaactgaggtcttgggacttagtatttggtttccgctgtcctcgatggacctcttcagggcataattcattccatgtctctaatttattgaccgttaacgatattatgcactatatatgtcataactacttcgtgtactgttcacatttatggtgggctgacgaattttgactcttttttttttctaaatcatccttacaaatttagaaaatgtctattaggtactgaaaaaataaaccatccctacaaattttgtaatgcatatcgtaaaaaaattttatatctaatatatatgcacttttgcagccatggatcgaagttagatgtacgaaaccgatcgacatatcaaggagtatagaagtggtgtttcaaattttataaacgtcgcagaggaggagaggaaaagaaggaacgattgcatgacttgtccatgtacaaattgcataaatgggaaggagtttgatagctaactagatatacactctcatatgatacgttgagaattcatgaaggggtacacatgttgcatgaagcatggagagcaagaatactatagatacagcgagtagtggtgcacaaaaccaggaaaaagatgaagctgacttgttcgtaacttctccgttgagcagtgaaatggttgatgtcgatcaagatgttttgtaagcaatgttgcgcgatgttgaggagctagattataatgagagagattatatgacgttcacctcaaatcaaagtaacatcccaaaacattcacatcacaaatcttaagttacttatacacacaaatca

SEQ ID NO: 48632 - DNA, 2021 bp, Oryza sativa
ggtgctgctgtatagatgaattaaatgtgatttgttgtctgtggatgttttggatgaatgtaggggctagattttatatacttgattttggtgcagtgaatcttgaatgtggatttaagtgcaactgttgctgtctatgtttgcccttgctgtctatgtttgcccatgctgctgcctatggttgcaactgttagttaagtgcaacttgaatgtggatttaagtgtcatttggacatataaccattcatggagtgtgtactgctatatatgttgctagacctattgaattttgtggatcatgtttacatttagctgaaaaaggataggtcagtgtagtccatggacggaaccgacctagacaccaaagttctccatgcattttgttttctgtcattctttgatgatttatatacccttgctgctgctgcccaatgtgttccttattaaatggccagtgatgaattgctcaataagaacagattatctacacttgttcatttttttgcccctacacttgttcacttgttccttattaaatggccagtgtagagtggttatatacctctacacttgttctttttttatgcataagaacagattttgtgcacttgctctttttttatgcataagaacagattttctgcacttgctcttttcttctggattgataagaggagtatatctagacatgttgttttagttaatttgcccctgctgttgctacccctgtggcatatatactcctcctgctgctgttttatgtcaatcatgcaaattctgtacccttgctgctgctgttttttaaatttgcatgattgattgagtggttatatacctctacacttgttctttttttatgcataagaacagattttgtgcacttgctctttttttatgcataagaacagattttctgcacttgctcttttcttctggattgataagaggagtatatctagacatgttgttttagttaatttgcccctgctgttgctacccctgtggcatatatactcctcctgctgctgttttatgtcaatcatgcaaattctgtacccttgctgctgctgttttttaaatttgcatgattgattgagtggttatatacctctacacttgttctttttttatgcataagaacagattttctgcacttgctcttttgatgttatgatttcctctttttatcccttcatgcaaatgattgtaattgatgcatatttctcagcaaaactgaggccatatctttcatagtataccccgtattacattggatctaatgctatttagtctaatggtacgaaatttataatctttttcgcgaaagttaaaccatgtcaacgcccggcgcaaacccgccctccccaacacctgcgaggatccaggaagaagcaaacccggccacagaggcagttgccgaaggtcatcccgcgacaacggcggtccaacaacccgaaattcatggtaatttataggataaattttcaccacatgaccacataaattttagctagcaccccttagcaaatattgccttctgtttgtgctgcagaattgccgcaggaacaacatacgtcgatgtcgggcgggacaagtgcaagtaggtctagtagaaatccctggtcacaaaatatatggctgtcacgaccgaaaataacccaacgggcgttcctgacgtgcgtgcattaatccttgtcccaggaggcaaggtacaccaaaagttgatacaattcagagtttaacaagcggaagcgtaaatagttatacttattacatgggcagcgaaggcccggcacacaaagacaaacgagaaacagcggaagactatggcgactaccacatgctcttgacggcatgcacgagctagacaccaaagccttcatcttcaacgaacttctcttctggggttgggaaaaaatgaacaagactaagtacaaccaccgtacttaacaagacacaccccctagtgcagaaataaatgcatggagtacaaatgaatcatactgtaaaagggtagggtt

SEQ ID NO: 48633 - DNA, 632 bp, Oryza sativa
aacacagacatgccaaatgcagagatgattgaagcatacccagttccgtatgggatgttaaaccaccaagtgggagctctccacccatagggtacggcaacgatgccggttctcatcatggttttgtaatgcacaaatgtcgctccccttgtacacaccgtccacgatatggaatttccggcgcacctgaaataccccattggccatggtaccatgagtagaggatgctaccaccactagagccaaaatgattgttgataacaacaaaggagctgccatctcttcagcaaagtgcgtactatcccttccctttttgtattttatggagttttaaatggtaattgttggttcctcatctggtcctcatctctggcaatgggctattctatgagcttcaatatgaatgggtaggggcatgctagcaaaagatgtggggaaccgtgaacaggaaatagctaaaagtggaagcagtcaccaattattgccgggagagagtacgaggaaactggaaactacatgggtttttgcggttgagaaaaatgcacgtgtgtttttttcagataatggatataaatctggccactacactggtgaagaaaccgtctttagtcccggtttgtaacccatgtagt

SEQ ID NO: 48634 - DNA, 674 bp, Oryza sativa
cgaacaagccctggatgaagaggaaattggagaagatgttgatcaagctgcagccgagctaagtgacctaggagaaaaaacaccatcggctccacctaaaaagacgcctccaactcctgcagctccaactcactttacaagggtaacttatcctgacaagctcttaaaaaatttccatatagccgatcattcattgaacttgtatttgtagaagaagaaaatcgcttcaaagaagacatcagcaaaagcatcatctaaaccagttccatcggtaagactccttctgaagaatcttttaaaatttaatcataaccgatgctaatttacatttgtctttttagcctactcctcctccttcaccccctgtgcagccgatgtcaagcggccgtactccaatggtcatgggcagccatcatattgaagaagaacaacaaccagccgctcctgctatcccagtaaatctttcttttttcaaaaaccccaaatcggctgtacaacatgcttcagtgttaacccttttccaactttcatctttataggtcttagccgatctattctcttttgacatcaaggactacttcgacgaggtggaagaagacaccaccagcagatccctagctcctctatatgaagatgttagaagaagtctcgaagacatttgtcatcgtctagag

SEQ ID NO: 48635 - DNA, 776 bp, Oryza sativa
gtgtactcggtctaccgcggtcctttaggttgacatgtggggtctgcatgtccacaagcgcagccttcctatcttttccacgttagcgcttacacatgttttatagttgcaaaacataattataataatccgcaaatctccatgtaacagcattaaacttcggatgaccatgtcttggtcatacgagctccgaattgacccgttcaactctcttaatgtttgttataacctaaagaaccgtgtgctttctttttatgtattgttattgcttctttataggcttgtagctttgcttgtgtgcttcgcatagcttctgtcgttccggaggttcctgaagcgtggtttgcagtcgttgccgaaggttcggaaggccgttctctctgagcaaggcaagtcacatcatccttgagcatattgaatcccagtttataaaattattttgatttaaattaatgcattatcgctttatttaaattcccgcgttatcactgttttatttagccatgcttatttacctttgttatgacattattattgctattgttattattaccttgttcaccctagaataaataaaaccccaattagtgggtactctattcatggttccactagtatgaatttaggtaaatgcttcgctgattaattaggcaacattatgtggttttataactctagactttgggaatattcatctcacttggacattatggaatggttggattattgtggaattggatgcacacctccccctctattcaaaacccccaaaatgg

SEQ ID NO: 48636 - DNA, 554 bp, Oryza sativa
gaattcgagctcggtacccacatgctctagcgcatgtgctgtacatgcaccccgagacgagccttggccttcgtgaataggaagcaatgaacctaaccagaatccaccaaggattgtggtgtggcaatcgaatctcgagcagcatgcttttcccattcgaagatagaccaaaatggggggagggggggggggagggtcaccacttgcttatttactctgctttggactgagtttaggcttatgtaggtgcctgggatttgaaggacgagagtgtacatatggtgaaaatagacgaactatagctaaaaatacggatttagttcggagggaggtgggaggggggttcacgacagtggtcgctgccaccgtgctgctgattccccggtcacagcttggctgtccaccgcaattgcactggcagccgacaatgttagtttggtcaacgatcatgacgctgatgaagtcgctgacgtgcccttagtcacgacgtgtgcagttggtggttgtctcccccagattgtctagcttttgatgacggatgtcaatactcataa

SEQ ID NO: 48637 - DNA, 3158 bp, Oryza sativa
caccactaccactggtgctctgatccatgtttggaacaagagactcctctcctgtactgctacctgagccatgcttgtcgatgtttggaaggtggagagcaacacctgagccatgcttgtcgatgtttggaaggtggagatcgtggctctccagtattcggttaatggtggatagatgcccccggacttcatccatcttttgtgaaagtggagctcatggttgtcctgtatgtagatgatggtggacaactaacccaggacttcatccatcttggcgaagaggggtaccatgccttcaattgttaacatcgagatggtggtggcgaaagagtgctctgataccaatatattatggatagaatttaggtggtgcatgaggttgcgaatgttgtacgagcgtccaataggaggcttagtccctagtgccctaggatgctgaggcaccagccgtgagtgaggacaaggaatcatcatgctgtgaacaacgtgcaaggaaggagatagtttctgcttattccttctttattgtccaatagtacatcaaattataacctaattaataggaaattaccaactagggatatgacacactaaaaggaaacttgatggtgcacccggcgtgttcttggactgctgcttgcgacggcggtaagtaattataacccatgccacatggttgaggccttaacccgtgcattgaggccccaatcacgtacacaatggccgcccactatttgtaggtcggttcaaggggccagcgaatgaccttttcttaaaccaactctgaaaattcacaccagagttgaacccatgagctagtaggtgctaccatgcataaaagtgtaaatactaggctgcatacccattcacaacgacggttgcccatattttcttggaggcatgctttaatggggatctaacatgtgatcaaccgtgcacggacgtgctccccccatcccaacgcgcggcttcgccccccttctcatatggttttcaagaaagaatttaatatatgtttagaaaagaaaaaaaatactaacaaaagaagaaaaaatctgctcagacatattcatgtgtataaactttatacacataaaatctatgtgtataaacattcaatgaagctaaattcggtatgagatatttgaatccatttgtcagacatttaaaatttggtgtataaactttatgtgtatagactttgggtgtataaactttgattgtataaactttagctgtacaaacatttcaaataaggaaagcatgtggagcaagaaaagaaggggtgcccagaaagaaagggcgacctccacacgctgatacatgagcattggcacgccgaattcgggcttccttgcctttggtcgccaccaaataacaaagagaaaaccaatgtatgtctagagtttattaaaagggattgtttagattccttgggtggcaatcctatagttctaataagtccactcttaattaatcaaaatagagtctctttcatatggataaaaggtcaaacaacaaattccaaacctaaatatgacaagcattttcaatttctaaaaatttacaaaattatatgtagaagtattcaataacttgcaaaatcaaaaaaaaagcaaggataattcagtattttgaaacatacgcacaatgacctacaaataaaaatattcttatttcctttataacaacagacaatttaatttcgtttatctgaaacatttttccttcaatggaaaaagacggaagttcatgatatagtagtttccgtcctagtttttattgtggacaatcttgatttgcatcttagcatttagcgttcaagtcaagtaaacagtaccagtgcctagcaacacgaacataaataaagaaccgaagatacacttccatgactataagtggcacttaatttatttaaggagaataacatcatgaacttgaaaagatggacatataagaggattaatagcatgcaacaataataataatgatgcacatatggattataaaatagttagaccgattaaaaacataaaatagatatagtgaattgaatagagtaaaactgctgaatgatcacgcataaaacaacttcatgacacaattaccttaaagatggtaatagcccaaagtcttatcagcggtactagaacccttcaaacttaaagaacaaatcaagttcgaaacatattacctctagaatgaaaaaattacctctagaatgctcaatataaaatctgaaagcccgaaaacctgaattccgacaaacaagcaaaactatgtttacttattattctggtcataacttttaaaccactcaaattatatatattaatttacaatgcactatgttggcgaatggcctcacaagtccatgtaggaggcatcctatcatggaggagaggggaggtggaagcagtggcttgtagtagtgtcagggtacactcactgaggcacattcctttggagaataaaacgatgctccacaccgcagaggaaacggcatggggagagctcagtgagggcaagcatctccaggtgtttgtctcgttgttggatcggtacctcagacacgcagctgctcacgttgacaccatatctgcaccattgctgggcaagtttttgcatctgcattgatataaggcttatcggccgatctctttgccatatatgtgccacagctgtcaagcgtgacacaccactgcaagcttatcgtctgatatgtgccatcaacatcgtccttcagccgagcagccctcggcgccacagagctcatcagcccactgcacaaactccatggagggctgctcacgatccgtcatccgtgttaccacaagcccttcaatcgtgggaggggacggtgaaagtggggaggtggtggtgattggtgaagagtgatgactcaaagctttaaagtaaatgaggatggcagcattcacagtgaatggaagtagttggaggcggaagtggcgatggtgatttgggagtagaggaggacaacgacggtccagacgtgtgagggtagatgagtatgcagggttatggttaggctatgatagtttaaaagaaaatttcttaccatataaaacaggaaccatgagatgctgagcagcggtacaagatttggagcacagcaaactggtttgacaaacttggga

SEQ ID NO: 48638 - DNA, 1448 bp, Oryza sativa
tggtggtgattggtgaagagtgatgactcaaagctttaaagtaaatgaggatggcagcattcacagtgaatggaagtagttggaggcggaagtggcgatggtgatttgggagtagaggaggacaacgacggtccagacgtgtgagggtagatgagtatgcagggttatggttaggctatgatagtttaaaagaaaatttcttaccatataaaacaggaaccatgagatgctgagcagcggtacaagatttggagcacagcaaactggtttgacaaacttgggacaacatatttgaagtagtcaatcctagcaacttgatcgtatcctcctcgcatgaatgttttctcctcgcactcactcgctaatcaatgccacaacatgggcggactactgctatccacacgtctatgggtggaacgttgtgtgcagacacgtctacctacagctagtgtttggctcgtgagtgcaggggcggctagggtttatcatgatggttcatgtacttgcatgtctcatttaccccctcaaccgtcgcccttgaatgaatagaacttctaattggacctccaaggaccattaggacgcttacctagatccctatccaatcaagtcatttcaatacattaaatgtgtgacccaataggttcgtgtacactcactacatgtatcataacagacctagatacttcctttatagcaatctagttacgtgcagtagcatttgacaacctaaagttagccaatatgcttgttgagaatcatgataccacctatgatatacaatcaaggaggatttagaaatagtagcatattagatgaagagtatcacgaataagtcacatattcattgatcaatagtaagtcatctatctcaaggaacacttcattataattctagacaaagtatgtgaaacaatcatctcaatgattgcctctagagcatatcactaataagggacaacaatgttgcttgtgctttggaggaaatggggatggtgatggtgttagtgtgtaggcgatttgggatcggtgtccaatgtgcggtgagcagagtaattgtgtgagggagatagatgagggtgacgaaaatgtgatgcttttgacaatggccagtggggcatgggtaaggaaatggtacatgtatgatagtacttagtgccataaggtttgtagtgtaaaatttgaacatttttagttaataaagggactaaaatggtcaaatagttaagggttgaaatgcaaaattttatagaggaagtgactttgtgctatagtctcatctatggttttacaagtcatgttctctcatacataaaccatctttacaagcggtcaaaacataaatttgtaaacgactatgaggcccacatgccccgaggtgtctgtgaaaatcggtattttcccaaacaggtagctgaaccgtgtacgaaaacagattttttgcataa

SEQ ID NO: 48639 - DNA, 503 bp, Oryza sativa
cgtacggttgagggggaaagtgggaaggaaaaaggaaacaaggggagactgggactttcccgaaaaggaaaagcaatgcagtgccattttaggaaaagaacggaaacggatattgttcgtcatgcaaaacgaaaccgcagaccgagaggggtgtgaattgggcacaattcacgagcaaaagcaaaggaagaaattattagcttgacacttttacttagcaacactgcctccattgttctaatatttactctttaggtcctgttagtgattttcagagcaaagagaatttgaaaaaaaaatttccctgacaattccgattactaaatgcattgttaattgggtttttctcctgattaaccaaagcaaattcttgaagccatttattagtgatttggaacctaagggaaggtaaaactcagggtgtgacaaacctacccccttaaacagaataacaacatcgagattcggaagaactggcgaagagatggggatcctctagagtc

SEQ ID NO: 48640 - DNA, 572 bp, Oryza sativa
gagagcttatctcatcttgcgcaaaaagtgactctacatgagcaaagatttgccgaagctaagaagaactttaaaaagatcaaccatgtgtatccttacatgtatggttctgatgatgaagatgatgattccaaagtggcagcagccgaatgggtcagaagcaagaaggtggtacaatgccaatggatcaagaattctaggaaagaagaaaaatatgactttgatatcaccaaggctgacaaaattttcgatttgttacttcgggagaagcagattcaactacctgctggtcatataattccattagctaaagagctaggaaaaaggaggtattgcaaatggcacaattctggttctcattctactaatgattgcaaagttttcagacagcaaatccaggtggccattaaaggaggaaaaatcaaattcgatgattccaagaagccgatgaaagtgatggtaatcctttccctgtcaatatggtgcatacatttgggaggatagccaatgcagggaggaaccaaaattttcagatgaattcagctagaattatcaacaaataccagagaaag

SEQ ID NO: 48641 - DNA, 603 bp, Oryza sativa
cttcgttggcaggttgggtgcgataacttcgcatttgtcgagaatgttctcgataatggagtgtactcgaccataacctaatcgagtgctcagttgttcctgaaaaatattttctagaaggcaagatatatagcagataatatcgagtatgtactcaaaaaactgcatggatcttctagtattatcaggatataatgagtagattaaatatcaggcattatgtaaaccgtaaacaaacatgattcatacagaagagaacaaagtgaggccccagcgttagaccgtagtcagtttaacgtcggaaacactcacgcgatagatattgtataaaaaacatgctctaggtaaacatagtaaattgtagatctgacaatgctgtatgatctgaataggtacgataaattcatatagaatattgcgtacctttgtagatatatgccggatatatctacgaaattagtagatcaatttaattaattaatctactaattaccttggttgtcatgccgtgcgtccttagtagagatttcatgcatgcggtagattaggacgtggattaatatatcaccaggatcatgcttactgtgtacgggttggacaccg

SEQ ID NO: 48642 - DNA, 2891 bp, Oryza sativa
acccatcacattatctcaacagcaaaataagttgatcaatatactccatgttcatgcttttcaacttttcgttagcggcatgaaatttcgataataagtttagaactaatacatcatgtggagaagcatcattgatgcaaaagaatacaaatgtgcttaattatggcgaatcatgtgtagaagacaaatttatattgaatgtttttttttcaaaagaaaaggaataatatatgtgaccacgtttaatacttactgataaactgagcataccaatttataagaataaaagtacctgtggggtaatgaagtcattgatctaacggtaaaaatgaatggcattgatctgttggggtgacttcgatgtctcttatcctgtcattgaaagaaaaccatgctatagaatcagtagcaccatttttaagattaggatcatatatagaaaacaatatgatagcagaagaaaatatgtaaaattattttagagcttgaattgatttagtaaagaagtacacctatattagtccgttagtccgttaaagctctgaccatattcaaactaaatacatcgatttctagctagatgcagcataccttgggattatgtattgacttacagacacactgctggactattgtagttatcataatatgattcaatgagctatggagcttgttacagatttttcagctaaaaaaaccagcatggggatgataatatatgattaccccttaagcataggccaattgtttgtcttcattgctagtcgatgagagcatgagtttcgaagtagaaggggaaaagggaggagggcagcaaatcagctgaacatgattataggagaaggtaacaaagaagcatgtcatttctaatttgcattctagcgggaaaggaaaaaaagaatataaatcatatatttgatccggcaaagacataaaccacttggctattcaaatacagaccaccagggctgtaaggcaacaatctcatctaatcctgttctagaatatgcaactgtatttcagatttgtaaccttggatgtaaaaagggtactgacctacactctcattcaaaaaagggacccagtgatcaccattgtagataaactgggcttgagctaacaataagtatttgcctacttcgtagaacaataatctgaagtctataaccatcctttagagtttagacatgcaaacaaaaactgcagcataagagcaagaacaatcacctttaatgacataacagtatatgggcaaggaagaccacatacatattaattgtagcattcgtcataaagcagtggtcacacataacagcttagatatttaagtattggaggtaatatgtttcaaaagcaatcaataagccaaggctagctagagataatttttagctgaaaataatatcaacatataaatctttgtagatcctaagtgagcacaaggtttactttttttttttcccaaatcgatgcatatggaaagctgggcttacactaaatgtttagcaatatacagagttatagaaacagttaggttgttagaggtagagctagagctaggtgaataaaaaatcagtaataaaagcaaaataattatcaagtgatcgattatgcttatcttttcaaaatgatatacaaatcctagactgaaagtctgaaatctgcatacaaactggtatatagtgtatacaacaaaaggggattttcgtgctcaccttgaggtcaggagtacacaggttagcattatgattaagggaaaaaataccatgaaaatgtcaacgatggtgaaaacacaaccttaggaagtaaaatatacaacaaattgagttttctatatcaacatgtaccaaaaatattgtcattgtcttataaaggggaaaagtagagacaacatatctgagatgcatataaatggcaaatcatctgagtggcagcgagagcaacctcgaacacgcttcttctctttgcacaacacctgaaagaaaaggtttcatcagcaaattggggtatatgctttcacaggaccatcgaccatcctggctcctctccttaggagaatagcagatcttgcctatctactggtactgattatagggaggagacaaacctgctatatatgctacggctagtgccggctggctgtacggtggtgtgaacttgccactgttggtatttcttaacgacattactagaaatataattcccagcaatggcgcagaaatactcctggtatattatggttacagagtttatccgtaagcgcacggatataccattgtagcatttcactcgagagtattgcaagagtatcatatttgtttaatcccgtaggaagattatagtagagagaaccgtgctaataatttatatgttgcttgtaataatcatagtctaagtagggattaatataatccaaagggtaggatgacacacaagcatagaactactcattctcatattaaactatctaagctaagtggaaagaaaatagaaaagaatctattcctatacttctagtatacatattatacattcatcctagttatataattaactagctaataccctctttctgatgccctcatggtacttcaagaagccacccctgactgtcgagttccttacgacagcccgtcatgaccatacaaccggggctaaatacggaggagtaccctccctaagaaattaacttaggactatatatatgcgtgaaggaatacccatactgagctgtcaccatcaacgacccacctctcattcgtagcatataaccccaaataatgatacctagtaatctagacaccaggactaaactaccagatactactctaatatcatcgtcatgacatagagtaattgcaatagcaaacattatacccgtacctatgcat

SEQ ID NO: 48643 - DNA, 2806 bp, Oryza sativa
tcaaatgattttacaaagaaatccaagtcctcaaatgattcactcagtctctccaagtgtatcaatatgaattcctcacctttttgcccttttagattcctactctaaggtttgatatgtggagctcagtagggatcaaacatggcatacttgcattcacgtttattactaagtcaaaaacttagactaaaatagatgactaaacatacttaagatcaagatcgtgcaaagtgtgtgtgtgatatatggtggaaatgaaatgtgaagaaaaataaagaaaacgcttctcctttgtgcttactttcttctcccaaaaatccttctttttattaataaggagagggcatggctacattattatcttttttttcttttttttccaatatcatgctcatacttgagagagcataactttattattttcataaccatgcctttccctctttcctttttttttttcaaaaatgattttctttttaggagaagaaagcacataaaatcatggagaattcatttttagtggtagtatggaaatggaatggataattgctagctcccagtgtaggagtttagcatgtgcatatatgtgggtgtatgatcttgatcatagagcatgagaagtatctacacagttcacaagaatttgacaaagttcaatagaattgcaagtaaccaaaacatatatggtttaatcaacatggaatatttttggctctggtaggaatttatatcaaatgaggaacttcaatataggttaaacttcaatgtgggtgtattttgggtggatactgcccaaaaattttgttaaactttcattcatattttcatcacatatatgttagccttgtcaaacatctatcaaattgaagtccattttgcaaactgaaatcaaatttgacaaaaaaaaatctaacaaacctaggtcaaatttcacgaaaatatgataaatttaagtcaaacttgtcacaaatcggtgaaacctaaaataagtgcacaaatttatcattgttctttctcaatatttcaccatacgtaactatgccaaactaactaaaagcttggtaaaatgagtaagggcagaagggacattttatactccagttaacacatttacgtacccttaacgtaatagggtcagactgtgtcttcaattttgaaaaaaagatcaaatgagtaaagttgacagaagagggtcaaattagtagttagcttagtctagagcgtggtcaacgagaggaccacaaagctaagaaactaaatccaatccagcccacttgcttcccctttcctcctaccttgtggcccatgtgtaaactagggaaaaagcccatgtgattatttgcatttatgttggctgaaaacaggggcgaagccaaggggggagggaggaggcctggcctcccccaacgacagaatgaatactaattaatgaatctcccttcacctgtacactactagtgctagtgtgctacatacagcactgttatacgtacgattgtttttgtatgacgtttatacgatgaaacgtttctctccttactcctaacgttttttagcgatgaaacggatccctcccctgttgagtccatatccaaagcccaagctctaatgcgctggtctgctctctcgttggcatgcttgcatagccaaccaaagcaatcttctttctatctaattatatattaagcaattttcgtcctaattatatcttatatggtaattgtacttagcgctcctttattatgtggcaggtgaagcaaattactcatacatatatgttccttgcaccttggacagggatagcatcaaccatagttgaaagtagattctaatggccaaaattagaattggatgcagaaaaagttcatatatatatgaaccaatgtcaaacaaggtttgcatatgtttagatacagagagagttcctagagacaaacttaaagccaaagtatagtgctgctcagcacattaattgatgtcacatggtgatgaagcagaacttgtttcaaacattccactcttttagtcatgaggtagaaggcccaaaatatcttctattccctttagattagacagtaaatttagttagattaaatactacctggtagattattctaatataatctcaaagtatagatataatctcatgtcagatgctgcaaaaggttaattgggctttcgggcccataagcgatcctgccgcgtgtgcgtgcgccgcgcgctcgcgttaggttcccctgccgtccgcgccgttacgtttgatcgtacaaaaattggaagataaaaatcgtatgcgtagcattttccgtgctacatatcagtaataatcaagtttaagtccttaggtgactaatatttaagctgtataatttattatggtgtagtgttcaatcataaattaaacctcaattcccgtagtgtaatttaccaatccatttcaatttttaaatttctataatattaactaatatttgcaagatagggagtttgttgcttcttttgacaagatctaggtttatttttattatttatcagatagacttttagcttggatgatattatctctgcttataatcatactgcttagtcctcatatggctaaattaaaatttagagtaaatttcactttggacctgttttattgaccaaagtttcaccatgaactatgtctaactctaccttttcagttaacaccaggtattatgattaccttcttttgcaatttggacccgggttttaagacttcggccacttgatccgagcctagtgaactaagttcagggaagagaaatattcgatggaaact

SEQ ID NO: 48644 - DNA, 1515 bp, Oryza sativa
agttttaaggttgcaattttgtcagaattttatcttttttgttattctctatgtagaatgaatttggagatgcgactttgcacgtaaatgtaatcctattgaaagtatatgtatctgttttcctagaattttttgtgataatttttagttggtgtacacggtgtgcacacgtgagggcctgtgtgcataggatacgctccctatatatatatagaggagttggattttttgcacgcgagttcacatgtacccacaatctacaccctatatgcagcttgcacgaatcttagagcgagtatattaggtgctaataaaatgtaccatgcatgatgtttacgttatactattttttttacaagtgtaaaataccttgtttatgtaatttttgtatttcttgtaggcaaaacttgtttatgtagtttaccttgtttatataaattaccttgtttatgtagtttttgatggtaggatatatatcattttggaagtatcatttttgcaagatgacaatttagtgatatagtagatatattgttttctcattttgactaaatatcatgttataaacaaaataacggttagagaaatacaatacactagatatataaatgtcatatatgattgttattgaaaaagttatttggtaaaaaatacaacatacatgttatacatattgtgaactaacctaatcctaatcttttctccctatagtaagcattcatttggttaaggttaggtacattttgcagcacgaatcttaaaacacatcaacggtgtagattgtaggtacatatgaacccgagtgcaaatatgcattttcatatatatatatatatatgtatatgtatatgtatatgtatatgtatatgtatgtatgacgcccggatgggactccatggagtatgggctccaaacttgggagctgttggatggttgctaatcggtttgatcatttgattgcaagagcttaatgggtatagacccgtttagagtacaggatttactagttaatggattccatatatttgaatagattaaaacaggaattaatgcatttatatgcatgcatgcatgcagtgtggatgagagaatttccataattgcatgcacatttcaaaaatggaaacattaaatgtccgtgtaattggaaataatacatctaaaataaggaaacttagttcattgcacgtacatttcaaaaatggaaacattccataattgcgtgtacatttcaaaaatggaaacattaaattcccataaaattggaaacaatatcttgtaagtacggaaacttacgtgattgaacggtgaggtttgaataaatggtaatataatggtgaaaaatggaaactaagtatatggataaattgactttttttttctgcgaactaggtatgtgtaatactaaatactaatccttcgtgtttggaaagtaagtatatggaaactaagtaaatggaagttacgtgcaatatactgatccttcgtttttggaactaagtatatggataataa

SEQ ID NO: 48645 - DNA, 1876 bp, Oryza sativa
agtattaaaggaaggaagcctgagacatgaataaatatgtcatatattatgtattaagttagtgatataaacttaggtatagatgtagataatgcctaattgatcgatttaatatatgatggacacttgacaaatatattatttattgtcagtatatatatacaggataaaaattccatccatacaaacaatatactccagatttggctagaaagaaagtagtatgtgataaatacgtgtatgtgatctaaagttagttgtactatgttatattttgatatgctccaagaacctaaacttctgtatacttatatgttcccgtgccaggtaatagtggcaaattaaatgatcaaatcatatggagtacataataaataaattaatgtgatgtattgtgacaattatagtttgtataattactagataacatgcacgaaaatcgggcacaagacttgtactaatttgattggaaatatatatcttcatatcaaaatggttttttgaagctactaggtgccgtgtggcaattattacaatatttgatactctaaaagaaaagaccaaactggattattaattgacagatggcttgcaatccttgcacgctttcaggggcgccggattcacctgatcttcagattgatccccatgagcctgaacgagcaacttgggaggatccactctaatcttgacatcagtgagtttatctgcgtctgtctcctgtgatcagcaaacaagggaaatgattatattggaggtcggaaaaaaaagaggtacggatcatgatgcatgaataaaattggaaaaaagaaacccaagaatcgttttgatccgattcatcatctattattttctgcgcattttggaggtattcattctcatcttgcaagccatagtgattgacaaaagccacccaagcattttcaaactcctgtgctgtgcatcctttatcaaggacagagggcatccaatactttgcaaaatcctgtgatgtgtgtgcttgaccaaccttgtcgacgtttgatcttacaattctagtatttgcatagtatgggcatcgtcggtgctaggatatacgcgagactgaggtaaaagagatggagacgaggatttttataaagattcgggcccctgaactgtcaggtaataaccctacatcctgttggccggagccggagttacttttattcaccataatcacaccagtacaatatgtgaggtagcctatctatctgttgtcgacatgccggtttaaaagtctgactcgtagtcgacaacaggggtaaccttgctcctcgagctcgcgcccgacgaaatcagagacagtgctagatccctacggacggcctctgaaggtaccggatagagttgatccaggcgtatctctgatgtcgatatccggcggcttgtcttggcgtatgttggcttgtatgctgtggcttctgttgttccgtatattgtggtaggtgtgttgattgtggtggtcgtcgattgtgttgtccgtgtcccctctcctcctagggggtcttgtatttatactcataggtgtctccttgtccaagtagaattagggtaaccaatatggatacaatctaagtagttcttgtcgtttccatgtagaactcgggttgtctttccttatccggaactcctcctatatccgcaggttgttttcgtataggacatggtatgtggtgggtcctgccgagatgtagtcgactactattaggtatgtggtatccataaccctgacaattattaattgacagatggcttgcaatccttgcacgctttcaggggcgccggattcacctgatcttcagattgatccccatgagcctgaacgagcaacttgggaggatccactctaatcttg

SEQ ID NO: 48646 - DNA, 541 bp, Oryza sativa
cgatgttgatttttttatgggacatttaaccttttatctttattaaaaaaatttacgtaattataatttattttgttgggagttagtttatgacttaaagtattttaagcatgatttatatcttatacatttgcataaaacttttgaataagacgaatgatcaaacatgtgtttttaaaagttaacggggtcatttattaaaaaaaaggaggtatgagtagaattgaagtggtagtttttattctgaacaatcctgaatttaggtttctatcctaaacaattataaagcatttaccgataaaaccgaaaagtcccctattttcatgtgcggctcctcaaaaggaccatacggaaaaatcaattttcacatgcgagcctcttaaatggaccgtgggcctattttcgcaggtggttaagagcaaggctaataatacagccgacatgttggctataagggtctttatagtctttctcagcctacccatataatagtagatctttacaattaatatatggcataactggctctctcacggagttt

SEQ ID NO: 48647 - DNA, 714 bp, Oryza sativa
gggagaggagagagggggcgggagatgggccgaattcggcccattagagagaagtagggattttagggttttctttttataaaacctttttaactttgtttatttcttaataattattatttgtgctttgaaaattccactaaaattaatttacacattttgggcttttaggaaatatacaaaaatcctccaagccctatttgacttttaactttgcacattttaatttttgaaggctttcacaagcattttaattattctaggtataatttagaggatgtattttagggtcgatttgggacgcgacaactggtacaggtatggctttgaataatttgtttgcatgattattagtaaggaagtcgtaaccctgttgtagagtccatagccttcactcgggatgagcaaatgttaagtgtaggggtgttgttgacggtcattaaatcataatatttgaccgtcaatacctacatataatgaaacaaaacatggtatccaacttagtggtagggattattactaatcaattccactagtgttggtgaaatatgtgtatgcacgtattttaatgagaaaacacacccgacatgcgaggaaacacacctccgaccaatcagacgcgagcacacagattggagggcccacaaatcatgtgaaaccggccgggaacggtcataactgccataaccgccatcagggcccaccagtcattgt

SEQ ID NO: 48648 - DNA, 574 bp, Oryza sativa
tatatgacctagtaatgagttgtagtggatccttatctttcttgaaacaaggataacaacgaatcattaaagctttctgaacaaattgcggataacaacgaatcatcaaagctttctgaacaaattgcaatggaagctggaagataagaaacatatgaccagtacaatataaaatgtaaatgtgtagtcttttgaatcccccattgtcaagccaaaactagataattcttcccttattggcttgacagttcattttggcaaactgtagtgttgggatatgttattatgtaacataagaaaatagcaaacataaactcagaaaaagagtgggatgcttgctccatatgtgactattaaatatacactagtacactatatattttgattatgaaggcatcaggtagaggtgtctgtttcatataaacttacaagggtctacgtgccaagtgaaagccctcacaaaatggccaactcaatgaaattgatgtccttacacatccaaatgaaattgatgtccttacacatccaaatgaaattgatgtccttatacatccattttgataacatgatatct

SEQ ID NO: 48649 - DNA, 530 bp, Oryza sativa
tatgaattgggaggtttcaaatctgcgatataaagccaaattaataggggggaaaatatgacagaattggagagatgaaagtagggaaatgatttttgcaatcaatttggaggagagacgtctggggaggcggatcaacctcggtggcagtgctagtgctagctagggagaggggaactgaattggcgggttggaggtggaagacgacgacgcagcgacttcgtggactggctgagccgtgcccacctaggccgagcaaggtatacccgggagaaggaggggactttgctcatgagccaacggaggaggacaggaagcggactttggctataatcggcccaaagagagcacatacttgtctttaggttttttattttcataaactctgaaatttgttttgctgcatattttaggatgctctgagaaaatcaaggaaaaactgaggtgacattttagagcatggagaatttaagaaacatactctaagccacattcaaacttttcttgcacatgttcttgaacttttgtca

SEQ ID NO: 48650 - DNA, 807 bp, Oryza sativa
actttaggtgcataaatttactaaaataggaaagtaatgtggtgcctaaaaaggaaactatgtggaggagggggggatgatcactaggggcgatcgattgcccgttagcctttttggatgtttcatgcttacgtaagttttgtatgtaattattgctagtggatgatgaggtggcatgcttgcatgttgaactttagaattagtgggctataactttacagtaagataggatttcatgttggacacaagcctagggactagggcacaaaccatgggggccggcgcgcatcaatgcacccttccggctgtgagaactatagtgggtgccatcctccatgttgggcacaagcctaggggaagcggcggggactagggtttggaggaggcttctagtcagtgtatggatgttaggtccgaaagctagtgagagaaggcatcaatcaaatggcaaaattctttttttcattttgtatggtgccttgcagaaatggaaaggcatgtgtgataaaaccaacaggttattcccatcgcgtctttctttcaaggcatgtgctttatttaggccatgatcttgtaagcgatggcatggattgcatgcaagatggcacttgagattgttgaagcttgccttgttagccctaaacaagactactatgccaataaatgtgtaatgccacttagatttgtagttggttgaaagggtcaattcgacctagagggggtgaatagacaattaaaatttttaagtaaaaacgaaagcaatacttttcggaagtgaggggatcctctagagtcgacctgcaggca

SEQ ID NO: 48651 - DNA, 711 bp, Oryza sativa
aaaataaccattttaccctttggatgaacataaaaatttacgaattacattattggaaatgtaaaagtttgtcgcatgagactattatagttatgagtttgatgtgtgacacattatttatgacaaaatatttttagataatgaaataaaaaatacgtatttattttatttttaaaagtcataaaaatgaggagcatacatacaaagataggactgcgaatgctcaccatattttttttatgaatgctcccgataaaaaaaatctattgttctattaaattttaaataaaaatttttatttattacatttgttttattttcaaaatttatgttaaaattttccgcactaattatttagtcccattttctacataaaatgcacatattctgcactcaagcaaaattttcaatcgttttcaagcttatattcaaacctaaatcatcaagggcattaaagacatttgccaccaacttaacggtgaaatgaaggaaaatgtgacggcaagggcatggaagggatcaagttaaatatcaggggtataaaagggattgagtgatttttcaggggtatacaggaaatttactcctataaatcaaatacaatgtgtataatttatatcaattgttcatcactatgagcaattgtgtagctcgacatacatgtacaagattgtaccaaatatgatatgatgattagagtgggaataattt

SEQ ID NO: 48652 - DNA, 1363 bp, Oryza sativa
taaaaaaaatgttttcatatttttcccgcttctgactccgtctgtttactcactccataaataagagtaaaaatttgttctaaaagattcttggtggtagagtgatctactagtcctgaatgaatataatctcttctcatcgttacgtattaataaacgataagtagtttttaatcattttcaaaatatatttagattagctaaaacacttatagttatttagagatggatgaagtaactttcgaagaatggctgctgccggtcgaaaaaaaatcggccggtcctttctatccagacgtctctctcaactctacgcattctgcacatgtactgattagtgattgaatatcatgcactttctcactccaaagaaagcacgtgatgcacgaagagagtatccaaccaaatccgactagattacgcccctacaggaggaagaacaagcaaaagatgtagacaatctaccaacttatgatgtgtatagatgacatgtgccagcaatttagccaagatagaccaaagccacttttggaaaggtgagtaggctgagatgaagggcatgttttaagaaggtaaattttgctacaggacactgcaatttcgtggttttagccgtaggacaccgcccgaacttacttttgtgggaagacacactataaacgtggtaatttgtcaatggacaccgcgccgattaatagagagaaatcacgtgaatgtcaaaaatgcccttgggcccacatgtcagctctcctgtctctctctatcccctccttccaacgtctgatgcgcagagcggagcaacagcgatggcgggatggcgcgggcacgttctggcaccggccctcgccttcacgcctccgctgccaccgaccatgtccccaccatcatcctcaacaccgcggagtccaccaagcggcaggtcaacgggatctcctcctctctctctatgcgtctcagccatggtggagaaggcaaactcgacgtctccgtcgcctgctgtttgccgtggtagccgcagcagcaagtgtacgatagcggcggccttccgtcgccgacaagcccgctcgaccgtgcggcacttcacacggtgccgtcgccacgcagtggcgggtggcgccaccgtgacgcgggcggggtcgggctcgacatcctgacggcgctcgaggcgtaggaggaggaggaggcgcaaaagcccgcggtgttggcgtcgtccttcgccgccacgaccacccaacaccgcatatcagacgctggaaggaggggatagagagagaggagagataggagagctgacatgtgggcctaagggcatttttgatacttcacacgttttctctctcctctccaaccggaaattattgtt

SEQ ID NO: 48653 - DNA, 2044 bp, Oryza sativa
cggggtcgggctcgacatcctgacggcgctcgaggcgtaggaggaggaggaggcgcacaagcccgcggtgttggcgtcgtccttcgccgccacgaccacccaacaccgcatatcagacgctggaaggaggggatagagagagaggagagataggagagctgacatgtgggcctaagggcatttttgatacttcacacgttttctctctcctctccaaccggaaattattgttctaatcagcgcgatgtctattggcaaattaccacgtttatggagtgtctttccccaaaagtgagttcgggcggtatcctacggctaaaaccacgaaatcgcagtgtcctgtagtaaaatttgacttttaagaacgagtataataaggtgatgtaaatgggctgtacaagttgccacatcacatttatgcttatagaggaaaaactaagttagagggcagtagcccgtcgatccgccatccatcaagcatcgaacgctcgctactcgctcagagaaaaatgggtgccgccgatgcactactcgctcgctgtcgttcaccgcaccgctggcttcagctgttgttaagttaagtatgccgcttgtgaagttgatggctgggtagcatttatctgtgtccaagctgtttggccagaggagcaagaagcagagcaggaagccaaggtcctaggggtagggatcgagcaaccccgccgtgatctttagcttggtcggctggaatactagtccgtcctcaccgttgaggagctagacgaggaacaaattgaagaaaaaaaacactcgttttctcttcatttcatggccgcaaatttcttttcttggttaacacattacactctcttgatgtcttctttaacaaatggaaagaaagcgtcatcttcgattggttctactctgccctcgccggaggtgacatcgcgtgccccacgcacggggaacatcgacggccgacgcgctccaccagctcgagaggaactcgaggaggttgagcggcggttccggcggccggagctccctagcgacgtgggttgaacgactgggcgatgcgcttctgggacaaacgacaaaggacgaactgcagtggagcgaatgctgccgtgccgttagatacgggattctggagtcggacctccacgtagccagagtgcagcgaggctcccgcgcgcacgacggcactagggaggacgcggaggcgtgggacggggtcaaggaagagggtggtggcagagggggcttcatcgggaagcacgggttgtggccgtgtggcgacggcagcataggcctcccctccctcacttgtggcagcggcgcggcgcaccaccggctgcactgcagcggctcgtggtggcgtcaacgcgaagatgtgggccgttttttatttgccgtgggccgagcctgtctgctgtgcgtgtttaactccgttggatgctgaacggatggtcgagcgctgccggacgtccctctgacgtagcgagtgcgggcagtctcgcacaaccaaaaaaggacaacgctgggaaaagattaatgattactagtgattaagtatcttaattaattactaataatgctaattaaagaaataataataaataattaattgctaaggacgctaattagcctattaattgcgctagttcggatgcgaagtcatgtctcgcgcactcgtcacgtgaggttgagcggtctcgcgccctcgctctgcgagacagttgcgagtctcgaatctcctggcatcgtcctacgacaacggtataattatgcaaattttttataaacgtgtatattcatgtaaaaccagtaaaaagagatatatttttaaattttttcccacttatgacttcctctgtttactcactctataaataaagtaaaattttgttctaaaaagagattcttggtggtagagtgatctactagtcctgaatgaatataattaatctcttctcatcgtttcttttttctcgttttctgtacgtattaataaacgataagtagtttttattcatttgcataatatatttatattagctaaaac

SEQ ID NO: 48654 - DNA, 827 bp, Oryza sativa
cagctaatagaaatctttccgcggatgcttaaagaaacatactagaaataggaatcggagtaaaaaggagaaacgtacttaggaatcagagtaaaaaaagagttcgagatcaatacgactaaataaacggcctgtacatatatgtgaaaccaaccaatctgaaaaggaaaagtttatttctaaccgggatatttaaattcgttttgtctatatgaagtatttgaactttttctcatattaaaattaatgtattgatccacagcttgcgttccttaaaaacgaactcatgtccatgtaaaaattagaacaatactgcctccttaattaatacggagaaaaaaaagaagagtctaagtagaaatacaatataaaaataactgaaattcggaattaaaaatatacaatattgaaagaggagtctagataggaacctaatacatgattaattaaaattcggaataaaaataaaataaattttgaaaatagaaagagtaaaaaataaaagttcgagtagaaatacaatttaaaaataactgaaatttggaattaaaaataaagaatattgaaagaagagtccatacaagaatccaatacaaaattaattaaaattcggaataaaaaattgaaattaaaaaaagaaaagaaaataagagttcaagtaggaatataatttaacattaacttaaattcggaatttaaatataagcattatttcatgactacatataagaacccaatagtagattaattaaaattcggaataaagaataatataaatccaaaattaggaaaattaaaaatagagttaaagtaggaatatagttttg

SEQ ID NO: 48655 - DNA, 620 bp, Oryza sativa
taaaagcctggatttacctaaaattccgtgattctttttgcaccaaatagcccaaaccccaaaagcgatcaaaagaatagcaatggtagcagctacaggtgggacaactagtacaatcagagaccttttggtctcaactgttactcagacaaaaaaaaaaagacatagagagagatcagttcatgctcagaattactcccttcgctgacttttctagttaaaacttctttagattaaatcaaatttatataaaaaattaaaagagattgcgacatcaattaggttcattaaatataatattaaaatattttgataatatgtttatttgtattgaaaatattgttatatttttctataaactaaattaaacttaaaaaagtttgaataggaaaaagaaaaggtgagagtgacttatattcgagagagtatcatatgtcggcatttcttttacggtgacatcaggatcgttactttgttaaaaaaaagaactgttactttgacatttctttcgctaatcttttatctggggtcattttcattcaaaatataggctcggattgaaacccattttcattattgttttagaacataatctttcaagataaaattgaaataaagca

SEQ ID NO: 48656 - DNA, 666 bp, Oryza sativa
atgcatgcatatatcaataccatttgcatcagtaatctggtccataacatttttgtctgctttacatttgttgtctacttttcttgtccagctctgactgcaagattgactgctgaggctgagcacccaagagttgttgttggtgagatcagtgatcctcatgtgccaagtggttcacaccaacaacagagctcttacatggacaaactgcagcagctgcttacacagaggcaaccatcacaaacccaacaaaatcagccacaataatatgtggaacttttagggtgatttctcattagagacttttgaaaggcttattgattttttttttgctaaatgttgagtaatacatgtgtggagactttcaatgtacaactagaagataccccgtgcgttgctgcaggattacagaaggtttattcagaaaaagaagtatagtttataaactatattcagttattcaccagcaagaagtgtgttaccttcagtattttaggttcagaattaggcttgattggaaaacggaaatctaacatagcctacatttcatagtagaaaacgatcatgccaataaggaccaggccagtattcccatgtgtggaatttgttcttggtcaacacaaacaaaaaactctacactggaagacaaggacagtggcaaggtat

SEQ ID NO: 48657 - DNA, 643 bp, Oryza sativa
  unsure (1)..(643): unsure at all n locations
atcatcatattctacaaaattctcacgttccataacttccggaaagtttacaagataacccacatagccgcctccagaaaaacccttttactccaagattcttgccactaattatcatggcattttgtaaagagtccaggtatcgctgacaaaatgaaccgggaaaaacaggaaagggaaaaaaagaaccaagcaacgttttctaagcactactctacaattgaattagcaagggtcactattacttacacaatgtacaacagatctgacctgttccacctgtacactcaaaacaagacttaaacctaagcctaagaactccagaaatctagtttactcaaaataccaaggctattctaaccacgatcaaaatgtatgctaatgcatatctaactttaatatatctgcactagtctggaatactcctagaaattggaggaaaagttgcaggtttagatcactaggctgcctctcaaattcagaatgtggctgaccaaccatgagataaaaggtggcttgtcagcaccaagcatttcagtgcccttctaagcctannnnnnnnnnnnnnnnnnnnaatctatcagggtcagggctaaagagcgaataatcttgtatctccagatttgctaaatgccaattgacg

SEQ ID NO: 48658 - DNA, 646 bp, Oryza sativa
ccattgctacgttgtactagttcgagaaccagcgagcgagtagaattatctctcgaacaccaatggaagttgcggtgcgagagattgctacgtactggttcgaggaccagcgagcgagtagaattatctctcaaacaccagtggaagttgcggtgtgagagattgctacatactggttcgagaaccagtgagcgagtagaatcatctctcgaacaccaatggaggttgcggtgcgagagcttgctacgcactggttcgaggaccagcgaacgtgtagagttatctctcgaacaccaatggaagttgcggtgcgagagattgctacatactggttcgaggacaagcgagcgagtagaatcatctctcgaacaccaatggaggttgcggtgcgagatattgctacatactggttcgagaaccagcgagcgagtagaattatctctcgaacaccaatggaagtttgcggtgcgagagattgctacgtactggttttcgagaaccagcgagcgagtagagttatctctcgaacaccaatggaagtttgcggtgcgagaggttgctatgtactggttcgagaaccagcgaacgtgtggagttatctctcgaacaccaatggagggtgcggtgcgagagattgctacccact

SEQ ID NO: 48659 - DNA, 1193 bp, Oryza sativa
cactgagatagcacaaagacggacatatcaacctggcagttcaatacaatctaacatgagtatgtaataataagaaataaaaaggttccattgttttagttgggttgatgaagtgtacatgaccatgttacaaaaaaaaaaaggatgggtggccaaagttacaaacacagtactggaaaaaccatctttcgtgggttggccaaaaaaccgtgactaaaaatcatttttcatcccggttcaaaagcccaggggtactttttgatagatcattattagtcccagttcaataaatggcaggcggtgtcagacccctctactatctttaggtccagttggtgttaccaactgggactaaagatctaattttaatcccggttgttaaacaaccgggaaaaaaagccttgagccgcgcgcgcatgcaagtctggttctctctctccatccttatttccttctcctctcccatcccccatccttatctccttctctcctcctcccctcctccccttcttctctcactccatctcctcctcccctctccttcccttcctcccctcccctctggcaggcggcgtgatgggaggccagccagtggcagcccagcgaaggccgggtgcggggcggtggcctcgccctcccctccgccagatctggccagaggagaggcggtggaatgggtggctggccggcggtgggatgggaggctggccggtggccgggtggcacatgacgatgtggattttgatttgtttgagtttttcttgattttttttgatgatttgtggatgttgttgatttgtgaatgtatatgtgaatgtgtttgtgaatgtttatgtgaataaatttccgatgatgtgctgtgaatgaatttgtggtgttgtgaatgaatttgtgatgatatgtgtgaatgaatttgtgatatctgtgctgtgaatctaagatcatgaaaggaggaaaaaaaagaaaaaaaaccgaaggaggaaaaaaaagaaaaaaaccatagtcccgggactaaagatggttgttcccaaccgggactaaagatgcatctttactcccgggtatttcaaccgggattaaagatagcgatctttagttccggaatcttagtcccgctttgcaacccgggattaaagggggttgcaaaccggggttaaagagggtttccgcagcagtgacatgactagtatata

SEQ ID NO: 48660 - DNA, 1493 bp, Oryza sativa
cggactgcgatgtgcggaggagggtggcggctccgaagggggaggacgactgggcgacgaggtggaggtgggtagcggcggagacgacgcatcacaaggaggagccgacgacgtgtagggcggcatcgacggtggaaggaggatggcggcgctcgcaacttgcagcatgtgtgcgcgctcgccgcctccaacgacaacggcagaggaggatagagcgggcaacaccccgtccaccttgtcacccatcttcatcccagcgtggacaccaccatcgtgctgccccgtcgccgttggcaaccctcccccgcgtgctcgcaggccgcaaccgcgctccctcgcatgctcatggcctgccgccggcgagcactggctgccgctcccctctctcccttcctctctatcaacaataggggtattatggtcttaaaacttctcaaagtggcaaaatatcctaaagacaacctattgaatggcattttatccttaccattctaatgggtggcattttaccgaaacctcatgaaaagagtggtataatgtcctttttctaaccgagagggaggaaaatggagtttgactaactgttagagtgttgaaggttgcgttcgctagcttgattggtgatctgaccatggcatcgaagacgcgagcgttccgctccttccaaaccatgcatccaagttatcgaaatgatactgaaggactatgttggttagtaggctgaactatgaaagcttaaaacactgcttgattaagtctcccagagcttgctgggtgtagggacatcgcatgaatagatgcagacaggtcactggcaacaaggtgcacaatggacacgatagttggcttaccagccgagctggttgacgttgtccgatgtcaagcagctttctctggtcgtcaagtacatgaagaactttcagctgtctaaactttttgccttccatacgattttgccgcaagatgcatgccaatgttttgccaatgaagagtattggcaagaaagcaagattccaccgtagggtccttatcatgctgtaaggctatccacggcctctattgttgtgtgtggcgccactatacacatcgcattcgccggtgtgtgagtgtggtgttgcgttgtagtgctgtgcatgcgtgcatatctaccttgtaatcaaattttaagtcaacttgtggttttagatgtcaaaatttcagttttgttttcgacaatgtcaggtagttccagtcctacacatgtgcaacttgctttgtgagagcgggcaatgcaacgaggctgagtgagaagagccgtaccatgattggattaaggtgaaataaatagctatatttgtggtgtcatatttttttttattaaaaacagttaaactttttacaatacaaattacatacatttacaaggtatttatgttataaaatttaagactgtatttttcaaaaattttctactgcacattatataagagaattaggataaaaccattgattac

SEQ ID NO: 48661 - DNA, 1112 bp, Oryza sativa
atatgtgattaggaggcgtcagaggcctatagtatcaggtaacaattcgtaatactctgaaagtctgaattcctgataactattttgttcagtttactgggattttttttgccccttgagatgatgacccatcgtttctcccacgtcaactgaatagtcatgaaaaaaattgataagatagattaacatatgatatattgctccatgagacaaattaaacttctacaaattataaaaaaaaaacttctaatgtatgaatactttaatttgttgttttctacaatttgtagaggttaaaatttaactttacatgtactattttttatattttttcataactatttagtcgacgtgcacaaacgagaatttgactttatatgtaatatattttatagttcttttgtttttttaataactatttgacgatgtgctacaaacgggaggcgtctagagaggagaaaatcatccccatagttttctactccctccgtttcaggttataagtcgttctgactttggttaaagttaaattattttaagtttaactaagtttgtagttaaatatagtaatatttataacaccaaattagtttcatcaaatatataattgaacatattttcataatgtatttgttttgagttaaaaatgttactacttttttttctacaaacttaattaaacttgaaatagtttgacttttaccaaaaacaaaacgatttataatatgaaacgaagggagtgctttgatatacaagaaggtgtaaatcaatgcaattatattcaccagatgatgatgcgggcgttccagctgctactgctgctgttcatgctcgtcctaatcctgctttggctgccccttcaattaatctgtctagtgtgaaggaggctacagggaatttctctgaaagcaatatcattggcagaggtggtttcggcattgtctatcaggtctgcacttttttcaacaatttgacacctttatgtacgcaaactaagttacgatttgacttcactaccacaaatcttgaaatgcaaagtctgcattgaaacatctgattttacaatcaccaggggaagctgcccagtggtagaaaggttgctgtaaagaggc

SEQ ID NO: 48662 - DNA, 591 bp, Oryza sativa
actaaaagtccatgaaactttctataaacgctctcaagccgccacgtggcgctctaataaaatagagaaaatcctagaaattctaagaaaaaagcaaaacatctatcccttaatttttacttaaattggtaggtccaatattatacaccgttagataaaattgatcttaaaacaaactaaataccatggtcccacctatcctcttcccacacattggcaggtgtagtatatacgtacgtacatacgtacgcctccttcccccccctttttttttcctttttttcttttttttcttattttttccatttatatatataatggatatatttttaaataattaatcataattttacaaacaaataatctaccatcatataacttaaaccggtgtacttttttactttgtactactattttcaaataatgcactattttaaaataaattttacacaattatatcatgtatactaaaagtccatgaaactttctataaacgctctcaagccgccacgtggcgctctaataaaatagagaaaatcctagaaattctaagaaaaaagcaaaacatctatcccttaatttttacttaaa

SEQ ID NO: 48663 - DNA, 640 bp, Oryza sativa
cccgccgaggcggagaacggaacatcgacgacatccgagctcgagaaggattctaatgcggccaaaccttgtcgttccgacatgaaccgcgagctgacgaagatgacttccgaagtgacaaggtcctggtgtcctatccacaaaaccaggaaacacactttgtgtcacatcctgattttcgtttcaggatttataaattatttaataaattattaatagaatttatattaaatgttctttaatttacaagtgaagttaaatgtgggaaataaaatttcctaaatataaagcatggatggatttaatttttattaaattctccatgattaagtcaactctctgaaattttctcggatttttcagagctcaactcttaataatacaaagaacagttcagtaattatttgatcattaatgatctaattataattgttaaagagcttttcttgtttaaaaatccttaaattataaattgttgtttaaaaggaattattagaaatgattttaaaagcttataagagaagatctaattttaatttggtaaaatctcaatataaaattgggctagataaaatttcattaaatactttgcttaattctataattcctagatttttctgggatttatttgagctaagga

SEQ ID NO: 48664 - DNA, 605 bp, Oryza sativa
ttgaagtcagaatgaggccgttcaagtctcataattcatctaaaaatatgatctacatgtgggattactttttatgtattgtttatttggtttttattagtctttttcctcgttttgcgtgatagcttgtcgtttccgtcgttgcgaaggttcgtgagtgcgccggaagtattcaagaagattaattgaagaccgattattgcaaggcaagtcacacagatcctaaacacaatcctttgagcatgttgatcctatatttaaattctctatttatttcaactgtgcatttattttcgaatgtcattgggtggaattaacctattctttgttatggcccttttgttcttgattactttattccttgataccttgggtgattataattggactagttgagctttatatatattggttcaactagatattagatatgattgcttagccatgcttagaaacattagcacacatttgggataactaatgtttcactatcacttatggttatatttaatggtagcttcacgatggtcaatcgtgattggttaattaattacttgccaactaaaacttgataatggcgggttgtgagcacatggttttgagag

SEQ ID NO: 48665 - DNA, 669 bp, Oryza sativa
actccatgcatacgttcaaatatttgatgtgacgaaattttcggaagtttgaagggggacataaacacggcctatataagttgggatgtgtgtttttgatgtatgggtccatgaggacgagtccctcctgtttggacctatatctctgactttagtgagaagctgcttccaagtacaacccatgagctccttcagttaaaagaaaaatcagacacttcccatttatgaacactttcctagctcaatgtttttgtcctctcgatttattaacttgaaaatatttcagctttgaaccaaattacctttaccaagccagcactacatcccacgaaacaacagcaacgaggttgaaacgtaaatagttgtagagctcaaggcatatctagtggagacgaaactaattttaccacatcatacgtgtgctagatgcctagatctttatttctataaatagaattatctttttttctgaatgagtaaagattgattgattttagtgaacacttctgcttacatggcttcttaaaatcacacacacacactagcatttcgatgccattagcaggtatactggtgctatacgggaccgccccatttttttttgcatacgatgaccatttataactacaaataaaaagcatatgccccattccttagctcatgagcatt

SEQ ID NO: 48666 - DNA, 764 bp, Oryza sativa
attatggatatcatgtattcatgatgtttgtttagtacttaagcacataattattacaatgggtcgttcattgattgttgcattgttgtcccttgcattgttaactcgatggtatattgcttgcatacacacataacatccaacaaatttaatccgtttctgaaccgagtccgcaccatttccaacatctgaaacaatccgctcagccgctctgaatccgtttagaaaatatggtttaggatatggtatgaccactatccatccgaatctgctccatttttacccctatatactagtcatgtcactgctgcggaaaccctctttaaccccggtttgcaaccccctttaatcccgggttgcaaagcgggactaagattccggaactaaagatcgctatctttaatcccggttgaaatacccgggagtaaagatgcatctttagtcccggttgggaacaaccatctttagtcccgggactatggtttttttcttttttttcctccttcggttttttttcttttttttcctcctttcatgatcttagattcacagcacagatatcacaaattcattcacacatatcatcacaaattcattcacaacaccacaaattcattcacagcacatcatcggaaatttattcacataaacattcacaaacacattcacatatacattcacaaatcaacaacatccacaaatcattaaaaaaaatcaagaaaaactcaaacaaatcaaaatccacattggcatgtgccaaccgg

SEQ ID NO: 48667 - DNA, 940 bp, Oryza sativa
cagtggaagttgcggtgtaaaagattgctacatactggttcgagaaccagtgagcgagtagaatcatctctcgaacaccaatggaggttgcggtgcgagagcttgctacgcactggttcgaggaccagcgaacgtgtagagttatctctcgaacaccaatggaagttgcggtgcgagagattgctacatactggttcgaggacaagcgagcgagtagaatcatctctcgaacaccaatggaggttgcggtgcgagatattgctacatactggttcgagaaccagcgagcgagtagaattatctctcgaacaccaatggaagtttgcggtgcgagagattgctacgtactggttcgagaaccagcgagcgagtagagttatctctcgaacaccaatggaagtttgcggtgcgagaggttgctatgtactggttcgagaaccagcgaacgtgtggagttatctctcgaacaccaatggaggttgcggtgcgagagattgctacgcactggttcgaggaccagcgaggtagtagaattatctctcgaacaccaatggaagttgcggtgcgagagattgctacatattggttcaagaaccagcgagcgagtagaattatctctcgaacaccaatggaggttgcggtgcgagagattgctacacactggttcgaggaccagcgaacgtgtagagatatctctcgaacaccaatggaagttgcggtgcgagagattgctacgtactggttcgaggaccagcgagcgagtagaattatctctcgaacaccaatggaagtgttagagttggtttattatgtgtgtatctcatgtggccaacatgactcacacacccaacttgtagcatatccggatgttcgttcgcaatcatgtcgggtgatcaagccgacaacgttcacgaggaattatccattaacaaccttttct

SEQ ID NO: 48668 - DNA, 660 bp, Oryza sativa
ctacagctattagaacctaagtatcatgtgatacctcgcaagtatcacatgacaccacacaggaatcatccgacaccgtacctataggtatcagaacctgatatcgtaagtatcttgtggtacctggtaagtatcacttgatacctcacgagaatcatctgatgcatcgcatgtatcgatgaatatcaagtgatattgtcgtaggctttccggaccttccattatatttgagggatgaagtgaataattcaagtcatcaaacaaacataatgaaacatccgacacctcgagagaagaatattggagacattgctgggcctttaacctgccagtcaacttcaacctgagatgtgcccgtcaaaccactcgaaggcggcgaccagatgtgttacacattcaggagacttgacaaaaatggctaaagatctacaacatctcaaatattcttaactcatactcatgtgaatctagttcccaggatgtgcaatagattcacactttcatctcaagcatgattatacatagcaaacacaaataagatgaaagcgattataaactacatctactttagttacattagccgaccggccaaataaatatatagaacagcggaagcttgtctacccaatccacaagcacaccgactaggggtttacccca

SEQ ID NO: 48669 - DNA, 654 bp, Oryza sativa
atttggtagactctgtatgagattgtacatgaaatatgatatctcgcactttgattatatggatgaatatatgttaagtattataaaaataatggatatatatgttaaaaatattatgaaaaataatgtgaaggaagatgattggatgttgatttgtagaatccaatgaattatagatgatgtgtggctaatgggcgggtaatcgcccagcgatcgcccccatcccccgatacgctcctctcccccttcctcctccccttcttctcttcctactacaccataaatttttttaaaaaaataagaaaataaagttagaaaaatttatgtatggaaatacatatatataaaatatttgaattcaagttcaaatttgaaacgggtatgtaaacttttgacttataaactttggatctataaactaatatttgaattcaaattcaaatttgaatcaggtatgcaaacttttgacttataaattttgggtctttaaactttaggtgtataaattttagatgtatagaaatactatatataaaaatatttgaatttaaatttaaatttgaatcgggtatataaacttttgacttataaactttgggtctctaaacttcggggatataaactttagatgtatagaaatactatatgtaaaaa

SEQ ID NO: 48670 - DNA, 631 bp, Oryza sativa
gtttatatttttagcacgtgtgctagaaaggtggcctagtgttgtactttctctggtttcaaatatttgtcaaagaaaaggataaacataaaagtataccaccatattatattagcaatgtgtgttgtaccgttaaccatataattttcattaacaataaattagttgtttaaaagttattactgattaaaattgaaatagtgatggtgaacagtgacaagtaactgaggacagagtgagtattaactgcaaataagtaataatactagaaaagggcttgcccaccattctacaccaaagtagagcccaaacaattctaaagcgtagatgcctttctctattattatcaagtttacaccaggcttgtttaccagataaggcactccatcagtgcatgactaattaggtgttaactatttcaaactcaaaaagaatggatttgttttatttcctaatgtaactttcatatataaagttttttttttaaaataaatgcaccgtttactagtttgaaaacatgtgtctgcaatccgcaataatcgaaggccctgcgagacgatctcgatcaacaagagggcactcaaccatatcctacttttgtcttgttctctccatatatctcttgctatcg

SEQ ID NO: 48671 - DNA, 1081 bp, Oryza sativa
  unsure (1)..(1081): unsure at all n locations
ttgtgaaccaaaaatttccatttttaaacctaggtgaaattgatttaactcttgcatgaataaaattggagggaaaattaaaactttttcatttataacctagaacaaaaatgtaaacttatgtgtaagcatacatactcgcataaaacatgttttgacttgagtccttcatgtgcatttggattttcgatttgcatttcataataggtctcatcaatattaactaagatctagataaacaactaaaccattagggcctagtgctagctagaggaagttaaaatagaaaccatacaccttaaaatatatcaacatggctaatgtcaagcctcactaaactaatttggctattcatctgaaagcatgtcatgaatatggaagttagtaaataaattaacttatatagaaaatattctatcttaattacctttatgagcatcctcttaatttaatgctaaagtaaacttatggataaataggtaagaagcttatgacatgtgtaaggtaaactgtaattctaacatatcaacatcaccttaggtccaaatataacttctataaatgtttacatacatttgcatacaagagataagtcttgctaattatctaaaataatttgtgcaagataaaatcatggaaaaattcatgtaggttctactcaacaaatacatatcactgtaattttggtacaatttaataactaaatttgatacctcgaataaatcagtcaaaccagtcaaatattagattaattataattctcaattggctaaaaccacaccttgtctaaaagtacatttacctgcgtggaagtgtataaggaaaataatttattcaaatactaggttaattatcatgaataaatatattttttttcagaatttatcttctctgtttaggtctcctaaaaattcaaactagtatccaaagggcccaatttcttctaatttctgtgagtaatctatccataatttttaagtacaaccaaaaaaaatgaaaactaggtacattcatataactncagtaaaatccacatgagcttttctgcactacaaattaatatatgaattaacaaagatgg

SEQ ID NO: 48672 - DNA, 546 bp, Oryza sativa
tttttcatgtaaatatgagcccaagtgataagtaaaacttttttaagcatggttaagcaatatagtgaccaagtggccatgtaactcatattcctagtagttttagaatatgattcctaaggttaggaatgagggagatggatatatgtggggttaaggtatatatgcaaataataggagtttgtctaactagtttaacaagattttaatgtattagtgtacaatcgacatgcaagatttgcaaacattttcaataacctccaaaacataggttcaaagtgatcaaagagagggaggtgggacttgccttgaaactggaaaaagtcagcacctaaatcacttcttcaccgtttaagcaatcatctatacaatgtacacgttatgcaattaaaaacactgaaatatgcgaaaaatccaaaatgctctaaaatgcatgatttgtgcacagtggataggtactggtctaaaatgaatttatgtgaaagaatttctattttatctcatttcatttgagagttatgaattttagaagtttcgtcggtatag

SEQ ID NO: 48673 - DNA, 760 bp, Oryza sativa
ctacgtagtgttatcgtgggtaagtacacacccggacttactgagacttgccacttggtagagaggctcaaatgttattgcctcacatcaaagaaaattaagttaaaggagcttaatttggttgatgtttctatagtcactaggaattccccacgctttgatgtttctataatcactaggaattgcccacgatgtgctggggaaattcctaagttaaaattatattagttattaacaacaaataaaactgatttgtcaaactatgttcatagagaaatacatttggtagactctgtatgagattgtagatgaaatatgatatctcgcactttgattatatggatgaatatatgttaagtattataaaaataatggatatatatgttaaaaatattatgaaaaataatgtgaaggaagatgattggatgttgatttgtagaatccaatgaattatagatgatgtgtggctaatgggcgggtaatcgcccagcgatcgcccccatcccccgatacgctcctctcccccttcctcctccccttcttctcttcctactacaccataaatttttttaaaaaaataagaaaataaagttagaaaaatttatgtatggaaatacatatatataaaatatttgaattcaagttcaaatttgaaacgggtatgtaaacttttgacttataaactttggatctataaactaatatttgaattcaaattcaaatttgaatcaagtatgcaaacttttgacttataaatttt

SEQ ID NO: 48674 - DNA, 526 bp, Oryza sativa
aaattctttcacataaattcattttagaccagtacctatccactgtgcacaaatcatgcattttagagcattttggatttttcgcatatttcagtgtttttaattgcataacgtgtacattgtatagatgattgcttaaacggtgaagaagtgatttaggtgctgactttttccagtttcaaggcaagtcccacctccctctctttgatcactttgaacctatgttttggaggttattgaaaatgtttgcaaatcttgcatgtcgattgtacactaatacattaaaatcttgttaaacttgttagacaaactcctattatttgcattatcaccttaaccccacatatatccatctccctcattcctaaccttaggaatcatatcctaatactacttggaatatgagttacattgacactagttcactatattgcttagccatgcttagaatagttttacttatcacttgggctcatattaacatgaaaaatgattttattaagttctggacagatatgaataaatg

SEQ ID NO: 48675 - DNA, 661 bp, Oryza sativa
aatttgggagagagcttcaccactagcggcacaaactgttggaaactcgactcatgccacacctaagttatcagacgaagatggatttggtaatcggttgggagtacgggtcagtctaccaatagcacagtgctgctgctgctgctgctagcaccacaatcttggccaacccaaacagatatcaaatcagctcataatgtggacgtcacatacccaattgatgagcacagatgatgaacacactggagtatttggaccatatgggatcagaggaactgcaaactagtgttccaaactgtcaaacatgctactgtatttgcatccgaaagaaagaacatgcatgctcccactgatgatgcatatgcgcatcatcatgcagggattcaagattcacgccgcgtgcgatctgatccccaatcccccctctccttttgcagtggaatggaatcccatgcctttactcgcacgacgatatgccgctaatcaacaacacctacccactcttttagatctgtcacattaaagatccaagaccgcacggatcttgcctcaagacgactcttcgatcctaccaacccattcaaacgaaacgggcccgacctatactagtagaaatccgcgaggaacaaaaagaagccggtcagccagcgacaaggaggga

SEQ ID NO: 48676 - DNA, 707 bp, Oryza sativa
cggcagatgtcgaatgaagcaaaagcaaaaccagcagctaggagagcaggcatggctgtgcgcaacttccgttgctagcgcagctgcgccaactagcaacccccttcaatgttttctacaggatgactaaaaataatatctgaatccacgctagttgtaaagaaatggaaattgttataacattgttaaagatagaaacactttggctatgtttggataatgggtttgggatatgatttcccactcctcaaagagtaagtttcaattctagccatccattcttctcactccatttcattctatccctccattcatttctatttcccaatcccacctctcctaacccattatccaaacatatcctttcaccattggtcatctactttgggcatgcgtaatcaaactttgccttacttgtccatgcaattccttgtaaacaagatagtggaatagcttgcacttgaaaactagtaaactattttccattatgaatttcgattgtttttagttaatacagatcacgtcccattcctttcccctctaccactcatttctctccaccaccttatccatatcctctccaccatccttctctctctcatgcatccttctctctctcacgcgaagctcaaaggaggagtggctggggtaggggcagcggcggcggtggctctaacgagctgcggcatcggtggcggctccgagga

SEQ ID NO: 48677 - DNA, 531 bp, Oryza sativa
ttttgcacagtcggccctgagttgcgctccatgcacttttgtctatggggtcggcttgtacgcaagtccctcggctgctggaaccgtgaaggtcggcatcaccctaactatgagggtgcagctcgttggttcctgcgatagattaatcaatttttttagaatattatatatcatatggattcggtaagtctttcatgtattgagtaagttcatggttaccgttatatggtcagcggcgctgtcgaccgatgttggattttccgccaactcagttgatgcgcaactgctgcgtttttgggtgggacttcctaactcttcgtgcgcagaagcaacggcggcctgggggttctattgctcttctcggatctcttgcctaatcttggccctcatcgactcgagcttttcatcgaattcagatgtcagctcagctcttatcgacgcccagatcttggcttcaaggcgtgcatctttctccgccttgttggaagtccgctttttgtactgccacgcgtagtctggaaatccatactt

SEQ ID NO: 48678 - DNA, 559 bp, Oryza sativa
accggttttgtcaaggtcaaagtcgtcttaaccatatgcattcatatatcagaaaacaaataatatatggcatttttctcgaaccaatatggggggttttttctgtcacattcctttagccattgagcctcaccaaattgatcttgagcaagccttgtttattgggaaaatgctctactcaagcccgaccggtgcggggggaggccgatcagatgcttcccccgggcaccctacccccacgtgcgcatttgctaaactcacatatttttccctttccttttacacaaaagatgtttcatctagtatatttacaacattatttataaatctaatgttgcagggaattaaaatattcttttgcaacaaaaaacccatatattttggaaactctctattaagggaatttggtttattttttggtccaaccaaaatgtttcacctagtgtacttacaatgtttcactatatatagatctaatgttgcaatgaacgaaacatttcattggaataaaaaacccacatatttggaaaccccctattaagggaatttgggttatttt

SEQ ID NO: 48679 - DNA, 637 bp, Oryza sativa
atagtggcggatgtttcggcggggaaaacgaaacgactctaggactgcggctatcgttaggggatcgggagggactaacggacccgggcctacacagaactttcagcccaacttcattattggcgaggttggacgcgatccttacggatttaagcatatatttttgccttggtaaaaattgctcacaacagaatatcccaatgccgctaaaaatctttttgatgcagctagataattctttggaattactacaatgcgaaataaaaaggagcccgacagaaaagtgtaatactaatttttttggccttcttaggctacaaagctggttgggttttattgtgatggctcatttcagaaggctattctgtcagcatgctatatgcttattttgctaatgacataagtcatagctgaggctattttgacttgccatttgacattctttatacaacagatgatgaaccctttaagagtggtttactcggaatcttatcatatatgctggcctatagatctttacagtatttttcactcgggtctttctctgacttttcaggcattttaaactaaagcagttggccggatattttatcaggtgccacatatgcttaactatataagcaccttggagagtcag

SEQ ID NO: 48680 - DNA, 558 bp, Oryza sativa
aacacaattatccctaaaactttctaaatacaatttttttataaaaatacgaacatttgaatatcgatactgtgcagttcccatcgataaaaaaaagttaaaaaaaaacttgtattcttaggaatttgggtaaaaatagcccaactagtagggaggcccaaaggtgggtatataagggcgcgcatgcagtcgtgggcctcccaagcatgtagctcgtagccccatccgttgaaaaaaaaataaaaggaaaaagtaaccaaggtcccttaacttgtcgttgagttacaaaatcatccttgaactgcaaaaccggatacaacgtgtcccccaacttacaaaaccagtgcaaactaggtccctcaacagttttgactacggttttaattgacatggcagctgactcatgagcgtgggacccacatgggtcccacatgtgtagacccccgattttgaaaatcggaaatcctctgtgtttatccgtaccaatccctggatcagtagttggtacacacatacatagttggatcacaacatatcacgaatgaattcaggctaaaa

SEQ ID NO: 48681 - DNA, 679 bp, Oryza sativa
gtatcagttgagtttgatttattaagtcatgcttagaatatcaatctctagcctgccttctggttgccgattagggtagtatcggagtttcagctgatcttatctgatttaattatatttgctttatatgtttcattgacatgttaaatctgccctttatgtcaggatattattgcatctaagtatattaagcttatgtttggtatattctgtttgtttcaacatcttaacatagtgttgtattggagtattagccgatacatactagatctatccgatcggctatgctataaacatatatagttctgttattaatatatatttcaatctaagtgatttatactgtctcgacatggcgaccgatctatcccaatcactcaatttaagtatagatataaaattatatattgttgatatctacagccgatcgagtaggtttagtactttattatctatttataaccgccgatcgatttacatatgacatcggctcaaagataaatgatatgtcatcggcacttagccgatcgtctatcatttataggtttaaccgcggtttctttgtctctatttcttgttgattgcaggatcaaatcaactggcacgctaacacacccgaaggcgagctttggacctgcactagagttaagcagatctcccaggcctcatgttttacatc

SEQ ID NO: 48682 - DNA, 682 bp, Oryza sativa
  unsure (1)..(682): unsure at all n locations
taaccacgtacgttggtcctcgccgccacagcaaccacggcngccacngaagctcctagctgactggcaaccgcttcaactgccacctccctcagccacatcgggcgccgccgccacctctgtcggcatcaccgccgctgtgctgcttgccagatccaggcgagtcttgccatgtcgccccatccaggagtacggaggaggaagccacgccgccagccaaccatagggcgccacacctccagccaatacagagcatcgtagtgatggctaggatttgaaaaactgcaactgaatctgaagaaccaaaggagaaggggaggaaaagaaggggagaaggagatgatggagaggaaacaaggagggcgggggtggcgccgctgccggctccaccgccggtgacagcctcgccggtggcagcagggtcggccggtgggagatccttggtggcgaagttttttggtctcccgggttgctccgtgggagcgacacggaagttggttcgactccttccgtcggtcacaacaattggtaggatcttagagaatctcacatgatcctacaaatacaatgatgcccttccatttcacagtatttctccttattataaccactttacctctttcaaactgtttaattactgagagtatggaaactctgaaataacatcttgaattctgtaatg

SEQ ID NO: 48683 - DNA, 668 bp, Oryza sativa
aatgtagtagttgaaccccacaaaagaaaagcaatttttttttcatattgtttctaactaacagtaaaagtgatagatcacattctcatggttatgaaaaatctggtgacttcactgcaaattctgtgcaaagtgcaaacacatgtttagatatctggagaacctatctcatgaacatatttggaaaagcacaatacaacttaagtttaaatatgttgaaaaattgaacagggagtcatttgaataacttgtgggggagaaactgggttgggaaccctgcaagctctttgttaacatatcacagacaaacaatagaaaagtatcattccaggtgtagtgggcaaagtggtccataccactacgagcatttgtcttgtgacataggctgtttctttagttcatttccattactgggtaaccaaaaaagtaacctgtagaaatttttctcatatgttcgtttagcagccattctttgaaaaaaaaaaggatattgttttgaaagaaggcagtatgactaagatgtcctggtatcataaccttccatgcttgtacattcctaccgttctggaaggtatattgaaaagtgaaacagcaatagtatacttggtgtggagaaacttcccaccacaagcaatgggcttctatagtcctataccaagatccatgca

SEQ ID NO: 48684 - DNA, 679 bp, Oryza sativa
  unsure (1)..(679): unsure at all n locations
tttggcaatttagaaaaaatattanctggcatatgatgaacatcaagagtatctcgacaattccagatttgcatcaaagtggacatgcatgaatggagggatggcaatataagtgaaaaaaaaaacagtagttttttttaaaataaattcagtcacaacccatcaatagactatcagtagcacagtgccgtgtaaaaataaagaattgcaaatatgtacaaatatgttcaagtgcatagcagggaaatgttgggctagttgtttatgcgcaatcaacacaatctattatagataggtgttcaggagtaaagaaaaactctcatattgtctgcaatatatatatatatatatatatatatatatatatatatatatatatatatatatctttgacttgtaagcaatactggtttagctgccaactggacctggaaaacgtaatcaaactttggagataattagacaaaaaagaatcaaatagcatgcaagcgtataacagtacctaagaagcattttgtcgaacatttgctgctcacgcaagagtgtgatgcaacatctcgcaccaaaggttattaccttgtgtctgttgcttgttaccaggattgggaagaaatcgtggttaagccgtttcaacaaacacccttgcaagcacagttaatcagtttgtctagcaatcaag

SEQ ID NO: 48685 - DNA, 629 bp, Oryza sativa
aaacccccaaaatcagtttcaaatttatggttgataattcaaattttggatgataagcataaacataagtgaaaagattatgccgatcatctttaactcacatcatgcattttcagccagtggacaatgcacacaaaaaccgccttacgaataactagaacagcatttatgagttaagaccgattgactcaaacaacaaagattcagtaagaagagcaaggagcatgtcatgtttgttaaactcattggcattctccataacatgattaagctcataacacccaagcatcaaacagcagaatcaatttacacaaggactagtcaagcacagcagttcacttcaaccctacatattctagcaagttagtgcgaccactaaccgaagtaaataacaaaataaaaaaaatgaagcaacagtagtacccaaccatcccaacccagttctaacccctaaaccgcccatggtaacatacatttcagaaataaaaaagaggaaaaatttatatgccttcatgtttgctcaagaaacgcaaccatcccaacccaactctaacagtccaaccctttcgtccatagaaacacgcactgcaaaaagggaaaaaacaacatatgccctcatgtttgctcaa

SEQ ID NO: 48686 - DNA, 665 bp, Oryza sativa
tatttactaataattggatatggatcacaattcacaagagcaagcaagcatgctgcactatagtgctactaattgtccaatggctgaaccggcttggatctggaggcgaatttgttgaccagttctagccactttcattgactaagctaagctcacacactccattgatctccttctttgcaagttgcaagtatgcaatgctaaaagccacaaattgattgtacaccatgatcagccaccactacaacagtggatccaaccatggagattttagtggatggctcaccacacatcccactatatgtgttcagggataaactttggtctccgaattcttgaacatttttctcacggatagtaggtttaggccctgtttagttcatataacaaaaattttctcgctgtcacatcatacatgtatggagtattaaaagtagaaaaaaacaattacacagattgcatgtaaattccgagatgaatcttttaaacctaaatgcgtcataatttgacaatgtggtgctacagtaaacatttactaatgacggattaattaggcttaataaattcgtctaacagtttcgtggcgaaatctataatttgttttgttattagactacgtttaatacttcaaatgtgtgtctgtatatccgatgtggcaactaaat

SEQ ID NO: 48687 - DNA, 1853 bp, Oryza sativa
  unsure (1)..(1853): unsure at all n locations
agtaaaaattgcaatataaataccaagtaactacaatgtaattgatacgcaagtataatgcaactgagatgtaagtacagcgtgtaattggtatgtaggtacaacggaactaggatgtaattactttgtaatgaatattaatataattttggctatggagacatggagtcagcacaactactgtgctcttttttttttaaacttaaacatccaataatataaaacgacagagttcatatgaataaatcccagtacattgccaaaaggataaagagaaagcataagaccatccgtttcgaaagaacggaaaactgcactaaggccacaatcttcatatagaaaccacacagcagagaaggtgcacatcgacagggagctgcagtgatgaaactgcactaaggcaatccgcgacgattgcgaccttgggcctccttcagcgtgcacaacgcttgacaatccggtaatccccatccggttgcctccacgaaacgacacaaaacggaggtctgctactgagccgtagattttggagtaagcatccccgggctcagcaagagatgtccacggagtccgtcgtcaaatctgaggagcgagagctcaacccgaacaacaaaccctgcatggaacaagccgataggaaacacataggaagaaagagcctaaatccaaatcccaatatccactaaagaactcgaatggtggcaaacgaattgctgtcttcgtggattgacgtacgtggatggggaagtgaanatctgcaaagcatgattgatagaaccatggcattggaagcacatgttcaggcaccagagaaaccgccgccacaacgctgacggggtgtcgcccgcaccacgagcggcgagctccgggcgacaacagaacagccagcaagggacacaggaagccgccgcagccgacgcaagaagcagggcggcggcctcccagctgaagacggcgacgcagccgacgccaccacaagaagccagctccatccatcaaatcgcccactgatcttcggatctcgcacttccaccgccaccaaccaacacctccgccgaccactccggcacctgtcacgccccgaactagtaccggtcggtactagcccgtgacgctccaaattaacctgttaatcgataccagtcccaggaaacagtgctggtatcacaggaagatagattatcacagcaacagaggtctctttattatagagtagaggtacagtcatgttgggctgcggacagatcccgagctcacaactgcattacaaaagggaagcggaagccaagacttggaccaaacatacaggcgcgacttgggaactaggccgaaaccctaaaactcatcgtagccggcttgctcctggaagaactcctcatcagtaggatccgcctcatcttcttcagcaactgggggggattatttatatagagcaagggtgagtacgggagtactcagcaagccatgggaaataagtgtttaatgcaggcttcaaggaaggctgttgtttttgcaattgattttatttgaactcgtttctgaaaacaactaagtgagtgcttctcaaacgacacggatgagacagtgcgtctcgtccggtcggagtatgtgcaatgtatcagtctttagaattgatcaagattggcacccagccagcgactttcaaacggccacccgggccaaccactttcaaacggccacccgggcctagctgatcccatcagctgcagattttccaaacatcgatcccctttccacaacagcaatttcacaagacaatagtcaaacaaagctacgctaggaatcacctcacatccgcccatgaccgtgggcacggctgttctaacagtttg

SEQ ID NO: 48688 - DNA, 585 bp, Oryza sativa
ctttttccggcgaaccctacctaatccgtcgccgattccatccgttcccgagtcgatctctccctcttctggctataaatagcatcccctcggcctcctcttccgtttgcctcaagtcccaagccgagccgtcgcttgtagcgccgccgccgccttgccctagccgccgccgacgccggtgaccctccagccgcgtcgcgccgcctcctcggtcgaccccaacctgcgccgtcgcctccctcggcttcgcaagggtgagagctaccccggccacccgttcccttgcgccgaatctcgccggaatcgctctccccgcgctcgccttctctctccacctccggccgccgctccagcagccccgcgccgtcgctgtggtcgtcgccttcggtcgccgctgccgccattgggttcgcgaggaggagaagaagaccgacctccacttccccgtcgtcgaagaccctgggaagcccgtcgtcaccgtgaagccgatccgttccatcttcagccgcgccgttcgtcgccgtccatcgccgccttcattcaccgtcaccaccctcgggatcgcaggagcgaggtgaagaccgt

SEQ ID NO: 48689 - DNA, 619 bp, Oryza sativa
catgctttgtcaccatcttgcgagccacacaccaccaggtagcgaagccagatgtcggagttgcgcatgcgagtccttaggtgcatccggactcaatcccacacttgttgtgagaagacgcaagcttagaagatgtgggtacatcgttggcagaaagatgacatcggggggctagggatcaggatcctctgcagtcgaagtcacgtgactttgtcactaacatatgagcctgatgatccctaggcccacatgtaagtgacaaaagtatcgtgcatttgactgtagaggatctcaatccgggggctaggtgccaacctcagcgctgcaaatcgttcgttgtgaggcaagcgccccgcatcacacaaaatattggagaacttgcatctcgccggaattttttttattttgtttcgatcaaattttcaacggtgcgatcttctcccgtgaatgtatgaatgcaggcatgtagtggcacccttagcccgttcaattccaaaatcttggttcacattttaggctgtgttttgttgggccggccctgtttataagtaaacaaggtaacaattgtggcccttgtctattttagcaaactgctatagtatcatatgttctttccttg

SEQ ID NO: 48690 - DNA, 1069 bp, Oryza sativa
tgttaggcgaaggatggatcagtcctagtatcggctctttcgaaagaaattgcacaaagcgactattttctgcattttattgatgcggcattagttggctattaggaagaaggcttttgtgttctcttatttttcatacacacgcttctcaaactattaaatgatttgatttaaaaaatataaaaaaattacttaaaatcatattaatttatttttcaagttttttaactaataattaataaattacgcgttaatttatcgttatgttttgcgtgttgggggagttagtttccaacttactataatggcaagtgatataaggttttaagcacaaactcactataatggcaagtgatataaggttttaagcacaaactccaaagtgtcatgtatacttaaatgatgatgtggaggagaggagagaagagaagagaaaagagagagagaaggagccacctctaccttgacatgataaaattttagagcttgccactagctgcactattgaccttgctctcatataaggggcaacctttacacaaactttaagaaacaagagaaaaagaaaagaaaggggttgattaggacattcctaacccaaaacactatacatagttttcacaaactccacatcatcaagaaactaatactagacactactcttccaatgcaaacaccactattccatacttagatttaatgctacttatctcacatgatgtcttaaatgttgtgtaaagaccatgatttttttctcttttcttatttattcacttgtcatatcatttttcattctaggtggcagcttatctaatgctatggataccatcctagtcattgggttgagaatggtgttagtggtaagtgtattgggactagtgtattaaatgcaatgcatttatataagttagttttaattttatggataaatgacgtggataaaattaaaggcggccatcacctttattataaaacttgccctcaagaacacagtctaatgggtcatcgtggagaggagtctagctgagtcagccacgtacgaaaagctttttcatcttccacgaagaaa

SEQ ID NO: 48691 - DNA, 717 bp, Oryza sativa
ctttaagaaacaagaggaaaagaaaggggttgattaggacattcctaacccaaaacactatacatagttttcacaaactccacatcatcaagaaactaatactagacactactcttccaatgcaaacatcactattccatacttagatttaatgctacttatctcacatgatgtcttaaatgttgtgtaaaaaccatgatttttttctcttttcttatttattcacttgtcatatcatttttcatcctaggtggcagcttatttaatgctatggatactatcctagtcattgggttgagaatggtgttagtggtaagtgtattgggactagtgtattaaatacaatgcatttatataagttagttttaattttatggataaatgacgtggataaaattaaaggcggccatcacctttattataaaacttgccctcaagaacacagtctaatgggtcatcgtggagaggagtctagctgagtcagccacgtacgaaaagctttttcatcttccacgaagaaaccacatagtggagagaggagtcaagctgggtccagcgaaagactaaaagctttcacctttaaccctttggccttccatctccttccccagaaaagtttttagaaataatattattttaataaaaacttgtaaaaaagagatcgattggctgaaatcacaagtgagattaaatgaatcatagagaagttagtgctct

SEQ ID NO: 48692 - DNA, 693 bp, Oryza sativa
  unsure (1)..(693): unsure at all n locations
ctggaactgaatcccccacatgacatgggtactctacgatattttgctctggatgatttaatggccgaaatttaaatttcttaactgaaatcgaacccctacgccaaaccagatcatcagtgacgagcctaaactgtcatctgtttaagaagagagttgagatgacggtattcgaaggccgcctcctagagtatgtcgtctcttctctccaaccagctgaagtgcttcagtacggctgtctcgtcaaactgaaatggatcgaccatcgctcaataaaaggaggagcaaacaagcaatgaaggaaagttaattcgttcagtaagaagctaggaaggaagaaagaaatgtagtccagtttccagagttgatagatgttggtcaagccaatccacggagacgagcacttgctacacatcagcgaatgtagtttgttggattttggcgatgagatggttgattaaccctgcatttgcttccacatttgctttgatctgcattcctaaccaccggaaacaagcatttttttttgaacgactcgcaccatacagcgcanagtttatattgataaagcatgaaaaaaatacaagattataaccctgggaggtcgtaacccaaataatgatatctcgtaatctagacatcatgtctaaagtaccagatactactctaatatcatcgtcataacatagagta

SEQ ID NO: 48693 - DNA, 721 bp, Oryza sativa
  unsure (1)..(721): unsure at all n locations
tggatcttatagattttagaaagcagtgtaaacgccgctaccatacttctttacggctggcccactgcacccttcttttttgtcatttggatttaaataattgaagctattcattgttatggccaggtttcctctttttactttccagaagtcttgtcaaccgcttcaaccntactctttcatagcttgcatgtcacccttcctcttaatatcattaggattataaaaatagaacctaatcgtcattgaggcttggttttatagtttttagattaaatgttctatcaaccaaagctacttctttatggtttgccgctacccgctctatcatcatttgcaatcgttgtcttttagattgacccctatttcagtatttcttcttttcaatgtctagtttttgttatttctaaactgcatttttataagaattctcattttctctcatttcagatcttattttttattttcaattttaattaatattgtattatgttctttgtacactgttctttcaatattccctattttgttattttgaatttcggttatttctaaattgtattctgaatttaactcttattttgtttctaatttatttttatatttcatgttttatgctgcatcttacttatttcagtgtgtgttgtaaatgaaccttaacttattttatgttttactctcttctttcaatattcttaattttctattccaaattttagtt

SEQ ID NO: 48694 - DNA, 655 bp, Oryza sativa
tggcagatcctagaaccatctcaattttgaaagaaaaaaacaactccacctggcacatgttgtaataacactatatcgcaaaccccaatctcgaatccatctctggtggatggtgacagcaccttgcttccctgctaaattcatctatagaaacaccggatgctgtagatgtatcctggtttacttctgccacatggcttagcctgatcatgttggggtccaccatctgcccaacgatggtgatcaccagtgtgcaagcgtttggagttgtaggagtgtgaagatggggggaggtcgctgtgggctgatgttgtttgcggttcagggacgacacaatttatttgcataagattttggtgggaagtaaaaagggagctaatttgctccaggctttgtttcacccggatctgctttgatcgatagtgtagaaaacgtgattgaacagcccagatcagttcatttcataattggacaccaaagaacgcttgcccatgatacatcaccaggctaagttgtagttgttacttcgatcttataggatttgcatatgattatgctcacctgcatcgtctcatcaggtttagttacacatactacgacaagagccatggtgctatacataaatcgatagaagccttggaccacatgggcatgg

SEQ ID NO: 48695 - DNA, 676 bp, Oryza sativa
tactatctaaatagtattatgtattaattaattaattatttgcaacattattgattaaaaattatttttaaaaaaattggcgggaaattttaaattttggcgtgcatattttaccaggcagccccgccttctttatcacaggcggccccttccctctttcccaggaggcgtgccgtgctcccgttcacctgcgaaaatcggcgataagaaggcctttgcctacaaaaatgtttttggtccgcctgagaagagaccgttttcagtcctatgcaaaaaatgttttttctagttgtagtggctggtgataatcaaaattcaaaagggaagattagatggatcccaagtgcatgcatgcagtacgcttctgggaaagaagaggatgcatgttcatgtgcaaaagcttgctgaatatgtacgtggaccaagaaacaaaggaagaagattacggctcaatgttgtgctacatgggctgagcctgttggactctgtcatgcgtgaaaactcgagttgggcctcgtcagtcagattgctctcttgccgtttggatggcagccggccctaagggaaagtttgtttgtgtcgctagcgtaagcttagattgattcatctatttttttttaagaaaccactaggatataggccctttcgcagagattcatctattattatttttgct

SEQ ID NO: 48696 - DNA, 747 bp, Oryza sativa
acgaagacacgggagatttgcttagctctagtgtaggtcctacattttgatgaggtgcggccgtgccagctagtttgatcctgcaactgacaagatggataaatgacaagatggataaattgatggtcaaagagtctatcaaccaataagctgatgtagcaatactagctgatgtcggtagggtttgaaaaattggctatatatccgatgtagattctaatacttagataaaaaaaatggaagaacatgagcaaacaatccaatcagctgatgataatatgatgaagtagatgtccaatgaaccaatcatcagaaaaatgtagactgaatggttaaaataaacatcggctggaagtcagatgtaaagataacttatatgttagcactccgataaaacaatatacatgagttactagggtggattagatctattaatcaacagtaaaaactaataggtcggaccaaaccgatacaacattaagttacatcaacgaataaacctaataatatcgataaatcatgtataaagtgatgggctaagatagaagatcggacctaactgagacagtcccaactaaaccgatgagcttctaaacacaatgcacttaaagatagaattgaaatatcagatacgcaaatataccaattgaatcagagcaatccaagagatcgaagcgatgcatcctaaaagaacactagtgtagcgataaatttgccagggccaacggaacttagggcttacccctt

SEQ ID NO: 48697 - DNA, 680 bp, Oryza sativa
ctatgatcttcccacgggattaaacaaatacgatacccttagaatactctcgggtgaaatgctacaatggtatatccgtgcgcttgcgaatgaactctgtaaccataatataccaagagtatttatgcgccattgctgggaattatatttctagtaatgtcgttaagaaataccaacagctaggccaacaatggagctacaaccgggatcacctaaaacactatcctaacaaccgacactaaccgcactctatccacatctttgggattcaaggagagagggtgagaaagaatgatggaatcgctctccctcctaggccctccgacgtggtcaacttgcataagctagagcttcgacacaagaggactggaatctacagcgagcttgcaccgtttgtcagggaggtttcgtcaagaggtgtgcctagacaatgtctccagggagaggagcggcgaaagcaccgccgtcgtcgtccgtcgaggtctcagggagaccaggactaggttttcactcgacaggccccctagaggagatgggacagcatggcaaggccctcaagagggaaaggacgctcgagaacgccctcgttgccagctcggccaagtctgggctgggttttcacccgctgccgaccacctgtctatccacaactgatgcaccatgctccaccgctgtcaatc

SEQ ID NO: 48698 - DNA, 858 bp, Oryza sativa
attaatattcattacaaagtaattacatcctagttccgttgtacctacataccaattacacgctgtacttacatctcagttgcattatacttgcgtatcaattacattgtagttatttggtatttatattgcaatttttactatatgtgtggagtgttatgtagtgttaattatatggtttgagaaataaagtatgtactagtttataattaatcgtgaaagtctgtacgtggaggccctctattcttgtcgttatgggtaaggattagagattgagaaaaatctgactgtgcttggctccgttttgtgtcgaatactttttagataacccaccaatcacaattatgtgaataacaacaacagcagacttaacttgcgaatttctatcctacaacagtgtctccacaaggggtacaatgcaaattgccaatcataatttgtcaatttgtgactgaaagttaaaacgtccctaacccgatcactatttcagcttatacgtcaacagctcggttcatatatagaacagccgtgaagaagctcaggctgccatcggtttgccaactgctgataatacatcaaacgatcgtattagcactaaaaaaaataatttccctcttatataggctaatcgcctgcttattagacttgctattaggaaccctctttccccgttacactctaaacgaagtggatgtttaatgtatgattaattaagtattagcttaaaaaagctttaaaaatgaattaatatgattttttaaaacaaattttctatataactttttataaaaaatatacaatttagcagtttgggaaacatatgtgaagaaaatgattaaggagaagttagagcatgac

SEQ ID NO: 48699 - DNA, 4290 bp, Oryza sativa
  unsure (1)..(4290): unsure at all n locations
atagtgtctttttcctatttatcccattttagtttatttcccatataaatttgattctataatttctaaatcttgcataaatgaagtttactcaatatttgtgttatctcaactaatgaattcaccctagattaatattactcatattttattggtataatttatttgaatttttaattagggttaattcttgttccattgcatttaaatctaattaatacaaatatggccgtgatgatattttatttattcctatccttacataatctttattttaaattataatttatttatttctttaaccaaatctaatttcagggttaattcctaattaattttcccctatttgtgatcgatgaattccgaaatcaaaatccaataaaatcgtcgaataaaattggcatgatgcaatttatttaaaaagtttttgaaggcccatatttttagagtttagattttttatcggtcgaattttcaggtgttacaactgtccacccttatcttacagctacactgaggctacttacatagttgtccctaccacctttgatacccgggccctcctcccaattcccctccacacccgcactcccaaactcaaaactttatctggatgtgccgccacttaggttccaagatttcatcggatatgaaggcgaatttggtgatttgagatagggtcaacgaggtatcggatcccttacctaggttgactctaggggtctacatatttgcaacatactctttccatgtgttttctcattttctatcttttcattctatctatgtacaattttagattacaaagctcatgtcggctcgattgtcagtctatgctctcacgtcagctttttttttttctacaagaaccccttttcaattttagttttagattcactgctagagaataagacatcttgatatatgatttttggagtcgatcagaatgccataacttagactaaattgataaaaaaaaagccatagatatatgtatatcagcactgaaatagaaggtgactttggatgttgaacaaaagctcgtgacttagatttaaatcatgccaaaatctatatattatagatatatatgtatatcaataccaaaatagaataaatacaactttttagaagggagaaaccttttaattgtgattattaacatcccaaatcacccctctttgttgtatactacatagaaaatccacaagtatactgctagtataaatttctcaattctaaaaggtcactttaaattactcagttacaaacaaactgcttatattgagtaacatgtaaggtgagttatcaggtttaggtagcaagaaagttgtttctaagtttgatgacctcattcttcatgtaagggctactttttcaactaccataataaatgctattaactccaacctaccataaatgctactattccaaactatgataaatgataaagccaattaaattatgtgttccaaagttttggttccgttgcatttttttcatttgtaaatagtggtcaatcaatatattgtttataaaattgtgttaaagtaatcacaatagatgggtcttgaaaaacaaaataaaatcatttcaagagaaataaaaaaggaattacatacatatacgccgacacattttattattgaattagtcaaaacttgtgcataggacaaaccttatctctaacatccatcgcatcccctcctctctgtccaccatctnccttccccaccaccccaccccatccaatccttcactttgttaaccccctcgtcgccgacttctccaaaaccagctaatatccccgctatgttttctttcctatctcaagcgaccaccatttaccaccactttcgtttcatcccatccatggcgcccattgtcatcctttgatgttatggctacgataacactactttcatagtcgcccctacctcctttgacacctagcccatcctctcgatccccgtccacacccgtgtcgcaaacttgaaaccttatatggacgtaaccacggcctagtttcctagaaatcatcgaagatgagggggtgagaatttggatatccgaagatggggtgagggagatggagggggaggggaacatgggtcgaccgaggcgtcagatcccttgccatggttggcacatggtgcgaacaactagatctacatgtctgcactacaaaatatcgaggtatttctttcgacgaattttctcaattttggttttgcttaattctatctatgtacaattttagattacaaaagtttgtatttgctcgattgttactctcatactcttgtgattgttttgttctatcatcaaattttagttttagatttactaccaatagaaaagtctttggtatacaaattttagatatcgaataaggggtatctaaaaaattaccataagttttttttttaagttttctgagtgaaaaactttcaaatgtaactatagtataattaaagtgtaactgtattgtaactatactttaactatgatataacttatataaaacttggatttaaccatgttttggttggttagaaccgagatcttacgcatgacatatttgaaacatgcaaaaatcttgaggaagtccgatggctagaaatcagcaaatttgaggataaaaacttatggaagttctcaagcaattctgttgaacaaaacctcataacttagactaagggtgtgtttagttggggaaaagaaaatttttgggtgtcacatcgaacgtttgaccggatgtcggaaggggttttcggacacgaatgaaaaaactaatttcagaactcgtctagaaaccgcgagacgaatcttttgagactaattaagccgttattagcacatgtgggttactgtagcacttatggctaatcacggactaattaggcttaaaagattcgtctcgtgatttcctccataactgtgcaattagtttttctatttatctatatttaatgcttcatgcatgtgtccaaagattcgatgtgatgtttttgggaaaaaattttggggaactaaacgggccctaaaggcatgccaaaagtcacaccaaaactgaaagaacacaactttgctagcctgggccctatttggttccatttgctaatgtttagccctcaccttttagccttaaattagccctcaaggatccaaacaggtgggctaattttgagctaatgtgaattagcccccctcaaaacattagccgctaatggggctaattttgtgtggggaccattaaaaagcagctttctctctccttctctctcctccctttctactctctctccaccttttagccttgaattagtctatggatccaaacataccaccctaggctaatgtttagcatatcaattcatgactaaacattagctcttaaaattagctatgggctaatcttccacacagggcgctgatactagtgagaactgagaagtgcaaattgcatcttccaacctcctaatcttgattattacatcccaaaattactgaatcccctcctcttattgcttcacagttcccaaaagtgtaccacactggtatataaaaaacaccccatcctgtgtgcctgccgactcgcccacgcaactccgactctttccttccccaattctcccgtccaccggccgcggacctcgccggaaccctagccccgccgcccccctcccctccccgatcgcccgattcggtggtcggggtgatggactccgacgccgagatgcccatgtccagcgacgaagagatgttggatgacgaggactattacgactacagtgatgacatgggtgaggacgatgatgggaacgacgccgggggcgggggagatagcgatgggtagtaggaggaggagggggatgagaagctggtggccggcgactacgaggcccgcgaggcggaggggagcgacgaggtggtgtccccccgcgagcaggtgaggatttttttggtcggaagcagatcaggtggtggactggtggtggtgtttttttttcttttttcttttttttagcagaaagcgcgacggtcgatttcattaagattttgggaaaaaaaagttttcatacaactcgagattacaccccccttcggtgtagcttagcggggaggcaaggcgagctgaacgtagatcaggacctggaagatcaggggtgctagattggtagcgtcgaacggtctcgagaatggcgtcgttttgctgaaataaggattaggatgagcttatggcgtccttttcttttttttttctttttttctgaaatgaggatcggg

SEQ ID NO: 48700 - DNA, 599 bp, Oryza sativa
ttagtctatgactaaatgattaaatataatacacgggtaaaatccctagtaattaaatccgaatttctaccgtgaaccgattacttaaaggattacccaaaaataatctataataatctataagaattcatctatttgtttagtaattaactacatctaaattattaccgcgaattgatttcttatagaaattgccaagaataatccataatttatattaaattttgcaattctacgactataattaatccataattaaattctaattattttcaattttctaaacttccctaatcttcctctaattactattttttttttcttttctttttctctcctcttttctctcttttcttttctttttctctctttttctctcttttctctcctcccggctcctttctttcttttccttctcttcctctctcctcttttcttcttcctccctagcggcctctcctttcctctctctctcggctcttgtccacccgagcgacggcggtggtggacgcgagggggggggaagaaggctcaacggcggcgacgacggcggcagcgcggcggtggcgacgacgacggcgcaaggcgacagcgacacc

SEQ ID NO: 48701 - DNA, 4322 bp, Oryza sativa
tcggtcagaccaactgcttccaggcggtcagaccggtgcaactactttggtcagaccgcgatccgtcgaatttgagggtaacttctaattctgcaaaaagtttgggtttttgagtataccaaccattcaactctctctggttggcttagttcttgtgtttcgatcctacaatcacctcctcgattgaatcacatatatgcatgcaaacaatataattagaaaacttaatggtacaggaattaaaataaatatttaatatatgcatacatacaggccttatattataagacatgagaaaaaaaatggttgtgccttatattttggcatgtagggagtaatgatttttaaaagatgacacatgtatcagtgagagaggtttactgtagagatttatttatcttctcagaataggtgaggagtaggcaggcctgtactgatcttttcatgatctctaatgaaatgtaggcattaacggctatttttttattataacagcaaaggtgatatatttaaccatcacgatacctaatttcatactaattgatgataattattatatgttcatcaatattatcagaaatgtattaaaaaaactagtggcggagaatggattttaacatgatggggcccaacttattaaacaacagtgatcatcgaaaaatggcataaccatatatgattgtcttaagtttttcttggataataaaccaataaaaaagcaaagtgattacataatatgttaattgaggagtgtgcgtgaacaatttaagtccaaacaatttggcgagtagagaaataagttctcagtgggaatttttttccaacttgaaaacatttctagagcataatgttgcactagctaaacataataattcatcacacaccaatataaaatttggttggactaagaaacaaaggcacatgaatttgatgaaattagtgcaatgctaaaactgtgtttttagggatgtttagatcccctgacaagttttttcacccagtcacatcgaatgtttggacacatgcattaggtattaaatataaaaaaactaattacacagattgcgtgtaaattgcgagacgaatcttttaagcctaataacttcatgatttgacaatgtggtgctacagtaaacatttgttaataacggattaattaggcttaataaattcgtctcgcagtttacaggcggaatctacaatttgttttgttattagactacgtttaatacttcaaatgtgtgtccgtatatccgatatgacacggcaaaaatacggatatacggacacacatttaaagtattaaacgtaatctaacaaccaaacaaattatagattccactcgcactatgatatcggctggcaagctgggtttaactgcctttgagtgtttgttgggtataatgctggctgtataagttcagacttcagattggccccgagtcccccataactctctttgtaccaagctcgatgcaacaaagtataattatattcatttatcatgtctgcctcatgacgtaccaggagtatacttcggtgtttgatgtctgcctgatgacgtcccaagcatcaatctggcatttatcacatggctacttgcagattctctccaaaaacaacaattggccattgactcttattatttatgatagccaatactctccatttccaccatcattcttttgtgtttgataaggacatggattgttcagttttttttctcttttaaaaacattgtttagtttatatcccacttggaaggagaggaccgtccatcagagatgcaatcaatgatggtgagtcgaaggagatgaagaaatagaagattttaaatccagttgcaatcgttcgcttcgctcccgttacgactgagggggaatgttagaagtataatatgttagttagagataagagtcaaatacaaattatagagataagatatatcctagagatagaatcctagagataagatagagtcctagagatagaatcctagagataaatctactcttacttgtattgtactccaagtctctatcccctacgtactcctatatataccctacgagagggccgatgtaatagataagaaaacaccagaatacaataattagattttccacaggagagacatcgatttgttttaaatagtcatgagcctggtggtgatgaggatgaggagccccttgatttgtgaatgtcgtctaatgataatagtttatcagcctaaaataaaagtgatttgttgattgacataacaacttgaaaaatagaagtatccacttggaacactactagagaaaccatctttactcggtaggccaaaaaccacaatagtcccaattgctcaaaaaatcgtgactaaaaatcatttttcgtcccggttcaaaagcccaggcgtactttttgatctttagtcccggtaggtattattagtccgggtttaataaatggcaggaggtgtcagacccctctactatctttagtcccactaaaaatttatttttagtcctggttgttaaacaaccgggaaaaaaaggctctatccgcacgcgcatgcaagtcctctcccatcctccatccttatctccttctctcccatccagccatcctccatccttatcttcttctctcctcctcccatcctccccttccttcttctctcaccccatctcctcctccccttcctccggggggcggcgggatggaggccggccgacggcggccgggcgtggggtgacgggatggaggctggccagcggcaggatggaggccggccaccgacggccgggcgtgtggcggcggcctcgccctcccctccaccagattcggccggaggggaggcggcgggatgagaggatttgtttgagtttttcttgaatttttgatgatttgtggatgttgttgatttgtgaatatgtatgagaatgtttatgtgaataaatttgtgatgatgtgttgtgaatgaatttgtgatgatctgtatgaatgaatttgtgatgttgtggatgaatttgtgatatgtgttgtgaatcaatatgaatggagaaaaaaagggaaaaatcaaaggaggaaaaaaaagaaaaaaaaacatagatggttgtatctttagttccggttggtgactaaagatgcatctttactcccgggtatttcaaccgggactaaagatagcaatctttagtcccggattcatagtcccggtttgctacctaggattatagggggttataaaccgggactaaaaagggttagtgcaccagtgccattttatttctcccgctcaccacgaatctcaaaggacattggatggtcctaaataaacgggttattttaatgaaaccgatcatttaaaagataccaatcaacacgcatctcaaagccacatcagatatcttaaacatttttttagcaatatcgaatatttttaaaacacccaaatatattaactatcagattttattttggatggggataaaattattgtgtttgttttagcaaaaccaatcaatgaaaaaagtacgaaaatgctcattatcaagcgaccaacacaaggcgaaccgaccactcatttcctcatcctctctctctcttcttcttctctcttcgctctctctctctctcgcgcgcgcgcatccgtatttggcactcgcatctggtggcgccaccgcccttcttcctatccttcctctgcgtcattgccaaatcaccgcatctggcgccgccacccgtcgtagccacttctggcactgccacccgtcgtcctctcctctctccgtgctgctgccccatcgcctggaacttgggagctcgggagctgtggaacacgacgaccgagcttcattgtgatatcccagcccagggcttaataggattaatagaatactcatatcaacaagttgcaacttcttttctggaagccgatctctaaagaactctgaggttaagcatgcttggcctagagcaatttagggatgggtgaccgatcaggaaattctttccaggtgcgcactttcctaggaaagctaccagatgtagagagggcccggcctcggaaagtgtggggcgtcacattcatgcagcatcgatgatggtggatacgtggatgcggtggagctcgtcacgacatcgacgcggaagtggttgctaaccactggagtggaggaagaggtagatctaggttttcatcttgaattttttgatgtttcagtgcatgtactatgatgtttgattagttatatttgaaatgttgcagtgggtattcgatggtttttcattctatttctcgatctagaaatgaaacagttgggggccgaaca

SEQ ID NO: 48702 - DNA, 561 bp, Oryza sativa
tcggccattgtacatcggcaaatcacaaccgattacaccatgaaaaacaactaagggcgatataacaatattggccattgtatatcggcaaaccacagccgattacaccatgaaaaacaactaagggcgacataacaatatcggccattgtacatcggcaaaccacaaccgattacaccatgaaaaacaactaagggcgatataacaatattggccattgtacatcggcaaaccacaaccgattacaccatgaaaaacaactaagggcgacataacaatgtcggccattgtacatcggcaaaccacaaccgattacaccatgaaaaacaactaaggacgatacaacagtatcggccatcttaaggtgatgtaaacacatcggctgtcatgcatcggcaatagtagccgatcatgcgttaacccaaacacttgggtaatatttcttcaaatatttgccattgagcgctcgctcataaacttcaccgtcatgtccttgcaacatatatgctcccttagacacaaccttatgaatttggaacggtccttcccaattcggcgacc

SEQ ID NO: 48703 - DNA, 553 bp, Oryza sativa
gtagatgataactttattactcctatttatatttacaaagtgcaacaacaacacttcttacgaaaatcttgactaaactcgaaaccctaattaactattaactcaatgctctcaaaagcgataccgggaagcctcacgctccctctctatttatacataaggtaggcagcctaaagccacaaaccaaactcatactagaagtcctaatccacctaggaaaccttcctgtacaagaaacaaactttacaaactccaatcattccaaattcggactccttccaaattcgattccgcatcccatatgcacacaatacctccatcgtatgccatatgtaatcttcaccaaccacgtgcattgaactctagcttaagtatcccgcatgatatctgaccgtcacggacgtcgccttatccccaagtcgactcccgatccatcaccggcaatactctcccgaggcatcaagtcacctacacatgaatcaaacaaagaaaccatattctgagaccaaggtatctccaacttgacttattgttatcaaacaacagtattaca

SEQ ID NO: 48704 - DNA, 588 bp, Oryza sativa
cccctcgttttaggttataagacgttttgactttagtcaaagtcaaactgctttaactttgctcaagtttgtggagaaaagtagtaacattttcaacccaagacaaatttattatgaaaatacattcaattattgatttgatgaaactaatttagtattataaatattactatatttgtttataaatttagtcaaatttaaaatagtttgaatttgaccaaagtcaaaatgtcttttaactgaaacggagggagtagctagctgtgctcatagggtgaagggagttagttcttctgatgtttcagcactgacagtgttgtgtagagaacggcaattttgttgctgttagccttatttgttttgtggtgggatagcacggtgcaccggctacagctaagaaaggatggaagtttgggctattttctggcgttgttcggcccccaactgtttcatttctagatcgagaaatagaatgaaaaaccatcgaatacccactgcaacatttcaaatataactaatcaaacatcatagtacatgcactgaaacatcaaaaaattcaagatgaaaacctagatctacctcttcctc

SEQ ID NO: 48705 - DNA, 1210 bp, Oryza sativa
atgacaaataaatctgcattgcgtttccagccttggtcagatgattgttcctctccttgaacctcctcaatattccaatccattagtttggggatgagattgcggtcagttgtccatgcagacaatctgaaaatcgacaggttttgtatatgatgctcttcataaagctcttcaaccatacaactaccgtctagtaattctttcatggcctgcttgttccataattctggtggtattccttcgagtgcaagtatgactctttggcgcagtgggtttgggacactatgaaggttcatcttgaaaggttcatcttgaaaggctcaaaatgcagctgagttgtttggaatgtgtaggatttctgggcaaacgccttttgagatctctcatattgcttgtctgagtccatgaatagcacaatgtacattttgtgcctgaacggcagtaaggcaaaatcatcaatctggcagtcacacacgaagcctatcatagctgatattttcgttgtgtttggatgcccagctcaaagaacggtgacaaccacagcgtcttggtaaatgacatcggcaaatagctgtgaaatttctccgcggcttgaaaattttgtcgctaacagtggacggctactgccataggacaatggtcgtggttgtctctggctagggtggttatcttgatgggcctccatagtgttctaggaaagaaatagaagacctgttggttaacgcgtgcccattgcagagatcaaaaaaatgtttagtttgtttgctctaatactttcctatattgttctattacagatgtttggatctgacccacttctgtatagggagaggagggataggaatgaacatatggagattactgaagataataagctgcagttgttacctggggagggaggctgaagagcttgtgaaagctgttcttgctgacgggaaggcgaagagcagcagatatgtggtggggaggtgcaagtagcggcgaagaggagaagataagtgtggtagagatagaaataataggatgtgctgtatggcatctcgctgcaaatatgtcatgtctcttcaaaggcagcatgtacgggcaagcgatggtgtggatggagtgtgtaaagaatgcgtaggctgttgtttcagtatggagttggttgatgggtgaatttccctagcattcaataccatatatatatatatatatatatatgtatgtc

SEQ ID NO: 48706 - DNA, 725 bp, Oryza sativa
aataaattcgtctcacggtttactatcggattctataattagtttttttattagtgccccaacaccccatgcgataccctatataatatctaatgtgacacgtcaaaactttacacctatagatctaaacacaccctaagctctacttgactccaaatgacatgtcttaatttattctacttcttcctatagttggccccaggatgatatgccgaaatgcaatagcgacagtgattcgaagtcgatcagcttcattcataaaggggcaaaccatgggcaactcaatctcccgtctatatcgtactagtacacatcccggcagaataactgcaaggttttaatttcaagcctaatttattagtgagttctggacactttgagaattttgtatttcatgaacactgacctggtcgtgaattagtgatcataatcgatcgacatatatcgcataaggactttgcagcaacactgaaggtttctttactagcggtcaaatttgttggtccacatttgaggaaaaatatttctcaggaactaaaacaccaagggagatataatgccaatattaattggaagatgtaaggcagtccgacaattagtgtagtttacccatacttgttacgcatatccaaaaaggcaatcagggtgtgtttagttctttgggtacgtgtaagtttttaaagtatatgagcacatatttgaagcctaattaatcgtagactaat

SEQ ID NO: 48707 - DNA, 536 bp, Oryza sativa
tatagggcgaattcgagctcggtacccgattttattttggatggggataaaattattgtgtttgttttagcaaaaccaatcaatgaaaaaagtacgaaaatgctcattatcaagcgaccaacacaaggcgaaccgaccactcatttcctcatcctctctctctcttcttcttctctcttcgctctctctctctctcgcgcgcgcgcatccgtatttggcactcgcatctggtggcgccaccgcccttcttcctatccttcctctgcgtcattgccaaatcaccgcatctggcgccgccacccgtcgtagccacttctggcactgccacccgtcgtcctctcctctctccgtgctgctgccccatcgcctggaacttgggagctcgggagctgtggaacacgacgaccgagcttcattgtgatatcccagcccagggcttaataggattaatagaatactcatatcaacaagttgcaacttcttttctggaagccgatctctaaagaactctgaggttaagcatgcttggcctagag

SEQ ID NO: 48708 - DNA, 733 bp, Oryza sativa
ttcctactgcatgtttgtatatcagtaccagcaaactgaagtactgttgtacaaacaaaaacatatatttgccgtagtgagaattgcttgagttgtaacaattccatgtactctctattattaaaagagctctgcatagccaagttgtacacacgcacatgctctgaatcatgtagatctagatggttaagtgccaaactgagctgaacaatccatttataatcactgtgcgttccgcacacagctgcgtttctgctgagagacaacttatcagatccaccattatcatgtatgagaagctgagtacttcatcctggtattcagttcagctggcacgacttacactgccgccccaaagagcttaatttgttcgtggtttaacattttgctttttatccgtgtgaaggctccctacaagtgcagaatacagagcatcatctggggtcaatccatctcccagcatattgtcgtacaactggaatgcctcctctgatcttcctttcttggccaggccggatatcagagcagtatatgccaccaagttgggtttagaccccctctgtttatcttttaaacaggctcaatgccacatccacctttccattgacacagtgcccatggactaacgctgcataagagtatatgtctgggacaagccctttcttttcatctcattttgaacctctcagcctcccgtagctccccttttgatgtaccattcatcataacattg

SEQ ID NO: 48709 - DNA, 802 bp, Oryza sativa
cgccggcgactcggagtcggacgccatcggcgggggagcgaggtgaagaggggagaagacgagcgagtccaaatgggctcgacctgcttggtgtccaatgttgcagatgcttttatgggcttaaaatctcggcccaataatatattgactgaaatgtcagcccattatccccaaggcccataaagagcaggagccaccggcccacctacaaacacatacatgcaagaggaattgggcgggcctttttacatacaaatgtgcttcgttgctatatgggcgggccgtgtatggtggagcttgaagaaaactgaaaatgtaaaatgtaatattcggtgcaaatttctcaatatattacgttacattatcagccgatgtaaactggagaacaatatgtacctctaatatttccaaattgatcagcttatatgatttttacagcattagctaattaccatattaaatagcctccgtccatatattcattcatcacgtacttcctctgtcaaaaaaaaaatcgatctgttgagttggttgagttcttttttagatggaaggtgtacgtggcagacggaacgacgaagggaatgacatggggcatggtggttgagtcgagagaagttcacgagcggcttgggaaccgaaaaggcgagacagggtacgacgcggttgtggcccatgggcgccgggggcgtagtacgtactcgtatcttgcccatacgggccacgggccggccggccctgtcgcgtcgacgagacaccaacgcaggagcacaacaacaacacacgcatgtgtgcacagtgc

SEQ ID NO: 48710 - DNA, 1139 bp, Oryza sativa
agttaaacgaaatactatcaagagtaccactggtaaatgctaatttaaacaactccattcataattaagaaaaacaaacaagtccatgtccactctcatagtctcatgcccttgctgatttgtccactacccttccattatgctttccccaaaataatcaaatcaaggagcgtatcacagaacaacgcaagaatcattgcattacatgtggacaactctggccctttgtttaatttgcagagtaatcatctcataaacaaaagcctgtgagccaacaggacgccagcttaactagcctggccaaagactcttcttggcgccaaatgtgcctccacttgcctcacaattcgaagtggtaggtaacatcacatcactgctcaaattcaaaatatctggtttattttgtttgtgtaatgaattagatacctacaaattcattaaaaaaatcatgcattttacaaggttttcataaattctacttttcagaagggcccatcatttagaaaataataaacaaccaaacaagttaattaacaaaagaagatattaagggtactaaaatactcatctcattacatgatgcactaagagcattttaaaatgggaagagaaaaaaaagtctggtcaagaagaggtttgaccatctaattaacagtactccactctagctagcaaccacacgagaggagaggcttctattgagaagcctccccgtcaactacagctcgatcggtcccgtgtccggcgccggcgatcgtcgccggcggcggcattacatgacgctacacgagctcgggttctcctcgttgaacatgttgctgtaagactcctgcggcggcgacgaccgcatgcccggcgggccgtacaggtactccggcggcggcggcggcggcatcatcatgggcgggtacggcgagtagccgtacgacatctgcggcggcggcggcatgggcgtcggctgcatggacattaccggcgtgggcgcgtagtacgaggacacgctcgcgctcgggtgcgccacattgtagctcatcaccggctgcggcgagtagtacgggaacccgccgtgagggcgctccggcgacgacagcgttggcgccggagcgggcatcgacggcgcgggtgcggccggtggcgcc

SEQ ID NO: 48711 - DNA, 683 bp, Oryza sativa
aagcagctattagacttctcgctcctgctagggccaaggttttgccctcttccctgatcttggctaaaaggaaggtagctgaaagctccttctgtggaaaggttctgcgattcctttcgttccatatctccaagggcgaccaacaacatcaaagtgcggagtgccttcttaggtgtctcttgtatgtttgcggtagcctcccaccaatctagcaccgttgaagtttgcctccattggctaggattaagttgctcgcacgtcgcccactccgctagtgccgcccagactctccttgtgtatctacatgctgcgaggaggtgcagagttgtttcctgggtccgacgacataaggggcaaatggaaccgtttggccaacctcttgtcgccagcctgtcagaggtcctgactctattttggatgattagccaggcgaaggtcttgcacttacacggcgcccaggctttccagattagcctattgaagttagtagcggtggttccaagaagttgtgcgttatatgctgatgctgtcgtgtactcgccatggttagtaagcttccatgttatattgtcctcctcgtgctctaccaggtgtatagcctgaacggcgatccaaaccccgacaagttgatcaatcaggtctgtcgtccagctcgcagtccctggcaagtccaagtcaagaag

SEQ ID NO: 48712 - DNA, 573 bp, Oryza sativa
agttgctgaaatatctgcgaacatgttaaggagcttcatatacaacattaatacttttctgaacaatcaattacattagtggaacagatgccagtacaagcaacacttatgcaagggtagttggtgatgaaaggatacataagcatgtctcccaagtgaactaaaaataacttcatcgcctccaaccaatgtgaccttagcagtcttatctaataccttcccatttacatggacagctttagatacgtaaatctcaagagcagcacccctctggtacaaacaggtcaaaaattgagtaagaaactcaaaaaaaaaaggcaagatgaaaacacgtaagtcaaaatttagaaaaaagaatgtgcaactataccttaacatgcttcaatttgcaaataagtgatccaggaaatgactctgtcagcctcaaatcataatttccaccatggccaaccgtaaaatgagtagtataaataggtactgaaggagactggaaaggacaaagatgaacacaatcatgagcaaagacaaaaggactccatggggcaaattaacactttagaagtaaatgaggct

SEQ ID NO: 48713 - DNA, 727 bp, Oryza sativa
tcatgccctataatatatccctctttactgtcattaaagaaattactgttaatattaggccttattgtgtttaaagaatttaatacagggccttgctattcacttagtgactgtgcttttgatgctaattacataattaatttgtagctcggggacttctcgaggtgagccaagattgatgccgtccatcttaaaggatcttgaccgtcgaacctacctctatagtctgatcatgcctatcatgaacaagtaagtttatatcttcttatggaaatattgtgatgtggttatgacaacttcattattgtgtaatatctggatccagttgtatgcctaatctcctttctgcaattttctaaccttcttattcttgcaaaagtaatgagataagtagttaattattgcattaaccaaattttgtttttgtttgcctcaaacagatgatatcatttgtgaagctctgttgacactgaccctaaaattgacagatcctgagaggccgttgtttgcatgcttcctgtttgacattttttttggattattcacattagtaacacaacctgggtccagtacttcagttgcaagacgcaaagtattggacaataggtaccgcatatgccactgcttgcagctcaaaaacttaaaaataaagtcatatattggttgctgcttagcaagtatcaagcaatgccagatatacatttgttactcatacacatcaagaaac

SEQ ID NO: 48714 - DNA, 614 bp, Oryza sativa
cccaaagagctccatagcaccgttgttcttcttgcttcttctcaagttcatgtagaaagccatcagctcacagagccatggggattgaagtatttcaatatgcagactctgggcttgagctttgaattcctgcccttgcttcgagtaatgtatctggaaaagagaggcttttagttaatagtcttacataattattaatataaccattgaggaccgtcttaaatccaaagacaagaacaatgatagatacgttaattctaacaaaaatagtcactagaaagattaaatatataaatacaactcaatcatcctctgtgtgtgtgtgtatatatatcctcgaagataccatatgagtatatgacccattgacacctatatagactagcattttgggcttcaccaaactcacatgcttataactaaaagtgtgtgaaatttttgtgttcctctctcaaataatggaatacttatatagttatcttcccccttcgttcggtttccaaaaaaaaatattccccctttgtccttagtaagctttaaatgtttctaatgcctttaagagataaagagaggtgcaaagattaaagtttaaggccatgccttgtcatatttct

SEQ ID NO: 48715 - DNA, 744 bp, Oryza sativa
ctgtaaatcgacaagttttattctcctatattagccgttatacatatatatagcagcatgatgtttttcatatctcatttctcttcttaaatattttaattcaggtgctgtaaaaaaattgccatgcatccttagttgatgtagaggccgaatcttcactttgtttaaaaagaaaagatgaatacatgttgccacaaaaatcctagggaacctatatatattaccacgaggtacacgctgttgaaatgtccccgtagaaattgttgtcatgcatgtgaagaaagcacaattatcatggttggcatgaaagtgaaaccggtcgatatagaaggatgagaagaatagattcattttttttttgaagaaaaagcggcaagagaattgccgattatattaggaggtagaataaagtcttacagcatagttcttagaaagattaatacatcttgggaagaaaagataggtagaaaagtagagctagtaataaattagcgcggtttgaaaacaaaatcccgatctctaatgtcttccattatagcaggtatagtctgcgggatgtctggtgattggttcctgaagatttttgcatttctcattaaccaaatacgccaccatggtgttaattagaaggagaagaatagattcattcacgggtaaaaccccatcagtcgacgtcgtcgcgcgctgtactacgtggtaatcgatttcatcggcgcatctgatctcaacaccactctacataca

SEQ ID NO: 48716 - DNA, 1186 bp, Oryza sativa
tcatgtatataaaaagatggaattctgatggctaccggttaatatattagaggaaatgctagaacaaatccagttcatttccttccaggttttgaattcatcgatctgttggttcatcggtgagcagagcaatggataaattggagcagtcagtgcacatgcctttggttgatcagttcaagaacagattaactcgagccgcctcgtgatatgcttgaggcaggcatccacgagcttgccacctaggaaggatctgaggaaacaactaaacagccatcccaattttgacaagccaaactttactcaatcactcgttgatttctgctgtcaatagacaggtgctcagctgacagataacagtgtcagatgcgttgaatcgtccctgcaacattcaccttgtttaagaacaacaaactcgaccaagaacaggtcatgcgactgcatgtttcgccgcaacgtttcattaaaaaatttcaaattgatgcatatggaaatagagtactaggccataacaatagaaattttcttatgcttatctgaaacttgggaggaaagctcacatcaagtgatgtgatgacctcggcagaaaactcacaggattaccatcatgtacggctataaactactcctaagtacagtacacccatccatcagcagccataagcatgcattgatcagctgaatggaaaaactattcagttctaatttggaagcttgtgtgcacttttttctttgttgacgatggggcacgaattctgcatcttgcctgctacagctgacgaggcaccttgttatttaattcccttgattaatagtgcagttaagttgctgttactgtcatcatcttcagttccaaaaccaaaaagggcaccacctctatgaacttatcctgctgctttggtcatctgaaggggcgttaattggaatgtgcgtatacatttatgcacgcttttcaggctcggcgacctacctgtcactgtccttgctttcagttcaccgggccttttttttaaaaaaaattcgccgggccttgctttcagttcaggttattaactggttaaacaagcagaggtgtgagatgagcacagctgattctttaattgggaattgatcacaagcttgagctcaattattattagtattctagaatggttggcctgttggtttcagtgcttgctacatgata

SEQ ID NO: 48717 - DNA, 531 bp, Oryza sativa
tttccatggtagaaatcattcaggttttgatagaagctttgagaaagagtgatgagtgatgacagattgacagccgcaacaaaaaggagcgtcgtttgtaggagctgggggatctagatggcgcacgggtgcacgacgcaagaatatctttgttttcatttttgcttcttcttttttgggctgagtcaaacggtggcataaatgtggcacgtctctgtctaactgcttcctaaaacttgctagtgctacaagtacgtgcttttcttgtaccttcactactctcagttagatgggtcaaatcatgacccaatagtacaccgaagatccctcaacttgtcattcagttataaaatcgcctccaaccacaaaactagatatcgagcttccctcaacttacaaaaccgttcactttaggtcctttggcggattgaccctggttttgtccgatgtggcggttaagtgagcatggccgtatcagcctcctctatctttcccctcttctctccctttatcatctctctcactttcttt

SEQ ID NO: 48718 - DNA, 729 bp, Oryza sativa
catcaacataataattattttaaaaataaatttattttgggataaataggaaaatgaacaatacagatagctaggagagatgcacctaatagtgtagtagtaaggggtgtttggttttttcaatctccaatacgcttaaaattttttctcaaaatatattttgaggctcataattttttcttaaaaaatatttggaggtacgtctttccttctaaatctcttcttttttcttcttttttttcttttcttcttaaaatattttgaggctcataattttttcttaaaaaatatttgaaggcacgtctttccttctaaatctcttcttttttcaatgatgcggaggctcgtaatttcttcttaaaaaatatttggaggtacgtctttaatttcctagctttttttttttttttttacggagagagtagtactagtactacgcgcgtcctccctctggggttgcaacgcgaccgcgaaatctttggttggttccaacgagaaaatgggtcgattttctgtgggatttcgacggcggcggccggcgaggcgatatgcaggatgctcaagccgcggtcaaacagcgggagactttactcgcgtcggcacttggcagtagtggcaggcaggcagccgcagctagattccgctagcctcgccgtcgccgtcgccgcggctcgtctcgtgccacaatacatgcagcacagtgcacgcgcacgcacacactggcattgg

SEQ ID NO: 48719 - DNA, 587 bp, Oryza sativa
tagtaatgttaccatacatacagaaccgcgcatttttatacaacttctcacttgatacttaagaaatcggagtggccagcgttagaaagtgttgagcacaaattgttagagtactgatgacacttacagaatttcaagccttcctgtcccagaagcaaggaagaggtgttcgtggaagaaatcgtatcgacttagtgatacatttaaccccactgatggtcctcgtgccgcaatcaattcgaacaaaaacgccaggtatgaattgatgtactgttgataacacaaacatgtcacttgaacaatgcccaacctttgtaagtaaaaagaatttcaagtgcagcaaacagctagggcaaaaatctggaccttgttagcgaaaccgcctccatatggtgttcttgtgaggtggcatttgttcctcttcgccctctgaacatcaggcacctaacgaaattcccccggtagaattgtgtatggaaattaatttcaggattgtacgtaacacattcagaactatgcagagttagaaattttacaatttcttcgagatagatatagctacgagctacgaagaacgagataaacga

SEQ ID NO: 48720 - DNA, 792 bp, Oryza sativa
cttggcaaaatggcatacctagaaaaggattagaatttaggacttgttgcaacttgcaagaggcaattgttttttttttcagtttttttagtttcatcgtgctgagaagtgagaagaactagttgataattctgcgggaacagaggaacctgtaggctgtacacagcggttttggtattcggcaagttgaactcttcctgggaatgccaacctattttctcttatttatcctttagatatatgtatcctaccttgttctcgctgtacttcttttatttatagtgtcaaacaattacagcttcgcatggaagagaagctttactgcagagaaagcaacaatttgacttcttagcacaattctttcgaagcattttctctgtcgccccttgtatggttaagattggattttaaaatggcgataatgttttgtttgctttcaaacatcaataccaacaaattaagttgatcggtcgggtatttggaaaatctgcatatactactgtcgtgtggacggcagatttataacataacttcaaattgaacactactagagatagcccattgactgccccattataatagtgcaagtcattgtcaaggtggtaattgtttgtcaatgacaaccacgtaatttttcaagtgccaagatactataggccgtagtaaccatggaaaaggggatgtcaccatcacaaagttcactcttaattttgtattattagcaggggcttattcatctgtccttttgaataaccttcgattattttagatagtgtcgactgtctactataa

SEQ ID NO: 48721 - DNA, 644 bp, Oryza sativa
aaatggcattatgcatcctgcaagcttctggcattgccattaatttaccccagcgagtgcatcagctctggcaggttttgtcgtcgcaatcgcaaagatgagatgcacaagagccatgacatgagtagtagtggtagtggtactgctagtcgtaacacactttgaacacgagtagatctcgcttcaattcatacatttgctgttggtccagcagcctgagcttggagcagagcattcagtcattcacctgcgtttctccggaagaaagaaccatacactagagaacaaaatctacacacacccaggagagatgagatgagatggccattcaagatgcacagctctgctgcctggaacctccaattttccttcagtgctaaaataagctctttttcatccaatataaaacctaaaaagatcataatatcatcatttcatcgaatcccaatataattatttcttactttatatactctcggtacatttattccatattttcacatcaacataataattattttaaaaataaatttattttgggataaataggaaaatgaacaatacagatagctaggagagatgcacctaatagtgtagtagtaaggggtgtttggttttttcaatctccaatacgcttaaaattt

SEQ ID NO: 48722 - DNA, 743 bp, Oryza sativa
aaggtgaagttttatacgtaaaacgaggtggtattaacgtgtgattgattaagttttaattattacaaacttgaaaaatagattaatatgatattttagagctactttcatatagaaaattttcgtacaaaatacactatttagcattttgaaaagtgtaccataaaaatcttaatcttcgtccaacttttattggagaaaaaaaaccataccttagatagggttggtatcaggttccatgaccatcaaattgatatcgtattcgccgtgtgtctgtccactacataaacagtatattcataaactaggttgtgtttagatccaaagtttggatccaaacttcagttcttttccatcacatcaacctgtcatatacacacaacttttcagtcacatcatctccaattttaaccaaaatctaaactttgcgctgaactaagccaatgtaagttcatcaaactctatccctgttcgtcatcagaatatttctcctggtggtgggcccatccggccgggagctaagctaacttgaccgggacatcactgcgagagtgaaaagatagatgctgcgctttattccagccttctcttagcgatagtggtttcggacaaacatgcacgtaatacctctattcagattctttttctttttcttttttttaaaaaagagctcttgttctatgtgacagatggatacaacgacgacaaacgggatactatattgagcgtttgatgagaacatg

SEQ ID NO: 48723 - DNA, 746 bp, Oryza sativa
tcgcctggattggattggatcggagttggacaggtaagaagtaggccatagcctccactgcaaaagggaagagaatctgattcttccgtccaagaactagtatccatctccatgctacttttgtccaaatgtccatcaattcatccctgattgcatctgatctaccacgacagaaaaaggtcaacgtctatctggatacagagctagctaaccaagagccacatcggttcacctaataagctaaatcaaaagctaaaatttgaatttctgaacttgatttgattttggagttcattttaagatatttttagcattatttctttttagcgttggcttttaagtcggtacgaacaaatatataaaaaattttcctataaattatttattattccttaataagccgggcttattagggaatatgggtaaccgatgaggcccaatattccagctagctatttgtagttttggagcgtccgaaatctcaaaaaactttactcaatatcaccatcaaagatggcatgccactaaacagaggcaccgcttagcaaccactaactaatgcattatcgctagacaaggtctgttgtctcaacctctttactcgttgacctcaatcaaatctgcgtgttgtgtgcggcagaggatcgaagtgtatcaagaaaccaaaacaagaattccgtttgagggataaataacccgtgaatcatgggccatggccggccaaaatagtacagatcagaaaccgt

SEQ ID NO: 48724 - DNA, 607 bp, Oryza sativa
tataacttctatgcactaaatatacttataatttgacaaccgttggtcaaaataaaaaaaaaagtgaccttttcaaaatattatacttcctccaccccacggagggagtacactctatagttttctagggaggaagtatgaaagacacgctgcaatcaatgaaagaacagctgtacaataataatataagtaagaacgtttttattgacccagttggtaaactgcagaacatttcttatcttatggaatctaaataagattataaaaattgaagatgtttttatcagtattttggtaggtcattcgtatttgagtcggtttttaagttcgttcacttttaaaaatacagatctgtgtttgagtcggtttttaagttcgttcgcttttggatacaaaagacatcttataagaaatctctttaaaaaatctcgcatgctaacttgggacgcttttggaaatacaaaaggagtcgtataagaaatcattttaaaaaaactcgcatgctaacttgagacgagagtcagactcctaattacaactcatgattttctaaaaatatatatatacaagcgaattcccacaatgattttcacccaagataaaccgt

SEQ ID NO: 48725 - DNA, 547 bp, Oryza sativa
aacccctatactaattttgagagttgagactaaaaaatcaggtccaacaaggcccctacagagcatctccagtagaggtcctaaacacagcccctatactaattttgagagttgagactaaaaaatcaggtccaacaaggtccctactaaagcccctaaagtaggaaagcctccaaattatccccttaggcccccagtccctggggctttctccgcagcccccatccgcggcagagacgcacgggcacttcttttttcgtgcgaaatatcctgctagcggcgcctccacggatctacgccgctcctcttggccggcgccctcctcccctgccggcgccctcatccttggtggcgccctcctccctgcccgtcacactcctccccggtaggcctcctccttcccaacgtcctcctccttgccggcgcggcggcaccctcctcccctgtaggcatcctccctggtgccctccttcctggccggccacctgcccacccagcaatatcctccctagatcctgacgcccttctccctggcgctagttgaagg

SEQ ID NO: 48726 - DNA, 581 bp, Oryza sativa
tggaaatatatcgatcaatcagtcaaaagtctgccaacgatctacaattacatgagaaggcccaaaagtccaatttaataatcacaaatgggcctagaatgtatgtcactgatttaggggcccacatggaagtctccaggaggaagctaagggccagaagagcccatagggggttggccgaccccttgttgagcccaatccagtcacattttggcctggagataagggaggccaaggaggaagcagcaggccaaaaactaggcctgttgggccactctagggttcggctgaacctagttcaccttgatctcagccgttggctctcccctttggcatggacgctccggatgaactcctgatggcggttgcggagcatttccgacaattcccatgctctacaaccgtcattgggtgctataaaaggacctcaccttcttcactttcaatacacactcaagcaaggatcaaagctctctacaaagttagtagtagtgttagtggagtagagttagaatagttccaagtccgcggaggcttcggggagttcggtaaaggttctatagcttttcctttcttctttg

SEQ ID NO: 48727 - DNA, 956 bp, Oryza sativa
cgtcaagcaaatctttcatcgcctccttgtatggtccatcttctccattcttcatcttctcctttgcttgcttcctacccattggtctttttttagcacttggctgtaataaatcaggagttgtactcttcctagcatcatctccttcttcatcttcttcaccagcactctcaattagggtcgaagacttcctagaccttggcctcttgtgggattctagagtttgaaactttggagaattcctcaacttgagccaacaatgattaaactgaaatgccctattcttcggtgcattggatgaatacaatgcctcggcttcaagaacttgaagcaaaattcaagtgttagttcacatacatacaagattgttattaataataatgaataacaatttaacttacaagctcttgatgtggtatgccacttggatgtcgacgctcaatttgctcgtagcagccctgaaacttgcttacttccttttgaatgttaccccaatgatgctcaagagagtttgcattcctatcagactcaaaatcacggttagcatggtagtgctctgcaatcctttgccaatatgccttccctggttgctcattgccaataataggatccgagctaatgctttgccatgaaatgcacagttgaatgtcctccttacgattaaagttgcttgatcttttggctcttcctttttgcaccatttgttgaagtatgaaggtcttcattttgcattggcaaggaatatgcctcaacatgggtctcttcggacatcatgcacacaaaggaatcacattcatttgccatcacaatctagtcactgcaataagtagataaattgacaacttctccaatcaatctcaggaaaaatggcagatactagctaatatatgttggtagaatgcataatggtagcaaatttttctaatcattagaatttagaacaggttatgctagag

SEQ ID NO: 48728 - DNA, 542 bp, Oryza sativa
agggcgaattcgagctcggtacccctacttacagcctcgccacttcaggaaaaaacataaatttaagagtaaaatgcaccagcggtccttaaacttgtcaggaggtttcacttaggtccacgaacttgcaaagtgcacatcgaggtctctaaacttagtttattgtatcatcccggccaaagccgcgtttgaccgtggtcttgcctacgtggcacgccacgtggacgatgacatggaatttttctcttctccctttttttttggacccgctgtggcctcaaaacctcctctcctctgccgctcgtctcctcctcgctgactcggccgccgccaccgccgcctctccgcgccgcgccgtgccaccgtagctgctgacgataagctggccatagcggcgacggcggatccgcgggcgaagccgcccgccgcgacgtcgacgcaccacctcgagccgtgggggcagccgccgccgccaactcccttcgatggtgggatcgaggagctttgggtgaagctcatgggtcacctacgagacgccgcca

SEQ ID NO: 48729 - DNA, 1141 bp, Oryza sativa
aatcgtattggtttcaccgatgatgaacttagtaggatcaaggttgccgactgggccgagaaagtaatggttcttgtgagataggctcggaactgcgatcagattggaaagatgctacgaatccaaaagaacagggaagaagaaaacaaaagataaggaaagggaaaactaatctgatgcgaaaaaagaggatctagccgatgagaacttacctccacgtattcggctgatgatgtggcagacgggctagtggaggtcgacatcgctacaggcgaaaagttggccggacaagaaatcgcctgggaatcgccttgcgcaccgaggggatcgctggagaaagagaggacgaagtttggcttaagcggtgaaaacagaagtcacggtgtgaagattctcggggatgacggttagtatttaaagcactgtgtagatttctctcggaaaacggcaagtgcggatttctctcagagtcgacatgtagcaaatccgaaacattttccaatattccggacttggggggcatgtgttaacgaccaaatttggtaatctaagtattggagttggagttgagaccgaggtggaatttaagatggaatcgctcggggaacagagtagaatcggctgaagtccgaaacggcagcgactaggatcggcagagttcgagtcggacagggttagccgattgagccgaatccaacaatatgacacggcatacgttgtcgggttaggttgacgtgcttcatgatgattgccacgcgtggatggagtcctgagaaggcaattgtatctattaattaggatattttatgtaatttccttagagatatgtttaggcaaatgtctgccgcaaagacttatagtatcttagagtttgttagagataagagtcatgcccgatatggacatattttgtaatctcgggtataaatagaccccgagccccatgtaataaaactaacacacgttcaaatcaatctcggtgcatagccacccttttacttttgttttgtttcgacgagttcttgctttggggttgagctgcatcggtttcaatcttcaacaagaggtaaaacttattgtggcggcttgcattctcgggatagtgcctccatctttatgatactctaatcttgttatgtga

SEQ ID NO: 48730 - DNA, 1551 bp, Oryza sativa
tttaactttgtttatttcttaataattattatttgtgctctgaaaattccactaaaatttatttacgcattttaggcttttaggaaatttacaaaaatcctctaagccttatttgacttttaactttgcacattttaattgttggaggctttcacatggattttaattattctaggcatcatttaagggatatattttagagtcgttttgggacgtgacaggggttttgttggcggttgttaaatgccattctcatacctccaacatctgcataaagtcgagacaataaaacatccaacatagtaataggtgcttaatctcacatattccacaagtgttggtgtatatttgtatgcagatgataaaccttgaagttgggaggaaaatcagactaaagtgaggagaattatgtatccatacaaggaggggttgtgaacttcattgaaacatcagtaaatgaacccaaaactccgagaaatggaaacaggaaggcccaggaagtccaccaaccgaaggccagaccaggagggcccaacccaggttcggccgaaccctagtgatcaggggcggagcccaataagctgagggggattcccaggaacccggcccaaacttggaaatcacttgttacccctatagtttcaccatgtaggaaccccctcagcccaaaccaaggaacccccttcttgtccagcccagaatggaaaaggcccaagtaggcaagcagcagacacaaacacaggcaggcccattcgatggagtcctttgcgctgctcgaggcttgccctggaagcctcacaatcatgggagtcacgacgcggtcaagcgggcattagcacaacacatcgtttcgtcttcaggataatcaagttcgctgtacgcgcctcctcgctctcgcaatctcgccggctgcctccgttccggcggcagcctgattcaaatcgccgacgccaattgacactgtgccccaagccccaaggtcaccgtgctcctgctgctcggcactcctgattttgccgctctgcccgtgatgactggttttagctagggcgagccgagcagcccgagcttctgccctttgaagtttaatcgttgcattgtgtgatcttgtctagttgtctaacagggatgatacattgttgcttgagttggagcctctgagctgttggacggcaacttggtgccgacgtttcatccaagattagctctccttggctctgggcctctggtctctcccaatccaccgacaacctccaattgagagcaagtgagatttcccctcacttctcaaccttatttcttcaatcttgaaaattttcatcttgtcttgaataggttttatacgatctactgatatgttttgtgaatagtgactttgtgtctgtgcttgacactttagtaacttcgtgtatatttattagttggtttctttgttaaggtacacaatttctaaatatttatgtattttcttgttgtatattgctatcaattagataatgatgtttacagttattagacacacgagtatttagtactccataatagtgttcc

SEQ ID NO: 48731 - DNA, 1156 bp, Oryza sativa
gtcacagatggccgattgacaaatttcataaccatcagatttagccaagtctgcaatagccaccatggtccacctgttccaactactaagccgacagctattttggccgatgctttatttaacacttggtataggtagccgagaagaattttgcctaagggaaattgtttctttgattctagggcttcggctacaaattgccagttggttgtaggaccacaactggatccacagaaaaggaacttttctagccacatcagcaagaaagccacatgttcccgaggagtgacaggccctttgcccatgtatgccgctacatagccctacatagccagaccaaccacctatgcttttggtcctgaaatcaaattggttcttggtgttcatactcatagggttagctgatgaagttacgtctaatccggtaatcatggtgatgtcaatcaaagttggagtcatcggcccttggttgaacaggaaagcgttgatggtattggactagaaataggtggcggcggccattaaaggttcatctttagctgaattggctatggtaagggcaagcacttggccgattccgatttcgtcccagtgaactttcttgctagccgacatgcgcttgtaccatatagtccagctcttctcgggtgaagttttctcgagagatggccaagatttgaaggtattcttccagtgtcctagatctgggttggctaatctgaaaggaatcgtattggtttcaccgatgatgaacttagtaggatcaaggttgccgactgggccgagaaagtaatggttcttgtgagataggctcggaactgcgatcagattggaaagatgctacgaatccaaaagaacagggaagaagaaaacaaaagataaggaaagggaaaactaatctgatgcgaaaaaagaggatctagccgatgagaacttacctccacgtattcggctgatgatgtggcagacgggctagtggaggtcgacatcgctacaggcgaaaagttggccggacaagaaatcgcctgggaatcgccttgcgcaccgaggggatcgctggagaaagagaggacgaagtttggcttaagcggtgaaaacagaagtcacggtgtgaagattctcggggatgacggttagtatttaaagcactgtgtag

SEQ ID NO: 48732 - DNA, 661 bp, Oryza sativa
tgattttgctcttttctgcttagattccgtcgtttccggagagtccgttttcgccggagaagagtttgaagagttccaaggccagcaaggcaagtcacacagatcccaaacaaccctttgagcatgttgatcctatttaaagctattgtttcttttcaactattgcatttattttcgaatgtcattgggtggaattaacctattgtttgttatagcccttttgttcttgattactttattccttgataccttgggttataataatttgactagttgagctttatttatattggttcaactagatattagatataattgcttagccctgcttagaaaccttagcacacttatgggataactaatgattcactattatttcatgatggcttattgatagttcacgatggacaatcgtgattggttaattaattaatgtgccaactaaaacctgataatggtgggttgtgagcacatggttttgatggtcgtgctcatgacaattaagggtaccggttcacgagtttcgggtgtgaaacatttatcgtgccaaccacaagccaacatgggcaacggctttatcttttggatagcatgggtcattgcggggcaccagactgagaagtggccgagataagcccacggggtcgcttgggagtccatg

SEQ ID NO: 48733 - DNA, 710 bp, Oryza sativa
taggtgctagcactagatggtggcttgctagcacataatgcatttcggcacttctattaatggaataaatcaggttggacagcacacttccccgggtgccttatctagaagtagataatatatgcaaaaagtacaataaccctcccacaacaaatattgtaatacttgcctttgaaagtattttcaaaacatgtggatttagctcctacaatttactagtacattactataaaatcaatccagtcaaagtcttggattgaagaccccaaaaacacaaaataatcttaatttggatatggaaggagtatttcaaattcatcagtgacctggcggatgcattaaaaaaataggtgtggaatagaagattagaatccatactacaacaagcagcttggaatacttcaaaggccattcctcagtcgggctcactgcagacctatatcaaatgccacacgaaaaatatgctaaatattttagttgaactagccaaagtgtccgtgcattgcaatgggaagaaaatggaacaaattgtgtacatggagagagagcatgatcggcaaacaaccaagtaagatggcaatgtggaaggagagatagagcggttgttctacggtaatgaaggcgacatatgctagagcaagaggggatgggattttgtttagataaaagaactgaatttctagcataataagccgattatgaactaataa

SEQ ID NO: 48734 - DNA, 588 bp, Oryza sativa
caaacgagaaccaggctcatctaccacagcaaatctttgccaaccaaccactttccaaatagaacgaaattcaacatccatacctatcttttttagcagctccggagagtattctcgtgtgtgagcatactcccggtcgctcaacatgtagtaggcttgtctttcccgatcactgacaaggtcaaggtcggtgtcgtttaggagtcatcgcggagcttcggcgtcttccatcgagacattagctaatgaacgagtactagactcatcatgatgacttgatgaagagctggaccccttgaacagacgagacaatcgcctcctcattctgcacaatggagcaagaacggactaactcggcgggggttaggaataaaaaaaatttcacccgccgattagtttcaccaaagcagcttgtatatatgcaactaagtatttgaatttgagggaaactatcaaagcttgaatgaacttgagagcaaactttggagagggaatgaaaatttggtgaaatggggtggagttccctctccggccggttggcttaagtagtgcacccacaacggtcaaaaccgacctgtggggccacta

SEQ ID NO: 48735 - DNA, 533 bp, Oryza sativa
ttttcaatcacctagagtcatagacacaaaaataagattatcatacacagaaatggactccttatgccaataatgacattgcgatattattgggccagtaaagacattgcgatgaaaatactcaacaggtaaaccagattcctattgggcttaatatgccaatatgttgaaacatttctaatattcagttatattttcaatgtatatgctaacatgatacattatataagaggtgtttttcttgagttcaggcaagacacaaaaaacaactgtgcatatctagtattcagatatcagtatatgctaacatgatacattactcagatatcagtatctaattcgtatataaaatgcaatcatttttttatatatggttgaattgataaataaatagaaaatgcacccaagttcacaaatcaactagatgggtacccttcgtgttgccgtgggagaattgtgataaaatagtcgatatgagttataaaattttcttttttacttattataccattttctttcatttgcttatatat

SEQ ID NO: 48736 - DNA, 1680 bp, Oryza sativa
gaagagatcgagctccaaacgggaggaatcgaatcgggaagaaatcgaactcggttttagggataaaagcaaaacgaactcgattcggacccaatcctcaacgattctctttgattattgggggaaaagaaagaggagaacgagaggaacaaaacccctcaaaatcccaaaggaattgggctcggatttgggcggaatcggagcgggaagcggcggctagggttcgggctcgcgcggcggcggccggaggtcggggacggacttgacaggtgggccccacctgtcggcctccgtgagagaggggcgggcggcggcggcttgggccggcgtgggccgcgcgcggggagagagaaaaaagggagagttgggccgaaaacggcccaacggcctaagagggggatttttgaactttttcgaataaaacaatttgtgaaatgttgtttcaattattaaaaatacttcccttactcaaataattcccagaaaattctagaacatagaggagcaagcatagtatttaataaaattttatctagctcatttttatgttgaaaattttcctagaaaattagggtttagcttgtaggcttttaaaataatttctaaaaattccaattaaaccacaatttatatatttaagatttttagggtgtgacatacacgaagccaaagaacttgctaaaaagacagagcatgaactaagggaccggattacccaactccaggattcaaactttgaactgagtggctcatcaaaaggtaacctcaagatctgccccattaatttgtgttgttataatcgtatcctcaactatctggaatcaaaacagtgcaagctgccaagatagctcaactggagaaacgaattcaggccttagaaagtgtcacgtcctgataaattcatcccaaaataaaaatcatcttctaaaaggaataatagaattaattaaaattcgaaaagaaattggcaaacactaaaatacgtacaagaaaaattcaaatatggcccggagaatttttgttaaattctccttggtctaaaaggagccctcaaattttagtggaattttcagagcacaaataataattgaaaagaaataaacaaagttgaaaaggtttataaaaagaaaatcctaaaagaagtcttttccccctcctcctcccttcttgggccggctcggcccattccctccctctctctctctctttccccccggcccatcggctcctcccccgtgcgcgcgccgctgacaggcgggcccgcccgccgctctcgctgacgggtggggcccacctgtcatcgccttcctcccgccgcgcccgccgcccgcccgtgccctagcgccgccgccgccgctgaatccgccgcatcccgctttccccgcgcgccttaatgaggggggaattactccccgcgtttccctctcccgattcccccccttttccctctctctctccctcggattcgtccggattcatcccgcgaagttcgccggcgtcttcaatggcggccgaaatccccgcggccggtttccttcctcctcggccgcttctctcccttccgacgctataaaatcgttgcccgagctccgctcttccgtttccgccgctcgccgctcgctctcgccgtcgatttcgtgcccgcgccgtgctccgctctcttcgccatcgccgccgagc

SEQ ID NO: 48737 - DNA, 605 bp, Oryza sativa
tgaaggcttgtcgtataaacatcatcttttgacaaaaaaggatgatatgtttatgtcaatctcgatgtgccattttctcccaacaagatactctacatccaactttagggcgagaaccaaatctcaacgtataaatgcggaccaaaagctcagatcttgattgatagcgactgaaatggactcactaattactttataagtagtgattaatgaagcacatccctgtcatgattaactaacgacaaagcaacggtgtaccagctaactatcattaacacaggaagaacatagtcccccattttggcattttcactaccagacattgcaaaaacctctcttgcaaattatgtatatgttgcgaaatgtgcaaattaagtccaaattataatgatggagattgatcgaataatgtgattatagatgtacaagaaatgcaatttcatatttgctatactgtctactgcacaattgtgcagggaattcgactagttgcaagtagtacagtcaagatcatgagaaaggtgaaagttacattgatgaggcaatgagtaccaaggcaagaggagatacagatgtggtagctgttttgttcaggagcaaaattt

SEQ ID NO: 48738 - DNA, 681 bp, Oryza sativa
  unsure (1)..(681): unsure at all n locations
tagttcatcagctcgaagacgatgaaaccctcacatcgccctttgtagccctctcatcaaaccggcgctggagcccagtcagaccggtcgtagaccaccggtcagaccggtcgtagaccaccggtcagaccggccagacgcgccggtcagaccggcctgaagcctcggtcggaccgctgtctagtcggcggtcagaccggcctgattgcccggtcagaccggctacatggccgtggtcagaccggccgactgcgatgagctggtaccggcttcagattttttgtttggagactcttcaactccatctccagaaaggtaggcacatcatgggatcctattttgatagtaatcacctncgaagtcctttcctccaccttggtgcgctttccttcccttttttttcattaacccgatttttaccataaaattggctttttgtttggtgaaagataagcgctcatggattggccttcggggtccgccccacccttgggtgaattgcattggaggcatatggttgtacattggcggcgttgccccccatgacatgaagtgaggataagaataaccccgcggccggcttgggataaaaccccatgacatgttctggggatgaaaagtttgaggtgaacgcaaccggcttagtggatgaccaaaatcgcccctaagaaggagatctgg

SEQ ID NO: 48739 - DNA, 3635 bp, Oryza sativa
cccggaatgtcagtaacagggaatcccgaaaaaaatgcagctatgtgataatttctaacgctaatgttgcagttttctaaaaagtggcgcaaaggttgcagcaaagtgatagtttagtcaataaaagtgcagttttctgaaatttactcttaattatatgcacttgctttagcttgtggggggctattgcatatctgccactagctagtgaagattttgtgcacttggttgtcatgctattgatttgtttgtattgacagaaggtgacatataattttgtgtgcagatgacgtgtgcagatatttgtgaggacccccctgctagggacgtgattatacatcgcccctactacaatctcaagagagcttgcatgaccggatttaatggtaatggaggtcaaattgccctagtaagatttatcctcaggaatgcagtaaaattggagaaaatgactatagttccaaaagggagaagaacgggcaaaatgatgggagaatacgaattaagccttagaatgatcaggaaaaaaattgttccaaaagacaagaacggtgtactcgtaattttgtagtaattctcaagttatgtatgtactattataggaagggctggacttacatgcccttgtactttttcagaaacaataataatagtgcatctttttataattttatttatgtgatggagcatttgcttagtatactaccgcagtagaagctagtgatggacgacttcgatctagatggtgatgtggaattttgctacttgggcatacttgcaggtagggtgcatgttgttgctccagtagatcacctccttgaatttagttttttttcttttaaaaaaagtcgttctataatttcaagacatttaacatagcaacctgcagatagtacaagccacaaaggccacaaaaaacaacaatcacaggtaacaaaataattatataaaaaattgaagatcgatcgtgttcttttcacgtacgctagttggtgtggttgcctcgtgattgacgattgagcttgaccaacaaggcagaacacagaccatgcaaccgaccatttaaatagatagccagccagtaacatgtactcctctgaccgtcccataaaaaacgaatctagaatcagatgtgatattctagtacgattaatctaaatatatatatatatctatgtatgtatatgtgtccagatttgtagtattaagatgtgtcacatttggtaactagattgattttttatgagacggaggaagtactacttttttactaatcgatacataaatatacattagttcgtctcacgttcaattagctaaccacctaaaactcaaggtaggctaaacacagtggcggaactgagagggggggggtgggggctggcaggggccatggcccctcccaataaaaagaatttttttattactcctatatatggtgcccaggtccaacaggccaccgtatgtcccaattcagttcggctggcccatagcagcgatttcaatacagtgaagactcatgccgtgaagtttaaatgaacatgactggctcgtagcagcgatttcaatacagtgaagactcgtgccgtgaagtttaaatgaacatgtaagtatattgcccacttttgcaaactattcgcttttatgtattgccaatgcatgaaaaaaagagaggagaaattaccaattttttgaactgtcaaaagccagctggccccctttgatttttttgtccagctccgccactggctaaacatgaagtagtaaacaagtcgattgataagattagtcaggccttaggtctagtatataaaaccccactcattggccagggaagcggtagaccaagcaacggtgatttgttaaatatgtttcaaaggtaaccgataggtttttcaactcgattttggcaccattccatccatttccaccaccactaaaaaaattgatgaataaattctccattcaatttgtgccttcttctcctaagaaaaatccctggaaaagaaaaaaaaaagaagaaaaagacatggctataaaaaaatattttgctcttccaaaatatggagcaacatgaaaaaaaaagaaagaaaatagccatgccccctctacaattatgaagcataaaattgaagaaggtatatacaaaggagaaacattttctttatttttcattctttccacatatcatacactttccacccaaaaatgtgcaatatttgatccaagagtatgatcgactatctttttgagtccatatatttggttttgcaatatatatgatgcaggtgtgttccgaattattcctactaaactccacatacacatcctttagaatagggaataatttcggcaaaatatgccttggtgaggatccaccgatgttgcaaaaaatttgagtgatcgagggcaagtcattttgaggagaaaaagctgattttcaaaaatttataaaaccccaaaagtctgatatagattatgaggaggactaaattcacggctattccatttaccaatcacccaagatggtaagatagccaccgctgaagttcacatgtatgagaatagttatgaataatttatgtgcttgtattatatcttggagaaatttattttgaactttagctctaacctttactcagggacgagcaaagagataagtgtgggggggttttgttggcggctattaaatgccaattctatgtcgccaatacctacataaacagaaagaataaaaatccaacatagtgattaggtttgattctaacatattctacgagtgttggtgtatatgtgcatacaggtaataaaccgctgaagttgggatgaaaatcggacctaagtggtaaaccgctgaagttgggatgaaaatcagacctaagtggaggtgaaatcctatccatacaacaagtgggccaaaaactacacaaaacatcaacaaatgggccttccactcgaagaaatagataagggaggctgaggaggagcaacaggctaaaaagtgggcctgttgggctagaccactcccgcagccatctgatttggggtttggcagggacagtccagatgattccctgatggcgtttggatgatagaatggatatttcgccttctcccaaccgtcatacctgccctacataaagacttcacctcttcacttcactcacacactccaagcttgagctgaattataagagactctattgtactttattatactatattagggagagagtagagtagaagaagtcggaggagttccgaagttgtcggtaatcctcttcttacttcttttgctatgttaattactctgattataatagaaatatcttttgagtaatttagttatgcttggtgagaattatcacttggttagttcctaatcagcgtgcgggatcatcgttcactataatcaagtaaaatatagtgattgctttagtttgtagctaacattaaagtaagttattaattacttagacgcggtgtctaggtagttgattttcggtgtttactccgtatcacacaataggtgtgtggtgagtgtagaggtggtgacagccctcaagatcacttaagtcctccctgtccgggtacgtagtagagcgatatctgggagcagcgagctggccagtacc

SEQ ID NO: 48740 - DNA, 3092 bp, Oryza sativa
  unsure (1)..(3092): unsure at all n locations
ctgattagaaaaaaattaggggtaataaaaacgtgtaaaggcggtttacaaattcaaaagataagacagacctggtttaagatttgtatcagaggtggctccggcgaactggatgaatgaaaaacgggaaagctctaaaagtaggttgggtcccttcttaacggagtaagaaaaaggttggttttataggttaaataaagatgccggaattaaaagcaaagggcgccatgattaccggcctggaaagccgaaaccgagggatgcttgtcctctcagaagaagaagtggcagtgtccgagatcattttttcaaaggttccatggtggtcattcgattaatctaatactagaaaattaggaatgtgtattcatcgatcgacacccttaccacttgcctggtagggaccatatataacagtattgtattgaagagcttatatcaccagtataaactagcatggtggtccgcgcaatttgcgaggctagcatcatatatttttctctcaaataaaggcataatgttttcccattaattaatcaaatatatttaaaagacagataaacttgtaaattttgtaatactgtccaaaatacaaatgtgtaaaataatattgaattttatatacgtgtaagtaattaataattataaatatcaaatttgagtatgttgtaanatagccacctcccccacgtgggccccccacttcttcctcccttttttcaaaaaagatgtttcacctagtgtatttacaatgtttcactatttataaatctaatgttgcagtgaatgaaatattccattgcaactaaaaacccacatattttggaaacccctattaagggaatttgatttattttttgttccaccgaaaaatgtttcacctagtgtagtcacaatgtttcactgtgtatagatctaatgttgcagtgaactgaaacattctttcgctatttgctaaaacattgtttttatataaggtgaaacaacacccgatttaaatgagtgaaatattttcgatcacttagtgagacaattccgatatacctggtgaaacattgtgcaacattttaaaaaaattcaataataagctaattttttttcgtcggaatatatccatgtgtggtcttgttttgaagatttaattgcaacgaatttaatggtgcaatcggatcatgatttggataagtaatttaagagaaaaatcggttcaaagtagttttgcacgtaaatcgggcgctgacgtcagcgcccgatttcccagcccgcccgatccgtaggcgctcccacttatgtgtaagaatatactctctccatctcataaaaaccaatttagtaccgaatgtctaaatttatggtactacaatgtgatacacctggtactaggttggttttttaggacggagggagtagtatcattctattcttgccatggtttacttggtgtattacaaaaatttcagataaaaaaattgtgaggccggatgatcatcattgactagttgcatgaaaacaatataatgatataaagttgatgtaatttgtcttgtcaatcgatcgtattatatactcccttcatactcataaaagaagtcgtttatgacaatatttaaatcaaatcttggaaatataaatcataaataactctcaagttgttgagtttgaaaatgtaaaaattatatgaatagatttgtcttgaaaaatactttcatatatatatatatatatatatatatatcactttttaataaatatttttatggaaataagaagttaaagttgtgttttgtagactgtgtcgctgtccaaaacgacttcctttacgagtacggaaggagtaagtgcttgttcggagtggtttggtatgaagataaaacttaccctactcaaatgttaggattttaattataaacagtaattctaataatttttagtttgctaccaataccgcatataccatatatatatatatatatatatatatatatatatatatatatatatatatatatatatatatatatatatatatgctgataagatattggtatcactcttttcagaaagaacttgcctatgatttgaagttgctaaattttttggcatcggggcaagctaaactagcccttcatatcatatcatgtatttacgtactgtgctagaactataattagtgagttctgttggaaagcatgtattttataggattttcgcacaaattagttccattctcgcgaaattccttttcaaaaatcctccaattaatcaaaataagaccatagactatataagaaaaatgttgaagtggtttgaaaatgtgcatatgtatatcacttcaacttttttcttgaggattagctgaatctacaagctgtcctaattaaggaccattaggacaacgacactacacatttataccctcttgggacagggagtttaaggctggtcttccctaactaagatacatggggtaccccgttattggcctccccctagcctagctatcaggttcgcttgaatgcaacgaacatccatgaagttgacgcttacgctacatgcctagtactataatgatgtatgtaccatacaaccttctagctagaagttacactacctgatactaagaactaattagcgttaggaccattagataattaatgattagtatgaagtatgtactacctcgcataggcggatctagcactactggaaaaaccatctttggtcagtcgaccaaattccacaatagtcccgattgtaataaaaaccggaactaaagaacatctttagtcccggttcaaaaggttagagctacttttgatttttagtacccgttggtaacaccaaccaggagtaaacatcatttttagtcccggttcaaaaaaaaatacaggtggtgtcagacccctcatttatctttaatcccggtggtaacatccttagaccaaccgggataaaaaacgacatcaccgagaagcatgtgtcaaaccccctncttatcttnagtcccnngtggtgtaacaacttgggactaagaataaattntaggcccggtgggtgtaccacccgaaaaaagtatcgcggatcagttataa

SEQ ID NO: 48741 - DNA, 1468 bp, Oryza sativa
ggaaaaaaaaacccaaggttcccaagcgtaatccaattctacctctcctcctcaatataggcccatcccctcccctcccctccccacttctcagccggcggccggacgggaggcgcctcctcctcccatctcttcctctacctcctctcctctgtatccgccccatccccttcccttcccacctcacttctcaggcagcggcttccggatgagaggcgccctcacgcggcaaccgggcggcggcggagccggcctcgcacaccggtggtaaggcagtgcgcgaggcgcgcggcggggccgcgccggatctcctctcttttttttataatttgtgattgagagatgtataattccttttttttttaaaattgtgattcattgcatagatctgagatgtataatcgatctgtgatgcatttgatttgtgtgtaatttttttttagatttgtgatgtatttgatttgtgtgtaagtaacttaggatttgtatttgtgatgtgaatgatttgggatgctactttaatttggggatttgggtatatacatgacactcgatttgaggatttggtgttatatctggaatatacatctttctcgatttgggagaaaataaaaaaaaatagaccaaccgagactgcccctatcctctctttagtcccggttggtactgcccctatcctctctttagtcaccaaccgagactaaagattcctctctttagtcctgattggtgttaccaaccggcactaaagatcaatctttacttccggttatttcacccgggactaaagatagcgatctttagtcccggattcgtagtcccggttgaaaaatcgggactagagggggttataaaccgagagtaaagacggattctccaccagtgtaggggcggtctcgggacttaaaaaaaattctagcctaatgcatatatgtacatatatgaaaataaacttttgagaaaaaacccttatgaatatattatgatacacatttgatcaatttatacaactaacctggttatgtttagggtattttaaaaaaatatataggttggactatccatttaaaaattctaaatacgccactgccacctctcgtgagaaaaatccacattagagatactggcactagtactgttcacttttctctctccaatgatccatcaagtactcctgcttccctatccaactatccaagatatataagctgcattttgactataagtatgcaaaagtctaatttttctctaagtaacctccattcctgattcccctctcacattgtctccctcccacccagcgaaaggttgaaagcggattgtaagcaaaaggtccatggcaacggtgtaacctcttttatacagatcggggtgcatcatgagctaactatgagtatgggcaacgcccaccctaccgagcactggtttctttgacgatgatgcctcaagtacaaagatgacagttgct

SEQ ID NO: 48742 - DNA, 1190 bp, Oryza sativa
ggctggacgatagatacgcgtcgtctgcaagcagctcatcaattaagtatttttaaagaacacgtcaacatcttaaagttagtttggtgtggtgagggaaagtgggccggcatggggatggtgtggtgagcacctcctcaagctcctatgtcgtcacgggttccatcccttgtttatcaacctcctgcggcgaggcagccgctcggagttacgaggatggtggacaggtagacgagctcgaagtagcttgccggcaacccccacattgctccacttggttgggaaaagaaagagttgaaagaaagataggggaaaagaagagtgggtacttacatgtgggtcctacagtagccctatgctaactccacaagtctgaccacggtcaatttgtcacgtcagcataaaccatgttccaaatcaccgaatcgatttgcactggtttttgaagttggagaatgcaacgtatccacttttacagtttaggatacgattcgactgaggccaatagttgagaaaggtgaaataaacttattcctactctataggggtaacacaagtgggctataaagtgggcattgtgaaatggaaggagtaccgagctgaatcattagcccaatttaaattcttctcctcctcacaaattcctttctctccctccgtcctaaaataaatgcagttttagcactattcatattcaacgtttgaccgttcgttttatttgaaaaaagattatgattagtatttttattgttattagatgatacaacatgaataatactttatgtgtgactaattttttttaatatttttcatatttttttttaaataagacggatggtcaaagcgctaaacatggatattttatgactgcacttattttgagacggaggtagtaacatatttgtcgttgaattgccaacggatggtccagatttatcataagtgggctgcttgctaagaagattgcttgtctggttgggccgttctctatttgctcggtagcgacaacgcagcccactaaactccaaagaacagagtactctcatttcaaaaggaaaaaaaaaaaaacaaacaaacaaaaaaaaagaagggattgtctatacataaatcttgcaaattctggaccacccgattactttaagatttgtgcaaagaaaccaaccctaaaaacctcctctcctctcctttct

SEQ ID NO: 48743 - DNA, 1089 bp, Oryza sativa
  unsure (1)..(1089): unsure at all n locations
ccaggcnnanatgagattcggcttcgtctgcaagtagctcatcatcgaatgttttttcttattttattagtagtcttatagtagtcttagattttacattttgatgagcctcgttttaaagaattcagattataagacttttctactattgcccacattcatatagatgttaataaatctaggcacacatatatgtctagactcattagcatatatatgaatgcaggcagtgctagaaagccttataatatactccctccgtcccaatatattaaaacataggacatgatgggacattttctagtactacaaatctggacagactgtctgtccatccagattcgtagtacttaaaaaatgtctcatactatcctaggttttaatatattgggacggaggaagtataagtatgtcaaacgttgggctggtgtctttggaaaccgaggatctcaaattctcaatccgcgcgcggtcccgcgggtagagacaagcaaaggaggagaaccagcgccacgccaacgacgaccggtcgatgcatgcccggatgcaaccccaaccccctcgcgctcgcgcgggcgggcgcgccgcatatacacgagcaacacatgcgcgcgcgcgggagcgagaggggaaggcagccaggccggcatcccgggttcgcacccgcgcccccgcccccggacacgcggggtgcaccaacccgcgcgcgtgttccgcgccggcccgcccgcgcccgagtacgtcgtcgtcgccacacgcacgcagcagcagcagccgcattttcctttctcttcacccccgcgcgggcggaccgcgcccgatttggcggtgtcgtccgtcgcgctacgctagcttgcgtgcggcgcgcgcgcggncacccaccacacgtngcgtcgaccggtcgatctacgcctgcgcgcgcgtcgtctcgtctcccgtcgcgtcgcgtcgcgtccgcgctgagctgagctgggggggccgcgcgctgctgtctcgttacgccatcattcatatgcgtcgtcgtctggcgcgcgcctgatctgaccgaaaggctgncgtttttgctgacntgccgncgggncgtccgcg

SEQ ID NO: 48744 - DNA, 5904 bp, Oryza sativa
  unsure (1)..(5904): unsure at all n locations
acttccccctccctcctccgnccgaatctggaaggaggggaggggaacttcccaccccggcgtcgtcgcctctgtccggcagtagtcgccgtcgtcgcaccgcgcgcgctgtcatcgccaccctgctcgcacggtagctgccgcggcccttaccagcctccccctccctcctcgggccagatctggaaggaaggggggaggggtttcgccgccgccgcccctgccggcctcccccctcctccggccaaatctggaagggaggggggaggggagccactgcgtcgtcgtcgtcgtcaccaccgccccgcaccgccgtcgttgtcaccgccccgcacacgccgtcgtccccgcccgcacgtgccgtcgtcgccgccgtcggtagagggagggaggggagggggacggcgccccaacgttgaggtgaggggaggggaggggagaggaggggaaagtgttgagggtgagagagagttgagtgagtgaaatgagtggtggggaagggtggaggagaagataaaacttagaattttttggggtaggtacgattttcgcaggcgcggtttgagtggtccgcctgcgaaaatgattttcacaggcgtcgcttaagtggtccgcctgcgaaaatcacagcgaacttcaccccgatttatatttttgtaggcggtcatttggcttcaagggtcatattcgtctgtgaaaatcagaccctcatattgggaaaaatgcattttctagtacagacatgtcgttttcgtaaaacgggaaaaaaagatcaaagtttctctacatgtgaccgtacgtttcacactattcctgacttcaactatggccctgtttaggttgtgtttggatccagtggtgaaaatttttggcgtgtcacatcagatatacggacacatatttgaaaaattaaatatagattaataacaaaacaaattaagattctacttgtaaactgtgagacgaatttattaagcctaattaatccgtcattagcaaatgtttactgtagcaccacattgtcagatcatggagcaattagtcttaaaagattcatcacgcaaaatagttgcaatctgtgcaattagttattcttttagtctatatttaatactccatgcatatgtccaaacattcgatgtgatagagtgaaaaattttgctagcagatctaaacaggccctagttccaaaaacttttcgcaaaaacatcacatcgaatctttagacacatgtatagagcattaaatatagataaaaaaacaaaaactaattgcgcagtttgcatgtaaatcgcgagaatgaccttttgagcctaattagtccataattagccataagtgctacagtaacccacatgtgctaatgatgtcttaattaggctcaagagattcgtctcgcggtttccaggcgagttatgaaattagtttttttattcgtgtctgaaaaccccttccgacatctggtcaaacgtccgatatgacctaaaaattttcattttaccaactaaacaggccctatatatttacgtgatgcaaagaagaagcagcacaaggacaaaatgattgaggatgacagttgacaatgacctttttatcgaaactcgttccagcgagagcatcaggctgtgtttagatcagcggtgaaatttttcgtcgtgtcacattggataacgaacacatatttaaagtatttaacatagtctaataataaaataaattgcaaattccgcctgtaaactgtgagacaaatttataaagcctaattaatccgtcattagcaaatgtttattgtagcacaatattgtcgaatcatagagaattagacttaaaagattcgtctcgcaatttacacataatctggggtaattatttttttctatatttaatacttcatgcatctgtctaaacattcaatgttgtctaaacattcaatgtgacacagtgaaaaaacttgccagaggatataaacatgcccttctagcgaagctgcttcttctttctttcttttttttttgcgatcgcacatatacaaatttgtcgaagtcaactatgttatcacgatggaaggacgctcaccacacaaagttacactattttattgttatctacttggactgttccttctatgtaggagtattaacgaagtgatacggacggttaccaaacctaggctgccgtgtttagttgttaggtcaattttttttactcatacggacacacatcacatttaaagtattaaagtagactaataacaaacaaattacatatcccacttgtaaactgcgagacgaatctattaagtctaatcaaatatttactgtagcactacatagccaaatcatggtataattaggctcaaaatattcgtctcgcaatttacatgcaaactgtgtaattatttttttcgtccacatttgatgttctatgcatgtgtccaaacatttgatgtgacagaaattttggaagtttaaaagtaactaaacacggtcctaactaactttcatggaaatatttatgtgcatgcatgtttgaaggagatgtttatactaggagagtatctttgaaagaaaactactacctctatttcaggttataagacgttttgactttagtcaaagtcaaactgtttcaagcttgactaagtttgtagacaaaataataacatttttaacccaagacaaatttattataaaaatatattcaattattgatttaatgaaactaatttggtattataaatattactatatttatttataaacttagtcaaatttaaagtagtttgactttgaccaaagttaaaacgtcttataacctaaaaacagagggggtaccgtgttttttgagtaaaagattttcatatgtaactctagtataattgaaatgtaatactacacttttactgtattgtaactatactatatctacgatataactacgatatagaacctgtattcaagtatagtttggttagctagcaccggaatcttacacgtgatatgggtggatttttttttccttcatgcacaaatctcgaggtgatccgatggtcacagatctagaaattttgagggcaaaaaacttgcagaagttttcttccagttctgtaataataattatgtacctatattatcaagggcggacccaacatttctccatacgtatcagagtctagcacctctgtgggtaaaatagaacgggagagctgcaaagcagcaacaccgcccttttttctttctcatcttacatactaaaatataagggattttgattagatgtgacacatcctaatactattgaatatctggactaagaacatgtctagatttatagtactataatatgtttcatccaactcaaatcccttatattttaagaaggagggagtgtttttttttctagggatagaaccaatggatctagccaccctagccatcccctttacaaaggaggagatcaagagagcaatggataagatgtcggggaactaaactccagatcctgatggtttcattagagggaagcttccacaaggtgtgcttgttgatgtaaaaaaacacacacacacacactggcttagatatttgttttactctagtgcaggtactaaatttgctttcgggttcagagcgtgctagttggtttgatcttgcaaccaacaagaaacaaagaaaccaaagtttaatccataaatgatggtggatcggctagattgccgatgatgttgaaagtatatctaggacccctcatttattttggtgttaatgacaacacaattagagagtaactaatgctttttgttgagatgtatgcaaggatgaaaaaggagtggatgtcaacacaataagtattgcggcatcttttgtggtaattgtcttctaatccatgtatatcttgtgttcttgagtattaggatgccgtactattaagaggaatgccacatgcatataattggtagaacactagtgctcaaaatcatttatttgaagtgttcctgttttatgtctgtcggactatcgatgttgatcagactatccgatgctcagactatccgaaatttcatagaactttgctcactgtcttgggtctgagtgttggctaaaaaaaatatcggactatccgatacatcggactatctgaaatttctcagaacttcactctctgttttgaattgctttttattcctttttgagtgagttttaaatcagactatccgatgtgatcggagtatccgatgatccagagactccgaaattcaatggaacttgagtctctgtgagaggatgaaattcttggttcaaaaataacggaatatccgatatgaaatcggactatccgatcgattggattgtccgaaattctccagaatttcgttctctgtctctggcctgcttgggggtcaaaaacatcggactatccgatgtcacctcggactttccgaggtgggatgaaaagattctctcccaacggccacattttgggggcttctataaataccccccacctaacccttttctagggttacccaactcattcattcatattcactttgggttgagcttggtgctaaggtgctttggatctttgagctctctctccctctctcaaatcccctcttgttctttgtgtggtggatcttggtggttgtggatttggggtttgagggcctagtgtgtgtttcactcgatcttgagcactagggttgaccaagagttgtgtggtgtttgttactcttggaggttgaggactcctagacggctaggtgtcactcccgagccaccgatctacgtgtggttggccgggagaggtttgtgaaggccggatctcgcctccacaaggaaagagataccccttagtggaaggaggagtgcttagtgcaacctcttgaggaaagggctagcaaagacccggctcttagtgagctcctcaacgaagagtagaatcccctcaaggatttgaactccgggaacaactcggtgaacttcattgttggtgatatctcttctcccattatttagctttgctttttgtgccactatagatctagtcgctgtttgcgccatactcttgtttgtgcactagatcttcttgtagtgttcttttagtggatcagacagtctgatccaacatcagactatctgatattttcgaatagtctgactgtggatcagactttccgaccctaactcagttttagcttccgcataaagttttaaattagcctattcaccccccctctaggcctaattgaccctttcagacgtatcgtctgagatcaagccgatgcgatatcattcagatcggcaatgaagtatatagtaaataaagagctaaattcactttatcggttgtagatattaacaatatataatatatactttaaaatatgtttaaaccaagcgatttggatacatcggacagccatcgagacagtataaatcacttatgtttaaaagtacctcaaatcaaagattatataagctcggattatataagttcatgtcatagccgataggtaaatctagcgtgttgatgctattattccgatacttctttatactaagatatcattatagattaactatattaaacaagtataaatctgttattaggatgacctaaatagattgatatcaagcttaatatatttaatcctagtgagatcttaatataaagggcagatttagcaaatagttatgaatgtgggaaatgatagaatgacttacattatgaaacggaggaagtaaataaatgaaggacaagatagataaaccaggtaagatcggctgaaactccgatactatctctattaacaatcatggagcaagctagaaattatggttctaggtattacttaatagatcaaacttatctgatgcagcattaagcatagagagaaacaca

SEQ ID NO: 48745 - DNA, 1162 bp, Oryza sativa
  unsure (1)..(1162): unsure at all n locations
ttctatcaagcataagcatagagagaaccncaagttctatcacccagccaaataaagtctttttcagattggtggatatactatataatttaaatcgtcaacattatctaattctatctgtcagggttatggataccacatacctaataatagttgactaagctcagcagggcccaccacatatcatgtcttatacggaaacaaacctcgtatatagagggaattccgtataaggaaggacaagaagagttttatatggaaatgacaaggactactcggatcgtatccatatttatctccctagtcttacttagacaagggggcatctatgggtataaatacaagcccccctagaaggagaggggacacacccaccacaatctacaaagccacaagccaatacgccaccagacatcgacatcagatattagcctagccataccccatccggctccgacggaggccggcaagagggatctagcgctatctctgatctcgccaagttcgtattcgagtaggaagactaccctgccgtcgactacaagttggttatctagccaccaagacgacgacagttagatatgttatcccaattattgtacttgtgtgatccagatgaataaagagcaacaccggcttcggccaacaggatgtagggctattacctgtcagataaggggcccgaacctgtataaaaatccatgtctccatctcttttgcctcaatctcgcatatactctggtaccaacgatccccataccatccaaataccgtagtcacgataccaaacgtggacacgatcagctgatttcgatgatagaggctagtcgacaagatcagatagtaatatcaacctagattatatagtatatatgataactcagtgattcacatatacaagattagagtgtcataaagatgtggctactaatccctgagaacgctagccaccatagcaagtcttacctcttgtcggagatcgcaaccgatgcagcccaactcgaatgcaagaactcgtcgagtcaatgaaaagtagaaaaggtggcatgcgccgaaagtgtattgaactggtgttaattatttagggttaattggattcataacattatacatttcacggtttgtnatggcatagttctcactcaaaanttcaagtccctcg

SEQ ID NO: 48746 - DNA, 898 bp, Oryza sativa
  unsure (1)..(898): unsure at all n locations
agatggactgattgacagatcgacatgtagcncatcacggttgataccgactcggataaggagaagccgatgtagccgatttcggcaaaggaatcttacagtcattgctggattagatttaaatgttgcaaaagtactgccaggcatggattgcgtccgaagaaggcaactatatctattaattatgatattttagtagtttccttatagatattttcggtaaaagtccgccttagggacttgttcgtcttttagagttgtaatagaagtggagtcatgtccgatgtggatatatattgtattttgggtataaatatatgcccgagaccttgtaaataaatagggttaattagatccatgtcattataactttcacgcttttgaaaaatatcattgatatttaactatttagaaccatgccattattatttcacatatatctattatatgccactacttacctattcaacacaatttataaacttttaggaccaaattgccatgtcttcttcatccccttccccctctttcctttcatcttctctctgcatctccttatcccttcaaacaacaggaggttgcccagctgcttctcttcttgtgggaggcgatggacttgtagaggaaggtgaggaggtcgatcagggcacacattggatggcagtaggaaggacgcgagctcggcaacagcgtcagagagcttcttcccgatggactcgtagatcttcgacgtcatcctttgcgagcaaaaccgagtctgcgcccagagccgttgccgccgcattagcctactctgtgacgcnacacgcatgtgcagagcctncccagcaccattgcggcggcaagtatgcgggcacgatgcgacctgctgacatgtgcgcgagttgacgctgacggt

SEQ ID NO: 48747 - DNA, 612 bp, Oryza sativa
tgtctttttttttttgacggagggactataatcgtagttgatcgagtatgttccaagcaatggaaatctcaccccattttttcttttactagccgttccttcattttgcagtagggttacagtagttacctagtaattaaggagtactagttctaccttgataaactagattcttttactgacatggagtgttttaccgactcaaagcgatgattccttttactgtgctttgccgtttaccttgctaattaacttgctaaatttgtggctaactcgtggtaattaagttacgttgtatgattcttgcagatggtgttagacaacaccacatgtaagtagtacaatatgctgtgttcacgtgatcgtttggttaagcaagctacagcgagagcaattaaaggtcacattagatatttaggttgtttttagttcagtgtaaagtttgtattttggttgaaattagagatgatgtgactgaaaagttgtatgtatatgacaggttgatgtgatgaaaaaggactgaagtttggatccaaacttttaatctaaactttggaataggccgagagcctggaacaatgacaccgaccatagcgaatggagggaacatgg

SEQ ID NO: 48748 - DNA, 655 bp, Oryza sativa
aataaaaggggaaactattactgttgagttttggagttcaaatatccatggtggtttatcatactaaggactatttccactgtttgttttaggattttttttcaagctaattaaacacccaaattagaattcagcatgatagcacttaatcagggttaagcaccagatgaatcccctaaagatctctattgagcgtaaatcaatgaacaagcagaaaacctctatgcagcagtatatctcaacagcagtaataccctgttataacatgaagatatgcatgttttcatgggagtaatatgcatatatccacatacagatagtttttctatttacgatgatcaacaatgatctctgttgtccagtgtgtgctcttgacattcaatcctttccctgaaatatggaaatgcatgaaattggccagctgctattgttggatttgcatccttatggtttccttttttatgttatttcatgtagcacctggtaaagacctttgtaatggtggcattcctgggtctggactacaaaacaaaatgcacaatgctcaaggttttctactcactccttttgctagttatgatgggcctaatgaatttctggaagtttctagttgctgcatattgagctaacattgttcatttatcttttaattttt

SEQ ID NO: 48749 - DNA, 2082 bp, Oryza sativa
aaaaagataaggaaaagaaaaacacccaagtggttcttaacctggctaccttttttacctttgcctttgtgtgcggcatctgaattgaatttgttgatcttgtgcgggtgcaggtttcggggtctaaaatgtgttcggtatcttttccgtttttcttccctggtatatgaactattaagcacgttcggtttttctttcatttaacaccttgaattttcgttggtcaaatgtgcaaactttcaatgttgacgggtcaatgagaatttattgtagttagatcacgaaatcgcatcattggattgtcatcaaaatagtttgatagtttcataattttttttcacgtgtaagttgtagctgtgaacttcacgtcataattttgtatgaaccaaaaaatatataaatgtaaaaaaatgaggaataacaacttaaggcggccgcattaattttttatttaaattaggaattgaaagttcaattttgtagcggatactccctccgtcccataatataagggattttgaatttttacttgtactgtttgaccactcgtcttattaaaaaaatttgcgcaaatataaaaaacgaaaagttgtgcttaaagcactttggataataaagtaagtcaaaaaaaataattccaaaattttttgaataagatgagtggtcaaacagtataagtaacaactcaaaatcccttatattatagaactgagggagtacttaacatggttaaatctatctaataatttcttaactcccctacgaagcttaggtgtagtgataagaaaaatcgagaaggattggtacaagttaacaacttaatcaatagattgtgcatatagcaaacaagtctatataataacacaaagagaaagaaagaagacccattttagttgatagtggtattattacccaaaaattaaaaatacgttcaatttagacctacttttataagcatcatgccagctacagctacagtcacagcctctttcatccctttttctttcttccaaaaaacgctcacctgtagtgatggatctatgtgaaagttgtgaggtcgaatgtcgaatgaccctacagcttcttcacattcattcttgagtactaaatttttcatggaaatccattcaaatctacacaaataatcccactgaaatatttaataataataatcgatctcacaaagtaactttatctaataatttattgactccgccactgaatttaagtgtagtgataaaaaatcgagaagaaggtttggtgcaaattaacaacttaaacatgaaattaaattgtacatgtagcaaccaacctttataataacacaaaaaaaaccattttagttgaaagtggtattgctaaaagagttaaaagtatttcaatttagagcaacatgccagctacggctacagtcacaacccctttatcctttttctttcttccaaaatacaaacgcttaccttacagtgatggatctatgtcaaagctgtggggtccgttgaccccatagtttcttaccatcatcgtttagagtttcttaaattttctatatttatccgttgaaatttacacaaataatcccactaaaatatatagtaatgataatcgatgtcacagagtaaatttgctggctctgccactactcacctgtaaccccccaactatgccaccaaacacacataactcatcgcctcatcatcgtcatctatctccgcatgagaccgcatccttatcccaccacgtccccctcgcgctcacgcgcacagcaacaaagaaaaaaaaaaaaacccgtcccttttccctcgccgccccaccgctcccccaccccacgtgtcgccggcccatcggcggcggcgcctgcgtgggccgtgtggcccaccctgcggccccttcccgaaaacggaacgccccccccctcctcccctctccacgtcactgcgcggtgggcccgcgcgtgcgtccaagaagcgtgacgtaagcagtgacagaatccgcgccgcctctcggggcgcccacgtgtcgtggtcaaacggtcagcgcggggcgggggctcgcatcgcatctgctccacgtgtgcgctat

SEQ ID NO: 48750 - DNA, 526 bp, Oryza sativa
cagcatgtggatgatacaggatgacacaaacaaaatgagacgcttacacaagcacagtggcgcaaggttggagtgtttaacccacggcaagggcatggccgggaaagcggcgagaggcctcaccttttcgtcgaggacgaggcggacgcgcgccacggccttgctctgccgccgcatgcggtacaggcgccgccccagcacggcgatgccgagcagcgcgacggcgacgggcaacgaccacacgctcctcgccgcccgcagcgcccacgcccggagcacgcccatcggcaggtgccaccaccgcaccacccccgccccagcccctccgcccttcgtcaccgcgccctcgcccgcctccacctccgccgctgccgcctccaccggcagcggctcggtggcctcggcctcctcccgcctctccccgtcgtccgacgagtccgaccacagcgccgcgcggtcagggccggggaagacgaggtcgtcggggtcgggctccacccagctcgcgttgccggacgccaccccc

SEQ ID NO: 48751 - DNA, 1218 bp, Oryza sativa
ttgttcaggacaagcatagtgaatacttgtgaactatcaattacacgctgaaacatcctgcagcattacttgcagtgagaatgtcaaaacaaggtacatgtgataatttcaaaatgttccagccaattcacgataatctaaagtagaatggaaagttgaatctagaataattataacatgatggtgtcaccatgaccatccgatacagtttccttgtcttaattcagtaattcttaagagagcacatgttgtcagatagatgttttcagaaagtgtaaaaataggtataaagctgaggtgaacatacagggcaactaaaactacagagatcgactagttgcttcctttcccatatggtaccgacaacaaattatttcagaggtgttatgtagtcgttagaatagagctaacgcaaggtgcgaagccaaaatctcggcaaattatctagcaagaaaatattgtaaagaacagatgacctattattaacctcatttacattaaaaaaagtggatagccacagttagattaaattagtttaaactgattggccatacctttggaaccacaaagcttgctctaacgtctctccaatatgacaagttaccaggtacatacattgtgtcattggattgcagttcattatttgaaacatctccactgggagcagacgcatcaccttttcctgtacgtagaaattatcgatttggtcatttggtgagacctacgactagttaatcaatcaagttcatgaattatgttttccacaaaaaacacatgtatcttatgaggattgaaagaaatatatattatttttaataacacaatgaaagaaactgccacggtgccaccaccacataactcaaaagttatccatttgcattccataaagctcgcatccaatgatccactttacattgtctttttatactaatactaagaaaataagaaatgccaaacacatgtaatatgctaatttagcagtgtaagctagaatacaaaacaagcaatcagaaaccttcagagaaaaaaatcatataaatatcagatttcgatcatttctacgaccaaataagcatagcaaaccattttacaccaattgcaccatacttgcaccagaaacatttcaatctccaaagatatcccaatcgtaaatacgtcgaattcgttcattaccagcacaaaatttacccccaaacgtcatgaaacattacggctaag

SEQ ID NO: 48752 - DNA, 649 bp, Oryza sativa
ttggtggctcggccttcgggtcggaatggaaaaaataagatcggaagaggggagagagagagtgtgggtgggggtggtcgctgtggggcccagagtggggcccggagggcagggagagcggttggttatggttcggtggcgctttgagcgggttacgtgtctccaactaaatttggggcgaattcgttctctgttcgatcggattcaaaaatcacgctctacttaaattaattaacgagagctatctggctgcatgtgctcaccaacggtggttcgtggaaattttaaaatcgtgattcaattagtggaatatgaatttgtagtactaggaaagaatatatcacatctcgtgatagattaatttattctgaaatggatctaatactccctccgtttcaaaatgtttgacgccgttgactttttagcacatgtttgaccgttcgtcttattcaaaaaatttaaatagttattaattttttttttcctatcatttgattcattgttaaatatatttttacgtaggcatataatttacatactatttaattttttttcctatcatttgattcattgttaaatatatttttatgtaggcatataattttacatatttcacaaaattttttaataagacgaacagtcaaacatg

SEQ ID NO: 48753 - DNA, 572 bp, Oryza sativa
ccggctgagaacgacggatgcagtgaatttgaacgggtggatggatcttatctctggaagcagcagtcagcagttttgtccgggaccgtggctgtgcacaggagtacaggaggaaaagcgtcgatggcaggatggattagattagacgagatgagctagtatggctagcttctttttttgaaaaccatggctagcttcactactcctggataaatccattgcgctatttgctttgctgctcagttctacaggagttaggtccagtcagatgaaaattactccaacaaatttcatcggatttaaataaatttaactaagaaaaaaaagtcaaacgacttataatataaaatagagggagtaaatcttcggaataaaatctgctaatatgacttgatttatatgtgctaatgtgcaatatacttacccctccgtcctataatatagccatctaggaccggacgagacatttcgttcattcatcggattataaaatatctaatctagtcttaggttgttatattatgagacgagattataaaatgtctaatcaggctagattggtatattatggg

SEQ ID NO: 48754 - DNA, 1032 bp, Oryza sativa
atctagcactagtaagttgacatggcacatggttttgaaagaaaatgtttgtgttattaaaattgtctaagatttttcttctaaatgtatgggcatagttatcatctgaggttaaaaacacctaatcagtctcgtttattgtgtcaaggcctaacaatattacctcagatatggatttcctgttggtggaggtttacatctctaaatgcacacataaaacattgaaaacaatatagtgtgcgcctagcaaaaatctcttccacaagaaaaaactattgttaacataccgacagcttttccgcttgcccacccatccaacttggagcttgaacgtgggggccaacaaaactttcttgcccccattccaccccttttctgcccaccgaaaacgtccccccgctctccctgacacctcgggcccacacccgctgcgtacgtggcatgtgcgggtgcggaggagggggcggtggtccccggtcgcctctccccgagccggtccaaaccgaaacctctcccactgactagtggggcccatctcccagcacgccaacccctggcccactttacagcgagcgtgatgacgcggggtgggtttggtgagaaaaaagcacgcgctgccccgttcccacgggtagcggggcgggataccatgacggcgtgacgtgatcccgtcacggctccgtccatgtgacgtcagagagagagagagaggggggtaaaggggtaggttttgtcggaatattcatcgtctccgggtgtgtttagtctacgctaaaattgaaagtttggttgaaattgaaacgatgtgacggaaaagtcagaagtttatgtgtgtagaaaagttttaatgtgacgaaaaagttagaagttttgaagaagtttggaactaaactcggtctccttggtccatgagaaatcggcgagattcagaaacaggacagattcagaagcaaaggaattggtatgtgaaagtgtagttgcttgatggcttgtattgacgagtcgcagggacaaaggcagagttggtcacgt

SEQ ID NO: 48755 - DNA, 619 bp, Oryza sativa
aattcctttgattataggagcggcactgctttgctaattttctgaaagaactgaaaacaatgagtgagagatacatgaatagtccgctgcatgatatcaatatgcaccgccaacatgttcataataggcataaagcaatgcaatggcaagaagattgagacagtgatatgaatgttatgagtcttatgactagggatgatgggaagatgtgaaagtgtttgcgttgaggaccaaggaaatgatgctaattaacaatgtaaaataccagcaagattcagatgtgaacgtgtttgctttgagtagtgagtatgttggtgagttcgtcttatttaaaaatatacgtaattattattcatttatagtgatttgatttatcattagatgttcttaaagtataacttaaatttttatatttacataaaaaatttgaataataagatgaatagtaaacgtttaaaaaaattgacagcatcgtcagggccggccctggccctatgtagccgaggcgaccgctggggcccatgatggtggggggcccataatgggtgtgggggggtgcaacacctaatttattagtagtatagtacctcatccaatgttgagatcaatgatttttatt

SEQ ID NO: 48756 - DNA, 511 bp, Oryza sativa
cctacccaacaagaagcttttctttttctcgtcgccggccgggcgtcacgagcggccagctcgtctcgtggcgtgcatggatgcatgcatgctgctcacgcgtgaccgatcggtccgatcgaatcgccattggcgtttgcacgagaaagcaactcgctatcacttgcatgtgtatgtgctggccttgtgccacgagaagtagctaggctgcctgcgcccttgcttgtcacatgaagctacaccacaccatatgataccaccatacagattaaattgccctaaagaatatattaagcttgaagctgaagaagctagctaaccgaatgcaaaccatgtactccctccatcccataatataagggattttaagtttttacttgtattgtttgaacactcgtcttattcaacaaattttagaattatttatttttttttgacttactttattatccaaagtattttaaacgcaatttttcgttttttatatttacacaattttttttaaataaga

SEQ ID NO: 48757 - DNA, 1119 bp, Oryza sativa
atgatttcacctcctgacagttgcaacgcacttagcgcccttttagccaaggaaatggaccacaccaacgttaaatggtggtcaaatgcatccacccatttttttgcctctttcttgtgcaaaacttccctttttcttaagacagtggaagcattttgtgcaagtttcctaagttgctgagaaaggagtccattgctaggaatgtgtgatgcgtgaagaagaaatggatcttcagttggattcctggagatggagaaggagaaggaccctcctccaatccacctcaatgccctacctgatttatgggtgcatgtggaccatctgatgcaatatgctctgcctcaatcagaaagtccatcaagccatccaagtgcagaagctagtcaagtttgcttatctacctaactctgtattaaggtgtatttgcaatattccatatgaataagcagaacattgcaaaaaaaagatttaagggttttttttaaaaaaaataaggcaagattttgccttgtgaaatttcagattttagtgcaacttcgacagataacctgccacaaatcaagtacaagcacatagaaattttgtttcaagaacaacagaacaaaggcactgtttagttcccacacaaaaaaaattacaccctacacatcgaacgtttaaacacatgtacgaagtattaaatataggctaaaaaaataactaattgcacagattgcgattaatttgcgagatgaatcttttaagtctaattgatacatgatttgacaatgtggtgttacagtaaacatttgctaatgacgaattaattaggtttaataaattcgtctcgcggtttactgacggattctataattagttttttattagtgtccgaacaccctatacgacaccctatataatacccgatgtgacacgtaaaaaatttactcccctgatctaagcaccccctttgtggactcatgcaagatggactgcagtcagtgcaaaacctgcaaaatctacactgaaaataaaatgtgctatgtgctcaagtgcactcaaatgggtactactactacttgtttgtcaggtactgtcattttgaggccctctttgtttaggcttataagccgacttata

SEQ ID NO: 48758 - DNA, 955 bp, Oryza sativa
tcatttgtttggagcacagtttagaacaacttacaaagtaatttgtaccacagacttcacaagcattttgatagccataccaatacggattagtatgtttagttatggtaggaatggttttctatgtaaattgagctgtctttatgattctgatataagtaacaaatgtggaaatcctatacttagccatggcaatgcattactagaagcaagcaaactgtatcaccatgtataagtagtcttctaaaagtccatttgaggtgggctaatttgatatgaaaaacccaggaaataaagtgcaacaaatatctctatatataaatagtaaaaactactagtagcacaatgtgtgtccacgcacaaatcatgatttaattatgcaaaaggaagaaatataaaacgatgtacaataggaaataaagtgcacctctttagtaattgtttggcagtaatccctggtgcggttgaagatcataatgcggttgcggtcaatcgtgtcgcgcgcagcaatgagaccaaacacattgatcggccactgtaagccccctcttattccctttattttgaccgagatgatctgcagagtgtgacggactgaaatatgtctcggcatagagtcgtccttacggtgtgtatagcgcatgggtggtataggcgctgcatgtagcgagtatcaatcaaccaaagaatacatacagtagataatgcaatcctaacaaagtagtgatcaaccctaaagaacccaatccaatcaattcctatgtactcccaatgaattactatcaatatgctatcaaggagtatataatataaaaggaatcaaagaatgtatcaatgaattactgacagattgtgtcgtagggaccgaagatggcggaccaacggtattcccagtcctcgcggtactcgcgagccttgacgcccggtgtgtcggaccagtcttcgttggggtact

SEQ ID NO: 48759 - DNA, 1135 bp, Oryza sativa
cccaccgttttcctcctcaggaggtgggtcccacctcgctcgcttttttgtgctcatgcgtcgtgtcagcgcgtgagccgccgtgtacggaccgaggtttgtgtgctcggctgtggctggctggtgggcccggagaatcactagttctggccctactctgctagcgtcaggattcaaaaattgagcgcatacgagggctcgtttagtcggtgaaatgatgggttgtcacattggacgtttgatcggatgtgggaagagatttttggacatgaatgaaaaaactaatttcatagctcgtctgaaaatcgcgagacgaatcttttgagcctaattaaaccgtcattagtacatgtgagttactataacacttatggctaatcatggactaattaaactcaaaagattcgtctcgcgatttacatgcaaactgtgcaattagtttttctttttatctatatttaatgctccatacatatgtccaaagattcgatgtgatgtttttgcgaaaagtttttgggaactaaacagagcctgatattacaggagcaaagagcaagtttaacagtatagccaattactagctccaaatcatctatagtcaatttaatagccaattcatacaatagttactataatattaatacctaatcccacttgtcatacacacattgcatcttgaagtctgtgctgcagctggttgtaaatctgtagcccgctgttcttctctatcctattttatcttcttaaaatatgtttatagctgacttataatctgctattttatctgctctaatgtagctatttctagcacagtaacttagttccaaaataaagctatttcttcacctacctcctcttctcaaccaattacaatcattattcttcatctcctttctcttttcaaccaatcacatacttccttcaatcattctctcctactttctcaatacacgtgccaaccttaaaaatgactatatattaggacggataaagtagtatagtagtcctagttgattattaatatatttttctgcaacaaaagaatttcgataggttcatttaggtagaaaatcaaccgtagaaacattctcatgcttgtgaaaattatgagcatcttttccatagaatgtataca

SEQ ID NO: 48760 - DNA, 830 bp, Oryza sativa
catgaaaaaatcattacaagttcatggttttttactcgttgtgattaattgttacccctgcatctatatatcctatttaatcctgtagttatttcctggtaggtgtccaaaatagatagcggctgtaaagtttcagagagccttgcagtgtgagcaagctgcctgaaatgggccaagatggcatgctctgtatctttgcagcgaaatggcaagtgtgaatctattctagctaggaatggagagagatcagaacatttgtggtgttagtttttttttattttggatttgtggtgctagctgaatatgcatgtctgcatacagcacccctctgtttgtgtctgtctacatatatatatacatgaccaatgtgcaaacgtacaaatattagagttcgttaattaccagctgcctgaatcttaatctccatccatatttgcatcaatgtcagttcaaaaattcagcagcagaccatagctatcatatcaaccatagaatgatagtaatcaataggtcatcaaatatacatcatgtatatatgcaggtcgttggatggcaatcatcagtatcattgaggaactaaacaaggctagcttgagctgcgactttttctgtagcgtctgaattcgtgcatcactctgttgtgtgtgtgttattcagaaaaagcttagccttgattagtgcatagtagaaacatcgtgtacgcatcttaatctgtgctatttatatgatcgacagcttttacgactttacagttcagtttgggatgtccatatataataagtgaagaaagttacttcgttgattaagttcagtttgagatggttatgaag

SEQ ID NO: 48761 - DNA, 545 bp, Oryza sativa
tgttcttgacatgtgattaaggtgttcttcagattgatatcatttcaaaccataattttttttttggtaaagtttcaaatatgtgtatatatttggtttcttaccaactttggtaaaaaaatacataaggaatttggcaactacgtagtagtggctatcctgccaaaacctggcaatattgccaacttacaaaaatttatttattttggctacaatctcaacagccctaatttatatgcaaataaattgttcctgccttataaatctctgcggttatcttttttcctcctgtcatgttttggagttcacactttacaggagcagttatcagttttcctctatctctttctgaaccttttattctctttccagatattggcaactgcaaattctacaattgtctattcatatatccaaagcatgttctctgaacagttacttgggagagcatgcagatgatatcaagtgtaagcttttcaacaagaatttgttctgatcctcacatgtctaacacaatgatgcctctcaccgaatgcattcagcat

SEQ ID NO: 48762 - DNA, 611 bp, Oryza sativa
  unsure (1)..(611): unsure at all n locations
ttcttacgcaaatcatgcccattgcaaactcaatctactagattaaatccgaccgtcgaaggaatcgntacgcctccactcgcgccgtcgccacgcgcgatgggagcgctacaacgcccggacgacgagatcgaagaactcccgattgaattaaatcgcaagaaataaatctcaatttcaaattactaaacagcccttttcatagttttaacaaataccaaatctaccttttcacatactgctagtatatacttgtggtagaatgtactgtaaaagtcctctatatataattaccaaagcattattgctcacacctacactaataacagatcacgacctaaaaagagtcttaaaaacacataaccggtgacaattagaccctttagttacctaacaatgtttccctgtgcatcctactccaaatgataggtttatatatcagggaaatttgtatgagcacgacaacataacgacaaacacaatccacggtgtgaactaaacaaagactaagggttttcaaacacgcaagaaatgtgtactacaaaaggtgcacttaatagtaataatgcatttctgcttctgccctgcttgcatctgcattacgctgatca

SEQ ID NO: 48763 - DNA, 935 bp, Oryza sativa
atctatatatatctcgccgatgtgttggaagcatatgcatctctgggtagcacgcacagtgcggcatgctgccgacggcgagcacgtcacgtggcacctgccggcctccgccgcagaggtggcggcggcggaatcctcctcggccctgctgtgtcggcgcgggcggtgctacccattacctcttgccggctgtgtccattttttttctctctcaatacgtcatcgacaatatcggtagggacacaactatatgtgttacgggtgcatgctaaaaaacccgattcagaaatttttttaatgattcgtctatatttaccatatatatactatatatcattcaattcaaatttaaatacatatattaatctaaactcaatcagtaaaacaagtttaaacttgatcaataaaacaaacgagtggcatatccttctatttcgttttagctcctgagtgtcgactagggtgaatttctttgacctattgagtattgacagtcaggggatgttctgccgacattcacgtaaattatttggaggccacatctcatcttcatctttattgttcaggtacaacggctcctcctgtacgtagccaacttcctcttctcagttctcactcaccaacgagagaaaaaagaaaagaaaaaagcaaaaaaaaaaaagatgggttgcttcccatgtgatgtgcgtattctgaacgattcgtctgcaactgcatcgtcagctcgggtcgatcgatggatggatgtacggttcatatctgacgtgtgatggattcgagcatcactgacgaatcctctcaccggggtcaaccacagatcgccgtgtcggagcggggcccacctggcagccacagcacagtgaggggatggatgagcagaacgccgtgagagttcagagaaacatccatggagcccccacatgacgctcacatgg

SEQ ID NO: 48764 - DNA, 762 bp, Oryza sativa
cagtcgcttcattgatggtagcgccaagttcttcaagcactttacttagttcaccatctggagtaatctgaggaaaagctctgtttagggccacctccaagtgatcaaggatgccatccatcgtttggcaatatttcttaactagctctgttttcgaggcattgcttgaagacagcacccggaaatttgaaatactatcgagtagtgacaatgacactgaatccatcacctacataaacaaatcaaaaattaagttcacttcgggtgcggagacaaaggaacggggaagctcaaacaggctcagagtgactaaacaaacaagcaggtgcattccactgtcattcgaagttatgcgtaagaaaaatagctgagtaataacaagcaggttagcatgcacgtttcagtgaaaatgagctgctagctaactcaagcatgactaaccatgccttgttatttatctactatatatgtgaactaagatagacataaattccgtgcttatacctggaacggaaagcaacaaatttaggcgtgatagcatcgaaacatctcgtcagtgtcgtaaaacaattggtgatcatcagaaattcagaactacttagtccaaactgtatacaaacaagctcaccgaacacgcatttttgccccaatacaagcaccgaagcactatccccacactatcacaaaccctaaccgcacagaaatctcgaaaaccccatgccgtacttgcccaccaccacaaacaaacgccatcaccacgtc

SEQ ID NO: 48765 - DNA, 772 bp, Oryza sativa
tatagtcctttcccccctcttcgtgcttcgggggaaggttttggggggggggggatttgctatttgttactcttgtctttccctcatacattggttgttattttgaacttagttgctagtattagagtgaaccaatggaggtcacattattttttatgtgctgagatctgcgcccttgtctccaggtgcaacagcacgagtagctgatgttttcaatgttgatatggctaaatcacaaggtttgtattactaaatcagtcatgatttttttgcggtagttgacacttttctgaatatttctacctatattcactatggttacttcattatttgttttttacaagttttatctaagcttttgtttgagcttttttctctcctcatgtttcattgtatctgatattattttgaactccagttgttagcagtagatggaacagcctcagcccagcctgctctctttttaaattctaagtcgctgcctatccttcttatttctaagtgcaaaaatgcaagtagctgaacctttgaaagtgctatagagaaataaccggaaggttttgtttcatgtcagtgtgattggtgctttgttttgatcatgtctctaccttatctaatatttccaaatgatcatgttttgccccttttctcctcaaatatcttttctttggaacagattaatcttgattcttgagatagatgtaactaatgatgttttaccttctttaatttctttgttcaagatgcatcagggcaagtaactgattacttg

SEQ ID NO: 48766 - DNA, 1518 bp, Oryza sativa
ggtaaaaaaaaaagccgaccgtaaataaaataaataaatcgccgactgcaaaaaaaaaaaaagccatccggaaaaacagatttggtatatgtccgtctcttttatccttcttttttttcccatttttctttttttccatctgctttttttcgttcttttttccatccatctttttttcgccgttctttccggttattttgccatcgcctttttatttttattcttttttcccgtccctattttttattcatattttttttggcacgcggaagggtgtgcgcacttgcttagaattcttttttttcatctactcggttttccatcggtgggccgaaccctaacaccacccgcacatcgatcaaccttctcatgctttccgtcctccaatttattataaaaatcaattctccactacccatcatcattttccacatattttttcttttcagctccgctttaattcaccatattcatattcaatctctatttagaagtcaccgtttatatcccacagttttgtggattcgctccaattttgataaaaatgaaaagaggagatcgagtgatccaaaagccctcaaccaattttaggagatcaagaaagatttgaccggatttgataggaggatcggtcctagcatcatactacacggactgtattccggaggttgaagatggcattcaactatgcgagctaggcctacattctacttgtagagtaggttcaagagaagcaggctaagcacagggaggcggtgggctagaccgagactgaaaaggaaggagcaacttgtgtttttgaccgaaaataaagagtataatgtttttctagtcgaattaaaaattcaaaagcttcgagttcgaggcctctacgtgggcctgcggcccaaccaggcccgtcgtccatcccctctccatcagtcattccaaggtcaacccaaaccctacctggtccgcgagtgcggtggcgatggcgacattctccgatgcgccgcccggggacgcggcggccggcgagaagatcttcaggaccaagtgcgcgtactgccatgccgtcgacaaggccgccggccacaagcatggtgagccaccgaaccacctaatgcatatagctcagtgttcgtccggttggaggattgttagattgtggaggtttctgcatcgttttactgctctgatgcgtgatggcagggtttccaggttgccatcagatagttggtttgtgtaatatatgctacttagatcttacagctagcacgtgtctgtcgctgatgtttgatttttgaaatcaccatgaatcatacgagggacatgcgttgaccatcttgctggatttgctggttagctggtaatatgcatttaagctctctgagctcttctctctcgatgtagtatactcagggccaggtgtacatatgctagttttaatggtaattctaatgatcctatacatctttggcggttatatagtcttcgtttatcggctagtctgtgaaatgtcaattattaggccctgtt

SEQ ID NO: 48767 - DNA, 1432 bp, Oryza sativa
gtcggtcggttcaatgcgcacgtgtggggggcggacgtagttttgtctttgagggttcatggggagaggggtgggagacaggctgtctccagttgtcttgcggctcggtgggcgccgagcctccagccttggccggccccaccccgagccgacgtggaacaagcccggggtgtgtaatcgctgggtgtacacgcccccatatcgattccattccaccacagctgctgatggtggctcttcttctcttcgccggcgaccggcagaccgatatcggagatgatgaagtgcgacggtcgtgatttctattgtagctgttgataggaggcaaatgggttcttctcctatggcgcaacatagttgtgtttcttttttcttttcttcgccggcgacttatatcggagatgatgaagtgcaccgatcatgcttttttggttgtagcggttgatatgaaacaaaagggctcttctcctccggcgcggcgtagttgtgttttttttattttcttcgccggcgatcgatgttggagatgctgaagtgtaccggtcgtgcttttatagttgtagctgttgataggaaaagaaaggggatcattgacatggtgacgtgtgtagcattatatatcacggagcaatcatgccatgatttaattgtgggttgtggactgtgtgaaagaaaattagagggaaaggaaaggaagggatggataatctttatggcaatcttgtgtttgatacttatggtgagattgaaaatgtacaataagagaccaaagaggcgatggagaagaagggcatgttctcctgagctccttggttattgattcagactcgtttgatcctatttaaataacagggatgtgctagcgtctttggatactgatttcaacggctcaatagttatatctatgtcatatgtatttatcatgtgtgtttcacgtatccaataccaaagtatcactctttattcattaaataatattaataaaaatgacttagatattattctattcatgtagatgctaataaaatatatatatttaaaaagttagctaatcttgtatatctaaacgttcatccctactttatattaattctttcttctctcgtgaagatatatcgtcctttttttttagcttttggatgattcatcaaggatataaattatctcttgatctcttctgcccaaaaaccatactatataatccaattatttataatcttttgataattgatctaagtatgaaacatataagcacatgagagaaatttaagtagtaagaaagaaaatttcacaccatatatctaccaacttatcacattattctttcgttgtaatgcgcgaaaagctaaaaacccatctagcactagtaagttgacatggcacatggttttgaaagaaaatgtttgtgttattaaaattgtctaagattttt

SEQ ID NO: 48768 - DNA, 605 bp, Oryza sativa
acatggatatcaaatttgacatgaattttacttaataattgttgtaacctacttttaaagcggagttgtccgtaggctcatacggtcatacccacattggtaagtgcgcagctctagtctagccaagaaaattaagcgatcagttaaaaatgatatgttggagccagtgcttcgtgtttgattcacactccaagccttcgctaatcatatatgctaatgcaactcatatcctgaattgtattaggttttttgcaaattgtaatgcacacgaccatgttactagtttctttgccttaatttttctaacaaactgttgggtcagaggtctagatgataagactgaaggggggcaatatatgcaaaactacaaatagctttcagttattgaatatctggaatggagatgatgccaaacacaaaattttagagaggctccatcgttagttagctgccttaatccatcaggattttctctcacccctgctgcttctatcttgtctattctccgtcctgtactctttgggggcaatacacttcacttgtccagcccagcacctgtcttgtcattttccttctctttaattaattaaggccgacatggaacc

SEQ ID NO: 48769 - DNA, 531 bp, Oryza sativa
ccaaaataagccgcaaacccgtttattttgacctataagtgggttcatgccctgtgcgacaggatgcaacctatgcaggctctgctcttatatgtatttgttttttgaaaaccgctatatggtatttgtctcatataagcatattacaggatgctcttatgtgatcaggctctactctaagtcctcctaatcattttcgaagtaagtcaaagttcagcgctttgccccgttgatacacgcgtgcacacgcaaacacaggtaggcgatgcacatcctgccactagtatggcagtacaaactacaaagtcacaaacagaaagaattctttgtgcaatattatgaggacgatggcgacaagattagtacaaggagctacatattttctcatcagcttgcaaccatacttaactcatgtaatttgcttaaagaacaatgcaatcacctataggctctaaaggagctacctattggctattgcttacatgcttagccagtaatatcaggttcctgaagtaaaatggtttgtgtttg

SEQ ID NO: 48770 - DNA, 1194 bp, Oryza sativa
caccatccatttaggtcccgttgttttcttataaagacatattttactttagtatttatctgatttaaaaatgactaaaatcaattaatcacgtactaatgattttttttccggtttacatgttcctacttaatgtttatgttctacacacaattgtatttatctcgaaaaataaaaatgcccaattgtattacttaaaaagaattgcactaccttcttcttgtaaaaatatacaacgttttgattatccgttatatttaaaatcttaacgtacaaatacaagaatatatgcatgtttaaaatattttaatgataaaataggtcacaacaaaataagtgatgcatatatagttttaataggatagatggttaaacattcgataacttcatatatttaaaattagagggagtacagttttactacctttacactcacagttatatattatattcatgtaaaaaaaacagttttattttttatttcttttccttgataagtatagatgtatttctcatgatgtgtgttcgctgctataatttagactcaccatttaccgtggctttcgggttcgggttgtcgtagatggtgaacattggagtactcaatttcaacacgagtattgaaagaaatgtgcgagcaggaggaggatgatgaaatgtgaaatgcagctagatttttagaggcctgcatgtcgaacctgcgttggtggcggctacgagcagagcgttcgttgatagagaaccgcattcactgtcgatttctcttgcaggtcaaaaaccacatttaagatattttcgttttttacatggatctgatttctctggtcactccgtgacagaatgttcagtgagagcgagatactggaactactcaatcattggcaaaagaaaacgaacaaatcctcctgcggttttaatattctggccaaaattactggctgttgtcaacccattttcgagtgatcctgaaacagatgagtttggcacttcgaaaggcaagagtctgtccacgtcggtcttttagctctttctgtaacctcaccacgaatacgaaactatatcagttctgctgctttctgcagaaaaggtgcttagtttatggttgattagtgattactcaacttagctgagaaaaaaaaaacagctgataaaaagagaatcttcttttaccctcttttgcaaagccgatttttt

SEQ ID NO: 48771 - DNA, 531 bp, Oryza sativa
catagtactgctagctcacaaaagtactttgcagcttatttctgacagattatatgctaaacaccttccttttagttatgtctatgctacataaaaactactgagcaattaatcctcccaagttttttgtccaagatactgaagcccattcactactaataaatgaaaggttaagcatccagcagccgatttttttttctaggaaaaagaaaggggcattggcaattccacaaaggcaggacatgatttaggatacttggtcaaaccaaatgaatgaggtaaccaaacatgggcaggcagcataatgggtattgcaatgtcgtgctaattcagatagcagctaagtatggttgaaatactgggggaaaaaaacaaaaggcgctcaccacaaatgaactgttcggcagaatcaaggaagctttcctccttccccacacagtgtggatgataacccttgaggcagttcctgaaaagcataacaaggcacaattagctagctacactgtcaccaatcgattggaaatgatcccg

SEQ ID NO: 48772 - DNA, 2051 bp, Oryza sativa
  unsure (1)..(2051): unsure at all n locations
tattttaagcatttttttatttttgttaatttgcactcttattttgagactgagttggaggaagtagtgcattagattgattatgaattactactgaccatgagtatatggggaatgttgtgaagttataataattatatttaacgataaatctaaatagaccaatttttaaaagttgattcgaaatgttcaaatactccgtatgtcccataataagtttatttttagcttattttatctgttccaaaataaatttatttttaaagtaatcattacatcggagtttgtgaaagtaggacatacttgtattgagagtaaataaaacgaataatagttgcattgggatttgataaagaatgaggattatagtttttttattttatattagtatgtgtgtgatgattgaaaaataaacatatttcgaaacggaggaagtacatattagtaagtaaaattaaaatttgttgactgcacatattagaaaatgccacttccttttgatgaaaaggagtaaatggtttacttgtgataaatactgatgcagtgaaattcattaagtcaaggataatacaatgtactccctccggttctataataattgacgctttagacaaggttaaggtcaaacttttataactttgagcattaataactttaaaaatatttagtttaaagaaactagaacaacatagatttgtctttcaaagcactataataaaagtaaacatgcacttatttattgtgtatattataatagaaaaataaggttaaagatatattttgtaaatcgtatcattgtttaaaacgttaattaaaatgaaaccggaggtgacatttatattacaacctgaaatcactggagccggtctgtcggtccggtcaataccaacaagcggtgcaacatgggagggattgactacttcagatcggatgcttttattcagttttgccgcacgttttcatgctttttaattcgttggacgcttgtttttttaatcattttttttgtatgaatggaattattcagacattctccgcctaaatgaaacgaatatgccttttggtgtgtggttaggtattgccgcccatgttagtggctactactgtagtcttttgtcacatcactggacaaggcaaaactctctacggtcttggatgatgctgcactagctaggtgatcatacctaaaaaaaacgtactctggagtgtgtttgcagcaaaatatgttaaatatgtacattcaattttttgttattggcaaaaaaaaaacaacaaggtgctccgaaatcaacatgaaccactttgaagaaaattttattaaaatgattttcctactgaaaaaacaaatttaaaaactcacagaatatgcttagtatttatttaaattattaatccgaataattgaagttacttgaatcgggttgaactaattaatttctagacactcagagtgtgtttggataatgggaaatggagagtggaattagaattgggaaatgaataaagggttaggactaaatggaagatggagaatgaatggttagaatttaaagataccttttgatgggtgggaaatcatttcccaatcccattatacaaataatgcctcaagagactatgcagtattaacaatggtttgaccctcctgagaggtttgaccccgccgcctcagctttacgttgctcacgtaccggccagaaatatcacagcacacacacacggttaacttttttcccgcgcgaaatctctcgaagtgaaacatcccaagcaaaaatccgatcgattcggcgagctagcaggtcaactcgccatggctgacctcccatgcatatatatacgcgtattacgtacacttgctttcccaacgctcgcgaatcaaatcgagggtgaaattaagtcaagaacggagagagatcacggtgaggttgatctcagctcgccggaggaggcaatgagccgggcggagtgcggcggcggcgaggagcaggagcggtgcaggtacaggggcgtgcgacgacgacggtggggnaagtgggtgtcggagatccggg

SEQ ID NO: 48773 - DNA, 583 bp, Oryza sativa
gtattacaaggcctttttctcataattcggccttcatcatcctcagaatcatcgagaaaatcatcctctgaagcagcatttgccgcaagatgtatttccagcaagttaagaatcatatttgacttcacttttcttttcctgaacaaagaatgaagcttatcatcacaaatgacagattttcttttcctgtccttgaatagattcttctgctggatgtactccttaacaactccagtaagtataaattcatcaagaggtttagttgtatccttgccaatacatgacaggaattcaattagctcttttgaaccccaaccgacatatgttttcttgtttgacttctttctcttcagtgacatttttgcttcacttggttggacctttacatcaaccgggaatggttgttcagcgccatcattaacactcaatgaattcttatctgccctgtaatcttcatctgggggtttctctgaatcccttccttgtttacagcttaagcttgttctaagacaaatattggcttgctgcaaatcaatcaatgccaagccttcattgtctttaatagtttcccagtagtctttca

SEQ ID NO: 48774 - DNA, 594 bp, Oryza sativa
ttgccaaagtgaaattataagataaggatagtccaaaaggaaattttagtaataaaaaatggtaactgctttattttgacagtcctgctttaacatttggctggtatactgttacgtgacacgttatttgagctcatttcattgctaccctgctcaaaacaacaccacagaaaggaagtggacgacacttagcctgagttctttgggtcactttcccaactcaccaatctaactatcttgtttttttcgcatgttttcaaactactaaatgatatctttttttgcaaaaaaaaatatatacaaaagttgttttttaaaaaaaacatattaatatattttcagagaaaattaggtaatacttgattaatcattccataatgagttaccaaagaacatagccttatatatgattggtcttgaactcttgctatacatgattggtctgttgcaaaattcacaatattgacacatatataccttccatgaattaatctacaggagaagcagagctcaaacaaaatttccaggcctcgaagacgatgtctagccaaacgagaaggtccaaattaacagccgaccaataaccggtcgacc

SEQ ID NO: 48775 - DNA, 1278 bp, Oryza sativa
  unsure (1)..(1278): unsure at all n locations
gctatgttgacatgtagctaacttgctatgcatgcatctagggatgatttatctacaataatcgctgacaatctgtctgatcggcttgagagatggattcccacatgtttaatcacgaggtaactactggttccttttttttttataggagtagaaaagcttaaaatcactcccttcaataacaagtgacgcttttatattgatacggtttctaaaatgcaacttgatttgcatacaactaactaggtgagccgcgcaattgcgcagctagcatccatacaaaattattttttttacatatgattttgcttaaaattagttaaatagctatataattgtcttaggactttgaaaaaccgaaccttatcatctgcattttctaattttatagtttttgaaagtcacactaggcgctacctcgtacttatttgttacccttttatttatttgctcgatctactacggtttctattcatcctccttgcaacttttaaaattggatcttataaattctagagtttattgctcgatctcctacggtttctattcatcctccgtcaaacgccgtcactcgactcccntaagccgtccatcgcctactctttttattttcattgggatttttaaaatcgaacataattatcatctgtgtacattttaactttctagaagtcccggcaaaccatccgtagctttgttattgtactcctctatgacccatccgttgccttctctcttaattattagtgagattttaaaaatcgaacatgattatcattttggtttaatttttactttccaaaagtcttgccaaacaccgtgattgtgctgcttaacagcttgcctgtcatcccttctcttaatcatcactgggattctatttgattttttttaaatttaaccactataattttgacatgctatcatctaacaattattttttagtaatatttaaattcaataatatgataaatagatactacttgaacactttggaagtcatatcaaaatccaatttggggatgtattttatttttaattttatttttaataaatatttttaataagtagatggactctgcttctaatattctttatttttaattctgaattttagtaatttctaaattgcattcctacctgaactctttcgaattcgtagaattcatattgaaatcaaaatttgggatttattttattcataattctaaaatttaattaatcctatgttgtgttctaaatgcactctcttccaatattttttaatttagaatttta

SEQ ID NO: 48776 - DNA, 538 bp, Oryza sativa
atctaaaaagcttcggatataccactcctatagtaacaaaatccaatagggactcctctgtcctgagtcctcccgactccttagggcatgtacaatacaagcccttcttcatgtctattagactcgtcatgagcgtcggagacgaaagctttccttacttccaggaccaccatgagtcaaagtaatttgcttgaaatttattcaacaaaatatatacaaatttcacatagtgaatttgatattttatcttgactgatacctcctccctttcatctgcggtagtctttagtgtacaacacatgcttttaagaccttagtgtttttaggaagcaagttgataattacaattgtttatacttgtaacaacaaggcttgattttagcattgaaagtatctttccagaaataaaaacctattgaacaaaaagtggtcacacataggcaaaactgtcaaacatggagcaagtatctcaagacagtgatctcattgaaactgtccttatttcttttttcgtaagcgcacaggtccacttttatct

SEQ ID NO: 48777 - DNA, 912 bp, Oryza sativa
atcattagatctacacatgtaacttacgcagaataacatgaacagatcaaatatgcgcaacatattaacacgtaccgaggtgacgaaaagaccggctgcttggtcgaaacttttcgcaggctctgggcaagcctgtgtatcatcgtcgtcgtgatgctcatcatctttccacttcggcgcgtcctccttctcctccacaagaatgaagacctttttggtagttgatgccaaaagggggagaaaaatgtcattaggtgtgctttttgtcttgtgggttgggactagtggtagtgaggttagtcacctcatatctaataggttaaggaggtttgggctatattatgtatgggtatgggctattactctatattgtatgttccttttcattttgttgatctctatgtcatttggacccttcgtagtcttgtaatagcctatatttatttgtgagcccttttagaatgatttgtgacttatgtgatttgaatggttaagagatgtgaacttgtgcgatgatagatggtgtatgtgatattgatatatttgtgaccatcttatgctcatgaatgaatatttcttgaagttcacattgagatattgctcttgtgtttgtgatatgttgaaatgtgaaattgaaatgtgcattggctccatatttgctatttgtgattgttatgcatatgtttagggggagcttttgcttgtcaatgcaatatatgtccatgtgctctatgtttgattatatatatatttgtggtgtttgtcatcaattaccaaaaagagggagattgaagcatctaggcccccggtgttaattttggtaattaatgacaagcgctaattgtggactaaccattgtctttgagctatatattttaagttaggtccacgtcatatgtgtgcatggatgat

SEQ ID NO: 48778 - DNA, 655 bp, Oryza sativa
tggctagtctaaaggggatcctattggtttcggcattaatgaactcagttggatccaaattgtcgatcggaccaagaaagtactgattgggatgaactaaacttgggattgcgatctgatgagaaaggttctatagaagaaaagaggaaaaaggcagattgagcgaagaaagaactaatctactgcaagaacaagggatctagccgatggggacttacctcggggaattcagccgatggtgcagcaaaaggaccagcggaagttgacatcgtcgcgggtgaggtcgccactgcagggaagtcgcctccggatcgccaaaggggttcgagggagttgccggagagagagaagacaggtgtgatgtaagcggtgaaacgaaaagtaacggtgtgaaatttctcgggggtgacagttagtacttatagcggggccataacggtcaaaaaacggaaagccctagattttcttggagataagatttgggcaaatccgcaacattaccaaatatcgcggacttggggggcatatgttaacgatcaaatttggtaaatcaagcattggagatagagataaaaccgaagcaaaatcaaaagaaattgaatgtttcggaaacagagtgcacatcgactaaagtccgaatcagctacgatctaca

SEQ ID NO: 48779 - DNA, 699 bp, Oryza sativa
  unsure (1)..(699): unsure at all n locations
gcgaattcgagctcggtaccccacgtccatatataagcctagctacgtacctagctatatgcacgcctacctaattcgttataattgtgtagtaattccacatttatttatcctgtgaactatgtaataattgattatatttttttaagtaaatgtcaaataattgattttcattttccaaaaagaaaaatatggattatgactatgaactccaacatgcctatccaccactacctgcatgtgtttcgacagtcaggatttatgcacgcctgccggaacaggatttatgcactacgtacacagtagagtgactcatgagctgttaatttgctccaattaacaagcaaattgctagcaaaattagctaaattcgtgccgaagagttgtgttgtacttaattgttactggtgtatcacgggacatgcatgaaacgccagaagttacactatagcaaacagcactcccgatgttagtttccttcaagaaatgaaacattatatcgatcgatccatccatcgaaaattcgaaatgatggatatgcaaagtgtggcattttgtgtggttggtactgaacctctgcttcttcctcttccctcattcacaggcatagggtttcgatttcaactcatttatggggtaccaagcaaaaaaaaaatcgtgcgtttaggaagcanggaacagaaaagaacaaattataaa

SEQ ID NO: 48780 - DNA, 710 bp, Oryza sativa
acagaaagccacagccattccttttcttaacgggctccattttataatcgtctatagaaaaggttggggccgttgtaaggtcataggctgcctgtgaaaatatgtcaccatcgattacttaagaaacccgcctacactaatgaattcattattatttgcaaattcctagagaatccaagtcagtcgtaagttcataacagttaatatcaatctgaaaatgactctgtacaccacacttgcaattgcaacatagagttgtcgttggttgtactattccatcatcaattctcattgtgatcagttgcatggtttgtgatttgatgttatacttcagatttttctcttcgaacaagatttcttttaatcgatctcctcttgttcctcaatgctcagagaatgcggtgcattctttgttaatgcagagatagacagctgaatttccagttatcttaagaactctacagaatcagattcggaagcaaaataatggacattgttcaccttcttgaaagccacaaccttctttgcttcctgaaatctttgctcatgtactcctaccttctaggccagatgagccaaactttcaaagtcctgagccagaaacttttctctaattggagccagcaaatcctggaaagctagatcggctaactgagaatctaacaaaaccaagctgtaacacggtaccgagctcgaattcgccctatagt

SEQ ID NO: 48781 - DNA, 743 bp, Oryza sativa
tgcataacagcaagtttgaaggaactaaggctaccacacaaagcaaaatgcaactagttgagcaacagtatgttgttccattacaagtacttgggatcacatgaatagcattgttgttcaaaaaacagaagaccacaaggcaacatcacagggacacgcattgatcattcacttgagtctgcgcaggggctgctgggtcatagctcttctagttccggtggcagaggcgcagcaacattgttggagtggaagaccatgttgtacagcatctgcgaacgcaagtcgttgtactcctcctgcacaaaatgagaacagattcagcagggtaaataaggtggctaaaggttttccccggcaacgtaaatggttgtagcagttttaccgattcagcgacttgtatcaggggggagtcatcgccttcatatagctccatgcgattcaaatagatctaatctacatggcacgaacgtgggcaaccgaacacggtttttgcggacactgggctttgacatgcggtgctcgaaacaatgttccgtgcgcaagtgcgctgaataacgctaccgcataatatattgaatttcataaggaaatttacagaattattggttacatctttgaacaaagaaattcataggcatatcttttaaaaagaaaaaagtcacattttcagcagcaaagctctggtagataaattgtgcaatgtatctatttctatataatcttcgcaaattccttcgctactt

SEQ ID NO: 48782 - DNA, 911 bp, Oryza sativa
cggcgcaacttggcttaaagcaagaagaagtctgcaggtttgtcccactccatacggagggagcagttgtgtgcactctgtactaatccacgtatggcgtcgaaaataaaaacgacaataacaacacactaacacgacattagcatgaggatgggggtttatggattggttcagctaaccgcccgaccgaccaaatgatgttgtgctttttcgtgttgaaagatgattaattaactcgatggcaggaaattctaaccaatgtgctgtgtagctaagatcatcggatggaacttttgttgattgattaggacgttggatatgctgcccatatgctgcttcagttgcagccagcatcagatgcgagccccatacactcaggtggagcacctcaaatgtgaagatgaagctgaaaatgacatttttggtacgtgtttggttctgtttctagcttaaggccctctttatttaggcttaggtttattggcctagacttttaagtcagcttattggtttatatgatttataagccggtgaatttaatgtcctaagtttagtagttgagtcatacatctacctcacataagccaaaaaagcttctccaacctagcttttggcttaatagtattagagtggcttatggtttcaaaaaagctaaacggaaaagctgcttgtttgtttaggcttagacttttcgacttataagttagcttataagcctaaacagagaggcctacagatactactactgtctattgttgatattgaatacggagtactagcatttcttgccttcgtgatggtggtgtatgcaaaaggaaccttgatctgaatgacccaatgaaacaagtaacatagtcagcactcagcacaatgactaaggttttcctcttcttctttttttccttgtaacc

SEQ ID NO: 48783 - DNA, 508 bp, Oryza sativa
ttaccatgcaaccacatgttttcatggtaaggacctagcttagtacactgcttagctttggcaccggcggcccaggtggctagatgataggtttttggtttgtaccatgggaactttcacctgtgtggtgtagggaggaccgcccatgggggaagccggtgttagggcgaggtaggggaaacgctttgttacactttggtgtttagcggcaccgaactgtatcttgtgggtaaagttgtacaacctctgcagagtgtcaatctattcgaatagccgcgtcctcggttatggacatgctcggtgacttcacatgaggggtagatttgtgaaagttttaattttgggaaagagttgtgtgcaggaattaatgaatatagatgtgttgtcctgtgtggacaaagaaccttttggtcttgtgtggacacagtatcctttttgggttggttggttggttaaaaatgttgtgattgcaaatgttgcttaaattaaatttatatctatagtgagt

SEQ ID NO: 48784 - DNA, 1015 bp, Oryza sativa
tactatagggcgaattcgagctcggtaccctccaatgtataaatattataatatttaggaattactagtactaattgttagtagctagcaatagctatacatatatgtatcctccatgtcattgtaaataatgttagtgcctgtttgggttagtgccctcgtaaaattttagtagtgcaaaatcttagatatgttatggcactactaaaattattattgacttggggcaaaggttgaccttaatccaaatatgtaccgtgctatattaaagttatcaaatgattcgtaggactaaatttggtatccaaccaagctatttcgcagtacataccaactagttaattagcactagctactatgagaggcttgtatacaacccgtctatttaaaaaatatataatgcatagtaaaatgttcttaataagtctatatatgcgtgtgtatattaattaatcgtaaccattagattaagctctgggcatagagtccagcaagaaatatatatgtaccaacccatgcaattaagctaaccatataattaaccttgtaagccacctgctatataaggttcagaaatttgttgtgatattttttgggtaccggtaatttataccccccataaaatcgatttttttttaaaaaaaaggaacacatgcatttgctgcttcttcttttcgatctggaacctgccgtcgatcgatcgatgaagcatcatatctcatgatatccagtcacgaatataaaggttgccacacctgactggttcctttcattcgcatgtatagcaaagtacaagctggtgatgatgctggtctgattagtggaccgaccgacctggaatgaatatatacgacctctcagattttccttcaaaaagacaaacgtgtcgctctagtacttagagatgatattcttgagatgcatgctcctctcattgtctgattgttagcttatttcgaaactccttttcaagtttatatttttattttccgtgggtggccaaacaactgttttt

SEQ ID NO: 48785 - DNA, 760 bp, Oryza sativa
tgtagaagttagaaataatacttctgctcatacacaccaatcctttgctctactggagactcaagtgcaatattgaatccatcaagagcataacaaaatcaaataatagagaggattgtaacagattaccccatcaagttggtgaaataaaggagcaattaggataaccaatagatcagctaatggaacacataatgaacagaaattccttagacctttgttgtcgaagtgacaactgcatacgtcgaaggatgtggttgctcaagggttcttggaaacaacgaagtgtactaatttaaggatttttcttttgaatgcccctttacatggccctaggggtctatttatagttctattacagatccccctattagggtttaggttttacaggggaatttacatggttgccctcatgagagggacacttgtatgggcatacaatgtaattgaaatatatgggcctccaatgggccggttggcgaatgttggcccactggccaatgggatagagcggctgggatggccccttgggcctcctggagctgggcttgataccgcgaagtcatcctccttcggcaagcacccttcaccatttagccttcgcctaggacgcatttggacttgcagggtcccaacgcgactcttcacccttcgccgcctttgcccccatagtcttcgccatggggcttcgccccgacgaaccttgacgccttgagtctgaatcctcgctggttgcatggtttcggcaggtctggtcgaa

SEQ ID NO: 48786 - DNA, 652 bp, Oryza sativa
tggaataaagtatggctcatacagatcaataattcatctttccatcagtggcgacctcacccgcgacgatgtcaacttccgctggtccttttgctgcaccatcggctgaattccccgaggtaagtccccatcggctagatcccttgttcttgcagtagattagttctttcttcgctcaatctgcctttttcctcttttcttctatagaacctttctcatcagatcgcaatcccaagtttagttcatcccaatcagtactttcttggtccgatcgacaatttggatccaactgagttcattaatgccgaaaccaataggatcccctttagactagccagttgtgcaaccgggaccccgaatcaggtactaaagatgggcatatagtcccggttgaaataatcgagactaaagatgaatcttcgtaatacgaaccaacactaaagatcagagtgccacgtggctgacgctctcatctttagtatttttttttgttttatttttaattattttttttgctacttatattaatttcaaaccaaactcaacgacaaaatcatccccattcacaaaacatcacaaaatcatcgacaaattcatagatcgaatgaacatactcaaattgacataacaaattcattagctcgaattcgcc

SEQ ID NO: 48787 - DNA, 734 bp, Oryza sativa
aagtggaactagggcagcaaaaactgtgatcatcagaagctattgctgggaccacctccaagcatctcctccctgtcgatgaagcgctcaagaagctccttgttcttggtaacgatgcattcatcatccttgccaaaccaatcgtagcgattctttgcaatgtaatcgtagattgcatcccgcagtggggcggggatgatcagcagggagctcaaagctgagtagggaagaggcaggtacgatgcaactttcaaagcagctgcaaccaaaacatggaagatttagtaccctgattaccacaggaaataagggtgggcaaatatgacatgattaaacagcaaaaagtacataaagaattgctgtttattttttttccctaaatgagtatcattaaaaggatccttcagttagtactttcgatcttccagttagtgctgctatatggacagtacaaccatatctataatctatgtattctgccagattaattggtgtctcagggaatgattgagctacattatgaaaggaactgtggcctctagaaatttgtacttttttgcaggagcacagcaatggctatcattgcaataacttggttgaacaaatgcatgatccaaaaaaaaaatactagagtgtaaagcatgttgctctcatgcattactggtaaataagggggcacacctatctatcacaaacctagcaaatgggtaccgagctcgaattcgccctatagt

SEQ ID NO: 48788 - DNA, 511 bp, Oryza sativa
catgcaaagagggatcctttgatggcctgatcaactgtaaaattgtttataaacatggttagtaatatagaaatgacacagatagattccatgagttggtacactagtggagcttgacagtgccgtggtgaaaaattacagaattttctgaacatttctaaaaatcaactcatagggattatatgttctacatctgaaaaaatcaaaataaaaatccaagatgtgaaaagataaatgctacatgagatagtgcttcaactcttttcagcactgatgttcttgtacttctaaaaaatcaaatcaactgtattcaatcttacaaattttacagatagtaataacattagaaaaaataatcttcttccaaaacatatcgaatgtgaccatacccattcagaagctcacgggtgtgaagctggtccatgaattgatatcatagtgtatgatcatttctgatgtggtaaaagcccccatttaacctacacactagacagacaatgatccatggatg

SEQ ID NO: 48789 - DNA, 638 bp, Oryza sativa
ttgtctttgaactagtttagtaaagtggttacaaatcattgtttcaagcaaaacgataaccggtaagacccgtgtgaagtactgcaagacaatggacaatatggctatgttgtttcatgtatgttcatagtagcattttatatgctgaagtaatatatggtcaatattatttcattgcaattgtgaagtgtaataataaatttcttatgtagattcaaattatcagtggctgaattctgacacttgaatcccacttcaagatctaaggaagtagcgaaggaatttgcgaagatgatataggaatagatatattgcacaattatctagcagagcttgctgctgaaaatgtgtacttttttctttttaaaagatatgcctatgaatttctttgttacaagatgtaaacaataattctgtaaatttccttattgaaattcaatatattatgcggtagcgctattcagcgcacttgcgcacggaacattgtttcgagcaccgcatgtcaagcccagtgtccgcaaaaaccgtgttcggttgcccacgttcgtgccatgtagattagatctatttgaatccgggtagttgttaaagatacgcctctgcgtgtaaatcaattagtgtcggatatagggacacct

SEQ ID NO: 48790 - DNA, 726 bp, Oryza sativa
cttggaatcgcgactagattggacaagtgctacagatgtaaacaaggatagagaagaagaaaacaaggtgaggcaaggaagaaacaatctattgcgaaaaaagaggatctagccagtgagcacgtacctctgcgtactcggccgatggcgcggcagacgggctggcggaagtcgacatcgccgcgagcggaagcttggccaggagaagatcgccttgaaatcgccgtgtgcaccgaggggatcgccggagaaagagaagacgaggtttgcttaagcggtgaaaacggaagtgacggtgtgaaatttctcgggggtagcggttaatatttaaagcactgtgtaacggtcggaaaacggcaagtgcgagtttctctcggagacggatatggcaaatccgaaacattaccaaatattccggacttggggggcatgtgttaacgaccaaatttggtaatctaagtatcggagataaagattagattgaagcggaatccaagatcaagattgtttcagaaacagagcaagaatcggctggagtccaaatcggctacgaccaggatcggcagagttcgagtcagacagggttagccgattgagccgatcccgacaatacaactctacgtcatcggatagaattaatgtgcttcgcatggattgccacacttggactgagtcctggataggcaattgtatctattaaataggatattttatgtaatttcctta

SEQ ID NO: 48791 - DNA, 867 bp, Oryza sativa
ccggagacctgctctcccgatcgctggtgcacgccggcgagcgggatggagtagtctacgagcgacggcgcagtacagagtaggaggcaaaccctagattgattttcgcatatattgcgtgaagacggcgggtcggtttatatagagaagggtcgcttgatcagggcgcccgcacgatctctactgcgcgtaaccgaaccggataagtcgcgcgtaacttatccggactccacgccgtttgcacgcaccggatttttcggaacgtttccaaaacaaaacgaatccgaatttgcagcaaaacaaaactgcaaaaggaggctgcatctgcgcaagggtgaggagccaatttttcggaccattcgacgcgtacgtcgtgcacgcgcgccgcctgccctgccaggccaggcgaggcgagcgagcgcgcgcgtgtgtttcccctcttctctccaccacacatgcttcaagtggctaggagggcatcctcccttttaaggaggtccccctctcctagaataagcaaggtggtactaaactccacatgcatgccatcccatgaggtgggcttttgtgattttccaaagaattaatcttcgagtgggctaaggcccattcattaattccaacacatccatcagtgggatgatcaacggagaatttgttatagggagtagagtggtggactgattacgtagatggccgagatttatttgtagggagggatgacttggattgatttgggtattaggaggtttggtctaaccatgaggtgtgcaacatggtgccgtggagcgagcacataataggcgtggtgatgataaagcactggatggtggacggatagctagaggggcttcaggagtcggtttg

SEQ ID NO: 48792 - DNA, 1160 bp, Oryza sativa
ccatagcaaattcgactaaggatgagcccttgatagccgctgcaacatatttttggtcgaatgcccttaatgctttcctcttcaaccaagggccaatgacaccaactttgctaaatatcacaatgattactggcttggatgtgacttcatcggctaataccatgagcttgaacaccaaaaatacctttgaattcaagaccaagagtattggaggctggttagggtatattgtagcatatatgggcaaaggacatgtcactccccgagagcatgtagcctttctgctgatgtggctggagaaatttctcttttgtggatcaagctgcggccctacaactaactggcaatttctagccgaagccctagaaataaagagacaattccccttgggcaaaatcctcctcggctatctgtaccaaatgttgaacaatgcatcaaccaagatagctgtcggctcagtggttggagcaagtggtccatggtggctgctacaaacttggctgaaattagtagccatgaaaagctgtaatttggcatcttgggcagaagcttgagtcccagaatagaagtcgatacagatgatgatggggtagagcgaacccaccgtaggtgcatgtcttatggagaatatgcattcacaccagttaatgcaggagcaaagctatctactgaatttcagaaggactggttcttcagcttctacgatggatttcaaaaagatgcccgagtctggttcccttatactgactcgatggattttgagctgccatcggactttagattttaggaaatcaattctgagaaatatgatcaatctagggaaatttttactactgccgtcagcccatgcatccttctagtcgtcatccagcaggaaacattcaaacctcatacgaattttatcacccaatgagttctgctaggcaatttggaatgggacaaatgccgatcggcttgtactttgtagacaaaatccagtgccgaggtgatataacttcagccttaatgatggatcggctgcttaacatcccaggacctccactaggcagcatcgaaaatatagagctggcaaggttcaggagcaaggcatttgacagatggtggggtgaatggaagctgcatctgttccaccaattggcttccatgtacatgacagacct

SEQ ID NO: 48793 - DNA, 562 bp, Oryza sativa
ctgtttgcaagcgctaccgtggctgaactcaaccgggctgcgatgacagagcctgcaaaatctcccaaggctatggcagtgaagcggtttggcagggcgctgacctatccatgtaaaagaaatagaagagggcatggcactggcaattatacaggacacgggaggtggacggtaaaaagtggaggagccatatgtgctggaaaaatggatctagctcatcatggtgattcaatttttgtcattgatggaaaaaaatgatttaggagaggaaggaattagtgagtagattggaagaagaagaaaagaaacggctaatcatcctcagtggtatctgtggaggaggaaggtaaactagctgggagatgagaggtcaccggaaatttgggaaacggattcagatcatcaaggtagtttcattttttggcattaaacagtaagattgatgagggagatgatagatctgtgatgggaattggaggatacgttgctgctttcatggagaaaaaaatcagcgtctcagcatacgtgaataaaaagaaaaagggccagcactagtaggaat

SEQ ID NO: 48794 - DNA, 505 bp, Oryza sativa
cccatccctacctcttctgttcttaaaaaatattatctatctccacttagtgaaatactggaactagtaatctcgctgctacgaaaatagatatttatactccctccgtttctaaatatttgacgttgttgatttttttaaatatgtttaaccgttcatcttattcaaaaaaatttaagtaattattaattatttttctatcatttgattcattattaaatatacttttatatatacatatagttttacatatttcaccaaagtttttaaataagacgaacggttaaatatgtgctaaaaaaatcaacggtattaaatatttagaaacggagggagtaacttataatcacacctaaactgcacagtcggctaaaaagggtgagtggtgccacgtgcttggccttatgacacatatcgactacccaggatagccaagctagatcgatatggtgcccatatattattaattgtatttgtggtcttgataaacaattaaatatacaat

SEQ ID NO: 48795 - DNA, 650 bp, Oryza sativa
atagtcgtagcagtagccatcactccggattggaaagtgtagtactagtaaatcagcttttacctttctagccatctcgagaacaaaactgacgaaatcatggaataatcgaagtggtggaaattaagaacatatatccttttttaaaaaaaaaacaaaaggcaaatgtgtatcgctggcatcaaattacagcgtaaatttttattctctacgtgttagactatatttttgtggataaccattgaaattggttgttaaatagaacacaaatgctggagaagggtctggaaaaacactaggctttttagggagaaaatggtttcaatctgttcaaaacattacttaattgcttagctggtcaatgctacgatgctacgatggcattcccaattcacagttgtgagagttagtagccttttttctctaaaggaaaaggatgtagtcagtagccttttaggtgagcgtttgactcgatctaaaaagcttcggatataccactcctatagtaacaaaatccaatagggactcctctgtcctgagtcctcccgactccttagggcatgtacaatacaagccataagtaacagtggtcttaagataccacgtaggatagaaccacataaaggtcacacaacccacagtggtaatca

SEQ ID NO: 48796 - DNA, 531 bp, Oryza sativa
ctatacaagtgtgctccagtttcacaacaagaaatggagataaaagaagagaaagcagcttgttcatttcttcagttagaccaaaatttacagtgaggactgactgcatttgctgtctgaatctggcgacaacatgatacactacggtgaaaacgatgctcttaataggaaagcgtgtatttctttttggaattgatccaatgttgttccctttttttttccagagatgggaacactgcagctgggtgactgaagctcatggtggcattagtgctaagcttaaacacttgcattcaatttgtagtttagctcttagctggctagttctatttattctaaaaaaacaactgaattgtaaccattttgattactttgtgaccctttcatgtatgcatttgtgaacgtacagcatacatgtgtgttttccctgtgctaaacaatgtttttttttactgcgtcctatggatttgatctgggagaatgcatattggttcattgctacttgggaacgtacagctgctggcttatttt

SEQ ID NO: 48797 - DNA, 709 bp, Oryza sativa
aaattggggtcttgttcctggatggatgctagaaaattgggatcttattcctctatttcttgtttcatttctttctttcatcgagaaaagctcccaactaagctactgctgcctccacacgtgagcgtggctcgtgctgctagctgttgctgatttccgtcccagtctccaggatgcagccgcagtctcgactcacttgacgagaaatacgaatacacgacacaatttccgttccctgagcaatgaaagaatgagtgattgaactgtagagtagatccgattaaccatcgaagaaaaaaaaaggaaaagtagagtactaagaaaaataaatagtgcatgcctccatgtctatacactgccatatgcattcgtaaatagctagcctagcactcctggagaaaattaaatgtcatacatttttttgatagattgatgactagcacggcaaattggaaatataatctagatcgtaaaaaaaactaacatacatgcacctaaaaaatatcaaacccggctcctgtataccgcataggagcttatcagttttgctatgatgtctaaacctttaagaaattaccacgttaattagagaaaaataaaaaaaaatatcaactgtttgattggagtatgtctaatgcgcaatcaaccgcacatgacatccatgcagtccacacctgccccttactgagtatattatcaaacgaaatct

SEQ ID NO: 48798 - DNA, 634 bp, Oryza sativa
tataccaaataggcccttagtttaagagaagtgatctcatcatctcatcaggattgttggtggctatcttctaggattcttccaaatgtcaactcatggtttatgttggatgacttttgcttcgagaggaaagagtggttaatacaaagagtgccctccatacgcaaaatttgtaaatctatagattaaattggttcctctcaaataaatatcgttttaacgaatcaaaaatcaagataaaaaaaggttgaattggccagccaggctaaaaactggataaaccaaaatactaaaaaaaaaaccaaaaaaacctgacatgatccacaaccttaccttcccccctctccgactctccccttcctcgtctccatctcgacaccacccctcccgcctcccatggagtcctccctcctcctcaagcccttcgtcctcctcccctccgccccgcgccgccgccaccatcaccacctctccctccccacgccgccgcatcggcgcctcccctcctcctcgtcctcgtcccgccacgcatcgcccgcgtcctactcgttcgccgtgacccgcgccgcgcgcgagctgttcgacggcagcgcggacaggccccccgggggggtcggccgcgggggcgcgcgcc

SEQ ID NO: 48799 - DNA, 543 bp, Oryza sativa
agtacaccgttagatgctatatattttctccatttcatattataagccgctttcacttttttatagtcatttttttaagtttgattaaatttatggaacaaaattatcaacatttagataataaattagtttcattaaaactaacatttaatatgttttgataatatgtttattttgtgttaataatgttgctatatatttttttaaaactttatcaaacttaaaaatgtttgattacaaaagaagtcgaagcaacttataatatgaaataatgaaacagagggattattatgccgaacttttcaatttttatcacgttatgttacagagcatgtaattttttctgcggtgtgtggaatcaatactaactctctgtttcagaggacagtcatatggagggtggttcagaatttgcttcccgggaagacaaaggaccagagttctggagaatctaccccttctgggatcatgtggtcctttgccgctggttccaatttgtcaacatctgcaagctttaatgctgaaaaggaatcaaggaagaat

SEQ ID NO: 48800 - DNA, 1408 bp, Oryza sativa
  unsure (1)..(1408): unsure at all n locations
gtagccgatggatctacaaccgatggcttggttcttttcttctttccggtatccattgggataggctctctcatctgtccttgaagcaaacttgttgtcttggggggcatggaagccgatgacaggaggagccagtccaccaccattaggaagaaggcctgcagcataattgatctccaaaccactttcactatgatgaggaggtgaagattctgtggtctgcaatcaaagaaataaattggataaattttatatcagcagatagttaaggaaattgataaaagtagaaattcttacttgagggataacatcagggaatatgttagtgagatacatggaaaccgattgatgaaataaatgtttcttccattcaacccaccatcggtcaaatgttgtgctcctgagcaaagctagctcaatattatcaatacttccaaggggaggtccttggatgcttagcagccgatccatcattaatgccaatgtaatttcccctctatgctggatcttgtcggcaaaatacaaaccaattggcagctgtcccaatccaagttgtctggcagcactcatggggtgatagaattcgtaagaaacttggatgtttctaccctgatgtatgccaactgagagtatgcaagggctgatagcagtagtgaaacttctctagacttatcaaacttctcagaattaatgtcatcaaatctgaagtcgaggnnaagttcaaagctatcagaatcggcatatgcaaaccaaactattgaatccctggggaacccattgtagaagcttgcaaaccaatctctgaaaggatcggctgacagtttggatccagcattagttgatgctgcctctccaaaagacatgcatcggcatgtggttatttcttccctatcttcatcggtgattggttcgaatcttgggaaatctgcttctgtcagggctggtctatcgacaactttcatagtatgcaaattcaaccagatttgaagaagccaccaagggccacctatgtcgattgctgatccagaagcaattctagccgatgttgagttcagtgtttggtataaataacctaatagatattttcctaatggaaatccttttttttctactagggactcggctatgtgttgccagtttacagttgggccacagcttggaccacagaacaagtacttttctagccacatcagaaggaatgctgtgtgttctcttggagtaacagctccattccccatgtttgatgagacaaaccctgaccaaccacctatgctcctggttttgaagtcaaacttgtttttggtattcaagccgactggattaaccgatgaagtgatgtctaaaccagttatcatggttatgtctagcaaagttggggtcattggtccctgtttaaacagaaagccat

SEQ ID NO: 48801 - DNA, 602 bp, Oryza sativa
cgccttgcccaccccttacgaagggggcgtccggtggctttgtggttgaccggtggagttgggctcgcctcaacggggagtaggaaaccggcgagtttccgaacctcggtgaaaaatctcttgtctccttgtctcatttgattgtcgcatttacatttgtacaatttacatttctagagagatacttgagatcatatcaccctatgattgctaaacattgacataggagtgtgatttactttcctagagatatatttgagccactatcaccctacgtttgcaaaacataacttagttgcttagagttgatcctcacgtgcctagcaacttaggttagttttgattaggtgtcatttagttttatatcgcctattcaccccccttctagttgacatctcgatcctacaccggtttgcccgtcttgccgcctgccgcgatagcagctggctgaactcagcgaccgacacgtcgccgatcaactttcgggcttcggtgtcggcctgagcaagagtcaacactacgaaaacaagaagtgtcaccacatcaggcgtcgaacggggaaaaagagcgaaacatagatgcacataggaaaagcatagact

SEQ ID NO: 48802 - DNA, 647 bp, Oryza sativa
taacatggaaactccatcagctattgaaatcggttgttttgcctcctcttgagtggttggttttatcctacatgcactactggagaaaagggtcttcactcacggttcgtaaccccctgttgtcccagttgtgcaaccgggaccccgaatcaggtactaaagatgggcatatagtcccggttgaaataatcgagactaaagatgaatcttcgtaatacgaaccaacactaaagatcagagtgccacgtggctgacgctctcatctttagtatttttttttgttttatttttaattattttttttgctacttatattaatttcaaaccaaactcaacgacaaaatcatccccattcacaaaacatcacaaaatcatcgacaaattcatagatcgaatgaacatactcaaattgacataacaaattcattagacccacggtatgaacaaattcacataaaaaaacaaatacacattaatcaagtcattgtcgcgccggccgccgcccggtgctgctcctcgtccggcgtcgtgttagccgccgccgccgcccgacgcgcgcaggccgcccttgcccggtgctgcgctggccgccgccaccgcccaacgctgctcctctctgttgcgaaaaaaaatggagagatgagata

SEQ ID NO: 48803 - DNA, 646 bp, Oryza sativa
gggacttctagaaagtaaaaaatgaacccgaatgataattatgttcgatttttaaaatttcaatgacaataaagagaaaagacagtggacgggccgtagaggagtataatggcggcgtttgatgagacttttaggaattataaaaacgaaacccaatgagacaataaactctaaaaactataagatccaatttttaaaaggttccaaggagaataaatgataatagtagatcgagcaagcaaataaaaaaggatatgacataagtaagggtagtaactggtgtgacttttcaaaaactatttaattagaaattcggggatgagaagatttgttctttcaaagtcttaagacaataagatagctatttaaataattttaagtaaaatcatacgaaaaaatatatgattttgtttgggtgctagtcgcgcaattacgcgggccacccagctagtttcagtagaaagaaagaaaacacatccaacaagtttcagaagttaaaaaaaaagaattaaaaaagatgtgatgggacaaacccccaacttccactaataaaagtatcaactgaaataacgttttcaaaatcacatagattctagcataaaatttcgtaggtactacaccatccaaactggaataaaagctccgt

SEQ ID NO: 48804 - DNA, 642 bp, Oryza sativa
gctagtatggtttatcgttaggaattaataagttttttggatttgtttgaatgtacagaccaaaaattcattgtttagtactttcagcagagcaaacctttttttttctgagtttctccttcaggcacccaaaagaaatagagctaatctttttcgttactgctcagatattgaatccgtactcaaatgaattagagaaacataagcagctcatccaccaccaaagttatcagaaacttggtccgacgactaactacaacccacatgtcacaacatttcccttagcaatttcaagtttccagatagaattactggactagtgctcgaattaagaccgacagacacatatatgatgtgtggggggaaaacgtcgcagcttcaaaaactaatctaaggatatccttataaaagtgctccactagtaacttgtattgtgcaacagtacattgaacgcaactaaagagtcgaaactgaaacaaatcagtgtgcgatacaaattaagttatgaaatagtaaaagcagtaacatattccccatgattaggacagaatcagtgtgcagctgaaattgaaacagaagataggaagtttgatgcaacagcttctcgactaaaccattaacccaagtaaaagatcgcccata

SEQ ID NO: 48805 - DNA, 1143 bp, Oryza sativa
atgcttctgcttgattgatgtcacatcagttaacttcatctcatgaaccccactgtagaagtaactgtgaaattgtttctccaaatcggccaaactattgataaaattgtatggcaaattagagaaccatgtgaaagccgatccagacaaagacaaaggaaacaacctaaccctcagagcatcattagccgatgcctcaccacattgagccaaaaatcggctgacatgttcataagtcgacacattatcttgtcctgagaacttggagaaatctgggaccttgtatcgatgtggcagtggaattcaagtccagtacgataatatcatgcaagtctaggttgcacaggcaaaaatgtacgataatatcatagccacactacgtggagctggtgcagctgaaggcacacatgccactgtctccgacgtgcaagcaactggcccatccacgacaagcggtgcaaactaggccgtgacggcagctaccgattccatcgaggcatgcaggtcaccaaggaggctgcaacgctcactgctgccacttaccgcatgtagccctcgaaggaggtaatccctttactgcaccataattttatacgcaactatcacaaagctctctgatgacacagcaaatgcattaccacgtgcattatcacattgtttaattaccttacatgcatttgttttttcagcacatgcatctatgtttatcttgtcaacattgcaattagtgggggtactctatatttataattattcctacatttattacatactaccagggacaccgaaagacaggcgacaccactaaggcggtcccccaggacagctacagcatcaccacctacaacaaagtcacttgttaccagccccaagagcactgatgaacacaaggataggagtacgtcgccaccaaaagctatgagaaggtcaccaaggtcctcgccggctagcaatgtgcacccatcatccccacagcaggcggacacgcaacaatcggggttggcattggaaaagggcacgcttgaatggcaaagccgacctgccatcagcgcaatgcaaggcatgcagaccgacggaggaacactgccataggaccaaggcggatgctcgattgatgcgactgcaggcattatacatgcaagt

SEQ ID NO: 48806 - DNA, 647 bp, Oryza sativa
tatgtttatttgggttggaaaatcaggacttgacaacaatttcttctgttccttttactggtcattttactgggctgaatatataagatggaatgcttagtggttattggtatttaacctgaaatggatgccttgagatgatcacagatggcggtcttgtaggttatccattgccctgtgatatgcatagatgtcaccgtgaaaggaatggagcaattcttagattaattatatggagtcttagcttcagtcatacatggtagatgcattcctgtcttaaatacattagaattggcatatagagcatcaacaggcatcaaagaggcctatgaaagttctttcaattcaagtacgaataaatagtatattataaagactaaaacttatttggaaccagcacagaatactattgtttgtaactttcctttggaataaagtatggctcatacagatcaataattcatctttccatcagtggcgcttgtcctttggaaagaattgctgataattcgatggaacgtattgatcttaagacaatcaggggtcataatattgtttctaactttatgtcaattgagaaaatgaatgcatcgggcagcacaagtgctgatatataatagatatgtgcatacacatgcttttacaca

SEQ ID NO: 48807 - DNA, 650 bp, Oryza sativa
tcatatatttatgaagcttagttatctataatgttctacacgtgttctaacattagtgaattactagtacaacatagaaatagatatcactgattgataacaattcgagcaacttaccatgtcttctaagtattaaaaaacatttttgcaaaatttaatgcatacatgtaagctttttatctgttgcgcactatttctataccttattattctacattgttatctattaaacctaaaaagaagtaatgacacatttcaccgggttaaattactaattgtttaacatatcagaacaaagtaaagtaaccaagcaagttagttctaacaatcacttagcaaaactatgagaagttgattaattaactaaaggaaaatagggtgtttgcacgtgtaatgctaacaatagcataactgttttgctttcataaaacaacgcatgtttttattacctgctaattgcatgagctgtagtgaattggtcaatctaccggtgtcagtgaactttcatcgatggtgtcattggctaaaaacaaatagcatcgtgtaggatttgcaaaagggcgtcggtgtcagctgacactggtaggaacaccgtagatccgcccctggtctcgactctccagcaatcagatgtgtctcgatcttgcatc

SEQ ID NO: 48808 - DNA, 843 bp, Oryza sativa
ctctttcctgaagttttgatggatggcgcagttagtattatattggcattgctctgggattattgaagcacaacaattagctggtaataggttttttttttccatctttgcaagaggaggcaactttcggggatggtgggacctctgaccagtgaccacatgtttggagcaaggcagtagtcgtttctttcgtgtttagtttccgatatgctaaccggacaggttttataacaagtgatatcagccgaaggtttcagcattaaatcaatcaacaatgtggaggaggaaatacgaattaatgtttttttgtgatgttaatacgaaggcttcggctaaggttgcttttgctgcggctgcatctgcgatcaaattaatgtttttttaaaatgatatttttcatgatgttcttcagtgtgtttcttaattagtcccgttcaattatttaataaacttgccaatgggaaactaaaattggggctacttgatggattacgcagggagtgcaacaattccctgtaaccaaaagaataaagtgggcacagtacagttcaagaacaggttcttctccacgaaaataattcggcaaggtaaggatacataggatgcaacagcaaagtttgttgtagtaaatttgtaagtttgttgtagcaccacaaatgatattttagttgtttagagattaattgcaatcctttttatgtttaggcttatcacctagagttgaaaaatctgggattgcaagaggcattgcaagggagaacttttgaaaaggaattgtgagtataaagaagagctcacaacaggtacagagttcttgcgttgcattaacatatgattttttta

SEQ ID NO: 48809 - DNA, 2125 bp, Oryza sativa
aagatctttagtcccggttggtgctaccaaccgggactaaagatcccgggggggcctgacaggtcctgacagcattcgaaccgggactaaagatgatatttagtcccggttggtaacacaaaccgggactaaagatcaaatatgcccgttacccttttgaaccgggactaaagatcatctttagccccggtttttattgcatccgggactattgtggaaatcggccgaccgacgaaagatggtttctccaccagtgaaaccaaataacatttacaaaaaataattttttggaatctaaaccctatactttacttcaaaaccagaaaaaaaacaacctgtacaatattcccccacaaaagtgtgaaccgttttctactgtctcattgcttatgcactacctgtttctggcaactgccaagtgtaatgttggatacttcactacttcagcgaggaatatacttttttttcgccttctctgttatccttatcagtcgtaggtaaaatttaaatttgaaaaattaattttttagagctgatcattgtaagagggtttgtttatttttcaacatatattggcttctgaatatgaataatacatgtataaaagttttactcataaatttttttattacttcatccattactaagccatggatcaaccaattagagacgatgatcttctttttattccttgtcttcgtcctatgtcttctttgtgtgagagaggggagaaggaatttgaaagtgctagcattatattgttccttcccaacaaattatatattctccctcagctcagtctctcctctctcctctctagattaattagcagtcccagtggcactacataaccagtactatatatacaataaccttgtgaacaggtttgcatatactccctccgtttctaaatatttgataccgttgactttttagcacatgtttgacattcgtcttattcaaaaacttttgtgatatatgtaaaactatatgtatgcatataagtatatttaacaatgaatcaaatgataggaaaagaattaataattacttaaattttttgaataagacgaacggtcaaacatatttaaaaaaatcaacggcgtcaaatatttagaaacggagcgagtatatacttgcatgcataaagacaaattacagttcataggtaggatcgagccaagcttctcctttcccatattctctccccctgcacaccccattcgtgcgagtatcatcagctcatttctatattcttctatgtccccccatcatccattcacttgtatataaaaacaattttattgatattaattaattatcaattagtatatatatatatatatatatatatatatatatatatattgccgtcatgcattgcatatactagctatatattactttgtatgcatgctgagtacgcatgcatctgaatatacccactaattaattaaataataaattactaatcaaactagccgctaagctagccatttagtttgaccatatagtttagttaactaggttgttattagctaggaaccattcgtgcaagcatggatatatgggtcatatatatgagaagatcgatctactagctagctagccaggccagccagtgaccggccggtcaatagtcattagtcgcaagcaaagggttttgtgggggccatcagcgatcaacgaacttttttgcagctcgatcggcacctttcatggaatgatgtctgaaaagttctgtagtccatatatataagaatatttttgataaaaattcactataagttactggggcagtttttgtttcagaatacccatcgagctggtgcatgcatgcacacaaacaattagggttaatttgatatatactccatccgttttacaatataaatccttctaacatttctcacattcatattgatgttaatggatctagacatatatatccatctagattcattaccatcaatataaatgtggaaaatgctacaacgacttacactgtgaaacggaggaagtacataaagttataaatgtgccaaactagaaagtgatattactattcataatatctactgagtgccactagagttttataaaattggaatcataacatcgccgt

SEQ ID NO: 48810 - DNA, 656 bp, Oryza sativa
ctatttatggagtttatggaatataagacagaaatgtccacgggaagggaccacatacaatatccggttccatagtgtagtggttagcactccagactttgaatctggcaacctgggttcaaatcccggtgggaccttcttttttttaggtatttcccataatcctcaaatcatgttttcaagttatccgattagtcatccttatcgctaccataacctcaatcaggaacttcgaagcaattagttcgatcagaaaacttattgtccgactaatcacgactagtccatcaaattagtcatggacgactagtctgttagggctaaaaattatgtgttgggctttacgcccagcccaggaaagcctgtagccctcatctaaccctaaccagccatctagatccaatcataagagagggaggggggaaagatggacttattgcaactaggacagataaatgatttaactttaagaccttgtcaagtgtgaactgtcaactgtgagagtctgattatccttagtttatactatactatactagtatactatggtaattactacttataaacatctatacattatcctgggtacccctagcctatagtcaccgactaatctacgactagtcacgactaacagcgattagtcgactagtcag

SEQ ID NO: 48811 - DNA, 843 bp, Oryza sativa
tagtattggggtttcagccaatctttctgatttagctacattattccctacatgtttgctttatatgctaaatctgccctttatattaagatcctattgcgctaaagtatattaggcttattgtttggtatattttgcttgtcttaatatcttaatatagggtagtatcggagtattagccgatacatgttagatctatttgatcggctatgctatgagtgtacatataatcttcatcttgaagtacttttaagcataagtgatttatacaatctcgactgactgttcgatctatcccaatcacttggtttaaatatatttcgagaaagatattatatatcattgatatctatagccgatcgagtagatttaactttattttgctttatccttcatagccaatctaacaccaataacatcggctcaatgattaatgatatgtcaacggcccttagccaatcggctatcgtttatagatttaaccttatttttcttgttttcttttcttgttgattgcaggatcaaatcaactggcacgtctttgaacccgaaagtaagatttaggacctgcactagagttaagtagatatcccaggcaagtgtgtgttttttgcatcaacagttcatcatcggtcaccgttgtcgttttgtgccttgtctcgttgtggtgaggattcctccctcgctgcccctcctcggcctctcggtgttgccaccgtacacgtcgtgccactgtcaaccccggtaccagtgtaatggtgttggcagtcgttcgtgcagttttcgtgtgcacgtgtggtgaccgttctcgtgtgcccgctcgatagctgcgtggtgtccatg

SEQ ID NO: 48812 - DNA, 2008 bp, Oryza sativa
aaattctagaaacactgttcttggtgctttaggtagattgttaattagcaagaagcatggggatattcagaggaggatggaactaaagtcacttggtaatatctgagaaagagataactggagttacaatgtaattacactaaattcaagtgctaataattactgaactaaatcaattatccccccacatagcttatgcacctatatcatttctttcaattgtaagctatgaaatcaaatttctgctaaggggcagccagtagcagttccacttgtcacattaagtcaacgcgcatagttacttcattccaagtctaaattgggtgattcaaattgtattagaaccagtgaatttggctccttggtgtgatataaattttattcacgtaaggctgctaaaaatctcagtatatggttgggtctgtttgttctattttcaaaagttgccattttagtgtatatggctggttagttgtgtatctcctaagctagagcagcaaatgtagtttttatgtcaacttgtacgctgcccactgtatttatctatcaatttatagagcatgttgcatatgcatgtttatttgaatcttatttgcatatttgtcttttatcggtagattcagatgtttcggagtacgtggagcaagaacctgagattgagtgtgatcatctacagcaacaaggcgagcacctaagcatctagcacccatgttttacttaaattcctttggttgtgaatatatatatatatatatatatatatatatatatatatatatatatgcatttgcttagttaattgttttgggtgacatggtctataattaattggtgcatttaccttagttatatatagttgccatatacctattactctcctggttgggaatagttgggatgttttattcattatgcttagttttgcttagtggggatacaactatatggctggacagttttgttaattctaggatatggacaacttggttaatgggctaaaactggagcacttacattaaataatggttgatgaaatatgattgacttggacgggtggtagggcgatgatgggaggtatgtttcccctgatgcagtagctccgtctgggtcgttaaggactaaatattttgacgtctattcaagcaccctacgtacttaccacatgccgtatcatgggaccggcttgtttgattactagacccactgtgatcatttacgcccatcagagaaacgtgggtatttgggatccgcggagtgcttggttggccgatgtcacgcccagaaatttaacccaaatttctagactattttgcgtattaaatccctgtccaggaccagccagggtacacaaaacgacaagtaatatacagttccaaacgtaaataaagcgtaaaatacttacggaagaggcacttagtcctcacaccgaaacagaacgatagcagcggaaaaaggcgatcctagcggggcttcagctccactccataggcaaaactcaactggggtctgagccttggtcctctaacttcatcttcagctcagaagcactacacttctgaaaaagggggaataatagcaagactgagtacaaccaccgtactcagcaagccacaccaacgatgcagacgtgcaaggggatacaaggaggggtttgtggctatttgcataaaggcagttgtaaaacattttattgagcaaaacagtaaaactgttgagtaattaaagtaacattaaatctccattgatcaacgctataccacattgaacaggcccaaccaacccacctgaactacagtgtattgggtcgatttattaagatgggactaatcacggtgaatctggtcgaccgcccataaccgcgggcacggctattcgaatagttttactctgatcagaggtgtacagctgtacccacaagacacagccccacgacatgtttccgtgcgccgacatgccaccacgacataccggaaagaggccatgacaggacccttcgcataaccccctc

SEQ ID NO: 48813 - DNA, 4154 bp, Oryza sativa
ggcggtggccggcagtaatgcagcatggcggcgggcaattccgctagtcgaaggatgcgacggcggctccaccgcgctgatccggcggcagagagtggacgacccccacctagatccgacgacgggcggcggacgacgagcgccgcccggatcgggcggcggtggttagggtttttttgtgatttttatttttttttggacttttatttttgagtgcaaataacagaaccactcgcacgtgaaaatccgatttccacgtgcaggtgcgccacccacatgaacaaatagcgattttggagaccatttcgagcagacaggccggagttctgctcgtcaaaataatttttaacccgtctggaaaaattgtttttgtatggaattagttcaccggctgtccctcaactttacgtcaagtctgtatgacatccctaatccccaatataaaaaatcttcacccctaaattatacaaaaccgtgcaatttaggtcctatagcagtatgtatctctggttacgctaatttggcatcctagtcagtaaaaaaataaaaaaaattatggggcccacatgtaagtgagaaaaaaaatgtttggtctgtgttggtatttcttaacgacattactataaatataattcccagcaatggcgccagaaacactcatggtatattatggttatagagttcatccgcaaacgcacggatataccattatagcatttcacccgagggtaatccaagggtatcgtatttatttaatcccatgagaagatcatggtagagagaacttgactaataatttatatgttacttgtaataatcatagtctaagtagtagttaatataatccaagggtagagtgacacacaagcagggagctactcattctcataaaatatctaagctaagtggaaagaaaagagaaagagaatccacttctacatacatcctagttatccgatatactagctaataccctctatctgatgccgtcctggtacttcgagaagccacccctgactgtcgacttccttacgacagcccatcatgaccatacaaccggggctaaatacggaggagtaccctccccaggaaattaatttaggactatatacacgcgcgaaggaatacccgtactgagctgtcaccatcagcagcccacctctcatccgcagcatataaccccaaataatgatatcctgtagtctagacaccacgcctaaactaccatatactactctaatatcatcgtcatgacagagtaattgcataagcaaacactatacccgtaccaaagcctctcccagataagctagtagtataatcagtataacatgaacataatgtaaagttggcattcatatactcagtaagtattccaataccataaatgtataaagaagagtattctaaataaaatacaaagcttacaaaaaaggaaaggaaagctactacagccatacccgaactcttccgaaggcttccggactccgatttctactctattcctattccactagcttaagactactaaaataacttaagagaatatgagagagctcttgcttgaggtgtgtgagtgaaatgaggttgaggtgtgtgagtgaagtgaggatgcgagctctttttatagcctcccaatgatggttgtgacgtttggaaaggtcggtaatacccaccaaccgtcattggggagctatctcagccgtccaggagaaacctggatcgaacggcgttgcggggggttcggccgaaccataggtcgggtcggcctggccaaaaatcggcatgtggcctccgttgctctcctacacagacttgtcaattttggctcaattgatcgtgtcaattctgagttcttggcccattcatgcataagtctgatttgatgtcgattctcttccactttatggttattctctacaaaaggttagtgaaccaaatactagtggaattttctcttcttttctttctattattctggtctcttgtcttctttagcgagcgaggctgccggtggcagagggcgaagcagcgacgggcggagcaatgcggctgcaggctagtgaggcagagggcggcgggcgaacggggcagtgggaggcgagtacagcggcggccatggacaccagagccgcccgtccttatcggtcgtgcgattgctgcccaattccgacggcgcggggatgacttgggcgacgtgcaggggaccatggcaggcgtgctctcctacatccactatgccctccctgaccccccccctgtgctttgtcgccgtgctccactacgtgctcgccccgcatgacgccgttgagtgcatcagcgcccttcccgtccgcgcaccaacctggcacccgctctagcgcttcacactactgcctacctctacaaacccgtggcatatagcatcatttaatggtatctaataatctaagcaccacgcttacattactaaacactactctgcatgtctgcatatgacatggagcaatcatataaatgaacattaaaccaatacaatcgcatatctctagtaagctagctacataattattatgagacaagtatgaactaaaatcggtactcaaataattatgtaaatgaagtaaagaaccaaaactatataaagaagaatatttcattactgaataaagtcttacaagagagagagaagctactagagccataccggagttctccggaagacttgaagaactaagagactattctatctctactccactagcactagaacaaagtaaataaactagagagagcttcttgattgatccttcttgatgtgtgttgaaccggagaaggtgagctccttaaatagacttcatatgacggttgtgaccattggaattgtcggaaataccccgcaaccatcattaagaagcaaccctggacgtccacgtggaaggacgtccacgtggaaggccaggatcagaggcgacaatggcggtttggccgaaccctagcccatctggcatgtgccttctccggtgatccgcttgatggattctaaactcagtggtatggtggttgggccaaatggcaagtgttctaatgggtttgtgggcccatttatccataagtatgccacacgtcgagttctaattaattagacggttattttccattgtttcttctccatttatatgaaggtctcatgcatacaaatacattgccaagtacaagtggaaatagattattcttaatcaaatatgcatgcaagcaggctccactatccgccgctttgcctgcctgctccagcccctcgccgccgcccactgccgcgctcgccggccgttgcccccccccccctctaccgccggcgacctcttggcgctcgcccaccactacccccgccctgttccgttgagcaccgctgcttcacctgcctgctccagctgtttgccacccccgctattgtaccccgctctacggcaaagagaagaaagaaaaagagaagagaaaaggagaggaaagaagggatgcaaaccccacattatttattcatctcagttacatgcaggcccagattgctgattaggatgccatgtcagtgaaaccacccatatatactgctatgggacctattttgcatgattttgaacatttgaggggtaaacatttctggtattggggattagggatgtcatatagactcaacgtaaagttgtgggacagtaggtgaatttattcctttttgtactagtgtccaccactgcagtccatggtggcgtcaatttctacacagtggcacacgtacaacgcaagcagataggcctaatcgagggcgcaaacgtggggataggatttggggtggcttggggcgacacctagtggatggtcaaggatcgggctcgtgcaacagcaacgacacgccacctaggacagggcatgcctaggttaggcggctcgcgcacgtgctatagtggcgcggtcgccttgttgttaggaggtcataccgataccgtgcgctaggtagcctcgaggtcttctgggcgtagcagccagccaaccaaggcaaaggcacctcagcagcagtgtcgtgtggcccaaaacctatagcgagcgggcacgacaaccaggaaaagtgtgtgcaagtgggagaaaaaggtggggagggtggtcgggttctcactgtgtat

SEQ ID NO: 48814 - DNA, 906 bp, Oryza sativa
tgactgtcgacttcctacgacagcccgtcatgaccatacacgcgggactaaatacggaggagtacccaacccaggaaattaacttatgactatatacacgcgcgaaggaatacccgtattgagctatcaccatcagcgacccacctctcatccgcagcatatagccccaaataatgatatcccataatctagaccccacgtctaaactaccagatactactctaatatcatcgtcataacatagagtaattgcataagcaagcattatacccgcaccaaagcatctcacagataagctagtagtataaccagtataacatgaacataatgtaaagtaggcattcgtatactcgggaagtatttcaataccataaatgtataaagaagagtattctaaataaagtacaaagcttacaaaagagaagagaagagctactagagccatacccaaactcttccgaaggcttcccgactcccgatttctactctattcctattccactagcttaagaacaccaaactaacttgagagaatatgagagagctattgcttgaggtgtgtgagtgaagtgagaaggtgaggggtttatatagcctcccaataacggttgtgatggttggaatggtcggaaataccctccaaccatcattgggagctaatccacactgtccagccgcaaccctgcatccttcggcgctaggggggttcggccgaaccccctggtttggccgaaccaggggccgacccaacctggcacaaattcggtaggtggcctcctccgttgttcttcttcgcagacttgtgaattttgacccaattcatcatgtcaattttgagttcttgacccattcatacataagtgtgggtcttggcatcgaccgattgatttatcatctaagttgatg

SEQ ID NO: 48815 - DNA, 3847 bp, Oryza sativa
catgagtgctttgcttcgtatcattctacccatataaatgtcttaacccctgcttagactttgattatgcaagtggcatgtatatattattagcatagttctctcttaaaatcttcccttgggattaaataaatatgataccttggaatactccagggtgaaatgctataatgtaatatccatccgcttgcggattccttttgtaaaccatatatataccaggaccatttctagcatcattactgggaatttatttttctagtaatgtcgttaagaaataccaacaagctataggcccaggtcgcacagccgactgccgtcttcggcctccatatagtcctgtggccgtatggcagagccgatcttccccatcaaatctagccaaatcttttttgatctctcaaaatttgttgagggcttttgatccactcgatctcctctttccctttttcccgaaattggaacgaatccgcaaaattcgggatagaaatggctggacggccatcatcagcaactgagattaaatctagttaattaaaactaaattgaaaggggaaatcatgagacaaatgaagagggaggaatggggaatcaatttttgcaatcaaacggaggagaaaacgcatggggagatagatcgaagtggcaacagtgctaggttttggtctggcggcggcatgcaatgcataggatgagataaaaaaccggctaccggaaaatatcagataaaaaacatacaatttttttagtttctcccaatcagatatgcggtaagggcaaatcgcatgcgcaagggcgttgcgggcccaatcgagcatgcggaaaatcatgcgcgcaagggtgttgggggtccaatcgcggcagcgcgtgtgtactggaagtgcatgtaggctcctaattattttgatgattaatgacaatacgattagagaggactaacaattttatttaagtgaatgtgaaggattgttagtccgtgatgatttgtagcgcaatgcaaatcttaatgagtgcgacaaagtcgtgagttgcggcaatgatcaaaggctatattgtgtattttcattatttgggtcattaggaaaaccccacttttaagagggattatgcattgacatattagtaatgatgaatgtgctcaaaacaatttttaaaagtgtttctcctcagtttctgtgttctggaaattttcagagttgtctgaaaaaaattttcggaacttctgaaagtagtcagaaccaattttagcttctagaaatttttggggtttaccgaaagtgattttcagaatttccgaaaatgaccgagaagcaaaataagtttccgtaaatttttggacttgtccgaaactggattttggaatttccgaaaatggcagtgaaggcaaaattgtttctataaatttttggagttgttagaaatcgattttcggaatttccgaaaatgtccgcgaacctgaaaaagaacttctagaaatttaggaatttccgaaaatatccaaaatgttgttttggttctgaaaattttcggacttgtccgaaaagttttcggaatctccgaaaaatcttcaattgacttcattgtttcactgatctggaaattttcagatatgtccgaaattaattttcagaatttctgaaaaatgcaattattgtgcataacgggtagatctggtgatgtggctatatatagcccactctttccacttgtgagggctactgtactaattggatatttcgcgccgttggcttgttcgtcttaagattcagttttgagccttattttcttgtttcccctctccacccgggtttgatttggatttggtgtgtgtgtgtgagagagttgtgcattcgagtttgtgtgagtgcttgttgttggcttcgtgaagatttgtgagcacttgcatcatttccaggagttctttgcatcatttgttactcctagaggttgaggactcctaggcggctaggtgtaacttccgagccaccgatctatgtgtggttggccaggagaagttggtgaaggtcagatctcacctccgaaagggaagagataccaccagtggaaggagtgttttgtgaaacatcttgaggaaagggttagtgaagacctggctctttgtgatctcctgaacggagagtagaatcccctcaaggatttggactccgggaacaactcagcttgcaacaactttggtgatatccattttctcactcctctagctttgcttgattgtgccgctattggtctagttgctatctgtgctagcatattcttgttgtaggcagccaaatctagaatttactttgatttgcgcatactctactattttcggaaattccgaaaatccctgattccgcatttacttgagtttttgaattagcctattcatccccctctaggccttattgaccctttcatggacaatggactcaggcgcggcccgatcgctgtgtgcagcaaggggcgtgtgaaaaggtgcggacccaattgattcgcgcgcgtctcggataagaggggcactatggtgtaagaaaaatggaaagaatttgacagaaacataaaatttaaaccgattcaaacgcggatgatgtaccaaaattctagcggaaatatctttaatttttataatagtagagataacatcaaatgttaacggttcactataataggatcggaagttcctatccgtttccgtttttagcacttctgtcacttctcgatggtttgctgtcaatgttactcatctactttcgtcagaaaaaagggactcatctacacacgtaaaatggcatttgtacccctcctttaaataaagtatcatctatttttgtcacatccatcaatctctctcttgtcgccacacgccagtggcaaccttggcccgcgacctggtgctgcctgctccatccagtccccttgcttgtcgtgtcccctgccgcgccaatgattgtcgcttgccccgtcccattctctcgcttgcagcaactcggccctcaactgcgctctatcgctgcaccaccgccgctgccatcaggagcaggtgtccgacaacctccgtttgtcactataagcctcatcctctgaaatgaattttatttgcttgtcgtagatgtaagccctcatcaatttttcatgtgggaggagtattagagtagctagcagattaagctttccttcgacacgtgcaagacttgaatatcagttacaggaagttagtcatgtaaaaattgttgaagtgtgctgaatatatagaatgaattttgccatatggtgtcgagccaggcatgatgggacagatggcaatggcattgccgcgccaaatggaggtgggtgctggccgccgaatgccgcactagcccttgggctgactgtgagcagccaatttctgcaggggatggcaaggtgcagcagcggcagggtgtctggccaaggttgccgtgtgcgcgcgatggtgtgagagcgcagtcgatcgatgggtgctgtagcggcaggacgttctgtttatcatttgcttagatggaagtatgaaactattaactgggagctagtttcatatgagtatgagtttagagcatttgagatgacgtagagctctagcagatagtcagtctctggagatgtggaacacaactggccgccgccttcatgtggtttgattggtatgtctcaggctaaagttgattggcacgccgagtcccagcaatatatcctatgctccctactcgatgcttcgggtttcatattatgttggatatttgacttgatagggaaatgatgagattgcatgttttattgggaactcatccaactaaatatttatatttcacactgtcatttcaagtag

SEQ ID NO: 48816 - DNA, 1684 bp, Oryza sativa
aattttagttgatgagctagttgtccatcccatggtgaggacacaccaggatgtattcatggagtctccccatgcctctggaattgaatcattggttgcctgctagaaactcgagatctttccatgaggatattggttttgcccattaggaaaaacctcatgatgaacgcagttgaacacctctcccaattgtccacagcacctctcttggaatagaaccaatgcttcagtctcccgagtagagaacgaaaacagacggagcctcatcctaggtcactcctttgatgatgatggtgttgcagagctcaaggaattgttggagatgggcgttagcgtcctcattggctttcccacaggatggggtagcctgtagcatagtgatctgacctgtcttgatctcaaagttggcatccccaaagggtgctgagtaatcacagagggtcttctaagccatcggcttggaatttgatggtgcgaaaatgactggttcaggtgccgagaacctgatttgtggaggaacgacgcgaggtttgactcttctcgcaagtttctctagattttcaacgaaatttgtcggcaagtcgaaaccgttcatacactacctgttttcacaagaagaggaaacaaatcaaggttaacctgtttggaccaaggttcactaatcatagaatgattatgaatgtatataactaaatctttaacaagtgtcttctctggcgatggtgccagaaatgcttaccggtactttttacggccagagataaatccgcaagtgcacagatacggctgtagcatttcacccatgagtattccaagggtgtcgtatttatatttccgcagggacgtgatggtataaagatagagttcatacatccttaatcaagctataattactttacaatagtttgaacaatggttaattgataaatgacaatgagatagtgtgtcacacaggagattcatctctaataatgacacattaggcagtggagaaaaactatagaaagctaaggtccatatatatgtacttctatattaccaatgtttagtttacactaaatacatatatgcttacaaggctaggacttagtctaggcacctaagaactaccgagagaccactcctagttggtttgtcagcgtggtaatggcattttaccaactcttacgtcatacctggacgtggaggaatacaatggatggagaggactgccaccatctaccgcctacctcactttccgtggggcatactcgcatccaatggcatttaactaacctaagcaccatgcatatcttaataaataatttcattaattcccccgggactctcacccttcgaatgaacaagttagaactaatgcaactcgttaagatcattggaccattatcgtagcatagatcaactagcataagctagtgaagcacataaatgaagtataatctattcatcgaacacgtaactagtaaactatgatatgaactatgaacacaatataataaagaagataattcttttattgcaactatagtcttacaagaaaagtaaagtactaaagacatactggaatctatgagaagactacaggaccaatgctgcgctcaaataagctagtgtggcctttcccaaatgctagtgcattgatccccgtcccaggaaaagttggggtacacttcaacaatcatga

SEQ ID NO: 48817 - DNA, 544 bp, Oryza sativa
actccagggtgaaatgctataatgtaatatccatccgcttgcggattccttttgtaaaccatatatataccaggaccatttctagcatcattactgggaatttatttttctagtaatgtcgttaagaaataccaacaagctataggcccaggtcgcacagccgactgccgtcttcggcctccatatagtcctgtggccgtatggcagagccgatcttccccatcaaatctagccaaatcttttttgatctctcaaaatttgttgagggcttttgatccactcgatctcctctttccctttttcccgaaattggaacgaatccgcaaaattcgggatagaaatggctggacggccatcatcagcaactgagattaaatctagttaattaaaactaaattgaaaggggaaatcatgagacaaatgaagagggaggaatggggaatcaatttttgcaatcaaacggaggagaaaacgcatggggagatagatcgaagtggcaacagtgctaggttttggtctgacggcggcatgcaatgcataggat

SEQ ID NO: 48818 - DNA, 1135 bp, Oryza sativa
  unsure (1)..(1135): unsure at all n locations
cggcgtctccgccggtgggcgatgcttgagaagaggcagacgcgttcggactcgacctagaaaagaaggaagaggggttagaaggggganaggttgtggacaccccaagtattataccatcagtgtccaacgcgaccaccacatactgttggaggagtgggatccaaacacgcataaaaaaaagacactcatcctcaatgtgtccatgatcacggttgacaccttctactataataaccggaatgccgagtagtgatcacaagagataaccataagataacttgccaggctactccgtcatatgcccgtcaaccacacgaaggtggcgaccagaaaacaaggcataccccagtgcctcgatccaaagcactatcaccaattatctcaagcgatcaaaacccgttactcatgctcagctagtccccaggaatgcgactagcctcacacattcatcgcaagcaattggaacatcatcacaagtgcataaaaaggggttaagtacagcaagtatctggtacataataggatccgaggtcccatctaacagcacacaagtagtagcggaagattcaaacaaaagccagaagcacaaaacaaaagccggtggtgccacaaccccacaagggcaaaccaaccgggcaagagccaagctgaagatagcagaagatcatttactgccctcgccgcccccggcagaacagtgaccacacaggaagcacaattctacgctagagtcctcacctgaaagcagcggagcccgtgtgccgccgtcgctttggtccctgccgccgccgccgccagccttgtgtgcgcgctggccaggccgcgccgctcggacgcccccagccgtccgatcggccctggccgatctgggccgtccacgtggtggacgcgcacccgaggccacgtgtggaccatgtncaccgtgcgcccttcccctttgactcgctgacgtctggggcccgcgtgtcggcgccggcccgccctttgtgacattagcgaagtccatttccttttgtaaaataaataataattgtgcaataaatcgagtttaattctagaaattcatttaaatggctcaaaacttctaaattcatatctaattcatacgaactccaaattgggccattcaact

SEQ ID NO: 48819 - DNA, 1120 bp, Oryza sativa
gtaataaaagcagcatttaaataaatcatattttgaatgagtaaaaacagtatgtaattaagcagtattaaatcatcactgtccaacgctaaatccacgttgcaacaggcccaaccaaaaccacttgaactacaccagttctttaaggcaaattattatagtgagactgatcactgtgagctggttgaccgcccaataaccgcgggcacagctattcgaatagttttaactttgatcagaggtgtacaactttacccgcaagacaagattccacacatgttaccatgccccgaagtaccgccacgattctgcaaagggggaaatcgtggcaaaacctgtcatataactctccataaccgaacataccctcaggtttcaccccctccttgtgccaagtcgggcagtcccttcttgtgcctaggtaaatccagctacaacagagaccaatatccaggtcccaactgcaccaacgcctctacccttgccatggtatgtcagctaggttaagttatactctagatttagcctagagtccatgctggcgtgtggtaagtacgagtatatcttccaaggattcctgagaaccggtccttaattatcatggacataacttcaaaaatcatgcatgtacacgcaacccaccattaaagcatattttagtttaattaaaccataaccatggtggtacatcataatataataaaggaataaaattataatgaatcccattgtgagctaattgaactaagcatggctaagcattcctaaaccaatcatctagtcaattataacccaagttatcaatggcataagatattcaacaggttgagtacaataggcatccatcccacatgacattctaaaacaatgcagtttaatgaaaagcaggggattttgtaaaataggtgcaacatgatctatgatgtatgtatgacttgccttgctcttgagctgactggacctcgcgagcacttcgaaataaactggatcaccagaactgacgggatctaaacgacaaacaaagcgcacaggaaatacaccttattaggcttctggaacagcaaatgaaaccaattctaatggattctatacattttaaccgattcgatgcaacttggat

SEQ ID NO: 48820 - DNA, 2668 bp, Oryza sativa
cctcggtgggcggcggctagggctagggctaaaacaaaaaaaaatgaatggaaaaacagggggtgttctaacttatataggagagggcagaactaaaggaggtgcggccggtgggaggcacgacagagggggagagggagtcggactcagataggggaagagagggaggcgcgtgcacggcaaagggagagggggagcggcggccgatttggaggggacaggaggagaaaaaaaaagaaaaggattaggatagggaatttcccaaattggaaaagtatatatttatagcatagtaggagtctctcatgctgttttgtggcgaccccaaaaccctcgtgggtccggaggccacagtactatacctgtgtaacatgcaccagccccaggatacacaacctggtacacacagaacatcggtgatccaaagaagtctaataatattacattgctgggatagtccttacataagttgccatcgtggacagaccccagatggacaacgacacgacacagaagataataacaaaagcgacaacaacggagtggaagcgaacagcggaaggcgacttaacgactaaatgctagtctaggcacctatgcgactaacttattccacaggcatggtttgggaactaggcccgaaaccctaaaagtcttcatagttggcgtgctcctgaagatactcctcggcggttggatcatatccttcttcttcatcttcaaagcctaatataattatatataaagcaagggtgagtactttcgtactcagcaagccataggaaagatgacatgtgcggctaccaaaggaggataagggttttatttgcgaaaactagccattgctcaaaaggtttctttttgcaaaactctagtgtgtcaagttttaattatcggaaagaggctcatgcctcaatccattccacaagttgctttgtaacaacttgtcacaagtaattagtgaatatatgttcttctaccaacaccttagatcttctcttgcttctccaacttttgcacttgtctccacttgacttctccacgagccgtctcaactcagagcacaatgagccgtctcagctcagaacaccacgagagcaccacaagccgtctcagctcagaacacctctcgaccaaacagtccaactcctattcacactatgatgccaatcgacattccagatcacacggacctgttccaaaccactcaggtttgccgtctgccacacaggctgagtctggaaacgatccccatcccacaaaccaatttcacaaacgtttacaaacaacactacgctaagagaatcaccttacattcgcccttaatcatgggcacggctattcgaacagtttaattaaactctgcagaggttgtacgctttacccacacgacacgaactgacaccggtcacccgtcggcaccgggagttcgctacaaggtttttccaaagctggtccattaaaaatccctataccacatagtaggccgagtctcatgacaagcatcaggcagtctcagccctcgtctactcagggtacactagggacgctcctacacctcatcggtaccgtatcgccacaatagaggcggggccactcacgaccatagatctcatcaaacacacacaacttcgtctcctcatctccagtgtcccactactactggcatacaagataatcaaggactaactaagtactttttcaggggtatcccataatacccgtgtggtcgcatagtaagatgcttggatggaattcccaaaggaatcggtccttaatgacaatacatagccagccacacaggcttagcctacatgccatcagggtttgagaactagttttgcttcgcaaacacaccgacactgaccatcaggtttttgaatagttgattggaattccaagtttcccacacgacaatacattcgtggcatggctaagccaaactaccttgatgctcatacccataaggtaagacgtcgacgcgtaatatgtgaagctatcaaggacatgtcatccaatatccaacagaatataagtgtgactaatcggtaggtccatcggatgcgttcgcaaaccgaggccgaacagtttaacgtgcaacctaagcatgcacatttacaaacaacataattttgcacatataggaagcaatatggtcaaaggtggcttgccttggtcctgtggaggttcttcctcgacgagaacagcttccggatcgtccgcgggatcggcaactatacgcgaaagagaaaaaaacacaagagctaataaagtagctcaaacaataagatactatactgccattagatagatctcatttttagaaaaatcatggaagtggaacggagtcaatcggagtcacggtttaggatatatgaattttcaaagattatatgaatttatgggcaaggggaaaagggatttcttctattaaaaaggaatactccgagggaatatccttgcgtggcccgctgtcagtgacacgggaggagccggcgcacggcggacagtgtccacaggggcgcgacacagagaggtggtggactgggctcgtggtccaccggccggtgcgcgtggggcccagccgtcatagagccggctcacatggaccgagtgtacacacgggtgcaccgagttggatggatacggtgggacccgtatgtcatta

SEQ ID NO: 48821 - DNA, 905 bp, Oryza sativa
cctgcaggcatgcaagcttgggggggttttgttgacggtcgttattgatcagtttcaaccgtcaatattactaaaacaggagagaactagtgatgcttgcaatgcataaatatgatagaataataatattccagataatgattcgccccaggcgaccggcgcgggagagccggatcgggcgctccccccgcccgcgccctccccgacgtgattacctggtgtgcccacccacttctccctcatatttttacacaaaagatgttcacctaatgtacttacaatgtttcactatgtatagatcaaatgttgcagtgaattaaaatattctattgcaacaaaaaacccacatattttagaaactctctattaagggaatttagtttattttttgttccataaaaaatgtttcatctaatgtacttacaatgtttcactatgtatagatctaatgttacagtgaacgaaacattccattgcaacaaaaaatccacatgttttggaaaccccctattaagggaattttgtttattttttgttccactgaaaaatgtttcacctagtgtactcacaatgtttatgtatagatctaatgttgcagtgaactgaaacaatctatcgctatttgctgaaacattttttttatataaggtgaaacaacactcgatttaaacgagtgaaacattttcgatctacttagtgaaacaattccgatatacctggtggaacatcgtgcaacatttaaaaataattcaataataagctattttttttcgtcggaatatatccatgtgtggtcttgttttcaagatttaattgcaacgaatttgatggtgcaatcggatcatgatttggataaataatttaagagaaaaatcagtttaaagcagtttttgcacgtaaatcgg

SEQ ID NO: 48822 - DNA, 740 bp, Oryza sativa
agcatctttctccctccttgtgacaagtgtccccggcggttatttcaggtagaaccgatcacaaccgccatggtatgtggataacttccagctgatgaagaactgggctgatcgggctggctactggttcggccgaaccaaccctggccgagcccaatcagccaaccatttggcatgtgtgtctcccagtggctcctcagcttagtggtatgaattatgggcttgtttgctcatgttaatcctgtattaccagcccaactatccaaaagtctgcttctcgatagcgtatgattgatcgttcatctattttttgtcgattctcctccatttatatgtgcttctcctgtatacatgttagtagcatagtatatagtggaagtagatgtgttatttggaatttatgcattgcaagcatagctagtcttcatatattgggtaacattgacggtcgaaacaggccgataacgaccatcaataccaatgacggttgtgacggttggacaggtcggtaatacccaccaaccgtcattggggagccatctcagccgtccagaagaaaccttgatcgaacggcgctgcgaggggttcggccaaaccatgggtcgggccggcctggcccaaaatcggtaagtggcctcctccgttgctctcctacgcagacttgtgaattttggcctaattggtcatgtcaattctgagttcttggcttattcatagtataagtctgattctcgacatcg

SEQ ID NO: 48823 - DNA, 765 bp, Oryza sativa
ttataaatgctctatatatatgctttattgacttgttattcctcaaatagctttaattgctcattgtgaaatagagaataaaaatatgaaaaaaatgaataccgaatccttggaaacaggtcttgacgataagaacgtattcgatgtgagcaaaataatgggtgtcgaatccttggaaacagtcttgacgacacggacgtacccggaataaaagagaaaaaaaatatgagcaaaaaggctcaagataagaaaagtccaaaaaattctcttggttattttgtgctcaaggttatttgagaaagagtgataaatgcaatatgaatttttgattgttgattcaagcttaattgtaaaatttttgtttcatggttatactttaatgcatgcttgttatattatagatgggtttatcttctttttattgcaacacatgacttgatatgctatatgtatgctaagctcttgaacattaatgagcataattcctatgcttgatgaaatcattgtcaaaagggggagaaataattgtaaaaatttttggagaagcaaggtgaatttttgaggagttgttgagaagagcatgtttttaattcaattgggaatttctttcttttaaaagggggacaagttttcttttggatttttgagcacgatgtgtacatttgtatgaagtgtgctttttaccactttcgtttttatttttccaaacaccaaaacattttttataagtttgccaatgtgttcatcaagggggagattgtgaaa

SEQ ID NO: 48824 - DNA, 564 bp, Oryza sativa
ctacaggccgaattctagctcggtaccgtgaggcagttggggacttggggttctttcgggcgtggcatgcggctggcatgcatgtttttttgtccctagcgtgtccgtccaccgccgagccacaccccccaccccgggaacagccaaagcccactcccatctcatgcgcgcgcggtggtgtacgtcgcactatcgtaaaagcctcgccccccaccggcgggatgcttcccccctcgtcgtcgtcgtctcgcgcgcgcgcgcggtgcatctgcgtgtacgcacgcatttttctcttggtttgttgcgcacacatcctgccccgagcggcccgcgcgtggctgctcacgtgggcgctcgtgtgttcggcaaaaatccaccggcccccgtgttgtggacggcatggccgtgatcgctcggttgaatgggcgtggaggagatctaacggtccgtggacaaggttaaaaacatactactgttacaggcactagatatacttccttcgaaaaaaacccaaactaatattagacgttttggtgtactttttttttttaaggatggagggag

SEQ ID NO: 48825 - DNA, 832 bp, Oryza sativa
tcgtcaaagtcactctcctcatcatccgagtcgtcatcatcatcgtcgtcgtcatcgtcttcttgagcaaactcagtcgcagatgccgctgccagatccaagtcagcaaagacctgagtgttgtcaagccctatgataacatgctacacccatgaaccatcatccaaaacaagaattcagtatacaccgaagataaaaattcagaaccaagaacgaaaaccggggaaaaaaaagggcgtaatcgtcaccgcagtcttgtcgtctcccatgatgctctccaggagggcgtcgtcgttgtcgacctcgaagtaaatatctgatgagagcagattgccacacatcacagcatgcagcttcaagaacaaaattaacagtgtctccagcaaaagtcacagagaaggagctaagctaagctagctagctgcatcaaagcatcagctcaagcatccggttttctcgcatacctccgttctcatcggtgaggtaggggaactccggcaggatgatcctctcgtgcacgccctcgtcgatcagcgtcgagatcatcaccgtcgccttgctgttcacctgcattttgttccactgatttcttggtgaaagcttgaagaagagtgatggttggttgtcaccaggcaatggccgtccggccggttgcgttgtgtaacaaaaactctgctttcttctaatacattgacgcgcaatctttttgcgcgttcacgaaaatgaagagagtgatggaagaattttatgaaaaaattttcagataattttgtgttatgtgtagacctcgacgatggttcgtgcggactcggcgtcagtgaggtgggcgggc

SEQ ID NO: 48826 - DNA, 1964 bp, Oryza sativa
ctttctttagacgtgtacctttacttaattatacttaatttggcgcagtttaatttagctttgcgtggaatataataaacgtgattaatggtgatcgatgctagaagataaatggaattaatgattagagaatatgttcactggagatggaaatatcatgggaattaattaagctcaccgcgacggtgattcccctgaagacgtcgagcgacacgaggcgctgccgcgtcgtcgtcgccgcagcctcgccgtcacggccgaggacgcctgcctcgacgtcgtcgtcggctccctccttggggtattcttctcgacgattgttgccgccatggacgctgctgctgctgctgatgcacttctccgtcgtcgtcgtcatctccattgatgaattcacaagctagctagctatagctatacttgatggcgatcaatcgttagttgttgccgtcgatttggcgatgagcagcagctgcatatatatatacagagaagtgagctctagctagtgttgcattgcaaggtcactctatactgtagattcgcctttctgtctccatctcaagaacgtatgggaagttgtagtgctacacatacgtggctttttaatttgtgcgtcactcacccgcctcacgcgtgcaaatttacagtcccctctgctaatttcttggttttgttgttcaggacgcggatgcgtaagtgactgaaaaatcagaaaaatatgttccattgaatttgagtaggagttgagtaggagtgcgcctcgtcgcatgaccagagttttcactttcgattttgctaaaaaattcgactatttcagtagcattgaaacccccgaaatttgaggattttcagccctttttagaccaaaattatttaaaattttaacataatttaactaaatttgaataaattttaaccaaattaaaaaaacgaaaattttagacgagataatgatttgccgggggtccgaaatttcgaaccagagttgcattcactgcacgagacccattaacattaacaagaggcggttttgtctttttcgacgaaaactcgaaaactaattaataaaaggatcgagatgaattcagctaactagacagtttgatggggataaatatcttttaggcgtgattagggttgggaccatcggtccaattgctgtatctaatatcaaaatcgttaggtcactttggcatggttttgttccagttcaaactggactcgatcgggaacatgcatgtcagcatgttatctcgcccgacgatatctactcagcattagagctacattttgtccaaatcagccttccaactttactgtaattgagaacttagcatctcagtcttaaaatataatatttttaacatactcaaacatttttaactatgactattaatagcaaaaaaaaaagattaatcatgtaaaattaatgttactagaattaaagaaactatcataatatgcaactttctttattttaaacatcttacatttataaatattgtttgttaaagtagtatctcgaagaccatgtagaagtcctagaaaagcttatattttgaaacggagggattatacaataagctctctgagttctactactagtaaaaaaattattcaactattcagatgatagtataaataaatactacttcgtacctctgtttttaatatatggcaccattaattttttatatcatgttttattttaaaattttactccatctgtcccaaaaatataagcattttggactctgacacggtctccgagatgctaatttgaccaacaatatctagaaaagtaagaggttttaaataaaaagagttcatattgtgatagtttgttaataataaatctagtaacatcaattttacaggataaatcttttttattctttcgttattaatagtcaaagttaataatgtttgacttgtcactatgctaaaaatgtttatattttggg

SEQ ID NO: 48827 - DNA, 2888 bp, Oryza sativa
cggacgtactccctccgtcccacaaaaaaagaaaaaacctggtttccgtgtccaacgtttacccgtccgtcttatttgaaaaaattatgaaaaaaataaaagacaagtcacgcataaaatattaatcatattttatcatctaacaacaatgaaaatacaaattataaaaaaatttcatataagacggacagttaaagttggacatgaaaacctatagtttgtctttttttggatggagggagtaatcctctattagtttctcatcaatactagtagtacgtactaccgctagtccgctactagctaaccgtgcctctggccttttaagcaatactccataagcaaggatcattaatacagaacatcacatatgtattgcctcatatgtaccggttcagaatttctagccatacaattggtcaaagttgagattctttagaaaaaaaactgatacatacaatggtgccactcatatatgtatttctaaactaattttttcatataaagttggatgaagataaatatattaaaattgtagagctaaaactttgtaggtgatgactttttatttgagattatttagatgtgcgaaaatctgctattaagtcacggatctatttggataagtgaatttttaaagttttcaaatgacttatgatgaatacaaaatctatataaaagttatagatcttgtcgatatctacaactttttggttgacaatatttttatttgatcttgtctacgatatctaatatgtattataagcttcatatataagagtagtcaaaagaataatatctgcaactaaaacaacaaatgcttaattcgtgaaatggtaaggaggcttcttaggcctcctttaatggttgagctagtgcactagctcatgcttgtccacctcatacaagagatagcaaaaagtctacctttccaatagattgtctcatagcacattgtttaaaatgctttgggttccacaattcctctcacattttctttaggagcttagctcttgaagaagagatagtgtattctctctccttatcttctctttcttccacatcagacaaaaactgatgtggagatttatgagctagctgactcatccttgttggaggaggccttatggagagaggctcggggttcatgattcatcaagtcttataaaccgcatgcgtacatattttaggagaaaaatcgtgagttgtgggaaccgaagcgtgactacatataggtaaaatacaaaataaaaaacaggtacacccatcgattctaaactacaccctccgtctcaaaaaaacccattcctaacatcccaaaatagaaatagtagagagtgagaatacctaaaatgcccttaatcattgaaaaaagtagtaagagtgataagtatataaagggtattgaagggataaaacttctcgttttacgtgctgatggtagataggatgatagaagttggttttttgtgggacaaaatttaaactcttttttttttggaacggagcgagtagacactaataactaccagtttcagaactagtactaactaatatccctcattagtgccctttttatggtgttggatctaaaactggtatctataaaggatttagaattagcactggtaaaaggatgtttgtactaatggttcacttatagatcattatcgcgagcagtcccatatgttagtttgtgataatggtcggtacgacaaggattttttattagtaaatacatgcttccaagctaagcccacatattagacatgaaaagtaccaataaccaagttcacgagtaagcccgcttacaccccctacttttaaaaactattggccgagtccatttatatctctcgtccaaatatccatgtgaagagttttacagattagtacataaaaagtatcaatatacgagtttacgagtcagcccacttacactcctacttttaataaccattggccgagtccattcataactcccgtccaaatatccatctgaagagttttaaattgttatactgaatgtgtccatatactcgttctcctatattcattgaacgatcaaacaatttcatactaagtttgtccccatcatttggctagttgttgtaatccgaagttaacaactccctgcaagtgcacgcgggtcggcaacctatatatgccgacaatcaagaatgatacaacccaaccatgcgatggtgctggtgacgaaggctaattagcatgcatctccactaaatcctaacatcacacaccacattatgatatctagctaactcttgcacacacatctgcactaatcagcaacttcctaccctcgtaccatgtacttttcaaatggacaaaaccaaaaagggcttagctcttaatcacctctcattagctggtaactgaacatactaacctaaattgttaggtacacatgagcatcttgcaacttactccgtactatagtatcttctaccgtcatcgttcctgtggcaaattgctgaggacaggatgagatatttaaaccggggggagatcgatcgatcgctgggattttgatctcgcctgcctggacgcttggcgggtgcgactgcttcttcttgtttagtttttgaggtaaacgacatggagataagctaacttagccatggagggctgcaattaatttggcggtgatggtgctaatgggtggttaagggttttaatttgggtcgtcagaagaggcgattgctgatgctgatgccttgcatgcctggctggttgggccggtttgggtttggattttggtcgtttgggcgattcgggagccgtttatcttttgcttaaatttagccaaaatgtcctgcctaatctcttttgaaagaattgtttacgaactataaacaaaaaactgt

SEQ ID NO: 48828 - DNA, 1118 bp, Oryza sativa
gagatatttaaaccggggggagatcgatcgatcgctgggattttgatctcgcctgcttggacgcttggcgggtgcgactgcttcttcttgtttagtttttgaggtaaacgacatggagataagctaacttagccatggagggctgcaattaatttggcggtgatggtgctaatgggtggttaagggttttaatttgggtcgtcagaagaggcgattgctgatgctgctgccctgcatgcctggctggttgggccggtttggcgtttggattttggtcgtttgggcgattcgggagccgtttatcttttgcttaaattttgccaaaatgtcctgcctaatctcttttgaaagaattgtttacgaactttaaacaaaaaactgttaacagtttggcattcacctgacaaaggaatgggagcccaaatcagcattcctaccacagcaacactggaacattgtcatattcccgtgttcaattcgtctctataaataaagtcgttgttatgattcaatagatgttataatacttgaatttcagtgctgctacttgcgacatgatggaaatcgtgagattagcatgccatgccccccaccccaaagaaatgaattagataagcaaatgggtgaaaacgaaaggtcaaagtaccgtagcattctcaaaagtgttttcaatgtggtatggcatcaggttgcacagggtctaacgatgagaacataaacagagtttgttcttgtttgtcaacactaactacacatttctcattcaacatgaaaatcgcatgcaagatctgatccgaatgaggccacataaatatctatatgagtctttcaaaccccatttagttttaaaggggagattcatgagctagcaattatatatacatttctcaaaatcttacccctcaaaatttcacttgacatgctgatggctttgatcacatgcggacatgcccacatataacttaggtaatgaactcaaaatttgagacagaatacagatgaatgttttgtacatcgcacgggttgtgaaaagagggtgtagagagctataaaattcacctctgacctcttcgttcccagcttcccaaaaaaccagaagatgttggagtatgccacag

SEQ ID NO: 48829 - DNA, 659 bp, Oryza sativa
tgtctatttttaaaaaaacttttatatatgtgttctcgttgacttaaaagccaatactgaaaaaaaaactgcgttgaaaatatcttaaaattaatatcaaaattaaatttgaaaatttaaattttgactttttctttggctgaataggtaatccgatgggagcctagatctcttgccaagataaaaggccggactactatgtatagcgtttttttattaagaacaagcctacgtataggtaatcgacagtacggtagcctgtggcagagatgcaaatggaccgacctgcgaagctacttatttattttttatatatattaaataaaaggtaatccgtggacttgtcgcgtcgtagaaaaacaagtgggtcaacccataaacctatttataaattaaattagtagttaacctacgggttactcactaatttaatctataagcggtttcgcaggttagtccgcttgcatcgctagctgtggctatgcctaggagttaacgttttcgtatcacgctagctgatcgagtcatggtagaagtggcgtaggagcatgcgcgcgtagaagcatcatcacacatacatacgaatacgggaactggcgaactgcgaccaccctgagtgggtagaggcctcttttggacttagagtatcaccaacaatt

SEQ ID NO: 48830 - DNA, 1678 bp, Oryza sativa
tttagttaccaaaagtttttcttaaaacatcacatcgaatctttagatacatacatggaccattaatatagatttaaagaaaacctaattgcacagttaagggggaaatcgcgagacgaatcttttaatcctaattagtccataattagccataagtgctacagtaacctacatgtgctaatgatggattaattaggctcaaaagatttatctcgtggtttccaggcgagttatgaaattagttttttcattcgtgtccgaaaaccccttctgacatctggtcaaacatccgatgtgacacccaaaaattttcatttggcgaactaaacaggctagtaacttccaaagttagaagtttggtttgaaattggtatgatgtgactgaaaacttgtgtgtgtatgataggttgatgtgatagaaaaagttgaaagtttggatctaaacacaaccctttttgttctaaaaaaaactccatccatcccataatgtagcaatcccagatttgtagtcctaggatgggtctcatcccatcctagattgctacattatgggacggagtatctttttattttaaatattttaatataaattaagatttaagtaaaaaattactatagtatccttattaagtaatatatataagttatgattggattttggtagttaaaggatagtataatagaaaaaaattaaacgaaaggagagacaaatgaaataagtagtacagtactttagagtaacacatattttaaggtaaaatttaaatagtagaaagataactattttgggacagtggtaacactcacttccttggtttttaggggctggttggatctatacagaggttgccgctatgtgccatatttttatgtttgcctaaattgcgattaacaaaaggacactgttacaatacattctactacaaacggtgtggtaggatttaaatctaactatcgatttttatgagtataaaagtattttaatctatacgcactatcaaatgtagggtgtgtttagttcacgctaaaattgaaagtttggttgaaattggaataatgtgatggaaaagttggaagtttatgtatgtaggaaagttttgatatgatgaaaaagttggaagtttcaagaaaaactttagatctaaactcgaccgtaacagagtacaatcaaatcaaatccattggatctaataataaaaaattagatggctcataattatttataccttagaaaacccctgataaaaagcaaatcacaaaagaatattgtgcctcacattttcaaattgatgacatatatgctggaatcctgctataaatatagctaagtacggctaggaatgaattaaagaattaaaatggtatgataaacttagccaatgtttggaagtaaaccaaacatccccttaccatttgcatggcacctttaatttggctgtctcgttttataattagaaaaaccaattgcaaaatctgccgatccactaccgtctagtagggatgaaagtggttcggatactttccatccgtgactttgaccaattttcagattcggaaaaattcggtcggaaatatccggaatttctcggattcggaaacgaattcggattttttttctcggatacgaaaacgaatacagtaagggtgatatccgacggaatcggaaaacggtcggaaa

SEQ ID NO: 48831 - DNA, 661 bp, Oryza sativa
actaggagtgtacattggcacggctttagctgtagcgcccatgggcagatgcaatgcaaagcacctgccagctcaacagtattaccactgtacgtatacgtcggactagtataatgtacagtacgtacacaggttcatagccccggactcacgtgcagaccaccaccacgagtacgtacgtactccctccatccttaaaaaaaaaaagtacaacaaaacgtctaatattagtttggttttttttcggaggaagtatatctcgtgcctgtaacagtagtatgtttttaaccttgtccacggaccgttagatctcctccacgcccatccaaccgagcgatcacggccatcccgtccacaacacggtggcccgtggatttttgccgaacacacgagcgcccacgtgagcagccacgcgcgggccgctcggggcaggatgtgtgcgcaacaaaccaagagaaaaatgcgtgcgtacacgcagatgcgccgcgcgcgcgcgcgagacgacgacgacgaggggggaagcatcgcggcggtggggggcgaggcttttacgctagtacgacgtacaccaccgcgcgcgcatgagatgggcgtgggctttggcttgtgcgggggtggggggtgttgcttcgtggtggacggacacgctagggacccgtgc

SEQ ID NO: 48832 - DNA, 595 bp, Oryza sativa
gagctcggtacccctgatacttaattaatcatgcactaataactcactctactcactctattttacgtgtgcgggagaaaagttttcaaccgaagctaccagacacagccttagggtgtgttcgtaatatggggttgggactcatctcctcgcacggaaaacggagcaatccattagcacgtgattaactaagtattagctattttttaaaaaaaaggatcaatttgatttttttaaacaactttcgtatataaactttttataaaaaatacaccgtttagtagtttaaaaagcgtgcgcgcggaatacgagagaggagatgggaaccccctcgtccgaacgcagccttaaactagttattggaagctatttaatttgttaagtttatttatcaaaatatttcatttacttatataattaagtatataattcgttagtaatccctttaataatctatttcaaggtgaggccgttttgacactgtcctaggggtttagctttttggcttttgcttttctcttaaattcctgaagttagccaatgccagccgctagctaagctcccggagccaaaacgattgctcatgtcgatcgcc

SEQ ID NO: 48833 - DNA, 1075 bp, Oryza sativa
agagagcaattaacttaagattgaattggacttatcccttaagtaccagtaggaggatatgtccaaccttcttatatgttactccctccatcctaaaataagcgtggccatgagtttccatatccaactttaattgttcgtcttatttaattttaaaaaaaataaaaaatataagtcaagcataaagtactattaatgttttataatctaataataatgataatactaataaaactaatcttaaaaaatcaaataagacggagcgatcaaagttggacacggaaactcatgcatggttacgtttattttgggacagatgtagtactggtatttgagaatgaagaaagcaccatgcaaagaacttgtaataaagaaaaggaaattaatcatcaaaactaaaattaagagcaaaagggaattaaacaaaagctatatgtatgcatcctttttttttatgattcatttgcctaccctttacgttgtgcgtctacaaacgtcactcacttaacgcgtaattgagatcgtggacgaaaagatttagcgtgtagtagattttcttttggagcgaagggcacgagatgtgtgtgatgctgtctgatggatccgtttagtttgtgaggtcaacagtggaggacatacagtgcgcattttggtacgacatcattgttctctcacgggcgacctgaggtgaaaaatctatgtcaatgtcttatctaagttctcatgatgatctctctatatgtagatggaataatgttgtcgtacttacgtggaagtgtactatgtgtagtggtggtttgtccaacttaacaatattcctagtcgtgctataattttttttctttaattagcaatgccacgattgtaacttagcatcgcttttcaattgtaggtatatgccccacacacgtcaaagattcgtttattgcatattaagttttcctaagtttggccagcattttactataaccacatttatggaccatattccctacctaagatttggttttactactaaggttagtcatcaaaacaaacacccttttatacgaacgcgcgcggaccatatagttat

SEQ ID NO: 48834 - DNA, 736 bp, Oryza sativa
aataccaattcaaaccggtccttaaagtttgcatgtgtcagctaacggtgccctgacgctagctgccacactctagcatgtgcagtgttctcacaaattcagtcacaaattcaatgcgtacagccaggctctggaattggataccccccacatatacgtacgtacatacacatacgcaatacagtacgtacgtgtacgacagatcagtgccgtccgtttaggtacaaatacatttgcatcatacgtacacagactgtatttaatttactcctctccggatcagatgttaggtatatgtagctagtagcaatacgtactcgtgtacgacccatatgtacgtacatcaacttgcatcgcaaaatggagatgggccagtaataatttgaagtacgcaccggtactaaagttgaaagaacaaattctgttcagtctggaaattaaaaatcaaaatcgatcttagatacgtatagtacgagataggaaaagtctctggatcgatcgaattgtccgataaaagctaggcaaaggtatcgattgatcgttggatccaacgaactggtttagtaacattctttcttttttcggatggtactcttaattaattcgaattttctgtgtctgaattattctgcttttgctacgacaaaaggatcgaataattgagaccgaaatcgatcgatcgatcgatcgaacgaacatggcgtgagacgcagatcgcactaggaagaggaggaga

SEQ ID NO: 48835 - DNA, 919 bp, Oryza sativa
aactcggcgtcaagacgagggacccaaaatggacttaccccctcgttaaccatgggaggcgtgcaacgtggcgccatggctacggaagtaacggagctcgcttggccaaggtgacgatatgtcatcagagcctggcgtgcatcagacccgatgaagtcattgaaccgagcattgaggcactggttgaaccatggtttaaggttatgtacatttaatactcccttcatcccgtaaaaagtttatttttagctctttccatttgttccaaattaagttcttttttaagtaatcattgcgtcggagtttatgaaagtaaggaataattgtaatgggagtagataaagtgggaaataattgtattgggatttaataaagtatgggtattttttgtctttttggttttgtattggtatgtataggatgagtaaaaaataagcttgttttgggacagaggtagtattttcttattattgtagtagcttgcttagcctggtggtatgtaagtaaatcctctaacctaactactcccttcgtttcacaatgtaagtcattctagtattttccatatttatattgatgttaatgaatttagacttattaaatgtgaaatataaatgtgagaaattctaaaaggacttacattgtgaaacggatgataagtagtaaccaaggatcgattcccatgactcctcgaagcaaaccgagccggtaagattttctactatgcgcttcccatgcggatccttggagcaaaccgagccggtgaggggagctggtttggttttttcgattgaaccaccggtccggtaagattattttatatctggtccttgccatatgtttaaatcctactttatatatgaagtgcctgaatgttccaagtagaaatagaattgtcgccggccggacatgtgtatat

SEQ ID NO: 48836 - DNA, 955 bp, Oryza sativa
tgtgtcatggtattactatgctgttatctcaatagcttctcagcttcatctctaatggtttgatcatccatatcactagataagcacatgcgtttcgattaggggaaaatggtgggcagtgagatgaatcaatagattctcaaaacaccactctactggccaaagaaagtgctcagtaaatcatgtacttaatccccctgtcttctggaataccactggtatctggtggcaaatgcaaccagccacattgaccttagtgatactactgctgacttgtagcacgtgtaagcaatgttcaaaggatcgtcgcccaacatgtcatggtaatagtagccagtgagcacagcgtgcacaggtgcacccagggcatgcatcattgctttgatctcctgacttcaatcataatcgtacggaatggctaaaatctacgagactatggcatgctaaaagaaagtgaacggaagttctgaatagattgaattcattggataaatctttaggagttctccaaatggtacctacgcatcatctagactacccaatcagctcctatcgcccgcatcaacttcaagactacgcaacaaataaaagaaaccagagatttctccattatactaactgatggtttaacgaagtactgcacttactaacattaagtgtgctaatagcatagcacgctagatatttatatttataataatcagctaaaccatctatccaaagatgatagatcgaacaacagccagaagcagaatcaaagtttcatttccattaaacaagtctgtattacagtacatcgcccaacaaaattactgtaataataatcagattagcatctctctctctctctcattttttttaggtgtccttcctacacaataatcctacttactaaacacaacacaaggaaggatacgaagaggagaataacaaaattaaagacgggggggggggg

SEQ ID NO: 48837 - DNA, 881 bp, Oryza sativa
ttattcaaaaacttttataaatattattcaaaaacttaattagtagtagtaaatttaacaatgaatcaaatgataggaaaataattaataattacttaaattttttaggtaagacgaacagtcaaacatgtttaaaaaaatcaacagtgtcaaatatttggtgacggaggaagtacgtaaaaacaattccaactcttattaggtttaatcctagattggcactactttaaaggcaaacacagtacatgcccaaacattcagtggcctctatatgcgcatttgattcttttgacatttggcatatgtgtgcaagtcacgatggtgtggtgtgtgagtgtggtgtcgttgagtatacatgttcaaataataaaaaagctatgcttgctaaaattacaccaggtaattatatcacatatatatttcgctagatctcggaagaatttaattaaacatgaagtacaagcatgtcaattgtcaagaatatataccctgaccattttctacaaatttaacaattaactatttcctgtaactaaaataacaatgatctcaggtagcatagtcacagcttggttaattaattattatatatcatcatcatgatgggcgacaattgtttttagaggacgaagtccaagtctatctcggtgttcttccggatagggcatacagtgtattaagctcttgcccttgaacgaaggatagtatgatagcattagattagacttacatattccactaaataaattaaagtgatggcctagctagctgcctcttgggatagagacaatctctgtcaagaatatgcttgctaacaacaaatcaaacttggccaccactacttctacttactcctacatcatagaactattccatatgct

SEQ ID NO: 48838 - DNA, 3648 bp, Oryza sativa
tttcattggaggtgatgagtgttttacactttagtgcttggttaattagtatagtgatagatatatatgtagatcttgatatagaagagattccattaattcaagttaaattcacatgtagtggtcgtgtatatctgtagtactcatttcgtcccaaaatatatatgctatttctagtgttaaaagtttataaaaagattggctatttcttcacttattttctcatgtcaacgagtcacaatcacatctcccgtatttactctagacctagctatgttctcattcccaattacaattccttatttgattttacttcacttcttaatcttcctgaaaaactctagagtgtttatatatttaggacataaaggagtaggaagtgactaattttttactccctccgtccctaaatatttgacgccgttgacttttttaaatatatttgactgttcgtcttattcaaaaacttttataaatattattcaaaaacttgattagtagtagtaaatttaacaatgaatcaaatgataggaaaataattaataattacttaaattttttaggtaagacgaacagtcaaacatgtttaaaaaaatcaacagtgtcaaatatttggtgacggaggaagtacgtaaaaacaattccaactcttattaggtttaatcctagattggcactactttaaaggcaaacacagtacatgcccaaacattcagtggcctctatatgcgcatttgattcttttgacatttggcatatgtgtgcaagtcacgatggtgtggtgtgtgagtgtggtgtcgttgagtatacatgttcaaataataaaaaagctatgcttgctaaaattacaccaggtaattatatcacatatatatttcgctagatctcggaagaatttaattaaacatgaagtacaagcatgtcaattgtcaagaatatataccctgaccattttctacaaatttaacaattaactatttcctgtaactaaaataacaatgatctcaggtagcatagtcacagcttggttaattaattattatatatcatcatcatgatgggcgacaattgtttttagaggacgaagtccaagtctatctcggtgttcttccggatagggcatacagtgtattaagctcttgcccttgaacgaaggatagtatgatagcattagattagacttacatattccactaaataaattaaagtgatggcctagctagctgcctcttgggatagagacaatctctgtcaagaatatgcttgctaacaacaaatcaaacttggccaccactacttctacttactcctacatcatagaactattccatatgctaattgaacatctcattaactggtcaatatgcaactggtccacgaaaactggtcaatgcaataaattatctggtgcccataaggttaatttagtggtcaatttctgacattaactttaattactcgtcactatagtcagccattagaataggggtccaggtgccccatcaagccggccatctagaatagtacacaatgcaagatgatctgctgctgagttaactgtttgacctgacaaactataaatcaataaccaaaaaaattaataaaaaccacacaataaattcagtactcctgctaatcgatctagtagaagtttactccatcatcagctctctacaattgttaggaaacaataaaataattaagaggactgatagaggatagcactttaatgagtctgaacacacacctccttcaacctcttacatgtttgagctttggagcttccacacattccgagtccccctacgacaaaaggagcgaagcagcggtgactaaggctgtgtttagatccgggttgtaaaattttggcgtgtcacattgaatatacggacacacatttaaagtattaaatgtagactaataacaaaacaaattagagaatccgcctgtaaaccgcgagacgaatttattaagactaattaattcgttattagcaaatgtttactgtagcatcacattgtcagatcatggagcaattatgcttaaaagattcgtgtcgcaatttacacgcaatctgtgtaattagtaattttctcgattatatttaatactccatgttatgtccaagcattcaatgtgacagggtgaaaaattttatcagtggatctaaacaaggcctaaaactagagatggcaacgggtgaatacccatcgggttcccttaccaacgtacccacacccacgtataacaaacaatactgcttcaatacccacacccgctctcgggtacagaaatcccccatacccacacccgtgtgggtgatgggtacccgtcgggtacccatacccataacaccaacttacagctagggagttggctgcaacagttcaggggaaaagcaaatcgtagcgtgagctctgaggcgatgatggcggggatgacagcggttcagcgcgaacgcgtggtcgcatggaggcgtcaacagcgacgcgtgtaggcggtgacggcagcttggcacaggcgcgcgtggcgtggagctgaggcagcgatggatgatcggctgcgtgggctcgcggcgcggaggcagcggccaccgtggcaaggaggccgcgacgctgcgtcagagaaggttcaaggctgcccccttaatccttaatttggatcagatccagtgaggcttccatacctccaatgcttctgcggtctgccataccgagagaggactgggatgagactatgagaggattagagaggacaggaggcggctgctagctggatgcctaggtgaataaagttagggtttctcctttcctatacacagggagggagtctggagtgtttccatctagcaattggtcttgggccaggcacatattgggccaaatatcaaagatgggctacgtatatatacattgcatataagccccacgggttaatgggtatggggacaaggaaaacggacccgcacctgctccacccgatgggtgacaattttgcccgttaagggacccatggggataaaaactgaaccataccctgcccctaatggagtaattacccattgggttccgggtttcggggccccattgccatctctacctaaaacaaggatgaggaggaagtattactcagtccgatgactaaatcgggaagaaaaagatgaagtggcactaaagatgtctagtggactactccactctagaaacacagtttctatagataaaattttaagttaaaatgacatttttagggttggggggagtatataggattatattagagccgattaaagatgttgagttcaagtcttaactaaaactagaaaaataaaaaaagtacattccacgtggatgcatatttgatgctagaactagggagcctcgacgtgagaggaagggattgaggcagtgagagatgctgaagtataattaattaagttaccagctgaaatggctgatgcaagtaactcaacttacaataaactgctctttagctgcaacttagaaatccttatatttcagttagctatttctagttacgaatctggattatcactaatccaaatttgtagaaaaaaaacacccacattttaaaattgctaaagtgaggctgtgtttagtttttaaaattggtgagaagcttgagtat

SEQ ID NO: 48839 - DNA, 925 bp, Oryza sativa
atcatattagaacgtaccagcttgaattgaaacctaaaattttagaggctatgtacggtggttgcttagcacgttcctgcataattaaggctgggttcggcacctatacttctcaacttaccttccttgtttttcacgcacacgttcttaaactaccaaacgatatgtttttttaaaatattttataggaaagttgattttaaaaatcatattatttttttataaaaaaaatagccgagtcgctccattttacgtatgcgagagattagctcccaacatcttgtaaagaacactgcctaaatacatctcaatctcaaatggagcctagaccctagagctattgcacatgaccatggtgtctccttttcttacctagcatacaatgcaagtaatcgcatatgcacaactaaagccaacatcttttgcttcatctcttctccttcatcttcctccttcgtctaattctccattatataatttccttttagtaatccgtcctaaactgatcctaatctatctcctccagattaattaatggctatagctatatatacctacgcaactagctcaacatgatcaccaactagccaatcacatcacaagaacacaaagaacactaacaatggacatcacggtggccggcggcgccggcgacggcggcgagaggcggacgtgggtggtggaggtggagaggacgctgcacgacgcgcccgacgcggcggcggaggcgtcgcggtggcggccccactgcatctaccgcgtcccggcgtgcatcaaggacctcaagccgaaggcctaccagccgcaggtggtgtcgctcggcccctttcaccacggcgaccccgggctggcccccatggaggagcacaagcgccgcgccctgcgccacctcctccgccgcgcggcgcgcccgctggccaacttc

SEQ ID NO: 48840 - DNA, 621 bp, Oryza sativa
ggcttggatccatagcgacaatgccatcgacaacatggagagtagggacgaagaacccatgatttggggaaagtgatcgccggtgggtgggcgagaggttatatgaaattattttgcatctgtttagaataggtagctctagcaataattgtacattaaaataaaatgaggtctagtgtaaaaaaattgaaagagtatactattttatatatagagagagagtgtccttggctcatagctgagagaacctcttcttattactgtgtggtgttagaaccatgagtgcttcttcatgagttggtgcaattacgacgtacggtgtatattttagttggtgcaaaggttaggagttatatttcctctaatttcatatataccgtcattttgaacataatcgtaattaccgaggagttaaataactttgaactcaacgtttatcttacattggaaatcaaattaagcaacaataactacaggggtaaacttatctaatgcgcttgcaatctcttttaagagcaagtttaatagtagactataagcaaacaataaacttatgtaaatgagagaaaattcaaaaaatgagaagaattgtctctcaaataagagctattcacacacttt

SEQ ID NO: 48841 - DNA, 596 bp, Oryza sativa
tccactttttaatgccttgttttatctgataaaccatagattgacactgatgaacatggcactgatggggaattatgcatacctgatggactagcacagttcagaatgaacttggaggagcttcttgttgatatttgcttgcttctaggtgctcctgcatatattaataaggtatgtggtttattgctgaaagattcctcatattccatgtctggggagaaaagattgtaatttgcagaagtggtggtatctttagacatccaataaccgtatttataagctagatatgcaatagtatgatgtagatatgttatgcaccattgttccaaataaacactatttacaactatactattgcatatatatatgaatgtactaaaaatagaaaacacagaaataaaccatatggttctgaaaatctgaaccttcttggtatttgctgcagcaaacaaatacccttatggtttctgtaatatttatactgccctatgtgctggtcttgaaatcgatttattaaacttctacatattggttctaatatcttgatacgtgggatactttggagccccttttgtgacaattattttaaatgattt

SEQ ID NO: 48842 - DNA, 718 bp, Oryza sativa
actttcttaggcacctgctttggttgcagaagggagtgttcaagcacttgctcttgccgatgcacttttgaggtcaatctattgaattgtttgtggtacttttctttgagtttttaagttgcacgtttcaatgtttcaaatgatgctattctatagttcagttcactttattacctgttgtgatcctgatgagttttatcctcaacacagatgtgtagccttttctagtgatgattgggagattgcagattcaaccttgcaattttggtaataatgtctatgtctttgctttgtttcattttcatgaatcacaagctcttcttctgattaattacaagtattagtttttcggaaacatattattcccgtattattttctttatgtttgtgttgcgatgtattcctgcatcttgtctatgtggaaatttaggatggctgggttgctgatgagcatattccgtaaccttgtggtcgtgtggggggtttagaaggtctaggagtatcacaagatttttggtgttcgactggaatctacgtacaaactttctcaaaggacttgtgattaccatacttcaggaccggatttaataaaaacactgtaacctgatatgcctatggtccttctagctatgtctgactttgtttttcttgtcatggtcccctcattgcaatctcattgagagttaaaacacatgcttttacatatatttttggatca

SEQ ID NO: 48843 - DNA, 1016 bp, Oryza sativa
aaagaacctatcataataggcaactttctttattttaaacatcttacatttataaatattgtttgttaaagtagtatctcgaagaccatgtagaagtcctagaaaagcttatattttgaaacggagggattatacaataagctctctgagttctactactagtaaaaaaattattcaactattcagatgatagtataaataaatactacttcgtacctctgtttttaatatatggcaccattaattttttatatcatgttttattttaaaattttactccatctgtcccaaaaatataagcattttggactctgacacggtctccgagatgctaatttgaccaacaatatctagaaaagtaagaggttttaaataaaaagagttacatattgtgatagtttgttaataataaatctagtaacatcaattttacaggataaatcttttttattctttcgttattaatagtcaaagttaataatgtttgacttgtcactatgctaaaaatgtttatattttgggacggagggagtaagtaatatcttttcttttgttgtggcttgatttatcactaaaggaattttaagcaatactaatacttatatttttaaaattcgcacaaaactttgaataagacattaagacgaatgatcaaaattgtaccaaaagttaacatagtcatatattaaagggttaattagatctatgccattaaaattttactggttttgaaatatatcattgctatttgcgtatttgtaacgatgccattgatacttgtttgaaattttagtggtgccattaagatacgtatttgcatgtattggaagaaaataccctcatcttctacctctctcttctcttatcttccttcccggtgcttcttgctccaccggccgccgttgcagctgccactcgccgtcgcgccaccgcttgccgctgctgccgctgcttgccgccaggcggctccgccaagtacatcctccagttggagcacgactaccctgggacgacga

SEQ ID NO: 48844 - DNA, 613 bp, Oryza sativa
tgtaacaaaccttatccagaaagtagctgaaaaggcatccatgactttgcaggggaaaaacactaacttgacatgattgcatgcctgcaggtcgactctacaatccccaagcattatttttctttgcatatactttatcttctcaggggaataaatttctttaaattaaaaaaccaacaggcccaataggacattatcctttttgctgaaatgaatgagcagtatgcattcattgtttcccctttatgcaactggctaatttactaacattccatgacaaaaaaacaaatgctctaagaaaaaaggtgttcaattgataaagaaaaaaatatatacataaaggtggatagatatcctcacatgacatatatgacatcgcagcaagtgctgctcctcggtgcattgctgtagagcatatagctgccttttgaaatgacaactcaagcagggagccagatgcgacaatagcttcctgatgatatatgcaatcaacacagataactactatcagactcactatccatatcatgcagcagcaatgaaccaaaacaccttaacatataagacacaataaattcacctttgggcagcagcgaataaatgtggatgtaaa

SEQ ID NO: 48845 - DNA, 505 bp, Oryza sativa
caacatagataggttgcaaatatgacactgcagtacaaccaccaggtgagacaacttactgcctgaccaacttcacacatcaaacaaacaagaccagcaatagtcttctcgcttctgttggcaagagctggcagaagaagagcttctctaatatatggcattttacttagaaatgcctgaggtagatcctacaaccaaaaagtggcacgcatcaagattagtggaactgtattgaattaatcaacaaattcaacaaggggaacagcagtcatgcttctagtcattgtctgagaaaataaatgaggagcaggacgggcattgcaactcttctagtcataatattcacatcatgtagatatctgaggcaaaatataactacattaactagcagcttaggttgaacattattaaaatgtaaactgaaatgaactctgatttaggttaatcaaaatggtgtcttgacacaaacagaagagagcaaacttaatcgtgcaaactatttcat

SEQ ID NO: 48846 - DNA, 3217 bp, Oryza sativa
aacactgaccaattatgcgtattccaaactgattgtatttctagtactagagtatgaatgtctctttgactccatctcctctagagctacagcccagctaaataattttttgctcaacataaaatagaaacgaaatttggtgcagcgttctcacgtaatgaactagagatgtggagttgggtgtaggctgcttaacaaccccacttaagacccaactccttaaactaaatttaggagttatgactctaccaaacaggccttaaacatcttaattccgaccaaatttctgcattccaaacactccgaggatcggcattgttagcctgcttattcgagcaaatattgaattatagagggaaactatttatttgaattttgcggtgccctaatttttgataaactatttatatcttgcaattactaaactaaaatacctttgagattttgacgaaatcataacagacgccttactatgacagacaggtacattacatatcataaaaaaaaataacatcaaatattagtacgtacatcaagtttagaacatgaacttaaatggtgtaccgaagtaggtacagaattaaaggtcgttttggtttgatgccctgtggaaaattcagataataccaattcaaaccggtccttaaagtttgcatgtgtcagctaacggtgccctgacgctagctgccacactctagcatgtgcagtgttctcacaaattcagtcacaaattcaatgcgtacagccaggctctggaattggataccccccacatatacgtacgtacatacacatacgcaatacagtacgtacgtgtacgacagatcagtgccgtccgtttaggtacaaatacatttgcatcatacgtacacagactgtatttaatttactcctctccggatcagatgttaggtatatgtagctagtagcaatacgtactcgtgtacgacccatatgtacgtacatcaacttgcatcgcaaaatggagatgggccagtaataatttgaagtacgcaccggtactaaagttgaaagaacaaattctggtcagtctggaaattaaaaatcaaaatcgattttagatacgtatagtacgagataggaaaagtctctggatcgatcgaattgtccgataaaagctaggcaaaggtatcgattgatcgttggatccaacgaactggtttagtaacattctttcttttttcggatggtactcttaattaattcgaattttctgtgtctgaattattctgcttttgctacgacaaaaggatcgaataattgagaccgaaatcgatcgatcgatcgatcgaacgaacatggcgtgagacgcagatcgcactaggaagaggaggagaaaaaatgtgtggcaaatggagtgagtaattgagtggttttgctgcatgattaagcagaggaagaatggtttgatctctgaaggggacgcatgctcgaatggatgatcctttttctggctgctgcgcctttttttggctcctttatttgttcatagagtatttcttttgttcgtgcatgtatgatgatactactacatggatgtctgtgagctttgcttctttggttgttcatgactgcttttgcttgctcccttttgattcccaaggagagggcactaggagtttaataggagtacatcataaagtgtttctgatgataaaaagaaacccaactgaaataatttaaaaagattacaactatcaaaaaattttagaacacaagaattttacaggatcacagtacaattaaatccaaaaataacaaataaaaaatcctctaaatttccttttccaaagaaggcctgtataatttgcacgatgaattgatcgagatatataatcaaaggagcttttgcaaggccctaccaccgagcaactactacaccctacatttcgcaagttaagccatagttgaactatgatgagattactgagatgggcccagatcaaaatgtgtctccaggcccggagaagcaatcaagcaaatgcaaaaagcccaaattaatcatcatgtccctagctggaatataattaatcaatgccaattaatcttccccgtttgatccctcctattcagctcgattcgatcgattgggttcacgacctacccgtatacaatcatgtggggccgtgcttgcacgctctgtctcctcttctttttcgtgggccccacctgtacgtgagtgagtaactgtatgcgcgtgaagaaatcgagattttgtctcacaaaaaaaaaagggaaacggatttcgacatgcggacaatatggcgaaattggcccaccaaaagttcggcccgctaaaatggagcccagtttggcacctcagatatgggctgatttgaccttggggaactgggccgtacgcgatgtaacatgtctgcagtggcccatcaaagcccggcctgctatagtctcgtgatcagggctggtgatgtggcccattttctttctgagaaaagtgatgtgggttgggatccagtttctggtgggccagactgggccgtatgatggttgggctggttcagatgccgttgtgggctgcctcgttaaggaataagttcactttaaatccctcgtgttcaaagagtttaagttgaatcctcgaaccacaataccagacattacacatctctcaacttgtaaaaccgatgtacccgaatacaccggttttgtaagttgagagacatgttatatatggtattatggtttgggaacgaaatccaaactcggcgtcaagacgagggacccaaaatggacttaccccctcgttaaccatgggaggcgtgcaacgtggcgccatggctacggaagtaacggagctcgcttggccaaggtgacgatatgtcatcagagcctggcgtgcatcagacccgatgaagtcattgaaccgagcattgaggcactggttgaaccatggtttaaggttatgtacatttaatactcccttcatcccgtaaaaagtttatttttagctctttccatttgttccaaattaagttcttttttaagtaatcattgcgtcggagtttatgaaagtaaggaataattgtaaatgggagtagataaagtgggaaataattgtattgggatttaataaagtatgggtattttttgtctttttggttttggattggtatgtataggatgagtaaaaaataagcttgttttgggacaaaggaagtattttcttaataatgga

SEQ ID NO: 48847 - DNA, 1483 bp, Oryza sativa
gatccttggagcaaaccgagccggtgaggggagctggtttggttttttcgattgaaccaccggtccggtaagattattttatatctggtccttgccatatgtttaaatcctactttatatattgaagtgcctgaatgttccaagtagaaatagaattgtcgccggccggacatgtgtatatacgggttattggtctttgtaaacagttgcaagacttcaatgtaggactatgtggataaaaagtcaaaagacttgattgagaaatactccattttatattataagttgttttttatttttttttcctagttaaacttttttcactttggtcaagtttatagaaaaatataacaacatttccaacacaaaacaatcatattatgaaaatatattcaacatcactaattttgtattgttcatgttgctaaacttttctataaatttcatcaaacctacaaaagtttgactaataaaaaagtgaaggtgacttataatataaaatagagaagtactatatatctacaacaacaaagaaacccatttatgcatactagaaagataaatatatggtataattaattatatgagcgataatatgactttgtgtgacagtttctttgtaccaataaatatactaaatgagagttctaaccatatatagggacatatctatacgatactctctttggttttttatatagacatcgaacatatgtttgattacacatcgatcttattcaaaaaagtttatgtaaatatgaaaaatttaaatcatacttacaacatcattaacgagaaaataaatcacaacaaaataaatgataattacataatttgttaataagctaggttaatagtcaaacatatataaataaaaacaataacgtcttacatcaaaattcagaggaagtactacacacatatcaatactacttctcttgtggaaatgccattgccgtagacaatgaatcacgtgatccacgtgcctgcaggacgatgttccttcctttgggcacaaacctagcaatttttttttgttacatacaaattaattaattaaatgtgatactatacctcccctaaactctactccatcttttgcacacgatctcaattgattattgtagctagggtatgcaacattcccaacgatggagaaattgaaggccacagcccacaacattccacgagatcacactgcacatattcctggcttcatcagagcaagctatccaggccagcttagctgcatatgcatgagccggtgtaggccattgtcctatggtatctcgacctctttacgtaaagcctttcttcagaacttgtgatcgaccgtccgtcttgcagctgtaaagaggaaaaacagatcatcaacaaacacaatcagtttgaccataacgtacaccacccatttatcacagtaattcttcttaacattcaccagctttaccttgtttgtactacttcctccgtttcacaatgt

SEQ ID NO: 48848 - DNA, 797 bp, Oryza sativa
ctatagggcgaattcgagctcggtaccccacaatgtaagtcattctagcatttttcacattcatattgatgttaatgaatctagatatatatatatttatctagattcatttacataaatatgaatatgagaaatgctagaatgacttacattgtgaaacggagaaatactttgcagtttgcaccatgtttctagctagggctgtgtctaaacatttgaggccctggtgttaaaacctgtttagaaaataatattaaaccaaggagtaattgaatatcattttggactatgtatagcataatcaggtgtagaccaactatttcacttgatgaccgtaaatgtaaaaataaaatctctagtgctgattgaaacgtgtgttcacttcgtcgtcatgcataaaagataccggtatttgaagtggttgtcattatcatctaataacacttgttagagcccagaaaatttgcttatttcaaacgagataagtgaagaaggaagagacagacttataaaatggtctgagtttatatatcctcaaatcatattagaacgtaccagcttgaattgaaacctaaaattttagaggctatgtacggtggttgcttagcacgttcctgcataattaaggctgggttcggcacctatacttctcaacttaccttccttgtttttcacgcacacgttcttaaactaccaaacgatatgtttttttaaaatattttataggaaagttgattttaaaaatcatattatttttttataaaaaaaatagccgagtcgctccattttacgtatgc

SEQ ID NO: 48849 - DNA, 798 bp, Oryza sativa
gtaccccctccgtgcaaaaagaatcaacttctgacaatgtatctagacaagcatttatctagattcatccatagaatttagttttttctcgaacggagtagttcttaaaattcatctgtctatgtcaacatatatgtacctctgttttcagataaacaggatgtgcatagagatgctggattccaagaacagaccgatcaatcatgccaacagcattgcaacctggccctgtatctcctttcactccacatttcacctgcaaccacccatccaaaagcaacattttataaaagcaatcaaaagtggatttctccatttcagataacaacaaacagaagaaactaaaacataggagagtttcttaagaaactaaaatataggagaatttcttaagaaaaaaaacttaccagaaaatgcttcacagttgagtccggagatgtgacctcatactcccaatctggcacgtgcaaaccatacaaaatcaccaggtacgtgaccaccagaaccaaacccacaaacctttgcaaagtaaggaaaaggacaacatgtgatgtaatgcatgagaaatttcttaagtttaagatcagttaacaatagctgataaattagcaagttgtgtaaagtgtgctcacatctgatgatggtatcttgttattaacatagagccagagccaatgttaccgccactactaaccctccttagccagatttcgcaaagcgccaccactaagtaggctattgcaatcctctgcgtcaagtgtgtaaaatatcatgtgtaaaaagctcttatatattgct

SEQ ID NO: 48850 - DNA, 1346 bp, Oryza sativa
taagttatgggcatgcagtcggtacatgggctaaagtggtccatctaagcttaactatcttttcgtgtggtttcaggatggatctgctatatgtcataaaatatttaagggctcaaattatatttttctacaatatatgttggtatagcaaattagaacaaaagaacatatcattaagttatcattcttgaatttcgttgtaatgcatgagtatttagctagcaagctgtacctgcataaggatatatatatatatatatatatatatatatatatatatatatatatatatatatatatatttgaaattgtggggagccaaagcccacttgagcactgaacacacttagcccactaggaataaaacaccatgcccccctattcccttgtccatgctgtttgatcagctctacgtactctctcggtaaaaaaaaagaaagaaagaaaaatcaattctaaatacaaatctaaatgtagtttatatttagattcatagctataagttagtttgtttatggaggatgtagatacttggaaatttcaatgtattaggactacaaaactttttacaatttaaaggaggaaattcccatcatatatatttttttattgtgtttagctcgttgtacctcatgattaaattagccttgtactcacatcaaaaggaaaaagggtatcaaataagaaaaaactaaagaaaaatcatattttgtaagaccagtactactctactaactcttcatgtacaattaatgggtttgagagttttgcacaaaatgctaccatcgtaattcacacttcacacaatgttccacctttcaagaactacggacgtactccctccgtcccacaaaaaaagaaaaaacctggtttccgtgtccaacgtttgaccgtccgtcttatttgaaaaaattatgaaaaaaataaaagacaagtcacgcataaaatattaatcatattttatcatctaacaacaatgaaaatacaaattataaaaaaatttcatataagacggacagttaaagttggacatgaaaacctatagtttgtctttttttggatggagggagtaatcctctattagtttctcatcaatactagtagtacgtactaccgctagtccgctactagctaaccgtgcctctggccttttaagcaatactccataagcaaggatcattaatacagaacatcacatatgtattgcctcatatgtaccggttcagaatttctagccatacaattggtcaaagttgagattctttagaaaaaaaactgatacatacaatggtgccactcatatatgtatttctaaggggatcctctagagtcgacgtgcaggcatg

SEQ ID NO: 48851 - DNA, 795 bp, Oryza sativa
ctatactcttcttccaatattatttattttatttctgaatttttattatttttaattgtatttctatgtggactctaaacacatctttcaatattctttaatttttaatttgaaattttagttacttctaaattgtattgctatattgactttaaactcttcttcccatgttttcttaatttcgaattttagttatttgtaaattgtatttttatacagattctaaattctacttttaattttattatgtttattccaaattttagttagttttaaatttctatatggactatgtactctacttctaatattccttattttttaattccgaatttcttatttttgttaattgtatttcgattctatactctacttctaatattgcttatttttaattgtaaatttgagttattttctaattgtatttctgtatcgactctatactctacttctaatattccttatttttaattccaaatttcatttatttcctaattgtatttccatatggattctagtcccctcttctaatattccttattttttaattccgaatttcagttatttcggtatttcctaattgtatttctatatggactctagtctcctcttctaatatttattattttttaatttcgaatttcatctatttctaatttgtatttctatatggactctattttttctttttctccgattaatatgagaatttctaggctatgagagtgaacgtggagactcctttttctattcttttaataatataatagattggctgaacagatttatggcaga

SEQ ID NO: 48852 - DNA, 603 bp, Oryza sativa
tttaaaaaattcaccagcgtcaacatttttagaacatttttaggatggatggagggagtagttaattattccgggaatacaacccagccaagcaatccggatcgtcaatcccaaccagacggctgatgatcccccaaaccagccaccaagctcttgcttctgcccacacgatgatcgtacccattcccccccccactgacagtgggccccacgacctaggtttttcaccttcttcttcccctctcatccccttcacgtcgcgtcctgtcctcccaaccccttcttccctccgccgctgccatcaccgccttccccccttcgaatcgatcgccggccggccgccggcccggcaccgatcctcctccggtgtcccatgccccggccagatccgcgggattcggggggtgtagcggtagccttccttcccggtcggatgccgcgcgacctgtcgcggtcgccgacgccgcgccggcggaggcggcgctcgccgtcaccgccgcggtaccaccggggagtacgcagggcgtgcagggaccgcagccccagccgcggcagcaggtccccgtatcgctcctcctataggtgatgaatctctcatctcct

SEQ ID NO: 48853 - DNA, 1684 bp, Oryza sativa
gatggggagaggaggaggaggaggagatagttatttgtggagaagatagtttcccagcgcgcctctcacttcctatccggaactgaagctttgacgcgaataatgccacaggatgagaagcggagcggcttcgcttcttgggccgagttgggccggcagttgttttatctgatggtacaagtctaatttctatcctattttgaccaccctccaccaaacttttgaaaccggtgtcatttgactctctgagcggttttgagagtggtttttgctgatgtggctcgctgatccggtctaaccagctgactcagcatgtaggacccgcatgtcagtgtcacattttcatctccctctctttcttttctcttttcctcctctttctagcccggctttgcaaggtggtcggcgagcatgctcacaagagccctttcccgccctcccggagcaggcgagcagccacaagctcggctccaccagtgaacgagcatccctcctgtggttagacggaagcggcaatccagattcgtatgatcctagcggatgcggagcatgatggtggtcaatgttgatgacgaggctgttagctcagatagggttggcaattcaggctcgggtactagcaacgctcacgaccagatgaggtgactggaataggtgagggatagggcgccgatgcccacaacggtggttgactccatgaacggcgaactagagcaggtgaggatgaggttgtcgtatgcctcaaccaccacgctccctatcccgcgaagaggaggagaagcaacttcagtgatgaatcagatcccacccgcaccgagctccgctcctctgaccgccatgagctctaagaccacctctgtcgccaccgtcagcgtagaagaaagttggagctgcttcgtagggccgtccgaggctagaaaattttcttctttttttttaaaaaaaatcaaaacataaaattttcaaatcagggttcagcggttttcttagtttttgtgagaaccatatgaaaactacttacaaatatgttcaaatttggtaaaaatttcaaaattcaacttgaatttttgaggttaaccgagaaacactctgtttgtgttctcaatccaggaagtccggtttccaaaaaaccaattgattttcagcgtttttgtaaacctagggactgcccggggaaattttgtgatatcatacaaattttcctagtagccttagagactaatccagctgataattcgcggtgataatctgactttagctttctcaaaaggttacagaggtagcaactttgctccaagcaattgttccctccaatcaaattttacgacaaaatttggtcaaatttttactaaatctaacaagtgcaagacatcacgatagtagtgtttttgaaagacaaatctctacacatataattattttggctctgttcattccagggtgataggggagattgagtctcgttttccacgcgcacgcttttcaaactactaaacggtgtgttttctgcaaaaaaaatttctataggaaagttgctttaaaaaatcatattaatccatttttgaaatttaaaatagttaatacttaattaatcatgagctaatggctcacctcgttttacgtatcttctcaatctcttcaattcccttctcctcaaacacaccctttgtttttatacgggcaa

SEQ ID NO: 48854 - DNA, 663 bp, Oryza sativa
aggatccccaaagagaggagaggaaaagtcaaaaggataaggttggggtgaaaaaaatggtggatttttttaatgtaaaaatcaatttttattttacatgtggctctttaaaacgaatttaaaggcactaaatcaactcatatgaaaaagttgttaaaaataaagttgtataaattattgaaatatatcatttttattttggtcatttctccatccgagtttgattaaactatataaaatttgaatttaaaaatataagaaattcaaataatttttcgggtagtaaatgatttcaaatgaaaaaattgtcaacaacaaagttgtataacgcatcaatatctacaacttttgttttggtcatttttctatatgactttgttttaaccgtttgaatttaaattttaaaatatgacaacttcaaacaatattttgaaatactaaatgatttcaactgaaaaaagtttcaattccaaaagtcatcaacaaaaaagttgtataactcatcaagatctataacctttattttggtcatttcttcatccgacatagtgatagtaacattgtttataaaatttatatctatatcatttggttctataaactataaaagagatcggtaaactttgtaaacaatactactatcactttattggacgaagaaat

SEQ ID NO: 48855 - DNA, 3261 bp, Oryza sativa
aaaattgtcaacaacaaagttgtataacgcatcaatattacaacttttgttttggtcatttttctatatgactttgttttaaccgtttgaatttaaattttaaaatatgacaacttcaaacaatattttgaaatactaaatgatttcaactgaaaaagtcatcaacaacaaagttgtataactcatcaagatctataacttttattttggtcatttcttcatccgacatagtgatagtaacattgtttataaaatttatatctatatcatttggttctataaactataagagagataggtaaactttgtaaacaatactactatcactttattggacgaagaaatgactaaaataaaagttgtatgtcttgatgagctctacaacttttatgttcatgactttttttagctgaaattaattacagcttcaaaaatattatttaaagttttgaaattcaaatttttaattgataaaacaaagtcaaaagaaaaaaatggccaaaataatagcagtaagaacacaataacatgatagagcatgattttagaaacatttaggaaaaaaaatcatccaatttggagttcatatgagtgagataaattagtttcaaattttcaaattttatttttgcatacggcttcttaagtcacccgtgtggaaaaatcaatttttccatgcgggtccttaaatggtccacaaacaaacaaatgaaaaaaattcaattctgaaaaataactactcaaatttttaaaaactttcaactgaaatgttcaacccaaaatttaaaatatttaaaaaattttcaaaaatttcaatgtgcttacgaaaatttcagtgatactcattaatttatttgtttcatgataacataaatttgtatggaaagtaaacaaaacattttctatctccccttgcccttataaatagagataaaatttgagaatactgatgttttgtttttgaaaactaatggctatatcgtttttagaagcttattttgtggggtcttgatattttgataattattcgttaccgtattcatttcgattcgtattcgctccgtatctgtattcgataatattcgattccgttttcgtatccaggtttccgattccgatttcgattccgagaataaaaaaatgaaaacgaatatgatagagctagattccgaccgtattcgatccgttttcatctctactaccgtccctttcagctgacataagtacgtcatggacaaatttctgcatcagttccatgcgttttgcttgcgtgtctgcaactccaaatgtcacacatgcatgcactacttcaacagtcagatcgatgatccacaggtccagacaaatcgatcgagacaaaacaaaattaaagcaaatacgaaagcaacgacgtcatgcatagtagacatctataccaattcaaatacgtgcattttgaattcttccggtgatcatccatcttggactatataataatacaaacaaaaatacttggtctcttgtgaggaaaacaatacatacatctatccatctgcttacgtagatgataggtacacaacgacgataagtatatatacacgaactcgtcctttgaatatgaagtaacccccgtttgaaaatataagtcaagtatatatagataatcttgactttactggataacaagaccatgaaaataatttaaaattttgcgttttgctagtactactctattgtatacgtatattgattgattgattgttcaaatttgacctcgacttcttggagttatataacgtttttttctccattggacgtacggcttgcacatgttacagcgacatctgtatgggacaactactattcatatacatattgtactatactatgcatatacaatttaaaaaatgaattaatcaaaagaattgaaaatgaagtgatcgaaacggatcgactgatcgagatggctacgtacattgaaagctacgtgcatgtaaaacgacgtcgtcgtctttgtgaattgtgacgaaacggacggagatggagacatgcatacatttaagtcataatgtttattagcaaccaacaaacaaaacttttgtatacttgtttttaaccataattaatattaaaacggagtaatatctaatacatattggttcgcaagtctttatacgtatcgaatttagcagccgacactaacttatagcacgaatgatataagttatcggtgtcggtcctacaaccagttctaatatttaattagtctcccgtattagtcggaagataaagagaaaatgcttatatttaaccgatacatataggaacgtccttcattagagttctatgctagtttgaaaatcaaaatactacactacacgaaagtaaataaaaaatcatcttaaattaagatatactaatattcaatttccgtcagcatctgatgaattgaacggttgtattcttccccctccttttccaactcataaactcagtttttcgtacgacgataacttcaccttccgaacatagccataggccgtcaacgtgttcgtctccatgtactgaaagcgtcatgagtcactgtgtcaatacaaaagttggagtaggtttgcttggtttgatcttttgatgcttctcgacagttccaacaccggtttcccaaaaattcagctgtccatatgcattttccatcttccaactagcgtgaagacaatttgctgggacttgctcgtatgaatccaaggcgtgcatggtcagaacttcaacgtgtgtttccgtgttcctctctatctgcccagcacatatatatccatggttatctagaaaaacatgcacatcactctcgttttcatcattcgaaaataatatgaataactagtattctctcatgtttcaaacttatcaacttaatttctttgccatcatccaaaaaataaaaacaaaattatcaaccataccctgatgtccactaatataacgcacatatgcaggtggatttttaacaggaatttagtgagattaagcggatgtgctgtcggtttccgtctcttaaagtatgtgttaggggactattcgcgagagtgtgagtgtggtgttgcgtgtgtagtgatctaacgtgcaatcttaaaaataaagctcactaatgtattttgcctaattatcttactattttctcatgaacttttaagaagatttggatgggatttaggagctagactgcctagacttggctccgtcctgtttatagacatttggatttgaacactaataatggtgtca

SEQ ID NO: 48856 - DNA, 1159 bp, Oryza sativa
acaaaattatcatccataccctatgtcctctaatataacgcacatatgcaggtgattttttaccaggaatttagtgagattaagcggatgtgctgtcggtttccgtctcttaaagtatgtgttaggggactattcgcgagagtgtgagtgtggtgttgcgtgtgtagtgatctaacgtgcaatcttaaaaataaagctcactaatgtattttgcctaattatcttactattttctcatgaacttttaagaagatttggatgggatttaggagctagactgcctagacttggctccgtcctgtttatagacatttggatttgaacactaataatggtgtcactagtctatcatatcaattatgtctcctcgctttttttttccctttcaattataagttagtatatacacgcctaagggtctgtttggaaaatggttaagaggggtgggattgggatagggacagagataaggatatgagtgaagggttagaatgaaacaatatatatgaagaatggatggctaggattaaaaagttgcctttcagaaggtgggataatatttccctatccattatcaaacagagtctaaaatctcatgctatattcggctataaatatttgatgtttaaaataagatttatttataaacttttgaattctaacaagcaataattctgaagtaatgagtttcttttttaaaaaacagtatacatatatttgcctcgaaactactacattatatcgtagacttattatttttataaacatattctagtacgaggactagagtttttaaagtttgacgtattaaatttttgtgtatttatgagtagagagaaatacttaattacaaattactctccctccatacccaatctacgacaattcaaatattttcagctagtcaggtgcttaagaggagaattcatgcaattcaaaattttaaaactgaccaataagatggctaaaaggaattgttttcgcataacctttatctttgcaaaacaacctatagatgtttacattgaaacagagtaagtaagtaatgtatattacacatgttaacaatttgattttatctagataatggatagaattatgtcttctatatccatacatggatatatacaaccaggtaacgatttgatttttaatggat

SEQ ID NO: 48857 - DNA, 3855 bp, Oryza sativa
tgatttttttggcagtcaaaaatacccaccaagtttagtcattatcttggcggctgaaattaacgcggctatgtagaaaccaccaaggtaaagtgtattcttgtcggtctagaccgttaaggttatatttcttagctttccaaaagtttgatattcttcatagttttcttggcggttagaccaccaataaaactttcccttatggttaacagtcaagaaaatctggatttccctgttaccttagacttggtggtttttgggcgctaaaaaaattacggattcttgtcatattagaaaaggaaagcaagtgctttcagacgaaatttccctgccaatacttggcaaccaaggagctaagccatagttagcaccagctggaactcactgatgacttgattcatcaacaaggaaaatgccgtggtctttccattgatttggctaggtggtggtcaatcaagcagctaacgcgtgcgcatgcatttgccggtatcatcaaacacacaatggcgtggactgactgtgtggatcaagcgtgtaatccttgacccacaccgagagactgatcatatcgatcgatatgatgatccgtatcatcactgctactctacatatcggtcggttgatcgatcggttggtccacacccacttgtctcctgtatgctcctcctcacctgcaaagatgcatggaatcagcttagtaataatcaatcgccagcagcagcagcagcagcagcagacagtgcgtgtagtagaacagtagaggcgttcacatcacgtcgcatgtgcaggtcgtcgtcgtcgtcgtcgtcgtggtggtggtgaatcgtccactgctgatcctgcagctagcctcactgtccaatgtccatccagctccagcatcgtccagccccagtagcgccctgtaactgtacagtaatggacaagaacaaacagtacagcagtgtcctgatcttgagagaggttggggtccatgaatgcatgcatatgcctctcgatcgatccatggcgatcgacatggagcaatccgtgtgggctcacgggagctgagctagcggctggcaatggctaactttcagggaattgaagaggaaagccaaaaggcaaaaagctaaaccctaggacagtggcaaaagcggctcaccttgaaatagattattaaagggattactaacgaattatatacttaattatataagtaaatgaaatattttgataaataaacttaacaaattaaatagcttccaataactagtttaaggctgcgttcggacgagggggttcccatctcctctctcgtattccgcgcgcacgctttttaaactactaaacggtgtattttttataaaaagtttatatacgaaagttgtttaaaaaaatcaaattgatccttttttttaaaaaatagctaatacttagttaatcacgtgctaatggattgctccgttttccgtgcgaggagatgagtcccaaccccatattacgaacacaccctaaggctgtgtctggtagcttcggttgaaaacttttctcccgcacacgtaaaatagagtgagtagagtgagttattagtgcatgattaattaagtatcagtaaaattcactttaaaaatagaataatattattcttaaaattaactttgctatatttttttttaaaaaacaaactgtttagtaatttaggaaacgcgtggatgaaaaacgacagtactgtagatgttgtgaaaggaaaagaaaaaaaaaacgcagcctaagtacattaaaagagaaactttcttttcgagaaaatgtgattttttgaaacatgaagcaaacacttcatttcaacaatccaataaataatctgaaaagcaacttaggtcaagtttagttctaaattttttttttcaaactttcaactttttcatcacatcaaaactttccgacacacacaaacttccaacttttttgtcgcatcgttccaatttcaaccaaacttccgattttagcgtgaactaaacacacacttagcattggtcggagtacaagtacaaccaccatctaaggggcaggactggctactgtgcggcattggcatcttgcttgtaccatggatcgatcttgccaaacattttctcctccatcacctgcatatatccatcgatccatccatatcatgcatgggtactgtacgagtagtacgtttgctgctgctaccttttctggttgtccatggccatctctctctgttcatcacacgctagctaagctatcagctggttagctatagtcatcgagatgatatgtagtacagatggatcgcacgtcaacttttgcatcgttgtgccggtctgatggggatcgaatatgtatgtgtcgatggtcagttcgtcacatggtcggttctatagcttggttgggttggccgcctgcctgcttcgttggtttgcttgtggttttctttcttgtcagtgtcggaaaaccgagacttctactagaaagttgttcatcggtgatttcagatttaacatgtggttttgttaatttattgtgtcggctcaaaagaatagtacttactagtactagttatcatctttcccgtggagttcccaacttctccaaaagagaacacgcctaatacttaattaattattcagtaaaaagtttttgcaaaaagtttttttatagctaatacttaattacttcctcattttcatattataagactttctacattcatatatatgaatgtggacaatgatatatgtctagtttcattatcatatatatatatatatatatatatatatatatatatatatatgaatgtgggcaatattagaaagtcttataatatgaaacggagggagtaattatttagtaaatattaagatttaaaaagaagtaaccataataccctctattaaatgatgtatggttgaatgtaggtgtgaggacagaggttgacacaagtacacatatttcgaaaatgctatgcatatgatttatgtcattatgtgtacgattgctaaaggatgaatatacatatgtttcaaaaatgctatgtatacgatttatatatacgattaaatgatctatgcagccacactaaactattttctctatttataaatataagagattattttaaatttttgaagagattaaaaataaaaggaaaatactatatgcctcttatataagggatgttgagagagtgggaattgtcggggacaagatattaggtgaaaattaagtcctaagtggttaattggtagggaaagttgtactatataatattcccttgtatttattaacaaattttgaatcctaaaatctcttatatttacggaatggctaaagagcatacgatattttttaacacaaaacttttgaattgttgaccgtcagattgtttcgagatttgtgcgcgagggagaaaaaggcacagccagagtcgaacacatgaccggttagatgcatatcatcattgctactcctagccaataaggcgacatgtcgtttctattagttatgtacgagttacatattagttacagcgtaactacaataaaattgtaatcacacaatagttattgttgaaagtttgttttaaagaaaaactatcaaatgttcatatagctacataactatatggtccgcgcgcgttcgtataaaagggtgtttgttttgatgactaaccttagtagtaaaaccaaatcttaggtagggaatatggtccataaatgtggttatagtaaaatgctggccaaacttaggaaaacttaatatgcaataaacgaatctttgacgtgtgtggggcatatacctacaattgaaaagcgatgctaagttacaatcgtggcattgctaatt

SEQ ID NO: 48858 - DNA, 745 bp, Oryza sativa
ggtaggcaaatgatcataaaaaaaaggatgcatcatatagttttgtttaatcccttttgctcttattttagttttgatgattatatttccttttctttattacaagttctttgcatggtgctttcttcattctcaaataccagtactacatctgtcccaaaataaacgtaaccatgcatgagtttccgtgtccaactttgatcgctccgtcttatttgattttttaagattagttttattagtattatcattattattagattataaaacattaatagtactttatgcttgacttatattttttattttttttaaaattaaataagacgaacaattaaagttggatatggaaactcatggccacgcttattttaggatggagggagtaacatataagaaggttggacatatcctcctactggtacttaagggataagtccaattcaatcttaagttaattgctctctccggtttcattttaattgacgttttggacaataacacggtctacaagatatatctttgaccttattttactattataatatatataataaataaataaatttttactttattatagtgctttaaaatacaaatccacatatgttgtttttatttctttaaactaaatatttttaaagttattgatgttcaaagttataaaagtttgatcttaaccttatacaaaacgtcaattaatatatgcaaagctgaatgatgcgatcaatcatcaatccatcaa

SEQ ID NO: 48859 - DNA, 1473 bp, Oryza sativa
aagaaggttggacatatcctcctactggtacttaagggataagtccaattcaatcttaagttaattgctctctccggtttcattttaattgacgttttggacaataacacggtctacaagatatatctttgaccttattttactattataatatatataataaataaataaatttttactttattatagtgctttaaaatacaaatccacatatgttgtttttatttctttaaactaaatatttttaaagttattgatgttcaaagttataaaagtttgatcttaaccttatacaaaacgtcaattaatatatgcaaagctgaatgatgcgatcaatcatcaatccatcaatcaattaatggtcctagatctacacaaacatacatgtcgtgcatcatcattgccctgttcttttcacattgttttcccaaagacgaaatttggtgggcattttgatgcctgcctgcctagctaggtaggagtaattcatcatcatcatcgttgtcgttgccacgattgttcgtttctctccgccggtctttttatcttctttacctgactactctcttttagttttctccatccttttgacgttttcgtgtttgacgatcttgtcacgcttgtgtttgagacgtgtgaatccactcaattaaccaaatatatgcatctacatgcactgacaaaccacacacatacgatatgatagcaacctgcacattgcaaaggtggcgacatgtgcattattattactaattaatcgtcttcgtcgatcgtgtgcgtgaccacttaatttgcatcgcatgcagctagcaccgtctctttcgttgatgttacaatcaatcgatcgatttctaggctggctggattgatggatggctgctcatcttggtctaatttccaaagctagtgtgtgcgtgttgttcccgtcagaattaagcttcagttttctcgccttttgcaaatgtgtgcaagtgacatggagacgttgatgcctatgaatgtgattgcatgctttgcccatatgtggtttggcaggtgatgatgaggacagtggacgagtagtgtgctttggccatttggacaagtctggttaattatgggtggatatagatagatagatatcacatgtgatgggaataatgttgatactgttggctggcctgaacaactgggaacattatttcattggaggtgatgagtgttttacactttagtgcttggttaattagtatagtgatagatatatatgtagatcttgatatagaagagattccattaattcaagttaaattcacatgtagtggtcgtgtatatctgtagtactcatttcgtcccaaaatatatatgctatttctagtgttaaaagtttataaaaagattggctatttcttcacttatttttttcatgtcaacgagtcacaatcacatctcccgtatttactctaggggtaccgagctcgaattcgccctata

SEQ ID NO: 48860 - DNA, 1414 bp, Oryza sativa
aaaaaaaatcaacggcgtcaaacatttagggaaggcggcgacagcaactatcccctcctggatccacgctgatccggcggcggcgggagaaacaaagcggcggcgaagggtgggcggtgggtgcgctttttgcctttttttttattcagatttttgttttcgcatgcgaacgacatgcgtccccgcacgtgaaaagccgattttcacatgcgggtgcaccacctgcatggaaaatttagattttcacggacccttccggggcagacgggccggaggtccgcacaagaaaatcacttttggcccgtctggaaaaattactttttactggtgtttctaggtttagtaaaaatttcgtttgagcaagtttaataatagagctaactatgagtttatagtatatattagagttaacatatacaatagagaggctataaggttatctatattttcttcttttctctgaatctctcacctgtgcatttaatgtactaggtgaaaccccgcgcattgctacgggaatttagtatggtaataaaaaaataacgtataagatagctagataacatcagattaagtaattaatgtggtttatgataatttaaatttaaataatatgtagaatggtgatttaaacgtaaaaagtaaggtggtgtgactttatggaagaagaaaagtagagagatagtttggaccgtagattaatcatttaaagctaaaaacaattgatgtgatatgacttaattagaggaaaatggagaaagataatttggaccatagattaatcatttaagcactaagtgatgatgaactatataagtatataggatatcataaaacataataaagatatacattgaaacatgtgaattatgttggatgataatttaatatgtttgtatttgaaaagctcttaaattataaaaactataaagatataacatgtttgtatgatgtttaaatgtgatgattgttagtggatgatgatgtggcatcttgttaattagtggattagtggatgatgatgtgacatctttgcatgctaagcttaaggaattagtgggagataactttatagtaagatatgatgataatttaacatgtttgtatttgaaaagctcttaaattataaaaactataaagatataacatatttgcaagatgtttaaatgtgataattgttagtggataataatatggtatcttgttagtggatgatgatgtgacatctttgtatattaagcttaaggagttagtgggggataactttatagtaagataggaatcatcttaaagtgtgtgaatagctcttatttgagagacaattcttctcattttttgaattttctctcatttacataagtttattgtttgcttatagtctactattaaacttgctcttaaaagagattgcaag

SEQ ID NO: 48861 - DNA, 2530 bp, Oryza sativa
cgtaattgcaccaactcatgaagaagcactcatggttctaacaccacacagtaataagaagaggttctctcagctatgagccaaggacactctctctctatatataaaatagtatactctttcaatttttttacactagacctcatttattttaatgtacaattattgctagagctacctattctaaacagatgcaaaataatttcatataacctctcgccacccaccggcgatcactttccccaaatcatgggttcttcgtccctactctccatgttgtcgatggaattgtcgctatggatccaagcctcctcctctccctcccccttaccatggtgacaccattgcccaagtctttcttagctgcagtaacgacgataaagtcctccacggccggtatggcgacttcccaagtcctctacgacaacatattggtggtggcttgatttgcttaaacaatagatctactcgctagagtccttcactagtatgatctgctccatgatggttgttctcgtccgcggcgatagtcagacttgtctggctatgccatcaccttcctcattgggtgctagatctccgtgtgccacccatcttttctccgtcacctctccttttgaccctctaaactaccaaatctcttcgtggaccatctactctcacttgaaaccattttttgggcctgtttggctggagctcagccaaacagtttcagctccaccaaaactgggagtggagttgggtggagctctctcacaaaatatactagagttgtgaagctgggtctagacagctctacaactccactccagactcaactcctggagcaatatttaggagttggagctgtaccgaccaggccctttctctacgaggctaggcatggctccacccaagatgatggctctaccttcaacgtggaaaggcgaggacactcgcccattcaccatatagagcatgcccttgtgtggatgtcctaaaaagatgggcggagcacctcgcaacactgccaagtggagggagaggcaatgctggcggtggcaaccattggaaggagaggaagataagaaatggggcaaccttataaattggtatgggaatctatgggagcaatcttagtcactcaaaattgatattttaaaaagagtaaacaaacaacaagtagacggcccacgtgtaaccttccttatatatcatactgtgcacggtgcaaggatctcatgcttccaagtaatactagtgcgacttgcttatgataacgagaatgatatagacaaaattaatggtttgatcagcaatttctggcaatggccttcaactacttccagcctgctttaaattggcacggcaaatgttaagccatgatggccgtgctgtcacagtcacaacggagagaagaattgacttgatgatagatcaaaaggcaaaatgctaagctaagaaaatggtttgaaaaataagtgctaaacctgagatttgttttaatgaaaaagaatgctggaccttttgtcttgtatatgcaccaagatgcaggaagtagagaaataaaacacttcttcattatcttgataatataaccatgcaaagatgatcattcgtatgagggatggccaccatagcatgaagtatcgaatctgaacaatgagagaatatatggattgtgccgatgatgtcccactggccaatctgataaacctgcaatagtatgtatatcggtggttaggttagtcataatgcatggccgtgttaagccttaaataaggaacatggctccgtccaaatgagcatcccatatttttcgaccaaaaaatgagagaatctcatgtggccggttggctgtatgggagatctacagtgcagtaagaacattcatggttgcaaccatccaggaaataaatgtgacaccatgcccccatgtggtagcattaggctatgttatagatggtggaaaaattggtagtttagagaaaaagttgatagtttatgtgtgtaggaaagtttttgatgtgatgtcatgaaaagttgagaattttggagaactaaacacggccttaagcccttactctgatcgctatgtgagcatgtttgtagcagaggtgatggatctcccaatagactggtcactttttggtcactgaacgctcaagtgaaatattaactgtttgtgaacaggaacgaatttttcatgttaaatctgtaaatcatcggtggaaataagcagaatgcattctagagcaatttgtcatctcgaagctagtgttaagataaataaacaatatgccctctagtaaaatattctaaaacaatatattaaaaaatagagtacatgctgcaaggaatattattcgtccttaatgttgttatcaaaagatgaccaggtagatactccctccgtcccaatttaagtgcagccatgattttccgtgcccaactttgatcgtccgtcttatttgaaatttttttgaaaaaaatttaaaacgtaagtcacgcgtaaagtactattcatgtcttatcatctcataacaataaa

SEQ ID NO: 48862 - DNA, 1812 bp, Oryza sativa
ccttcttgagcgtgtcgatgacggcgagcaccttggtgagtaccttccaccgctccgtggccacctcgagcgcgtgcacccgcttcttcttgctccgttgcctcacgctgcggctctgcgtcatcccccgggcgagagataactgtgcggggcagcagaatcggccctggccctggcgctggcccccgcagcggagcagctcggctaggcaatcccgcaaacacgtggtgcgcatggtgtcccgaacggccggaacaagcatacgcaggagtaagacgatggtacgaacgcaacgggagcaggaagcggcggaggacggcagctatcggcgcttctagccggcggcgagaggaggaggaggccaggaaggggcggcgggatggccggaaagaggagcggggaatcaagcggagcacgagcctctacaactgcaaggacagcaatggcgatgcttaaaattagcccatgtgtttggatagaagatctagcccgcagccttattaggcttgttagtttgggctaatccaagaaatattttcaaggaacaagttgtaatattatttaaattaattttgtagttattgctaatacattataaaaaaattaacaactaaaattcaaggctaatatcactttaaaagacaatatatcctatatttcgataaggtaaagtacggtctactatattttatagaggaaataaatgcaagtatatataccatgttattattgtatattttaataaaaaaatgtataaaaaggcatgtgaattataaaaatacgaatataaaaggtgatgaacatattttctgctaaaacaaaatttactatttacaaaagttgatgagaaatgttcaaataagtatgcaggttgaaattggaaacggtaattgaacatagttgatatcctatatttttataaaaggtaaaacaattagtagcaagaatgaacataacaaaaatcattttctcctaataattgtgcaaatttttacaacttagaatgtagtatgattttacataagtttcatggaaattcaactaatttatataaaatgttatgaaatttgcactacttaatagcacaaaataatatacacgggctataaattgacgcgctaattttctagtaattaatgtaaagaacccctaataaaaaatgcataattttctgatctaaaccatgccgacacggtaaaaagttaaaaaaaaaaacattagccttgagcccttgaagcagacacagagaaggcaagaatgaagcaatggtgatggagtgcgcactggaggccggagcagagccgtgccgtctactcaggactcgtcgagcaggagggagagggacccgactccggtgcgccgtcgccgccgtgaggggcggccgcgcgccgggcctactggcgcctgccgcagccgcagagtgagaggacgaggaggcgaggggcggcggagatgagacacaagcggagcggcggccgtccgggcgcggtggtgcgcctctcctctgtcgtcctaaccctagcgcctgtggtgggcttttttttttgtttgggccgggccaaaatccaggtggtccaaggactccccgcccctgtgatggaccgatggacgtacacaggggctatagcatccacgccgggtaatgacctggttgccgccttgccggcagcccggctagggtctgtttgagggagctttagattctgagaagcagctgctgggtagccagcttctgagaatctagaaaagctctgaaactcagcttcttcagtttctggcttcttagttaatttatttttcagaatctgtaac

SEQ ID NO: 48863 - DNA, 1847 bp, Oryza sativa
  unsure (1)..(1847): unsure at all n locations
tttatcttggaatttgcaatggcatagtaatccaaagcccaccaaattatctctcctgtgcatacaataaagaacctatctaatttttccatcctacacaacttaggagatcgataacctgaaatcggcaaaacctgatgctagcttgaaacaacaattggggtctaaaacttatcataggctaaacatttacatttattatgaatgcaacgcccataattttgggtttctctatgccactatggcactatctgaaacattttggcccttcctccatgacactatctgaaattagactaggggttgtttagattgatgtcatttcaaaccataacattttttggtaaagttgtcaaaaatgtgcatctatttagtttttttaccaaactctggtaaatacataagaaaccctgccaaaacttggcagtattgccaaattgccaaaaattggtaaagtttattttggctacaatctaaacaagacctagattactgtactagtaaggatgccacatatgtttgattgagccacattgactgactggcctgatcatcaaccatgcaagaagcgttcgagcacaagatccctgattattactctagtggggcgtgagagaagaggaggaagggagcaggacatagagatgcccagaccttgtccttccacgaggcaccgccgccgcagaagcagcggcggccctgccccatcctcgcgcctcctgctggcggctggcactgcgacgccgacggaaatggccgttgccatggatcgaagaagctccggcgtcggtgacgtggaggaggaggagcaggaggaggcggcggcagtgggaggggaggcgcccgcggtgggggtagagggtgaaggggaagncgncggcgtggggggagagggcgaaggcgctgagccggcgccggcgacggcgacgagaaggagaggaggcgggcggcttatcggcttcgggagttcggtagcgcacacgtgccaacagttcttcttcttcgtctttccttttccttttttttaaaaaaaaattattaaatttcagagaatcaaagattattataggctcgaaattacatgaaacaacataatcctccgttccataaaaaaaattgtagtaccggatatgacatattcgtccagattcatagtattatttttcatagtattggcatgggcggcttatataacttgggtactatggtcatattccaaagttaactttgctaacgtagtagcaatttttttttaaaaaaaatggttatcttatatggttaaaacttttatacaatggatcaaagatttttttataaatttaagatttagttttagaatttattggtatagtgtatcgatgaataattggtcaatggtaccattttgtgaaactctgctcacataatacttaggttatatgccaagtaattattggtatgcatgttgaccattattttttgggtcatgtaaattttaccttcgaaatgcatgatgcatgaaaagttgttagaatacaataaactaattagcgcagctaagctggcgatgtaactaagcacacgtgcgtgtggttgcgcaggtgcgccctactcaatgggtcttattggtcgaagaaggtataggcattctttttcatattataattgatctaggagagatggaaagttatctaaatctggtatttgaaagtaaaattttatgatagatactttttcaatatagatttatttcaaattttaaaagtgagtaagctttcaactctaaattttaatttttcaattcaaaattttaaagtattctacccaaaatatttcaaactttttaacctaaagtacaaaaactttaa

SEQ ID NO: 48864 - DNA, 595 bp, Oryza sativa
tcacttatagatcattatcgcgagcagtcccatatgttagtttgtgataatggtcggtacgataaggattttttattagtaaatacatgcttaccaagctaagcccacatattagtacatgaaaagtaccaataaacaagttcacgagtaagcccgcttacaccccctacttttaaaaactattggccgagtccatttatatctctcgtccaaatatccatgtgaagagttttacagattagtacataaaaagtatcaatatacgagtttacgagtcagcccacttacactcctacttttaataaccattggccgagtccattcataactcccgtccaaatatccatctgaagagttttaaattgttatactgaatgtgtccatatactcgttctcctatattcattgaacgatcaaacaatttcatactaagtttgtccccatcatttggctagttgttgtaatccgaagttaacaactccctgcaagtgcacgcgggtcggcaacctatatatgccgacaatcaagaatgatacaacccaaccatgcgatggtgctggtgacgaaggctaataagcatgcatctccactaaat

SEQ ID NO: 48865 - DNA, 718 bp, Oryza sativa
acaggaacgaatttttcatgttaaatctgtaaatcatcggtggaaataagcagaatgcattctagagcaatttgtcatctcgaagctagtgttaagataaataaacaatatgccctctagtaaaatattctaaaacaatatattaaaaaatagagtacatgctgcaaggaatattattcgtccttaatgttgttatcaaaagatgaccaggtagatactccctccgtcccaatttaagtgcagccatgattttccgtgcccaactttgatcgtccgtcttatttgaaatttttttgaaaaaaaatttaaaacgtaagtcacgcgtaaagtactattcatgttttatcatctcataacaataaaaatactaattataaaaaaaatcaaataagacagacgatcaaggttggacacggaaactcatggttgcacttaaaataggacggatggagtagtagatttcttttctactgcatacagcaccaccaccaccaccaaataatacgtaaatgaatgtaactgggacctagtttcatcatatacacaagttgctagatttttcaagtttttggcaagaaatgagcagtacagacatacagtatgttcaaaattctgacactattttaaagtcgtcagtaaaattgctggccaatgtaagaatgggttatgttagcaggaaaacaaaacagagcattatcaggtattatcacttaatata

SEQ ID NO: 48866 - DNA, 1617 bp, Oryza sativa
tgatatatgatgccattagtgtactactaaaatacaaacattcagatgcaaataaacactggcattgctgaaaagccacagagatatgggagaaccattaagcttttgtcaacaaagttaaaggttcattcaaggacttatcatggacacagctaatacaaaggttcataatggttctctagatgatatcatggtgataaagataataaaatatcagcaaacattccgggctcctttaaaatgcaagaattttacaggaatttcacaggaattagttccacccatgaaattcctctgtttcaacgaaagcccaaggctgaactagggagagagtacatacaagcttctccactgctgtgtagctggaacaaagtaaccttgctagtgaacttttccttaactctttgtcaagaacagaacataaagcatgtgtaattgcagtaatgatctcttcctcatcctctattcgcagattccccgcatccatgccctataagattgcatataattgccaaagaaagaatcaacttataagttaagtgttaaaggtagagggtgatgtggtaggccatgttcgcataaattaaatcattcaatgttagcatgaagctgtcagcacatataactaccagccaaagaaatcatcactacaaagcttttgccatcctagagcatacaataatcaaaattatttctctctagatagtaaaattttcttatctttcttcagtcatattgcaattgcatcaagaatgtgtgcctgaaaaccaaactatcctgagtgattcttttagcagccttcggttaatagtttgatagggtagtgaacatattttgcccttgaagaagatgaataaggcaatccaagatatcagaaatagcactttcaacccgattcagactacaaggaaacatgccattcaaatcaatccaaaatcattttcagcattctttccaaaacctggagtgatacatctagaatatactccctccgtattttaatgtatgacgctgttgactttttaaccaacgtttgaccattcgtcttattcaaattttttatgtaaatacaaaaatacttatgtcatgcttaaagaacatttgatgataaatcaagtcacaataaaataaatgataattacataaattttttgaataagacaaaaggtcaaacgtttgttaaaaagtcaacggcatcatacattaaaatatggagggagtactagcttactccctccgtccctaaaataagttgatttctagagtttgaaatttgtcacaatataatttgatttctagcctcttacctacccttggtccacaaatcgagaagttttatcccttcaataccccttagctacctacccacccaccaatactgctttcctattaaagagggtcactttagtcattatccctcactactatttttttcttaagatgctaggaattaatttattttgggacaggagtaagtgcttagcatactcaacattcaattgaattatcatttttgaaaaacaatattaaataagattagtagcatcgaccccgaacaaaaaatgtcatgtaaaaaataaaagctacttgaagtacaagtccatttacctcactgat

SEQ ID NO: 48867 - DNA, 686 bp, Oryza sativa
cccccacgcctgcggcgaccgctgcagcgcgaggagccactggttggccgcgagccgcgccgacgggtcgtggtgcccgccgccgccgtgattgagcgcgtgcaccgcggcggcgagcctcgcccgcagctccgacgcctccgcgtccatcgcggcggcggcgacggcggcgaggtggggcgcgtggattcggttggggagaagggggaggggaggaggggacggaggggattgggccgagtggcaggcagcgcacggatgagcgagttgggtgggatgcgatttttttttcctttttttttttcgtttcgcctttttttttactccttttttgggtcattttccggagagtacgacggggttggtggccccactagccagtgcattaatgtggatttgtttgattggtctttgcttcagattttcaaaatttaaatttggaaaaaagtcgtacagcgaggtggtggccgttggttgcccgtataaaaacaaagggtgtgtttgaggagaagggaattgaagagattgagaagatacgtaaaacgaggtgagccattagctcatgattaattaagtattaactattttaaatttcaaaaatggattaatatgattttttaaagcaactttcctatagaaattttttttgcagaaaacacaccgtttagtagtttgaaaagcgtgcg

SEQ ID NO: 48868 - DNA, 751 bp, Oryza sativa
attagagggaaatcaacgacgggttactattattttgcgaggtgaaggaatatgtgtgattggttgtgatagttttggccttggaaacgtgttttttcagttggataatcgtgttaacatttggaggagatatgggaggaatagtagaaaggtcacgggggtagcgtcgtgggttgaggttatggttgtcgacgcgagcatttggatggcgtgcccaaactactagtagctagtagctacccagcttctttgttctgtcatctccgaaacattgttgatctttggctgtgtttggccccgtttagttacccaaaagtttttctaaaaacatcacatcgaatctttagatacatacatggaacattaaatatagatttaaagaaaaactaattgcacagttaagggggaaatcgcgagacgaatcttttaatcctaattagtccataattagccataagtgctacagtaacctacatgtgctaatgatggattaattaggctcaaaagatttatctcgtggtttccaggcgagttatgaaattagttttttcattcgtgtccgaaaaccccttctgacatctggtcaaacatccgatgtgacacccaaaaattttcatttggcgaactaaacaggctagtaacttccaaagttagaagtttggtttgaaattggtatgatgtgactgaaaacttgtgtgtgtatgataggttgatgtgatagaaaaagttgaaagtttggatctaaacacaa

SEQ ID NO: 48869 - DNA, 678 bp, Oryza sativa
attcacatttctttctttccaacaggtgcataaatctgcaacaatattgcagcagttggcagcagtgtgcagcctctgtgagagaacaacgtggaaggccattatttcttgggattccctttgtcgatggctgcaatcagcggtactgcatttctacaataacccccttggtgtaattgcgaaaggaaccctatgtgtttttgtttatttttttgttcgtctaacatcaaagcattagaacacatgtcatgcataaggttagtagtactgtacatcaatcttgaaaatcacgatgaacatgacgtggatttgcaagaggatctgggtcaaatatcatttgaaaattacagatgatatttctgtttatttgatttacatgatacactaatttttagtcactagaaatcatcagttttcatctacatactagccattaatccatatatgtaggattgtaggcagacattgttgtcatgtcggactagtaacaagtactgttgacacctgaacattttgagctaccttctggtgttttgacgtgttatattcatttgaaaagtatttccgactaatgtattttctgcatgaagcttaactttgacgtgttgcaacaccatcatgggctaacgtttttccaatcttgtccaggtgaaatacatgccctcagagtacctaagg

SEQ ID NO: 48870 - DNA, 1325 bp, Oryza sativa
aattgaacacagtaaagaacagaggacattcgtatagcaacactcacagaatactaagaaaaaactaatcaattatttatataaacatcaattaaagctcaatttaaagatgaacaaataataaatagagtctgacagacatatttagacccataagcaggatcgtccgagtctaatttcaatttggaagacataccatccatattctcctagagctcaggtaaaaataccacaatattatcaacttgcagtgagaagcatatgccattttcaaattggttaaaaaaagagtgaaaatttaactttgcttttgtgttaaaaactcagattttaagttaattaatttgaagacaataatacaaagataaccagatttgatggaaattatagtagataaaaatgaaatcattctttgttccagaataattcatcaaagacactgctatacttcaatgaaactcaacacaagcttttcataggtcacaaaaacatgaaaggataaacagtacatcactccataaaagcacaaaatcataatgcggagtaaaattttaaaagtgcagtggtatagaactcacaggtggaaggaattcaatgtctttgcaccactttgcagtgtaatttcgtaagttcggtcaattaaatcttgcaaaaacaattcaaggggcctcgctgcacgtaaagaacaaattcagaatgtcaggcactcaggttgtatgctttatcatggcaataactagaactgtaacattatgcaaaacaaaccaaaaaaggtactccaaaacacatatattatcatacaagaaaatgtgtatcaattagttagtgaaacaaaaatgaaatgcaaaacgattatttttctaatgggcaacaaccgatgtcaaaatatgtgaccagtgacttggcataaaaaggcgagttgggttcttctccatgtggcagagcaaacttgtcgctagttcagcttactgaatgtaagacaaacttttggcagaatgctttcttgattgcatttttttgtaagtaccaacccctagagagaatggagcgataacacaactgtttacatactacatggctacatcaatacccaaaaagaagtagcacaggctgttgtcaaaacttacatactaaaacaggtacagctagtgcatttttgccaaggtcttcatcagcctgcatgttctttttgatccgtgcctgtcacaacaaaaagaacagaaaaaatgatttcacagtgttcaaaattgggttatatttgaaatatataatcctccagcatacacttgatataccgatatgtagggaacacaaggtaatcctaa

SEQ ID NO: 48871 - DNA, 710 bp, Oryza sativa
cccgttaaagagacattggacagtgatgatttgaggtagaatgctgctctgtgaatgcgggacttggttaggagggactagatctacacaatagcaggccaagagaagagaacacaacaaaactgatattcggattatcttcttttgttactccattgctccaacataaaatacatcataataccatatcatccttatatagatggaggatggcttgagttgaccactaagaagccatctgtccatctctaaacaaggaatcctgaagatgcgtaaccaaccatgataaactaccaaatttgagatttgcatgcaggatcctaattacaatataatctttaaaatgccaactgtcttgtcttggtatgtactgctgtaacaacagaaaccggtactagtcagatactcagagccaatggttaacatactcatttttttgcttctgcaataacatgtttatgattgttcaactgattcttttcgcacagctcaaacgcccaatcgtaatgcatgctgacatgttagctccccaagctaatgtactccctccgtcccaaaatatagctacataggagtgttttgaggaattctggattggagtgaaaggtctaaaagtccctcattaatagatggtgaggtgacgggaatcaagaatagtacgggtgggtgtggatctcgagggttgatgggatgatatggcctactgggaa

SEQ ID NO: 48872 - DNA, 725 bp, Oryza sativa
tatgatatgtaatgtacctgtctgtcatagtaaggcgtctgttatgatttcgtcaaaatctcaaaggtattttagtttagtaattgcaagatataaatagtttatcaaaaattagggcaccgcaaattcaaataaatagtttccctctataattcaatatttgctcgaataagcaggctaacaatgccgatcctcggagtgtttggaatgcagaaatttggtcggaattaagatgtttaaggcctgtttggtagagtcataactcctaaatttagtttaaggagttgggtcttaagtggggttgttaagcagcctacacccaactccacatctctagttcattacgtgagaacgctgcaccaaatttcgtttctattttatgttgagcaaaaaattatttagctgggctgtagctctagaggagatggagtcaaagagacattcatactctagtactagaaatacaatcagtttggaatacgcataattggtcagtgttgtgcccccatcaatattggtagggtctctctcactctttcaataccatcaatggttggcttccttgattcttctctcatctgcctcacaaatggaagaagaagaaaaagaacaagcaccagcagctggctgcaaaagagaaaagccagagaagcccctcacctccacactggatttttcacattttggtccttttaaaaaatttatttcctaaatagacccctaaa

SEQ ID NO: 48873 - DNA, 746 bp, Oryza sativa
ttgcgttttgctagtactactctattgtatacgtatattgattgattgattgttcaaatttgacctcgacttcttggagttatataacgttttttttctccattggacgtacggcttgcacatgttacagcgacatctgtatgggacaactactattcatatacatattgtactatactatgcatatacaatttaaaaaatgaattaatcaaaagaattgaaaatgaagtgatcgaaacggatcgactgatcgagatggctacgtacattgaaagctacgtgcatgtaaaacgacgtcgtcgtctttgtgaattgtgacgaaacggacggagatggagacatgcatacatttaagtcataatgtttattagcaaccaacaaacaaaacttttgtatacttgtttttaaccataattaatattaaaacggagtaatatctaatacatattggttcgcaagtctttatacgtatcgaatttagcagccgacactaacttatagcacgaatgatataagttatcggtgtcggtcctacaaccagttctaatatttaattagtctcccgtattagtcggaagataaagagaaaatgcttatatttaaccgatacatataggaacgtccttcattagagttctatgctagtttgaaaatcaaaatactacactacacgaaagtaaataaaaatcatcttaaaataagatatactaatattcaattccgtcagcatctgatgaatggaacgg

SEQ ID NO: 48874 - DNA, 711 bp, Oryza sativa
ttactcactctcgttgagttttctttcggttcgttggtggatggaggtggttcgaggtggtggggcaagtggttctactgggggtttgggtttgggtttggtggagggaaaagattcttgaattcgaggcgagatgaatgagcaattagttctggtaggtgcaaagctgagcaggcagctagctaggaatggctgcattggttgcagctgctttcaggatgcgtgtaaagagggctggatttctcatcttgtaggttggttctcatgagatctcctcaacacgcgagcttgtatcgcactgtttctggaggcatgaaatggattatggcctgctcgggcagtttctggagttcttgtgcagtagagttctacttgtgtggcatatatcgtgagctgtattgtctgctgggaacctgttcttacgtttatactgctcaaattgtcatgagatgggcatcacccagaatttcaaatttacacagaactatcttctttgagagtgctggtatgaattttacctgaatactcccgtcttcattactattttgagacctttcatgtgacatggcactgtgaactgcgttttttgagacctctgattactgaacgttttgttttgttttggttttgtttttttttccctcttgcctgtactggatactgaatttcaaatttttcttgttagtgtttcttaccattaccttgtgtgac

SEQ ID NO: 48875 - DNA, 696 bp, Oryza sativa
cattattaccaaaattgcaagggtgaatctgcaatctcccaatcatcactagaaaaggctacacatctgtgttgaggataaaactcatcaggatcacaacaggtaataaagtgaactgaactataaatagcatcatttgaaacattgaaacgtgcaacttaaaaactcaaagaaaagtaccacaaacaattcaatagattgacctcaaagtgcatcggcaagagcaagtgcttgaacactcccttctgcaccaaagcaggtgcctaagaaagttcaacggttatcagcttatattcaacagtctcacacttagaaaacaatgcaatgtgattatgcatataaggtgtgttctatttcacattggaatttctctcaggttcattctctgagccgttactaaaatgctgatttcaggaaatacatgacagttaattcagttatttcactaacttaactacagtagaggtctaatattcacttcaacttgatagtagaacaatgaatggaggaatattttgagtaacagaaatgcaacatagataggttgcaaatatgacactgcagtacaaccaccaggtgagacaacttactgcctgaccaacttcacacatcaaacaaacaagaccagccatagtcttctcgcttctgttggcaagagctggcagaagaagagcttctctaatatatgggtaccga

SEQ ID NO: 48876 - DNA, 3695 bp, Oryza sativa
taattaggattaaaagattcgtctcgcgatttcccccttaactgtgcaattagtttttctttaaatctatatttaatgttccatgtatgtatctaaagattcgatgtgatgtttttagaaaaacttttgggtaactaaacggggccaaacacagccaaagatcaacaatgtttcggagatgacagaacaaagaagctgggtagctactagctactagtagtttgggcacgccatccaaatgctcgcgtcgacaaccataacctcaacccacgacgctacccccgtgaccttcctactattcctcccatatctcctccaaatgttaacacgattatccaactgaaaaaacacgtttccaaggccaaaactatcacaaccaattcacacatattccttcacctcgcaaattaatagtaaaccgttcgttgatttccctctaattaatccgatcgaaatcgttcgcagttcacacgcaccacgtcatttatttcttgatctactactagcagtgtatatatgtggcccccgacccctcgctgcatcgtggccgtgggagtacccccaatacacggacacacagtagtacggtgtgatgccgttgcctacgcacggtacagtccaatacagtaatgcatgtttcccgaaaccccagctacgtactgagccactccttgatttccatcggttgtttgttgctgattataagccgtaacagcttattactggttaaaaatttaatttacagataaaatttttatatatttttatcacctattagaaacgtcagaaactgatgttgaaaaaaaaactatgttaacaaaacattaaaatcgactacagaattaaattttaaaatataaattttgattccgacttagagcatcaccaacagtctattatctatatgattcccaaaactaattttgagggattttagtccaaaacagcttcaacagatcccttactcttctacccgagttttgaagttccatttcccaagttcctcgctctgtttatatgcagacacgaaagtcgctcccaatcacgcaatcccgtctctctccttcgttcccgcacgtgggagatagcgatctttctgtgcgtgaaagaaaaaaaacggaattttctcttggtagtttaatagaagggcccacttttaatttgtgggattgaatttaggctatctgttggagggatgaggtttttcacttcctattttcagtttaggaaacccaaaaatatttttttaggagaaaattatagataatctgttggtgatgctcttatcacgtataatctctccccaaaaatttgtttttggttttctaaactaaaaataggtagccagaaaacagatcacaccaagagaaaacctaaattttatcccaaaaattaaaagtgggtccttttgttaaactaacactagatttttccgttttcgtctctctcgcgtgcgctcgtggcgctccctccacgcgtatcgcagtccccccgagaaaaatctggcgcgattaggattcggataggagatctgttggaggtattttttttcattaaaatttcaaaatattaggatcgggaatgtaataagagaattgttggtgatactctaagtccaaaagaggcctctacccactcagggtggtcgcagttcgccagttcccgtattcgtatgtatgtgtgatgatgcttctacgcgcgcatgctcctacgccacttctaccatgactcgatcagctagcgtgatacgaaaacgttaactcctaggcatagccacagctagcgatgcaagcggactaacctgcgaaaccgcttatagattaaattagtgagtaacccgtaggttaactactaatttaatttataaataggtttatgggttgacccacttgtttttctacgacgcgacaagtccacggattaccttttatttaatatatataaaaaataaataagtagcttcgcaggtcggtccatttgcatctctgccacaggctaccgtactgtcgattacctatacgtaggcttgttcttaataaaaaaacgctatacatagtagtccggccttttatcttggcaagagatctaggctcccatcggattacctattcagccaaagaaaaagtcaaaatttaaattttcaaatttaattttgatattaattttaagatattttcaacgcagtttttttttcagtattggcttttaagtcaacgagaacacatatataaaagtttttttaaaaatagacaaacgatggagccctacttgacgtgctaatcttcgcctactccacgtgtggctgccatctctgcttgtgaattttgtttatatattttaattttttaagtttaatagtaaatccttttaaaaacttattttcaaaatcacttggtagcgttatttgatcctgctgaactggctattttaccacgttagatgggacaaaatatttattgaaaataagttttgaaatgttttattttaattaaataaaaaaatcaaaaaataattaaaaaaatctctgctcgcggctccacgatcaactcgtgcatgtacgtactacgtgctgtgacatgatgtgtaagtctagtactccgacgcatggatccactatgcttgggcctactaggagtgtacattggcacggctctagctgtagcgcccatgggcagatgcaatgcaaagcacctgccagctcaacagtattaccactgtacgtatacgtcggactagtataatgtacagtacgtacacaggttcatagccccggactcacgtgcagaccaccaccacgagtacgtacgtactccctccatccttaaaaaaaaaaagtacaacaaaacgtctaatattagtttggttttttttcggaggaagtatatctcgtgcctgtaacagtagtatgtttttaaccttgtccacggaccgttagatctcctccacgcccatccaaccgagcgatcacggccatcccgtccacaacacggtggcccgtggatttttgccgaacacacgagcgcccacgtgagcagccacgcgcgggccgctcggggcaggatgtgtgcgcaacaaaccaagagaaaaatgcgtgcgtacacgcagatgcgccgcgcgcgcgcgcgagacgacgacgacgaggggggaagcatcgcggcggtggggggcgaggcttttacgctagtacgacgtacaccaccgcgcgcgcatgagatgggcgtgggctttggctgttgcgggggtggggggtgtggctcggtggtggacggacacgctagggacccgtgcacatgcatgcctgccgcatgccacgcccgaaggaaccccaagtccccaactgcctttctagctaatcatcccaacaaagctcaactaataataataatcaacgatcagattattatattagtactccctcagtactagtaaataaagtcgttttgtacagcgacacggtctccaaaacacaactttaacttgttgtttctataaaaatatttattgagcatattttttaagcataatttttacattttcaaactcaacatctagatagttatttatgacttatattcctaagatttaacttaaacattgtcttaaacgactttctttacaagtacggaggaagtatgtgcgagtcctatagtgatgttttttttcttccctttcgaaatacggtataaacgaaggta

SEQ ID NO: 48877 - DNA, 2301 bp, Oryza sativa
tttgctcagctttcctttccctttttttttttgtgagtaggagtgctagccggatcggattgcttcatctctttgaaaataagtacagtactgaagtattactactccggacaaatagtacattttagaaatacacgcagcagaaatgcggagctgggagcatgttgctacttctatattttagaacgggtggttatttattaagttcacttttcaaaatgtttgattcattttcataattaagcagataaaataatctgtctctctctctctctctcgtttggttgttccgactagtagtaataataataataattctacagtaggagtaaaacgggagtagtaaaggtttgcagcaggccttactggcctcctcttttctgcttctgccgccgctgcatcatgtctgacagaagcaacaacaacaaacaacaggcaggctaatgtgtctatctgttctggtagttttctttcaccgggaaggcagcagtgtgcagcagtgggcagtgggcaccaagctggaccaaagcagtacactcattaccacagcagcagtggcaggcagtgcatttgtactaccgctagtcctacaattgggtcgagatccttgcaacttttttgaatggagtacgagtaccagcagtctcacagcagcattggggggttgggttggtcggtgtcttcttcctcgcgtctcatcgcatcgcatgccattggaaagggagaaaggatggagaagaaaaagaggcatctgctgcgtttgggtcgtgttgctttcgctcattgaggtcaatgactcgagatgcttgatttttcacattttggtccttttaaaaacttatttcgcaaatagacccctgaaaaaacttatcccagaaatagtcctttttggggcgccagagtggctggcgccgtcatccaacgggacggcgccaacctctctagcgccgtcctcctgccaccgtggcgcacgcgaaccgacgtggcaggaggaggctggcgccgccgcctccattcctttttctctgtatggagttgcaacggtgtcatttttattttattttttcggatgtttttttatactcagtatcacgatacaaccaaccacaaaaaaaatttaaactcgaactaccacttaggtaagtctgaaaatatctagcataccacttagtctactttgcaccttcactaaaattagaccataactcctttagtaaaaccctttgatcagcatgttaaacataatgcactctaccactatatgaaattacttaatctaattcaaaatataaccacatgaaatgacatatatataagttaaacagtacatagagatgcaattttttatttttatttcatttttttatatttttttcacactaaggagaacataggaaccaactgtataaaaaataaactcaaacggacaaaatatgtgacatgtagaattttccaaaactctaccgaaacggacaaaatatgtcatctattaaaataggcgtaactttctcatacgggctcagaatcaggcaaataatatatgcacggacatctacagaaaatgatacatccgattctccccatctacgccgggttcggtgatattaaaacctccaaatttcgcttgcaagattgtgttttcgatgagagaagtttttcggtggagctttggaaaattccacatgccacatatttcgctcgtttgagtttattttttatatggttggttcctgtgagttcctaagtgtgaaaaaaatatcaaaaaaataaaataaaaataaaaaagttgcacatctctctcctctgcactagttcggaaagagaggagaggagaggaaaaattctacatgtcacatattacgtccatttaagtttaatttttctatggttggttcttgtgtgtccctaagcgtgaaaaaaatatcaaacaaataaaacaaaaataaaaaatttcgggggggaggggcgccagccactctggcgcactccccctagccacctcagcatcaccccgccacgtcggcagggggacggcgccaaagaggctggcgccgtcctgttgaacgacggcgccagccactctggcgccctaaaaaggactatttttgggataagtttttttaggggtctatttacgaaataaattttttaaaaggaccaaaatgtgaaaaatccagtgtggaggtgaggggcttctctggcttttctcttttgcagccagctgctggtgcttgttctttttcttcttcttccatttgtgaggcagatgagagaagaatcaaggaagccaaccattgatgg

SEQ ID NO: 48878 - DNA, 539 bp, Oryza sativa
ctaggcatcagaataaagattagtaattgttgttctccatatcattagcagcaaggatgaaatcttgatacgaactgtcaagtagatagaataattagacagttggaattagttgtagcattcctaggaaagaaattaccttgtatgcaaaaattctgcatgctgtttttgggcatgattacacaattaacgcaaatcttatttacagacatcccagtagtattagcaaatgaatcggtattattattattctacaagtttcaaagagtcttgctagtgttgtgtataaattacagcaatgatccttagtttacgaatagcaggttctgatatttgaaccctgtttagagtaagaattttgcaggaagttcatagaaaccaactcagaaaaatactctcttaaaatctagatcagaacttagcatagagttatatcccctttccaataacaatagacaggccaaacgacgaggcacacttgaacagaatgcaaagccacaacttcatgggcaatttagaagccaaagataaatgggaaa

SEQ ID NO: 48879 - DNA, 739 bp, Oryza sativa
taatcacgattgaccatcgtgaactatcatgaaaccatcatgaaatattagtgagtcattagttatcccgaatgtgtgctaatgtttctaagcagggctaagcaattatatctaatatctagttgaaccaatataaataaagctcaactagtcaaattgtaataacccaaggtatcaaggaataaggtaatcaagtacaaaagggccataacaaagaataggtcaattccacccaatgacattcgaaaatagatgcaatagttgaatagaaacaatagctttaaataggatcaacatgctcaaagggttggttgggatctgtgtgacttgccttgctggccttggaactcttcaaactcttcttctgcgaaaacggactctccggaaacgacggaatctaagcagaaaagagcaaaatcaccaaaacagcacataaacaagcatgaacagtacatgtggatatttttaaagtgtaaatctcaattttagaaaaatttagagacttgaaccaactaaatcggagctaagatgaattagttatgaatttttaaagattaaatcggattaaaacacttatatcggttaaaattgaattatgacgcaataatgaattatttttgaaaaggaaaagaaggattattgcgtcagcgggctagggtttggtggaccgggcgcacgggcggcggttcacacgaacggacggccggggtaccgagccgaattcgccctatagtgagtc

SEQ ID NO: 48880 - DNA, 2640 bp, Oryza sativa
tcttgaataagaaggcctgaacctatataaaattccttgtctctgaacccatctactttttcagcttgatagccacccccttttagtattgccgaaatcttgtttcgacactgcgtggtcagagaggagaagggtgtaggagaacaacaggaggaagaagggaaggtaaaggccaagcaattttggggtttatggtgacttcgcaactagtgggtttgttcttaaattctagtatcctcgctgcaacggtacttttgtttactttctggaagcataatattcaaatagaaattgattcgatagccgcttacgcaattttttttaggttcttgtttacgggctgggaaacgtattttcaaatctggtagtaaacaatcaggtttcgggttatgcatcctaaataaagtttgtagtaatcgtcgatatatttctaacaccactggtttcgctcgattccaataaacggtttaggagaaacaacagaaacagtattattgaccgggtctgttttaacatggacaataattagttttacttcatctgagaccaatagaggcttaatctgattttgtgcccaacatgaaaaatttagacaattttatctagatgtccgaagttgtattatttgctagattatattccgttagatggcataaaacagtaatagaactgctgagtattctttactcactcttgtgcataatttggtttttaggtaccaaatgatatcgatcagcatgggacgagagtaggacaaggactacacattttattacactattgaaatttggttttagatcatgattttgcttagcataagttttgcgtagaacttgtaatggtcaattaaagttttggttcacatttccttgtggaatttatggagttaggatggttagcaatgtgttgattaattcgttattgatttatcttatgacttcctgtcgtggatgtccctatttttaggtgaggctctgccgaaatttctaataattttaggagttagtggttttgagtgtattttggtgtggcactttaggtacgtggttacctgggatgttacagttgagaccaacatcgattcggagtcggcaccggcatcgctcgggccgccccacgccgtcaccgctcgggccgcccgacactgtcgtcggatggaccgccccgccagccgccgctgctcacccccagccttcggcctcatattgttctgccggttgggaaaaaaaagaaaggagagagatagagcggaggggaagatgaaagtgaaagaagaaagagagaaagaggggtagatgaaaagtcaacttgcactgtagagcatttagcttacaatgttcttagtctacgtggcatgtgaaaaacagcaaaaatggaggacaccctgctaatacccgaatgctagagctgctggagcagtggggactggtttggatccctgcttcactagggaagtgcgatggagggggaccgctagttggcgcgtatgcgccaccggggcgcattttttctgaggataaggtggttagactaatcttttagttttagataccgatagtttgagataataatggtagtagataagattttctttttcccgcgagatttttttaacgaacaaattgaaaaagaaaatctatatctgaagtcaaattttcaaaattttaaacctatatttgaaaactttcaactcgaaatttgaattttaaattcaaatttcaaaaactttcaacttttcatcccaaatttgaaaactttcaacttgagatttgaaaattttcaactcgatttaaaaattttcaactcgagatttgaaaattttctactcagatttaaaaactttttaactcaaattttaaaccttttaactcgagatttgaaatttttcaagtccagatttaaaaattttcaagtaatgatttaaaaagttttaacacaaaatatttgaaaacacgcgtactgaaaatttaaaaaaataatcaggaaaaagagaaaaagaaagaaaatatcgtgaaaaaaaacaaaaaaacgcagcgccggggagggaccgccaccagctggcgcgcgccaattagctttcgcggggtttggagcagttttggactggatgtcaacccactagctgactaaaaggaccaagctgttcgccacgtgtgcgtgttgacttccacgtcagccttgcccttcatcaggctcaggagctctagcatcgtcaaaagtcctagcggcgggaaaagcgcggcagtttcccgccaaaacgccaccaaaatccccaatctcgcgctatcccgcgtcccacaaacgcgccgacggagagacgggagggcaacgggagggcttagcgcgtcgctcccaacggtgattcgagccaagacctagccgccgccatggagatcgtgagatcccaccggcagatcgcggcggaggcggcggccggcgtaggatgtggcggcggggcgggaggcctgccaacctaccgggtggcgccgcagctggaggtgcggttggaagagtttgagctcttcgccatcgaccgcctccgaggtgcgggcgcctcctctcccctccccactgtggcggcgtttgtagagtccttttttcctttccttcctcgcattctgtgaacgatttgacatctag

SEQ ID NO: 48881 - DNA, 1436 bp, Oryza sativa
ccttatatggatacgtgaatctcctcactgtagtctgattttcctcccaacatcggggtttgtcgtctgcatacaaatatataccaacacttatggaatatgtgagattaagcacctatcactatgttggatgttttattatccgaactttatgcagatgttggcggtatagaatcggcatttaacagccgccaacaaaaccccccacacttagcccttggctcgtccctgagtaaaggttagtgtagaatgaatttctttaagatatgaatcaagcatataaatcattcacaaccatacctgtacctgtgaactttataagtggctatcttaccatcttgagtaattgataaatggaatgatcttgattccagtccttcttgcttctctgccagactcatgggatttttatgactctctcttgtctctcaaagatgtatattttctttggatcctcaccaaggcaaaatgtgctagaacttatccctattctaaggctaatatgtggagcttggtagagataaattgtgacgtacctgcatcatatatattgcaaatccaaaaagatagactcaagaagataatcaatcatattcctagatcaagggtctttatttatggtggaaaatgaaaaagtaaaatatttttgtggaatgatggagtaaagaaaatgattctccctttttcctatactttctctccaattggttctcttggcatggttatggaaggggcttggctatattttctttgctcaatgttttgagagcaaactttatttccttctctctttttttcacagccatgcctttccctccttttctcattttctttttgccgagaacttttctaggagaagaaagcatagttcaatgtaggagtttatttgaatggatattttttttgtggaaagccaacttccagtgtagaagcttagcttaattttatatgtggacatgaaggtggaattgaccccttgatcatgagagtatgaaagatatctaacacaagtcacacaaatttgacaaagctcaatataatgtcaagcagtcatatgcatactaaggtttatcaatgatatacctgcatatggccttggtatgtataaggtaaaatcaattggaggattgagcctttaaaaacaattttatttttgaaaacaaatccccaagagtcataacaaagttgcaaggattcctttcatcttaatcatctcacataaagcaatcacttagatgtataaggttccctaatcatggatggttgttcacaagcacaagttcagctgagaataatgaatatacacgatcaatcatatgaagaatttcattagttggaaattttatctttcacttatgcttcaaccagttgttttctgaattttcagctctagtactataccatggtgggggtaccgagcggaattcgccctatag

SEQ ID NO: 48882 - DNA, 509 bp, Oryza sativa
  unsure (1)..(509): unsure at all n locations
ctatagggcgaattcgagctcggtacccgctgacatttatcccctaacactgtgtgttcgcttgttgccgacgatcgaacacgtggtgtgtgcgaggacgaacagcaagcctaggatgatccgtgagccgaccgtcgacgcccgtcgacattgcacggtgtgccgctactcggctaccgcaatgtgagcaactcctccttcccctccttgctctccctcccatcgtcgcccttagttttgttgatcgcctcctccttgcgtggccgacacctagccggaccgcgcaccatccctctcccacgcgcctggccgcgccgccgcgtagcctagcctggctaccggctaccgccgcaccgtcgcctgcgccgacacgcccggccgctgccccgccgacgtcttggcctcacccaggacgccgccgagtggccgcgccatatgcgcggcatcgccgtatcacggccacctcgaaccgncatggccaccaccctcgcaccaacaaactgaacacc

SEQ ID NO: 48883 - DNA, 1015 bp, Oryza sativa
atgcaaggcgatctttcgggtcgatgccaaaggagacgaagaagccattgacatcagtgcagcgggcgccctgacctggtccatgtcgtcaccttcctctgggcaatcactgaagtgaagcttcgctaactagcgatggatcttccggctctggctccgccaaccatagcgcaggtacatgactcatgagctcatatgacttgtgattctcctcccaacatttatttttgttagtttggggattggaatctgttgcagatcgaggagcttgagcgagttgttgggattaggtttatctatagaggtgcagtggggacacgccgccgtcgtcagcgtcttgctgaaccatggcgctgatgtaggcggacgcagtgatgatgattcttgactgtattttagggaactaattgctccaattctgacaaattttaactatatttttggttccctgaaatgctaattgttccaatcctgacaaatacaatgtattaggcaggtagttttgatttgaaatctcttttggattttgtagcccaacaggattgccaatttcgtcttcacaccgttggtttcgtcacttttggggggatcattggaatgcatgaagttgctctttcagatagattttctgctaattatcttcgttctttttttctccagctccatgcttttttacttccttgtaccactaacttcattattcttgcaattttgtttactggcatttataccttaaccatcattctggatttacagtgctttctaaagaatctactgtgctgaacacatgaactaggccgatgctaacgttaatggcgctggattcaatggagcaactcctctgctgttagcatgtagtcataccggctccatcagatttgtcaattgcttggtggaatctggggcagatccaaacattcccgacgaagtgagcatatatattgcctgtttccctcaatacttatgttctttttgtcgcctcatgtgcacaaaattttgttccctacagtttcat

SEQ ID NO: 48884 - DNA, 722 bp, Oryza sativa
cccatctcctccacccttttgtcgaaagcggctcgcccgcaaaacgattacctaagtgcataaggcaaacgagatattttggaaaaccggtgtattttggaacaagccgttgtttacaaccaccatcggattgccccggttaaacggctataaaccctatagaggacacaaggtaccactgcaacatccgaccatcgcgcgccatacccgtggccaggcacgcatgcctacaacaggatacaagtacaatcgcctgtcatcagaagacatgcaagcaggttcgtcctagaaagaagttctaggtgaccaaggatataatcaggagcgctcccatcgacccgaagccagtcccgtgaaaattggaatttcatatatcttaccttcttcgtttcttcaggaattttctaaaataattccgtggaaccctcctcgcaagaaaatacctaggtgcagttcctctccctctctttatccaacccttactaatcttgaggacgagattattcttaagggggtaggtttgtaacatcctggaaatctcgattctgaaatacggaattaaaaattcggaataataaaaaatcttttaaaacatttttgcatgctgggatttattatgtatttgtgtgtatttaggttgtgtgccaaagatctcgattaaatcttatctcctaaagggacgccctctctgtccaacgtcctttccttcccttatcttcacg

SEQ ID NO: 48885 - DNA, 618 bp, Oryza sativa
ctagattatattccgttagatggcataaaacagtaatagaactgctgagtattctttactcactcttgtgcataatttggtttttaggtaccaaatgatatcgatcagcatgggacgagagtaggacaaggactacacattttattacactattgaaatttggttttagatcatgattttgcttagcataagttttgcgtagaacttgtaatggtcaattaaagttttggttcacatttccttgtggaatttatggagttaggatggttagcaatgtgttgattaattcgttattgatttatcttatgacttcctgtcgtggatgtccctatttttaggtgaggctctgccgaaatttctaataattttaggagttagtggttttgagtgtattttggtgtggcactttaggtacgtggttacctgggatgttacagttgagaccaacatcgattcggagtcggcaccggcatcgctcgggccgccccacgccgtcaccgctcgggccgcccgacactgtcgtcggatggaccgccccgccagccgccgctgctcacccccagccttcggcctcaattgttctgccggttgggaaaaaaaagaaaggagagagataga

SEQ ID NO: 48886 - DNA, 919 bp, Oryza sativa
tgcaggtaatttgaggagaaaacacatccgtcatacgataaaatgcacatccgcgcattcaggacatgtttacatgtattggaggcccaataagttaatgaaaaccatttaggattgggccaaaacatagcacaggttattgggggcccattaagcaacctcccggccgaaggagaggccgagagcaatgtttttgggttcggccgaacccactagttcggcttaacccgttctagcgccgttgatcgccatttttgacgtggacggccctgattacttcctgatggcggttccggggtattttggacatttcgcataagctataactgtcatacttgcctataaaaggagtagctcactctcatttccaacacacaactttgagctaaattataagaggctctattgtatcttttgtacattagagattgatagagagtgagggaaagctctggaggagtgcccggaagtttggcgcccatccgacttctacctcgacgagtgtagcttcgtaggaggaattctggaggagtaccggagctatcggtacactccgctccgggttcggaaaacttcttctataaagtaagcattcgtgttcctttcttatgttatttaattactttgtccaagtaagatagatttccatctttgcaggttcattggttagtattcatgctaagtactctagtactaggactccggatagagaatgaagttcctgcgcaagtattagagtagtacttaataacttaggcgtggtgtctaggttagagattacctttgtttgttctgtatcacacggatttgtcagaggtagacgacaggtggtgacagccctgaatcccacgctagtaatcctccacgttcgggtacataatagagctatagccggtaccacgcaggcagaccagtaggg

SEQ ID NO: 48887 - DNA, 670 bp, Oryza sativa
cccctaatgattttggtgattaattacaatgcgattagagaggactaacatttttatttaagcaaatgtgaaggttgtcatgtcctcaatgagttagcgtaatgcatatcccgcggaatacattgatgtgatgtgatgcggcaaatgagcaaatgatattttgtacgttttcgtttccttgagttaataggaaagccgcactattaagaggaatgatgcattgacatacgaggagtgatcaaagtgctcaaaatctatttttaaaaggtgtttctcctcagtttggtgtgttctggattttttcggagtttttcgaaactcattttcggactttccaaaaacacacagaaccagattgtcgcttctggaaattttcggatatgtccgaaagtgattttcggactttccgaaaaagactgcgaaggcaaaagtggttctgtagacttgtccgaaactgattttcggattttctgaaaatcatcagtagagtcaatttttcttctgtatattttcggacttgtccgaaagttattttcggactttttcgagaacatccagaacgatgttgttggtactgaaaattttcggacttgtccgaaaagtttcggaatgtccgaaacatccttcgttgactttgctgttggtgctgagcttgaaatttccgacatgt

SEQ ID NO: 48888 - DNA, 933 bp, Oryza sativa
tgggtcaatacatacgtattggcaaaccctacccaaaccttgggaaacttaaaagtacttgcaagctgagatcaatgagggctatatttgtggttcattttcagcataaagcaaattttgattcgcaatagtaaatgatagtaggttgctatgaaatttgtaaaacaataagcatgtaagtagagcatcatagtagtaatataatagcatcataatcatcatagtaatatcattcttgtgccctccaaggcagcaagcaacatgtctcattctcagcccacaatgggcaaaatcaccatttcccaccttacccggtttcaccaaacaattgaaagccataaaactatactcatgacacttcaccaagttgctcatgaccgtgagcacggctaatcgattagttttagactctgcagagtttatacaactttacccacatgatatgaacactctagtttgtttcgtgctcgcgaagcactaccacactctacacattgaatgcggtctagaggtcatgacaaagccgttacattgcttaatgcctaaccttgcatgagcacggcaagtgtttatccacactaggagcaacccaagtgccgctaggtcgaggggccctcgccatccctagcgccgtggcagctaacacatccgttcccccatgaggcacttaaccgttatattggacacacttagacgcctaggcacagccacactaggtagctcctataaaccatcattccgactagttcatactactacggcctcccaatgcaaggtcagacattaaacaacttaataagctaaggccatcccattcctagcacatgtggttgcacggtatacttagatggtgacacaaagtttggtccttaattgactagggcgagcactccccctatcgatatgcaactaccaccatatgcacatcacttg

SEQ ID NO: 48889 - DNA, 582 bp, Oryza sativa
tgatccccaacttggtgttgtttttcggtgtgagccttcctcactgtgtttgttggtttttggtggtgagtcttgtggatttggagcatgggtgcaggcgttgttggttgggaggggccatggcatttatgagctactgttgtgagccggcaaaggtgggtgcaaaaccctgtggtgtcttgtaggcaatttgtcggacacgttctgtgcatgcatgttgcctgagggaggcagagcagacttctggtggttggctgagcaagggaacaggggtgggctgctaggtcggctgggggagataaaatagacttatgctgggttgttcgttgggctgggagagagaggagaatggcccaattgtaataggagcttttgtatttttggtagggtttgtattgggatgacagtggcatttgagcttgcaactgatctgtgcattggactgtactatggatcgtataatttggacatttaatttggctctgtgtaattggatggtagggtgaattgtatacttgtgaatgggactgtatgagtgaagcgttatctgaacaattgagttcggtttggatttcgtgatag

SEQ ID NO: 48890 - DNA, 942 bp, Oryza sativa
tgtaaatgagactaaataagataagactcgagtaaacattagtttcacacttatatatcaataacatggaaatcatatatatgaacctatcaaaaagtaggagataagaagtggtacatatcgttttatctccatgcatttcatccttgtcatgattaaggtccatcaaaaaataatgcatgtcttccacacctcattatcgggaaataacctagtagacaacttatgcaaaagagaggttaatcccataaacatcggtttatcatctatcaccaaagtaacaattacacaaattgtttaatccaagatctttcaatcttctctctttggtgatggataataacctgatataaacaattagagagatgagatggaagatgatttcaaatcaagatagaaatcttataataaacaaaatatagaataagctccccctcaagatgtgcatacatatggatataaaggaacacatatgcacataatcaatcaagatcaatgaggtagggcgaattcgagctcggtacccacaagagagaccaagttagaatatgtgaagtttaatacatacctctcatcatttttattttcatatccaaataagactagtcaaagaaaggctcgtaaaaacgttagtctcatataattagatttgtcattaatcaccaaaaccaaattaaggcacttgaacttacaatgggcggcgacactgtagcccgagggaaaggtcaacgtttatcccgaatcgtaattatcttcaactcaccgaaagatcgggccaatcatagacgtgagtttctcaagtggagatcagggttcatcggggggggggaggggggagggggcatcgtccttttataggcggcgagaggcgattgtcgacttggccacgatgacggtgatgtgaagaagaagagcacaaccgccgccctcgtcttctgattg

SEQ ID NO: 48891 - DNA, 1523 bp, Oryza sativa
ttcggatccacggatcctatgtctccgttgaggggccacaagaccgggtctatttcaaccatttcctacgagattgcacaaatgcactcctcggtttcactcttgatttcttcccttacagaggcgaaatcgaagtcttcacaaactttctatggcacaccacaaccttgggtgatcaccgacgatgcctagccatctggaaaaccttagtccccaagagtaacaaacacaatcgaagatttacttgctatgaactcgagtgctcaaagtatggagtgaaactcactagctctcaacttctcaatctctcaatccaactctctcctcttctcaaatccctctaacaaagaggcaccacaaaggatggagtgaagctcactagctctcaactcctcactctctcaatccaactctcttcccttctcaaatccccctcacaaagaagcaccacaaaaggatgggaaatggggatggctatttggctttggatgtgtttaatattgcccaagaacagcagcccctcaaaggaggggtgtaggagtttatatacccgagcctctcaaaaactagacattgtaggtcaagactgtaattttcggaagttccgaaaagcattttcggatatgtccgaaaatttacagaagccaatctcagattcgtggccatttttggaatttccaataattttcggatatttccgaaatattttcagaatttctgagaagcacatagtaaaacgactataacttttcgctcgggagtctgtttttgatgatcttggactatatggaaagctcactcagaggactacccaactcaaccaaaaacaaggtccaaaaccactcaaaggatatgttaaagcttaggtttctctcaagagaactacccaactcaaccaaaaacaaggtccaaaaccaatcaaaggatatgttaaagcttaggtttctctcaaggtagtactataataggtcactttgagcaccaagacatatacaaacacctcgatgttgcatccgtcttaatagtacggcattcctaaactcaaatataaataggaagagaattataccaataggaatgccttctttccatctttctttatcttaagggacgccaatgccgaaaccgtttcaccatatattcatcaaatgattgatgaggttacttctagcttcaaatggccttgcacggtccatcatgacaaagccgtcactcgcccttcaccacatgatttggttcttcggcgccaagccccttgcttgcccttcaccgccacatggtccatcgcgaccgagcatcacttgcccttcactgtcttgccatagtagccacttcatatcccatatcttcaatatctccactttgttattcttggtattttaggtgcaatcatatcacttgagtgtcaacaccttttcaatccttggaacctatttttctcattcaattcaatgaaattattagtctcaatgatccggttgtcaacctccacatgttgaccaaccgatcgcatgtataaaagg

SEQ ID NO: 48892 - DNA, 644 bp, Oryza sativa
aaatcaaaactacctgcctaatacattgtatttgtcaggattggaacaattagcatttcagggaaccaaaaatatagttaaaatttgtcagaattggagcaattagttccctaaaatacagtcaagaatcatcatcactgcgtccgcctacatcagcgccatggttcagcaagacgctgacgacggcggcgtgtccccactgcacctctatagataaacctaatcccaacaactcgctcaagctcctcgatctgcaacagattccaatccacaaactaacaaaaataaatgttgggaggagaatcacaagtcatatgagctcatgagtcatgtacctgcgctatggttggcggagccagagccggaagatccatcgctagttagcgaagcttcacttcagtgattgcccagaggaaggtgacgacatggaccaggtcagggcgcccgctgcactgatgtcaatggcttcttcgtctcctttggcatcgacccgaaagatcgccttgcatggatggggagtggcaagactggaggttgaacgaccgcaaccaatcgaacgccatccccacaggaaactcatctgctccccatctcctgcatcaccaccccaacccaccattcgacaagaaaatcaatattcagga

SEQ ID NO: 48893 - DNA, 818 bp, Oryza sativa
caatgattcttcatatttttggtcgaagtggaagctcctatgttgctctcaatctttccactcttttgcaatacccccccggtcaaaccggcctctggtcccggtcagaccggccacaagccgtcggtcagaccgtccaggagggtcggtcagaccggccgttgtctggcggttagaccggctagctggctcggtcagaccgccgatgtcgacagcaacggcgtcggctttagtcttctccgcttgtatagttttcgccgcatctctagtaggtacatgaacaccttgatattcctcattgatagcaacgacctccggagctttggcttctttcctcacccacacatttttcacctttaatccaccagaccgattcttttgtgagaaacggtcttgtcctgaattagatgaatgattcggtactgacctaggtgattccttccactcttgataatatggcataggtggttgaggcatccatggcatataatacataaaaggataaccatatagtgacattaaatatggatactatggcatcacaactggaggtttgtatggagttggtatggttgatggctccgattgctttgatgtttgaccaaatctcttcctacgagatgatcttggtcttttcgaatcactagtttggttatcagatcgttgaccggctaatcctttctcgtacttagccataagcatctcaaaagtgagcttcggctttttagtcttttgggaactagatgactcatcctttgcaactttatgatcttcggccttcgcattgttgattctattcttgggccgaggatccccaa

SEQ ID NO: 48894 - DNA, 1064 bp, Oryza sativa
atgaatataatttaaggtttttggtgcaaagttttagtggaagctccccctaagagtgtgcataaaagcaagtggagagctccccctaaattattgcatccacattgaagctcacaagagaataaatatatcacatatgctcatcacatccaacacatcacatgcaaatgaataattacatctcatcacaagcaccatataaagaggataagatattgcaccacattaaagataataggatccattacatcacaagcattcataattaaacaatagacttacaaagctttaaacttaacataaaaaacacaaaaaatatcatacagataaaaaccaaccgtgctcgacgctaaggataagatagataaactaaagctatgatagatattctccccctttggcagcaagacaccaaaaagagaggacgatgagctgacgactcaagcgaagggcgcctgaggaggatcctcgggaggtggtggaggaggatagccatagccatggccatatccaaagaagtcgaagtcggaaggcaacccggcaaaaggatcctcaatctcttcatcctccggctcatcgggctcggcctcgaaacccggaggagaaggagggatatcaatgtggtggtcctcataataccgtgcctttaggaacttgacatcacgagccgtcttcttcgccgaattccgcaatcagcggttctttttggcctcctcggagcaaagaccaaaaagactccgcaaaatgcggaataagggagacggctcacgacgagccacagaggcagggcgctcaggagcaggaggcggctgggtagaagaggagggtatgtcccgagcagctgaggagcagggggccttaagaaggcgcaagtgaagctgagaatgagtcacatcatggcgaaactggagctgagtcacagtctcgatcatccgcataatgtgaggggcatagaccaaccccttcttgtactgaattgaagccatgcggatctcctcccacacaaagtgatagacatggaagcgatgaggagggggatcaaaccggagaagcacggtcctaga

SEQ ID NO: 48895 - DNA, 547 bp, Oryza sativa
gaagggagtccacggggtgatatatgaagaccccgaaatttttcggatatttccgaaaattttcagatatgtccgaaaggatacagaagagtggcgcacggttctgatgattttcggatatgtccgaaaaattttcggaaagtccgaaaaatcctgggattgcagcaattgaaagagcgacaggatagagattttcggaatgtccgaaaatttttcggaaagtccaaaaattcttggaaaacacagctttgcaatgagatttcgccgggaattttgatgaaactatttttcaaacattttaaaggaattttgacaaaaaacaatttttacaaggatttttgataggatatagaaaggaagggatggtcgagcactagaggctccatttgaacttgtgactagcacacaatcaatcacacaaaacaatagccacaagtcaaatggacgatctaagggatcaaaagagggggaattaccatgagacaagataattcaccctcgagagagggaatgtgtgaatctatttcaagttgtgctaggaccaaaa

SEQ ID NO: 48896 - DNA, 565 bp, Oryza sativa
tcaccacctttacacccacctcaaacgtactgtgggatacgcagcaattactggataacaattacctaaacaccacgtctaagcaattaatatctactttagtgtttataactcatcaaagcaatcactatattttagttaattatagtgaacaataatcctatatgctatttaggaactaaccaagagataattctcacaagataaatctaaattactcaagaagaatattatattgaattcagagtaataaacagaataaaagaaataggagaagattagcgacaactccggaattcttccaactcctactctactctcttcctattctagtatacaatatagtacaatagagcctcttataattcagctcaagcttggaagtgtgtgtgtgaagtgagggactgatgtctttatataggggtagatatgacggttggcgaaggggaaatgtccgaaatgccccgtaaccgccattagggaatgatctggagcgtccacgccaaacctgatgaggacataacttgctcagatataaccatgagtaccttatgtattaataaaa

SEQ ID NO: 48897 - DNA, 636 bp, Oryza sativa
ttgtctaaaacctatcaaatctacgttaatttggtcaaaaaaactcgtgaaacctaattcaaatctgtcaagcctatgacaaatacgtcgtatatttggttgaataaaaaaaatagatactgtgtcaaatgagcaagggtatagacggtctctttttccttgagttaacaccgttagcttgtcttaacggtatagggacatgtatagggacatatctgatcttcatttttttaaaaaaaaggggtcaaataaactaatggtatagggttatatctgatctttatttttttaaaaaaaaggggtcaaataagcaaactaaaaggagtagagtcaaattgctagttacatttcaaaacaaggttaaatgcgcaattgcccctatggattaacacatttgtttgctattcaataagaggagtttcatatgtccgctcacccctcccacgtacatctccccgctacgtaaaaaaaccggtgtacactctaaaagatccatcaaccatgaaatgacctgctaccaatttttgaaaggaacttaatgtcgcttagaggggggtaaaataggtgttcctaaaaattatcacaacttcatatcatattagagatatgagacctttcggtttaaataggaacttc

SEQ ID NO: 48898 - DNA, 1245 bp, Oryza sativa
aggtttcacccccgtccccagcgggcaacgggcagtcccctctcgtgcctaggtgaatccggaagcgacagaggccgtcgcaaggcccgccccgttccatcacgcccacccttgcctggatgcgtctactagaggagagctacactacaagcccagccgttgcccacgctggcttgtggtaagtacgataagttcttccagggcatcccgcgaaccggtccttaactgccatgggtgcgaccagcaaaaccatgcacccacagcccaccatgtggtttattttaattaaccaacaccaaaacggtgtcactaatccaacaacaccattggaaccaacagtctaaacattaataggattttccccaatgtgaactagctgaactaagcatggctaagcaatccccagtcctaactctaatcatgttagaaccccaagttgacaaagaaacaaggtacaacaatcgcatggctatgacaataggtaaacaacccatagtaacattataaaacaatgcaatatttgaaagaaaacaatagagcatttgcaatataggatcaacatgttcaagtgacaagcatgacttgccttgctctgctgctggaggaacctcggcgactatttcgaagtacaccggagcgtcggacgaattggaatctatcgacatacaaagcaaacattgtaaacaggctataagactactgaaacagggaacaaaaccatttttaatggattctacacatttatcttgatttactggaacttgaacggtcttaaacggagctcggatgaattaattatgaattttagaagatgcactgcgtttattactataacagaaatccttaaataatttattgcgcaatattttccagggctgacgtcagcacaggggaagcggcgccgacatgcgggccccaccggtcagcggctcagggggggaaagaaagggcggcggcacgcggctcggcttggctcaaggccggccgaccgaccgcggcgacggcgatggcgcgcgcgcgaacgcgttgccggcgacggcaaccggcggcgaaagcgacggcgcaaaaggcgacgcgaaggcggctgcgctaagcggcggctaggaaggggagggaatgggcggcgataaaggccgccgccgactcggctcggcatcaaagccgaccggccggccaagtctagcggcgacggcatgcggccgacgacggcggcgaccggcggcacgggaagcggcggcggtggtc

SEQ ID NO: 48899 - DNA, 781 bp, Oryza sativa
taaactcttccaacttcgaaaatccatatctttccaaccgtaactccgattgactccgttcaacttccataatctggaaacctctacggctcgggcgcccgatcatttggagaaaaatcgggcgctgacgtcagcgatttacgtgcagaaactactttaaactgatttttctcttaaattatttatccaaatcatgatccgattgcaccattaaattcgttgtaattaaatcttcaaaacaagaccacacatgaatatattccgatgaaatttttttatcttattattgaattatttttaaatgttgcacgatgttccaccaggtatatcagaattgtttcactaagtagatcgaaaatgtttcactcgtttaaatcgggtgttgtttcaccttatataataacaatgtttcagcaaatagcgaaagattgtttcagttcactgcaacatttgatctatacatagtgaaacattataagtacactaggtgaaatattttttggtggaacaaaaaataaaacaaattctcttaatagggggtttccaaaatatgtgggtttttttgttgcaatggaatatttcagttcactacaacatttgatctatacatagtgaaacatcgtgagtacactaggtgaaacattttttgtggaacaaaaaaataaaccaaatttccttaatagagggtttccaaaatatgtgattgatttgttgcaggtgggggtaggtattgtggtcgggtcagcgtcatcaacgcgcgcgcggggacgggggcgggggg

SEQ ID NO: 48900 - DNA, 1054 bp, Oryza sativa
catcttatgcaatttataaataacaaagcatttgcaacatataggattcaacatgatcgaaggaggaattgaagagggcttgccttgatttgttgtcacataatacttctctggtcctgctcacatcacgaatgaatccacaaatatgccatctattcaattttaaacgtaatccaaatgaacaccaaataaacaccaaaaataaattatgcgcaaacatgcatgatactggtgcagtagatagaacattattttagatgaatttaggtgaaagaattttaaattttcgataaagcatgtgagagatattaacagtcaaagttttatatgcggtcagcgacgtaactaatacttctctatttaaactggcattgcacattctagttttgcaaaatttgaccttacagcattaaggaaaatattattatagacctaacaaaatttggttcagtcgaaaatgatttaagatgaattagttatgcatttttgaagtttgcctatttttcagttttccaaattccccgtttgaactgtgcttttgcaactcgaaccctgagcttttatttttattacaaagaggtcctgtcttcttctccaaacgagcagagacagagcagagccatggctgagctcgatctcgagctcgcctgcgtcaaacggcggaccgaatgaggtcggggttaaaggagaaaatgcagataaggtctttgtgattccgtttctctattcatcccagccggcggtggacggagatggccgggaactcgtcggcagctgggctactcaaggactgcacatgcatgtggcaatgcgtttgcgatccgagcaaagagattaagagagacatgcaatagcaccctgtggctcacaggaagcttaccagggggtcggccaagggttgacgagctccggtgaggtcgggcagcggggtggcggtggagtagaccggcggcgacagtgacacagcgatggcgggatctacatcatgcatgccgaaatcattacatgcaacatgtacaacaccatcccaggttgctactactgcaagcaatcg

SEQ ID NO: 48901 - DNA, 3662 bp, Oryza sativa
tattgtctttatgtggccgtgtctaatttattacttccccacatcttgattttattttctttgccaaaaatgcacagggaggaacaactccataagtttttatttttaatgatttcagaataactgattttcatatttttatttcttggtatgtcacatgtactacccttgactagactcatagattttaatactgcatagtgtagagatgagagacatgagaaccttgcctaatgagtgggaaggttagtatagagttggtataagatgaatgtgagggtaaaccgaaccaagcgaggcttggagaggtggatgaaccctggataattacaacttcaacattaacgttgtttttagttaaaactgctaagtcataggtttgtgaaatgaattgtgaaaactagctttatgcaaataaaccaagccatccttgaacccctgtgtacattagattcattttgtagtagtggcttgctgagtacgtatgtactcactcttgcttaattaaatcttttagaaaggagttggagtcgattatattcatgccatgctgctatcaagtacgtgtcgaagacgatggattagggatcatagattcaccagtcgttgcctgtggagttggatggaccgcaactgcttcgcttccactattcggtatacttctttggaattttgtaatgtatgtgaccatgcttggtctattcaggacccatttgggatacccttgttttactattgtagaaacatctgtaaatgatgtcagttgtgatattatattgtgctatgtgtgtaccacctattgatccagagagtgatactatatgacacatgggattaccggtgtataaaaccgggggtccccacagacatactttgtaacgtcccgcctcttttgtaatgtccagcctctcccaggtcgagcccgcttacatctggcaactttcataggtcatagactaccctcacaagtcttttctgcacactttgtctattgatccagagtggtactgtatgacacatgagattaccggtgtataaaacggggggggggggggggagggtcccacagacatactttgtaacatcccacctctcccaggcttaccctcatagcctaccctcaattgcttcaggcctcccaggcctatccagagtggtacatctggcagctttcataggtcatagcctaccctcaattgcttcaggccaagcactcttaacctcagagttctttagagatcggcttccggaaaagaagttgcaacatgttgatatgagtattctattaatcctattaagccctggtccggaaaagaagttgcaacatgttgatatgagtattctattaatcctattaagccctgggccgggatgtcacagggttgttacacatcaagtggaccaaatagaactttataatatgtggtaatatgcgcttttaaattcgcatcaccatttatcatctcgtcaccattttgtaattgataaattcttgtttacctatgcttaccatttgctgccaaataaaaatatttagtattggagtctcctttcaaaatatttttagtctttagtcacaatataattatgtaaatacattgtaattacactcgacgactatttgtattgcaatgaaacgaaccagtcatgggcgtaagtagcttgattgtctcaacgtgagtcaatgcgttaatgataaaactgggtccaatctaacagctcaatcggttaaaaatcaatttgctcattgctcaataattatgttcttgcgggttttggctgattggatagatgtgtatgggaattatatggatttgcttctttcctaatcatttttcaatttgcgagttttgacttttggttgattggattggaattctatggattttaggtcataaaattccatataatttgtgagttttccctgacatgaatgctgtgcaatgtagattttgtggatttgcttcacttctgtggacatttttatgttgaaccaaactaacaatgatgctaatccaggctacatgcttgttgtatcggtttattggctgcaggtttgttaatggaattttggagaatggagttgtaggatcggaggttcaggtatttttctacctcagcttgtgctagttattttgcactatttatatctttgtgatttccacattaggcaccaattaatgcctttttttctatgcaaattgcacttccatttgttgtagttgccatattttagtcatgtactctgcttttgaatttctgcaacttcaattataattttcagcaaataccttttgctttcattatagctggattttctcttgaacatgttgcgcataataaatttttagccaatcatggattggagaaacaatacagttttgtttctgccgatataggatgaatatcgccgtttttgcaaattctattataaacatatgcaactttagttataaattttgagcaacaataacttgccatagttctggctggtctctgcgggcttgtgattgtttttgtgtgtttggctctaaacatctcttgttttaattttgtttcttttctcccttatttcttgatttgcctataaaatagaaccagtagaaatgaaattttagatatctagcatcttaaaaacacatgctatatcgacatcatatgaaaactatgttgattggtaacgtttttatgattattgtcaacatatgtcgagggctatatttgttttttggcatgcagtagaccatagatccaccctgtggggctcatcaggttgatttgctttttgatggggatgtgatgggcaatttttaaatcaatttcatgtatgttgattcttgatttgattttgtgtgttttgtgttctgataattttctcttacaactagacaaaaaatttgtttttttaatagcatggctttaattaatttttccgttctagtaacgtttatgtttagccatctacaacatgcagttcaacagtttttccattggtaaaattagaatacaaaataataaaaaaatgttgttaaatttgttctatgtcatttttacacttccctattgttgaggtcgccattttcaaatctgcaaagttttggttataaatttgtgtaactttagttataaatttgtgcaaccattgatttgtttttctgtaattatttcatgtttgtgtaggattggcaaagggacaattttaaatgttccatcagaagattacgacttgttttggatgtaattgatcctaaatgtaatgtgttcagtgaaacagatctttgtattacgagtatttaccttggaaaactttgttatgtgacatgttcttccacaaattatgtcggttagggggagaccataacagaaggcaaattttcagccatgtgtggtatcaaattttgtataggtcaatgcatttgttgtttctaaaccagaagcatcaactaatttgatttgcacatatactattcttttctatcttaattctgcataggctaactttcgttcttgatgcttcccaattgagtttttttaagagaacacatgataatggacaaaaagccttgaaaattaagttcttttgcccaacaatggtaaggaacaaaagcctggccaacatgcattggaaaaaaaaggcccaaacgcgttcaacttaaaaataa

SEQ ID NO: 48902 - DNA, 2017 bp, Oryza sativa
actatagggcgaattcgagctcggtaccctgtttctctgcccacctttagatccgcagcggatggcctaataaatccattgatggggagaggtaaataccatacgactgccaaataggcaatcccaatttaattagtaattgtttgatcgttcgtcaggctccgtcggatgctagctgcctaaccttgcagctcttccacttatgtttttttctttcacgtttcccctaattcccattccgttgtttcacacatatttatattgctaatccaaaaccatctctcgggtggcctctattcatttatacatggccattgaacatatcaagccaacatatcaattatgtagttttacagaagtaatcaattactaatggtctatcatctattatagtgcttcctattactgatctatataacttggagtagttttgaagggacataaatcaattactcagttttattagccatgctaatcgatcaacaacttagtatttttaaactgggatcaacaacttaattccttcaccccttcatcagtttggccgacagcgccgggtgacccacctatttctactataagtgggttcgttgattggcccgcttgcgcccttacagccggccaaataacgagttagcaaaaataacaatattaatcattgatttgttgtgctgtggtattatgatcaaattacttatctatcctttaacttaaattttaagtcaagataccttttgtcataaaccgttaacttagaagcaacgaacatatcttatcaattccaagcacaataaaaagatctcatatatgacacctcttcaaggtgatgggaaacaatagcccacattgataagacccgtttagattcatcttcaaagctttgcatatactttctcataacagaaagtatcatagatatggtttgagttgtcagtgcatgattaagtggtttaaaccatattgtctatatacactcacaagcaagcacgcctttagtaagaataaacggaagggactacccattaattttttttcaaaaattggtcaaatgtaaatacagtgtaattacattgtagcttatatgtaactgcagtctaatttgttctaacatcctgaaaattaagtagtattttctaattatgcatcatgccgattcttatgttcttaataacctcctaaacttaggaaattaaaaattagaggtaacctcctaaaattaaccttcatagaatccgtctatattatttaaaatcttttgtggtttttattttaaaattgatcttgttaaaattgaggtattttctttgatttgatttttgaatcttaaaccttcttataacaaaattcctttattcaaattatttgaaatccttttatgaattatggtccaagaaaccctccaatattacccgtaaacctaaaccaaagcaattccaattttattggaattatttcttaaacccaacctttgatctagaccttactctaatacttctccatccaaacattttatgattccttcttctccatccaaacattttatgattccttctatagatattccaattatcaaattcctatctagtctccaatttaatttatatagctcaattccctcctaattctctcactggcacaagaatagtattattaaaaatattgtgagtaattgctcttgtgataggaaaatatatttgatccttccatcccaaatccaaaacctcatttagcccataattaattctctaataaatatcataccacatattttcctccctccgtattcctttcagattctcaaaaatatattcaaattaggaaccctactattcatattcataaatacccctccctcatttgagtgctttgatatttagtccactatattttatctctcaaaatattcaactcaaactggaaaatatctctttttagaaattaccttccaatataatttcctttcaaacattcccattcaaatacaaattctatctaaacaaaactctctcaaaaattt

SEQ ID NO: 48903 - DNA, 1156 bp, Oryza sativa
ggttattatccatcaccaaagagagaagattgaaagatcttggattaaacaatttgtgtaattgttactttggtgatagatgataaaccgatgtttatgggattaacctctcttttgcataagttgtctactaggttatttcccgataatgaggtgtggaagacatgcattattttttgatggaccttaatcatgacaaggatgaaatgcatggagataaaacgatatgtaccacttcttatctcctactttttgataggttcatatatatgatttccatgttattgatatataagtgtgaaactaatgtttactcgagtcttatcttatttagtctcatttacattgagaacatggagatcatgaaggtatatgttttatgttggtctacatcattactacatatgccttctctatgtgtataggataaacccccattgatcattctctaattatgcatacacttgcatctcttgtatatttatttgtatgcatatatttagggggagcaaatcctatatatttattgtgcatgttctagatctatgttgttcactgttggcggttgttaaatgccgattctataccgccaacatctgcataaagttcggataataaaacatccaacatagtgataggtgcttaatctcacatattccacaagtgttggaatatatttgtatgcagacgacaaaccccgatgttgggaggaaaatcagactacagtgaggagattcacgtatccatataaggaggggttgtaaacttcatccaaacaccaataattcaacccaaaactccgagaaatggatagaggaggtccaggggagaagatgggccaagagccaggccagatgggcccagcccaggttcggccgaaccagagccatccaggctggggttttgatgaggacataactagctcggatataatcatgactaccttatgtattaatcaaataaaggtgcatatgttctacattagatttacttgttatatatttgaacaaacgttgctacacaataagtttcgtgtgtttttgtttgcaaaggtacttacttgggcgaaagaaaagagaccgagcgtaaggaatgcatggatgaaagaagacgatgagggatgttaggtgggtaccgagctcgattcgcctatagt

SEQ ID NO: 48904 - DNA, 970 bp, Oryza sativa
ctattttagcaagaggaaaccacccgttcctttgtcacctcccgatcctatggaactcgggttcctgtgagaaactgtccgagttgacatccataatgagcaatgaatggctaagggaggtagagctttcatccgaagtaattcagataaatacggctccccgaatcattccatgccatctagaagggaacgatgtcggtattctctacagtccatctgtcggggccaacctcgtctctgagtcttttgcactcgcttatttaagcgataaggcagtgtccccgacaaacaaattcttcaagcatccgaacggaaatatcatcgaagggtttgggattgtgcaagatgtgcctgtctgctttgaagacatggaggcgatcttggatttccacgtctttgaaattcaagatttcgacattctaatcgggcttcccattgagcaacttcttattaacacaccccgattaggtagcctcaaaataacactgggagagaatgaattttcaattccattctcgcgggcaaggatcaccttgaccgatcctctcccagaaattgagtcagcggaagaggttaccgcagtccctcctcatgagtctcctgaagcccttctggaagatgaggtcccagacttcatcaaggaagaagcagatcccggtgagactctcgacctgccaatcatggaaccgccacctcgacctccgcttgagcttaaacctctacctccaagcctatgatatgccttcctacataatgatagagaggccctgtcacaccccgaagttctcctcccaagcctaaatttaatttataaatgaccctaagaaaataccggtgcaaatcaagagaaaaccctaagaaagtaatgcaaataataatcggatttgacatgtggaatttttcttgagttctacatgtcgaaattcattaacaggatttttagtggaattttcagagctctagaaataat

SEQ ID NO: 48905 - DNA, 794 bp, Oryza sativa
tttccttgctcgggaaggcatgtttcgtgtttcctttagtttctatcccgagttggacgtggagaagggcctgtagagggcaagaccaacccctatttaagggacaaggccggttcattgtaaaaccccagaatacaatatacttgaatcgttcttttactatgttttctattttaccctagttttagttcatctttgtcggtttgcgccgtaaaccgtccgccaccgctgcgagagtgcgacacctctttgtaggtttgtcctgaaaaccttccgttttgcccacgagatgggtagttatcctctagccggtagctggtttagttgtttttctacaaaacccatcttgatttggccctttggctagatcgaggtggttagcgactccatatcaccgcaaggcgtttaggtgttgtgatcgtgcttatcaacttgtcaaaaaaaaattgccaacacgatttttggcgactccgctgggtaatcgatctattcggctttattatagccgaatattttgatctactgttcgcgctgtgatcttgcttgatcacgctcgggtgtcgtcgtcggtttagttttatggccgaattgttttgattcggcggaatttgtgatcaatagcaatagcaatcggattgtttctatacaagccgatctgctacacacggtataaaaaaaaatcaggctattaaagccgatttattactgcacacggtcatccagaggtacacgtgtgaataaggagcaaggcagtaatactcgtacaccctagcagtacacggctatttttaatt

SEQ ID NO: 48906 - DNA, 711 bp, Oryza sativa
ttttctttatctttgtccggtactgcttttacatggtttacttctttaccggcaaattctatttatacttgggctcaattagaacaaaaatttcatgattattttcacactaatgaaactgagcttaagttatttgatttaacatcggttaggcatgaatacaatgaatccgttgctaattatattgaagggtttagagatgttaaaaactgatgtttcaatttgaaaataactgacaaagatttagccaacattgcatatgatagattgcttgattctattaaagagaaattgaatggccagatatttcttgatgttgatcatgtgttgcatgaagctctagctcaggaaagccgagtggatgacaatagcttacaagctagtttagatgaaaatgcaatatcatgtgtagccaaaccaagcgatggttcggattgtgttaataatttgtgcaatgatgccataataagtatagctgaaccaaatgttggttcgaattgtcttactagcttggataataatgcaacaaccattatagccgaaccaagtgttggttcggattgtgttactagtttagacaacgatggaatagccgaaccaagtggtgattcggattgtgttgctagcttagagaataacatcattgaagatatagccgatctaaatgacggttcggattgtattacaagcaaagatgaaatagcattgtca

SEQ ID NO: 48907 - DNA, 671 bp, Oryza sativa
tatgttgaagcataggccacgtgttaaggggtattgagcaacgtaataagctcgagctagcatagcctgcctagatcttagttccgcgaagtcctagcatttagaggtgtaatctcctgtcctgactgctaagcaatagagtgtgctccctgtgtgttgcatgtttattttggcttgattttggattttatatgcatccatatttgcattcatatgccttaccaccaatcatcatatcatcctgactaatcgatgtgtatacaaattccagtatactctcacgtgaatactcagcatcatacatagctctcagttagattgatagcccatacaatcccatcaaatgtggattaattcggaatcatcatcggctaagactatacatccctagaatagtacgccagttgaacataaacatattcattctataatttattaagagcctagtttatttatcatagagtaatatagattctccagaaattattcagtcagtttatcccctctaataattcacgcaaccttcagcaagaggccttgtatttaaatttgtgcgagcaatccgcatcgaaatttggagtggcatcgttataaatgggacctatgcagcacagcctgcctccacagatatcgagcataatgactacccttaggaatgttggacaaatcga

SEQ ID NO: 48908 - DNA, 547 bp, Oryza sativa
ccaaatcaagatgggttttgtagaaaaacactaaaccggctaccggctagaggataactacccgtctcgtgggcaaaacggaaggttttcaggacaaacctacaaagaggtgtcgcactctcgcagcgacggcagacggtttacggcgcaaaccgacaaagatggactaaaactggggtaaaatagaaaacatagtaaaagaacgattcaagtagattgtattctggggttttacaatgaaccggccttgtcccttaaataggggttggtcttgccctatacaggcccttctccacgtccaactcgggatagaaactaaagaaaacacgaaacatgccttcccgagcaaggaaacccgagacccgacgaaaatagactcggactcgaccctaccggtctgaccgcccacatacctgcggtcagaccggccctactagccggtcagaccgcccacatacctgtgatctgaccggccctgtgaaggaagcccgttactttctaaactttggtaatttttccctatttcgtccataggtgccaaatttgg

SEQ ID NO: 48909 - DNA, 523 bp, Oryza sativa
aaacattatcgatctacttagtgaaacaattctgatatacctggtggaacatcgtgcaacatttaaaaatgattcaatagtatgataaaaaaatttcatcggaatatattcatgtgtggtcttggtttgaagatttaattacaacgaatctaatggtgcaatcggatcatgatttggataaataatttaagagaaaaatcagtttacagtagtttctgcacgtaaatcgctgacgtcagcgcccgatttttttccaaatgatcgggcgcccgagccgtataggtttgcagattatggaagttgaacggagtcaatctgagttacaggtggaaagatatggattctcgaagttggaagagtttataaactgaaagggagctgctttcagagagggctgtgggttgcatacgagatgtgttgtggactgtagtggatgaggtggctaatgatgggctctgtagaagggtattatgtagacttatgtaagtgaatcaatctttcggggaaaaagcacaccgcaggt

SEQ ID NO: 48910 - DNA, 658 bp, Oryza sativa
ccatctattcaattttaaacgtaattcaaatgaacaccaaataaacaccaaaaataaattatgcgcaaacatgcatgatactggtgcagtagatagaacattattttagatgaatttaggtgaaagaattttaaattttcgataaagcatgtgagagatattaacagtcaaagttttatatgcggtcagcgacgtaactaatacttctctatttaaactggcattgcacattctagttttgcaaaatttgaccttacagcattaaggaaaatattattatagacctaacaaaatttggttcagtcgaaaatgatttaagatgaattagttatgcatttttgaagtttgcctatttttcagttttccaaattccccgtttgaactgtgcttttgcaactcgaaccctgagcttttatttttattacaaagaggtcctgtcttttttccaaacgagcagagacagagcagagccatggctgagctcgatctcgagctcgccttgcgtaaacggcggaccgaatgaggtccgggttaaaggagaaaatgcaaaataggtctttgtgattccgtttctctattcataccacccggcggtggacggagatggccggggaactcgtcggcaggttggctacttaaggactgcacatgcatgtgg

SEQ ID NO: 48911 - DNA, 687 bp, Oryza sativa
ctatagggcgaattcgactcggtacccgatcagcttaaaactgacaatttctactccaagggcagtgatacaagttactgggaagaatgcaagacagaatctgtcttgcaccttttcctagctaccgtttacacattcaacggtagaggtataccattgctttgctctctcttgcagagagaacgagaacaatttccaccgcacagtttcttgactcatgccactaatcttaaggcaccagcccacttgttcaaagtctaacatatgatggcagggattttctagatcaaagccagaaaaaggattttccctaaccatactaattagttcgggacgaatttcatatccagttgtataaatgggctccgatgaaggaaggggctcgtaaaattcgccctgaggagcagatagctcaaaaagaggttgctccaaggtcgacaagagtttgacaggaatacttctctaggatagcaagggtgaaggtcgaattaaaaatgaaaaaggatcaaggatgaacttggttcgaaaatgatcagcaaccgttccccggcaacggtgccagaaatgcttggtggtatctaatacggtcacaaataaaatccgcatgcgcacggatataccgatgtagcacttcccctactgagtatcgcagggtatcgaatacaaaggaacgtgtgtggtcagatc

SEQ ID NO: 48912 - DNA, 1330 bp, Oryza sativa
agtcacactgatcccaaacaaccctttgagcatgttgatcctatttaaagctattgtttctattcaactattgcatctattttcgaatgtcattgggtggaattgacctattctttgttatggcccttttgtacttgattaccttattccttgataccttgggttattacaatttgactagttgagctttatttatattggttcaactagatattagatataattgcttagccctgcttagaaacattagcacacattcgggataactaatgactcactaatatttcatgatggtttcatgatagttcacgatggtcaatcgtgattagttaattaattaatgtgccaactaaaacctggtaatggtgggttgtgagcacatggttttgttggtcgtgctcatgacaattaaggaccggttcacgagtttcggttgtgaaacattaaccgtgccaaccacaagccagcatgggcaacggctttatcttttgtatagcatggttcattgcggggcaccagactgagaagtggcggagataagcccacgggggtcgctggggagtccatgccttgtttataagggggtgattatgatccaggaaggtgcgctgcagtggattgtgttatgcgaggggtattgtcacaactcctttccgagataccgtggtggtattgaggcacatggtgacatgatgtggggttgtgtcttgtgggtacagtggtacacctctgatcagagtaaaactattcgaatagccgtgcccgcggttatgggcgggtctaacaatgtctttcgtgattagtctcacacctctcatcattgtaaaagatgcttaaactggtaataatttgattagctcctggtttggaatggtatattcctggtttggagatagaactgtgcagccggggtggttgttcagaatggttgggcctatacaacagggtatgttgtatagcgttggattaatattgtttaattacttaactgttttatcaaattctcaaatgtttgctaaatgctgcttttgcaaatgcaaccctactatgccatcctttgttatcctgtgcacttgcatatttgctgcgtggcttgctgagtatgtcatatactcaccttgcaatcattcatcagaggaagagttctacaatgaggctgatggtgtggaggattaggtgtagccttggtcaagctgcctgtggagtggagccgtctgcgccgtttatttattttccgctgcttagatctttattgattgagaggaactatctacctctgtaatgacattttattcgcttattaattagagtaatatttgtactctattat

SEQ ID NO: 48913 - DNA, 832 bp, Oryza sativa
ccaacaccacatttggatcattttgagtgtaaaggggaagcaagtctgtgttggcaggaatttgaagattatgaaggtcatcaaggtttagcaaagaacgaagacggaagccccagatctcagacaactgctgataagaaacagagtaccaggacccctgagtcatccagtatacggtggcgtaaaactgagcaatgatctcgttgcaccaattttgctgcaacgtcatgaaggagcggatatccatgagatcacaattggcaatcacagagttgatcaccagatcattatgtgcctgcagctcctcccaattgatccattgcatgggaacagtgggatgagctttggacttattacagactcataaaagtcttgttgaaagagagtccaaaaccgcggatccgtggcggtgcggcgaagggagcgcggatcctcatcccgacgaggagcaacaacctcagacttgcgccgccaatcatacacttggcgaatcaccgccggatccctctcgggggtatgaatgcggagaggcccaatggggacattgggttggtgcggcggcgtttgcggttgacgagaggagccctcaccatcaccaccaccatcatgagcatgagtagaccgtcgagccacccgcgcaacctgaggaaccgcatcctctccaccggaccaatcactgtccgaatcatcatgagaagatggagtgggagagcgatccctcgggcgcttggacttgtgggaggtttgcttgtggagaggcatcctcaaacaatagagatacaaggagtcagatatggaagccaaggagacaagaaacaagtgattgagagca

SEQ ID NO: 48914 - DNA, 741 bp, Oryza sativa
ccatcagttgataagttgaaagaaaggtgctttctcctatttcttttaggattgtgcgcgaatattctttggttatttatcgagggatcgtatatttatcgctcgcgggtattcaggttatctgactgttgcgtatatctggaagacattaggaacatatagcaaggcaagtcactacactctcttcgttgaacatattgatcctacatttataaatattttgttgacatataaattgcatgctatttataaagtgcgcacctatccttgattatgcccaccctagatattcattacctttatacatgttgtatgcctttgaatgcttgagtcatttatttatatgcggtcatttattgacattgcttagcactgccattgtagacatacgcacactcgatatttatgttagataaatatggatgtgggatcactcgatgtgagtgatcgatgatttgcaggtggaggcatgagcgccacttgccacacacagatattttgcgaaaaccatatcttaatgaaccaaaactatttcgactggggcggcatgagtaaaatatgggtggtttaggaaatggttggtcgccgaccctagtcagttaaggaccgagtcaggaagctatgcgggaaacaaaccaagtaagactgcacttcttacgtatgagcggacccgatggattaggaagctcttgcgggtaccgagctcgattcgccctatagtagtaggatgccaaccacggg

SEQ ID NO: 48915 - DNA, 673 bp, Oryza sativa
tgtgttggcaggaatttgaagattattaaggtcatcaaggtttagcaaagaacgaagacggaagccccagatgtcagacaactgctgataagaaacagagtaccaggacccctgagtcatccagtatacggtggcgtgaaactgatcaatgatctcgttgcaccaattttgctgcaacgtcatgaaggagcggatatccatgagatcacaattggcaatcacagagttgttcaccagatcattatgtgcctgcagctcctcccaattgatccattgcatggtaacagtgggatgagctttagacttattacagactcataaaaggcttgttgaaagagagttcaaaaccgcggatccatggcggtgcggagaaaggagcgcggatcctcataccgacgaggagcaacaacctcagacttgcgccgccaatcatacacttggggaatcaccgccggatccctctctggggtatgaatgcggagaggcccaatggggacattgggtttggacagcggcgtacgcggttgacgagaggagtccttaccatcaccaccaccatcatgagcatgagttgaccgttgagacacccgggcaacctgaggaagcgcatactttgcaccggaccaatcactgttcgaattataattagaagatgtgtgggagagcgatccct

SEQ ID NO: 48916 - DNA, 631 bp, Oryza sativa
tgtgtatatataagcttgggcattgtcatttgcaggggccaagttgcgcggggttgtattgactgaatggcgctcttggcttacttcaccgttttcgtgttagcagcatctgttcctgccaccggccaacaaggtatgctttttcgttcttcctttttccgtcgattgcgcaattcagcccggccctctctagttttattgttgcacgcgtgtttcagtaagcaagacattcaaaattattttcggtgactactgtttctatcatctatggaggtgctctggaatctccgaaatataaaaccatgtcgattttgggtctggccatctctaagctaaatttgggtaaacttaagaaaacctctccaaaccatccgactaatcaaactcccctacaatctggccaaatgatgagcccaggggtggagctagagcaacatgcatggaagggaggggaggggggtgtgcaccgctatatattgtatagtatttttttttgttagcaaatggagtagtagaacactactaatttttggcatcaatattcaacataagcaaaaggtaggaaaagaatattcttaccgaaatggagaataccagtgacaatattttcagtaacttatatagtgcaata

SEQ ID NO: 48917 - DNA, 3307 bp, Oryza sativa
acaaataaatatttacttacaccacattgttataaaaattacagtgcacttacatgttatatcaactgaatttacaaatgtaatttttgttatatatgactgaaattttgtatttatttttattttaggttcaattgagagagaacgagagagaacagcgtgtatatcaattttttagagcgcaaaaaaacaaattagcgcctctaacccgtccgattgaatcctatgcggattcccagcgctatatgtgcaggaatcttggcacttatcgaacagcctaaaaaacgacaaatcctatagaaaaaatcacacgacaaatctatagcaaaatcgttgctaaaaaacttgcataatcttttctctccaaaaatttcgaactttttaccgttggaccatcttgagattcatgacgagaggaaatctttttttaaaaaaagatcacacacagcacgtactaacgagtggtcgaatacacgattggaagattgatagccaacagggctacacaacattttttgatttgttatatatgaacgagaattacgtacttcctccatttcacaatgtaagtcattgtagcatttttcacattcatatagttggtaatgaatctagacatataagtatatctagattcattaataactatatgaatatgagaaatgttagaatgacttacattgtgaaacagagggagtattaaacaaatacagaatattgcttttgtaattacagtttaattataatacgtttacatctgaaagtttttcatctctactattataagatgtttctgctgatactttgatacatcgactctatttaagtcggtttttaaatccgttcgcttttgacaacacataacgagtccctataagaaattcttttaaaaaacttacatctcacttaggatgagagtcgtacttttaattgcttcagaatttctaccaagccataggaaaacaatatataggatacggccataatccctacaagggatccgaactgaatatcaataatatctcaaaataaaattcccatatacttttttagacaaaaaaaatatctaacaataatacgattaaaatagccttcacccgtagtaacgcacggacatgttttctaatcaaaaaatatctaatgttatatcgctactcctttttttttttggaaaaatatccaaaaatccctatctgcatccaccttaattttatcccactcactatcctactatctcactttctatccatcccctctgcctcaaatatgagtcaaaagtgtatctctatctccattgctctcccatatggtgtcttcccctgcttttttttcttgggagtataagatcgataagatatagaaggatgagatatatggcacaaaattaaaatgatatctgaagcatgcagagaaatatggagcctttaaaaaaagtattatctttcttcagatttagggagttaaaaatagggagatcgatgaagataccttataggataacaaaaagcccgtcaacgccggacatacaggagagaagagtcttgaagtcttaacaaggtgatagtgatttgcgcacaacttgcttgagagagtaggtaaacaacctagtcagtcaatgcccccctcatcaaggcccaattgtcagcagtacggtctccactatacatcagtacatgaatgttcttatctgtgcgacagtgggagtgtgggatgatgtgtatatataagcttgggcattgtcatttgcaggggccaagttgcgcggggttgtattgactgaatggcgctcttggcttacttcaccgttttcgtgttagcagcatctgttcctgccaccggccaacaaggtatgctttttcgttcttcctttttccgtcgattgcgcaattcagcccggccctctctagttttattgttgcacgcgtgtttcagtaagcaagacattcaaaattattttcggtgactactgtttctatcatctatggaggtgctctggaatctccgaaatataaaaccatgtcgattttgggtctggccatctctaagctaaatttgggtaaacttaagaaaacctctccaaaccatccgactaatcaaactcccctacaatctggccaaatgatgagcccaggggtggagctagagcaacatgcatggaggggaggggaggggggtgtgcaccgctatatattgtatagtatttttttttgttagcaaatggagtagtagaacactactaatttttggcatcaataattcaacataagcaaaagtaaggaaaagaatattcttaccgaaatggagaataccagtgacaatattgttcagtaacttatatagtgcaatagtgaagatggtaagactaaaaatcacaaaacagttttgctcgaattatagaactacaaatctaatactacctcatttaatgaatgaaatcatccattatttccaaaacaagaaataatatctcatcatcttaataagtgataaaatggcctaatttctaatttaaaaacgtcaacatatagcctccagatccatagctcttccgtcccttttgctgctcctttttgctaccggccgaggtcgatggggctcgcatagtggcttctagatcccgaccatctcgttgctctcctctgtgaccaccatgtacggccatgtcactaaaataaagctcaaccccctcttctagcccttcccactactacaaaacaccacataaagactgaccttataggtgcctaaaatcggcaccaatagtcttccaaatcatcggtgctggtttttataataaatcggtacctatgaacattatataggtgccaattcatataataactggcacctacaagtgcggtgccatatgtaccggtttttatcatgaatcaacacatatggacttcacatatgtttcgtttcttaattaaaaccggcacttatgagcccataggtgtcggtttatgatgtggaactcatatatgtgcattttttatctattgttttcatataatggcggatgaaaacaaactttatattaactgtagagctcaatgagacctacaccttttttatgactttttgatttatggccgtttcgatggggatctgaacatatgttgtaaggtcttggatctatttgcgtaagtgaatatttaaaatttataaaaaatttcagatggagacgtaacctatatgaaagttgtagatctaaatgggatctacaattttttagttgacaaaattttcatctaagttcatatattgtgttaaatatgttcggatagcagtactctcaaaataatat

SEQ ID NO: 48918 - DNA, 5771 bp, Oryza sativa
catctgcgatgagtgcgctcttctccatcatcttctacaatcggctccagtcttgggaattcggcttctgtcaaagatggccgattgacaactttcatgaccatcagatttaacgaagtctgcaatagccaccatggtccacctgctccaactactgatctgatagctatcttagctgatgcattattcaacatttggtatagatagccgagaaggattttgcctagaggaaattgctttttcgattctagggcttcggctacaaattaccaattggttgtaggaccacaactggatccacagaagaggaacttctctagccacattagcaagaaagctacatgctcccgaggagtgacagggcctttgcccatatatgccgctatatagccagactaaccccctatgcttttggtcttgaaatcaaattggttcttggtgttcatactcatagggttagccgatgaggttacatctaatccagtgatcatggtgatgtcgatcagggttggagtcatcggcccttggttgaacaaaaaggcattgatagtgttggaccaaatataagtggcggcggccatcagaggttcatctttagctgaattggctatggtaagggcaagcgcttggccgattccaatctcgtcctagtgaactttcttgctagccgatacgcgcttataccatgtagtccaacttttctcgggtggagttttatcgagagatggccaagatttgaaggtatttttctagtgacctagatttgggttggccaatctgaaaggaatcctattggttttgctgataatgaactcggtaggatcagggttgccgactgcgccgaggaaatagtaattttcatgcgacaggttgggaattgcaactaggttggagagatgctacaaatccaaaggaaccgagaaggagaaaacaagatgagttggaaaatgaatctgttgcgaagaaaagggatctagccgatgagaacttacctcagcatactcggccgacgatgcggtagacgggctcgcatagtggcttctagatcccgaccatctcgttgctctcctctgtgaccaccatgtacggccatgtcactaaaataaagctcaaccccctcttctagcccttcccactactacaaaacaccacataaagactgaccttataggtgcctaaaatcggcaccaatagtcttccaaatcatcggtgctggtttttataataaatcggtacctatgaacattatataggtgccaattcatataataactggcacctacaagtgcggtgccatatgtaccggtttttatcatgaatcaacacatatggacttcacatatgtttcgtttcttaattaaaaccggcacttatgagcccataggtgtcggtttatgatgtggaactcatatatgtgcattttttatctattgttttcatataatggcggatgaaaacaaactttatattaactgtagagctcaatgagacctacaccttttttatgactttttgatttatggccgtttcgatatctgaacatatgttgtaaggtcttggatctatttgcgtaagtgaatatttaaaatttataaaaaatttcagatggagacgtaacctatatgaaagttgtagatctaaatgggatctacaattttttagttgacaaaattttcatctaagttcatatattgtgttaaatatgttcggatagcagtactctcaaaataatatcagttgtttttaagacatgtgtttgtaggttcgatagtaaggatgctttcgatggagagagatgtcttgcttgagtcatatgtatgaatataggtgccttgtgggaagtgaattgtgaccatataggtgcctaataaaataccaaatatttattcagatttttttagcaccttcaaaaaaaagccgggtacacccctatataaactggcacctatagtgtgacataggtgccttttcaagaatcagcaccaatgactatccaagtcattggtgccgaataatttgtgtggcactgaaatcggtacctactagaaaattggcgtgccttttggcatgccggctgattagctggtttctctttgtaggttttactaaattttatttattttatataagattaattaaaaatgttatatttggcagggcctccaaaaacgttgtgagtagataaagagaggaattattgcattgggatttgataactgcttatatctacggtgttatgtcagccggtgaatatttcgaagtatgggtgtgaatgttgggtgtttgggatgatatgtacatatattgggtagagcttggttcatcaagtactctctccatctcaaaatataaacatttctgaaggcttcgtgagaattaaaaaaatatgtgaaataaaatatgaaaaaaattaattgttgagaagataaagtaggtgaaaaattaaatgggagatggttgtgattggcttcatgggaattaagaaaatatgtgaaataaaatgtgaaaaaaaataatagttgagaagataaagtaggtgaaaaattaaatgggagatgattgtgattgaatttattttttttagaaaaaaatattttttaggtatattttttataaatgtgtagacttaaaagtaaatattggaaaataaattacaaagaaaaaccatcgaattcaactacaaaattatgttttgaaattcaaaatttatttgtggctaataagttgaagagcagacgaattttgcaattattttgttgtttatgctatcttatatgttatttacgctaataccatacatgcaaaactcttgtagcaacgcgcgatgtttcatctaaattataatcaaaacaagtaacaggtatatgaattaatgatggttacttcaagttgattactccttcagttctattattatacaaaatctaaatttcatatggttatggcaacaaatatgtaagtcataaatgaatctatataggggtatcaaaatttgtaagggtcagaattataaaaatgcaggagggtgcatatcagaattttgtggggtcttctttttccattcaagccgaactgttgcgtgtggtcttttttttttttcttgggactatttatatttatatttatgacgtcatattttttatggaaaaatagttaacatgtttttacattgtaattgtaagttactaaattacatatgtaattttattgtatttaccatgtaggttttaaaattacatatgtaattttcgtgtatttacaatgtaagtataaaaattacatatgtaattagtctaatcacataatgtaattattagtctaatcaccttgtattaccatattgtaagcctgtttaataggtccaaccacgtgaggcccaatacgaaaaccgaatagtcctacaccagcaccgtacctatctccacgcgcatcgaacggttataaaaaagtggcgacagaactatagcaacaccgttttttatatccgagccgaactgcttttatctctccgcgtggcgttcgccgctcattgcgagtcgatctttttatctcttcccttgcccactctttttttctctcagttccttcgctcgccgtaaaaatcgccatgggccatggctgctgctctctctccctatcgcttgcttagcttgtgctaatagctcgaacttgattcagcgatggtggaggatcaggcagcggtgctcggtggcccggcatcgttcattccctcccttcctctttctttctcctcaccagcttttccttcagccacgttggcccagatctggcggtggatcgagtcaggggatagctgttgagaggtggcgagggtggtgttcgctggatccgggccaaagatcctgccgtcctttcctctatccttgtcggattctccatagtccatactcggtgacggcatggtgatcaagcaaggggaatctatgttcttgatgtttttatttcttttgcttggattctttttttttaatttttttcccctctaatcccgactgttctagatgagattgcacattttgtgaaggatccgttgaaggttttttcaccattgatatattatcggacggctgcaggatggttgggaatacgtggcacgttctccggccgagaatccggctggagctctgggcgtggtgctacgtggcccaatgaggagtcagggttgtaaccctgaaatcggtttataagataggacctttagaactggcgcctttgggcttttctgtagtagtgtccgcctacctccgtcatagcccatgatgtcatggatcacacaagagagaaatagaggtagacacatgacggagagaagaacaggggaggagacattgacatatgggatctagaagatttggagaatggaaaatgaagatgctggttgagtgtgtaagtaatatgaagagaaatttatttggctgttgccaaatgagcacatagaaagttgttttatgtgacttacatgaggaaaaagtttgatttgtggcattcaaaactgtctcaaaataagttgatctagagctttttgccttggtcctatttgagaagcttaagattttaaagaacagctagtgagaaaattggaaaaaaagatgatttttttatctttaattttctgctttctagttcgttttctggattctataactatacccctcataatctgattgaaaatatgaattgtttaaaaaactaaagattttaggaagaacatataggtatgcatgctactccaaacagacctagtctctagatagagtccaaaatgatttttatcccttgcagccaagccaggatttcgactctgaaggatcccccagcaagggatttataagaacatacataagaatattcccgaaagaaagacatacataagcatatattgtacaaagtaatgactaatctacaaaatcaacactcatgccataaccttttgtcgtaacatgagaaggtaagcgggcgccattgttaattgacggtgcacccacgcatgcaaccgccgcctcctccacctgtacatgtccatcctatcgacgcatagagcctcggctgggagtagcacctggtggtggccatgacaacggcatcgaacatttcctccatctccaccttgcggtcgcgcttgcttctcaccgtccatcgcaggtccacagcgagccatcacgctgccgcggcagcgcccactgcttggggagccgccgccgccggatctgccactcaaaaacactactagaaaaagcatttccatagtcggccaaaacagtttttgacatgcggctagtcgcgacaactgcaatttaaggcctaaagtgatctgcctatgaaaatgttttcagagtgcaaaaaaaaacctgctgattccaaaatatccccctatggtagatccaaattcctctattccccttgccacccataatccattcacaaacttatcacaatcctcaaaatccattcaataaattgatcacaaaaaggggtcaaagagtaagattccgaggctggaaagtggatccacgcttccaaggctggcggttggtggatccatgcccctgaggctagccagtgctggatgatccggtcccacaaggcctggtgactgcaggcagggtcgacggcaggagctaaggagaaatgccaggctcggtggtgtggatgcaagctcctgaggcctagaggcgccgtggccggtagcaaaagtcatattgtggatccgtgctccctatccatcacgtgcatgggtataggtgtccaaa

SEQ ID NO: 48919 - DNA, 765 bp, Oryza sativa
attattagtctaatcaccttgtattaccatattgtaagcctgtttaataggtcaaccacgtgaggcccaatacgaaaaccgaatagtcctacaccagcaccggtacctatctccacgcgcatcgaccggttataaaaaagtggcgacagaactatagcaacaccgttttttatatccgagccgaactgcttttatctctcggcgtggcgttcgccgctcattgcgagtcgatctttttatctcttcccttgcccactctttttttctctcagttccttcgctcgccgtaaaaatcgccatgggccatggctgctgctctctctccctatcgcttgcttagcttgtgctaatagctcgaacttgattcagcgatggtggaggatcaggcagcggtgctcggtggcccggcatcgttcattccctcccttcctctttctttctcctcaccagcttttccttcagccacgttggcccagatctggcggccctaatcaagagtgatgcagctttactttcataaagtggtaaaaatgaactaaaggtatgataactaggggtgagtgcgagtggatattggctgctcttgggctacaagctaccccctgtagtgaaggaatactattcttgagactccagagagggtaccacttagtatctattatttttcattcagaatcactaaatcaattgaaatatataattgagactttaaaccagggacatgaagatcccagttatcatagtacccacctgtaagactgttat

SEQ ID NO: 48920 - DNA, 938 bp, Oryza sativa
ttcagtagtcttatagcctgtttgcattgtttgccttgtatgtcgttagattccggctcttccgacgctccggtgtacttcgaaatagtcgctgaggttccttcagcagcagagcaaggcaagtcatacttgtcacttgatcatgttgatcctacattgcaaatgttctattgttttccttcaaatactgcatttgttttgcaataacactatgggatgtttacctattgttacagccatactattttggtaccttgctcctttgttagctcgggttataacatgaatagattttggactaggagttgcttagccatgcttagttcaactagcacacaatggggaaatctcatttaaaatatagcctgtaggtttatatgataatgttggattagtaccaccgctttggtgttagttaattaaaatgaatcacatggtgggctgtgggtgcatagttctgctagtcgcacccatggcaagtaaggaccggttcgcgggaaaccctggaagaactcctcgtacttaccacaagccagcgtgggcaacggctgggcttgtagtgtagcttttctctagctgacgcatcctggcaagggtgggcgtgatggagcggggtgggccctgcgacggcctctgtcgcttccggattcacctaggtatgagaggggactgcccgtcgcccgctggggacgggggtgaaacctgaggtgtggtgtacttggctagagggggttatgcgaagggtcctgtcacagtctctttccgatatgtcgtggtggcatgtcggcgcacggaaacgtgtcgtggggctgtgtcttgtgggtacagttgtacacctctgatcagagtaaaactattcgaatagccatgcccgcggttatgggcggtcaaccagattcaccgtgattagactcatcttagtttagtctaatgaaatt

SEQ ID NO: 48921 - DNA, 739 bp, Oryza sativa
attttggtaccttgctcctttgttagctcgggttataacatgaatagattttggactaggagttgcttagccatgcttagttcaactagcacacaatggggaaatctcatttaaaatatagactgtaggtttatatgataatgttggattagtaccaccgctttggtgttagttaattaaaatgaatcacatggtgggctgtgggtgcatagttctgctagtcgcacccatggcaagtaaggaccggttcgcgggaaaccctggaagaactcctcgtacttaccacaagccagcgtgggcaacggctgggcttgtagtgtagcttttctctagctgacgcatcctggcaagggtgggcgtgatggagcggggtgggccctgcgacggcctctgtcgcttccggattcacctaggtatgagaggggactgcccgtcgcccgctggggacgggggtgaaacctgaggtgtggtgtacttggctagagggggttatgcgaagggtcctgtcacagtctctttccgatatgtcgtggtggcatgtcggcgcacggaaacgtgtcgtggggctgtgtcttgtgggtacagttgtacacctctgatcagagtaaaactattcgaatagccatgcccgcggttatgggcggtcaaccagattcaccgtgattagactcatcttagtttagtctaatgaaattggatggtataggggtaccgagctcgaattcgccctatagtagtc

SEQ ID NO: 48922 - DNA, 2029 bp, Oryza sativa
gcagatctcaggtgaaggtgtggtttcggaggcactgctccttccaatctctcgtgctcgcaagagatcagaagcgaggaagcgagaacagcataggcgcggaggaggaggaactaacaccgggaaagaagcaatcgatcagaacagatcggactcgcggcctccttatctatcaggagagagaggcaatcgtgaaaacgtggacgcgctgttgcggagagagtcgtgggaacgtcggttagtggctgcaaaagaatagcgacgtgacgcacacacgccgctagccagccacgcctcgccctcgccctcggccacgccccggcccggcccgcgcgcgcgtgcgtgtggcattccgacccccacctcaaccagtcaactgggagcctccaataactccctatttaggttgagatattcctcgcttaaatcctgaggtggtattattatccttaacatttattatgggcctttgagatttaataggataagttgggcctagcccaattattctaacaataatttcatttcacagcttgtctgtgaggatgttttgatttgagtaatatattttcccttcccaaaaaataatattggtcaaatatttaaagagttgaattttaataagatacatgtgcatcctagtgagggtgacgaagggagtagtatgcataatacacatcgctgaaaatcttgtcaagtttatttccaatgcaacaaatagtgtcatttggatttcccaataagaagtaaagatcaaattactgaatggcttcgcggaatccaaatgcgaattgatttcgggatgaccttcgaactagctgtctccagcaatttcacagccatttcatcacacaactaggatggttgttcttagcgtaaatatccctggtatctaagtacttgatagactatgttgattcaaatataaaccactttttgtcagtagtgtgatactctctccgtttcataatataaggcacaactatttttttgatgtttcataatataagacatacatgcatgcatacaattaattaggacctcttctccattaaattattgcttttttaaatcatccacccttaaaatttctaattctattggatgcatgcattacatttattagggggatccaaactaggagataataataattgtttcttgatctttgggttatgggtggttgtgtcttatattttggaatggagggagtaataaatatttgagaaagatctctacacctttctcttgtgattgcttgcagtattactaatatttgatcactcttcttcataagtgacaactattcaccacgggaggattactgaccaaggaaaccggtcttcaagccattttcggttaatttctaagagaaaagaattagagggatttattttacaactattatgatgtggaattattttaccttaagccccttcaaacggaatgaagccttacctggatctaccactcttccgtatagattcagatccaaagtctaacttcaacagcggaaaggcaaataatgtgaacagtgtagtcacttcaagaagagtttgtaattaaccatttaatctatccacatttgtaacgatcccatattcccatccacaataaacagacaagaagaccgattctgatatagtgcaatttatactatgctacctacatgttaatgtagcatatctctctgtttacccatctgaagtcggaggattaggttccctttcgcatcagctaaaaatccttagtctatatcttatttggcaatttgtcaagttggcagttttgaagttttcgaagtgttaattgtagtagttacaggtacagatctagtagtgccacttggatgcaccattttcctacacagatgtataaatcgaaaactaatttaatagtgctatttttctagaaaagtctattttacacaatcctaaactgattcagatctactcaaggagctggtctgaacagggtaacaagcagagtggatagaagtagttttaggaaagggttaatttgatgcatg

SEQ ID NO: 48923 - DNA, 906 bp, Oryza sativa
gtcgatcttagccgtagccgattcggactacagccgatcttactatgttctccgatcaatttccatctcgaattctactttgattccatctccatctctgatacttagattaccaaatttggtcgttaacacatgccccccaagtccggaatattggataatgttttggatttgccatacgtcaattccgagaaaactccgttctcgccgtttcccgaccgttattcaagcgctttaaatactaaccattacccccaagaaatctcacaccgtcttcttccgtttccaccgctgaggccaacactgtcctctctctcttcggcgatttctccgacgcacaaggcgatccccaagcgacttcatctccggctagatctccgcccgcggcgatgtcatcctctgccggcccgtctaccgcatcgtcggccgagtatgctgaggtaagttctcatcggctagatcccttttcttcgcaacagattcattttccaactcatcttgttttctccttctcggttcctttggatttgtagcatctctccaacctagttgcaattcccaacctgtcgcatgaaaattactatttcctcggcgcagtcggcaaccctgatcctaccgagttcattatcagcaaaaccaataggattcctttcagattggccaacccaaatctaggtcactagaaaaataccttcaaatcttggccatctctcgataaaactccacccgagaaaagttggactacatggtataagcgcgtatcggctagcaagaaagtcactaggacgagattggaatcggccaagcgcttgcccttaccatagccaattcagctaaagatgaacctctgatggccgccgccacttatatttgggccaacactatcaatgccttttttgtcaacca

SEQ ID NO: 48924 - DNA, 670 bp, Oryza sativa
ggtagatagtaacttgccttgctcgatatcctgagattgattgagattatctaataggttaggagactcctcaagatttagggttaaacatgtaaaattcaaattcaaaagagattcgaataaaatccaaaaataagcaaaataaaataaaataataaaatagcaaaagtagcctcaaaagatagagaaagattttggtccaagtttcattggaattgggtttatattttaaaagatatgggcttctaaagattgaatttgaattaaattgagaaattagaaaggttactgtagaggggcccacccgtcaatcttcctttctttttcttattttcttcttcttcttccttcgtttcttctcttctgtttcttccagggagctgagtggagcgagagaagggcgccggtgttctagttgacgggggacggcaacgtcggcggtgaaacatgttcctgagcgacgcgcatccagggagggtggtgatcaggagagggagtgagggaggaggccggaacggcgatggctagggcttagctccggccggtatgggaggtgccggtggtggctagtctcagagggggaaaggcaggggaaggttaggaaatggatttgcctcgtcgaggcgaaggtattggcgagagggcttggccggtaatgctccgataaggg

SEQ ID NO: 48925 - DNA, 592 bp, Oryza sativa
actatagggcgaattcgagctcggtacccattacaatttacacacaccgcaagtaagcaagctacaacaaaaactgaactccctcttatctaaaacatattttgatatcggtgagaattatatatatatatatatataattacttaaatctgggaatttgatcgtatttgtgttcacatttaaagtggacatcttagatgttaattaatggagaacttgacgatcaagctaaggatggattacatagagattacgtacccctgttcagattcgttgtactaggatgtgtcccatccactacaaagtttgctatatatattttgggacggagagagtaattcggtttgtcaccaagctccgaaggcccctgcaccacactgggagaaaccaaaaaggagatcgagatgaagctaaatatcgatggctcttttgatccagtggaagagcggggggaatcggtatgatcctgagagatgacaatggggccatggtcttttctgcctgcagatttatggagcgctgtaatggggcgcttgaggcagagatccttgcctgcgtggaaggaattgcattagcgcttcactggactatg

SEQ ID NO: 48926 - DNA, 641 bp, Oryza sativa
gtaccccacctaaggttgcacaatagtggaaacctgtccattgtgatcggagatcctgtgaatttggatggcgaaacaaactattgtgtgactgagagaagagacccttgaaaagggctcattttcatgatgtgctgcttcttttctttcctgcatggtaggatggctcatgccttaatgtgatccgagtggcttttccaagcagagctattgacttgcagaacatctcagaaggaacacacctatatgagttcgactgtagtcacagtctatgaggtttgggcgatctcaagatactcatgaaaggcctggagtttgacttatatgctccaaacagaggggatgcgaacggcagcccagtaccagtcaaggttctgagtgaaacctgatcacacaaaactgacaattcaaggcacagtccattgttcagttgtggtctgatgtagctcatttcctaggtggaagttcaactcaacagtctccaccaaaaccctggtatatcaaacagccacaacattgagaacatttcttatgagccttgaaatttggtggggattgttagaataattgggctaggcccaacttatcctattaaatctcaaaggcccataataagtgttaaggataataatactatctca

SEQ ID NO: 48927 - DNA, 891 bp, Oryza sativa
ctgacgggctgttcggctgcgacccgtcacaggtaactagtcacctgtaacgggttaggacttaaacccgtttgaggtgaggtaacctcacctgtgacgggttctatttttaacccgtcacaggtgactagttacctgtgatgggtcgtagctggatgcctcaccgatgacgacatcccgtatgacccgtcagaggtgacggtcatcagtgaccatttcgtttgcccgtcacaggtatcccgtcagagatgtgaggatctggtgtagtggatgcattggttaatggctagtattcctagtcaatttgcgtttctattaattggtaatcgtcttatatatcaaatttcacatatacaggtaccctgatgatcagtacgatcggttctggtccacagatgaagcccatcccttgtcgacaaacatttccacccaaactaccatccaacctagcaccgaatttgcggtgccctcgcctgttctccagaaagccattgtgccgagtggcaactccatgaaactagttttcttttccggccaagtagacgtccttcttcgtaaccacttcgtgatcctgcatttcgctgacttccagaacaacaagtcccgggaatttacagtttccatcgacaacggcgtgcatagcagcccatacagtacaccgtacctaaatggtttgtcagtcaccggcagctggtccagcgattctgaaggcaagtataacttcaccattgctgcaactgccatatcagctctgccccccatcctcaacgcttacgaggtctacggtcgtattgtccatgacaatccaacaacgttctcccaagattgtaagctcgctatatctgtcggtctcggttgaggtacactaaacaaacattatcaactctccct

SEQ ID NO: 48928 - DNA, 577 bp, Oryza sativa
catggaaaattattattttttatttcttcaactgtgaaaggctcatccagctcggataggtcagaccgccagttcctgcagggattgaaagttaatcgtcgaagagcgttcccactgttccccgagatgctgcaggaaaaaactaaactgttcactgctggaaaatgttagcagtgaaaaaagttaaccctgaaaataaggaagtgcaccaaatgttttattatcttataattttgagtaaaaccttgggtattgtagttagggttagaagaaaagctcatgactcgttagctcgctcatctcgtagccagctcgcctcaactcaactcagcttgttgtatttcctcaacgagttgggctaccatttcagcttgttagtgataacgagcttaacaagctgggggcatatgatatgtcatatgacaaccattgacccaccaacacttcaggaggcccaaataaagaagtcatatggactgtcactagatagaccaaacctagattttctattttggaacatgccctcgtatcactcagccctagggcagcacgggcggcaaccaggcgagaaccacca

SEQ ID NO: 48929 - DNA, 880 bp, Oryza sativa
attcttgatttttttaactttaagttttcattccaaattgagtacaacttcaagcttattaattcctgagtttggaattattgaattaattaaaacgataaattcaaactccaccatgacaacaaataggtagtgagtaattcctgattttcaaattattaattagattatgaaatgctatagtggacactgcaaaccaaactgaccacaatccattatgtaccaattattaattttagaaaaaaaatcatgaaaaatctataaatcagagtccaagccatgtacaactcaatacttattaattccaaattttattcattagattaagaaaagaactaaatcaagaatccaatattaagtaaaggtattactaattaattccatcttcgcaaattattaacctaagaatatgaaagtaacaaatgagatgatagctaagatgtattatatatatactttataatagctaatttgaattttgaaattataaatttgaaaaatcgttatgtccttagaacaatgtaataattgtttacatactattaaaatttatctctatagtaattgggcattgcgagtcagctgccacattaaaaaaaagataaagacatgattaagtgatcatatcatcgtgaccgtatattatatactgagaatttgtattgcagataccgtgacactttatattagttcccttttctttctaaaattttgaattaatgaacataaattgtatctatttgaacttagttaacactttcttagttaaatttttgaatgcaaaatttgtagttacaaatagtgactaacatggactatttttgcatcgtaatatgctataattttgacaatgtaatttccgaactaatttgtgcattaa

SEQ ID NO: 48930 - DNA, 539 bp, Oryza sativa
cctagctcgagccagcttgtttggctcgcgagctcaaccacccaaaatggcgactgtgggtctgcaatggtggaagctccaatccagggcattgtgccgtcgatgggtggcgaggaggcatcgtcgataatgcgtgcggccatggcaagcgatgccatgagaataccacatggacgcgcgggcgtgggatgcgacgagttgaggccgacaggtgacgggtgggcgggcgagctcgtgcaaccactgatatcccacaccaacgagaacatgcgctcacatcgctgccaatgtaagggcctgcactcgcttccgacgtccccgtcgagggagggtgacagggacgcttcctctgagctcaacttggcgagggcctgtgcgaccactgagctcctgcttgccgagttgccgtccacgctcccaccactccactcatccgatgccgctgcagcatcgccgtcctttgtgtgagaatggaggcactacacatttgacattttgacttatccaattccaatttgacgagtcacgagtttttcgtg

SEQ ID NO: 48931 - DNA, 764 bp, Oryza sativa
cccattcgaaaagaaaaggggaaaaagaaaaagaaaaaggaagaaaaggattttccctggaattaaaatattgcttgctcaatttgaattggttaaaattatctctagggctctgaaaattccaataaaaatcttgttagcgaatttcgatatgtagaactccagaaaaattccacatgccagtttcgattattatttgcattactttattagggttttctcttgatttgtaccggcattttcttagggtcatttataaattaaattttaggcttgggaggagaacttcagggtgtgacatgggccagactatgtggtccgttaagcatagtgcctgtttctattatgaatcagcagtgatattttcaatttataccactgttggttggtattttcaaatcatatcattgttggttcatatcgagaaccgacagtgataattgaagtatcattgctgtttattgttatgaacattagtgttggctcggaataccgtttctatgctataatgaggacatgttagtagaaagaaggaattgtaatggggttgatgaggtgggagaaatcagtaccattgagttgagacctaacatctggagagtgtagaattagaagagtaatagacctataattgggacatattgtatggaggctgccttaagaaattaaacaaagaagttaccacgttagcttctatactaacaggtggagattaaaaattttttatggcatttctctttgggcaataggtttcataagcattg

SEQ ID NO: 48932 - DNA, 703 bp, Oryza sativa
ctcccctcgcccatgccggatctagcggccggaccgccgccgcgcctccccacccgcccctgcaggatctggcggccgcgccgctgccgccgccctcgccggctccgcgccgccacgcctcccctcccgccctgccagatctggcggctgggccgccgccgccgcccccgctggctcggcgccgctgcgcctcccctcccgcccctgccggatttggcggccgggccgtcgccgccgccccagccgccacggcatagagaaagagaggagagatagagaagaagtcgaagagatagaggagaagtggagaagagggagccggccgaccttatgtcctcatgtgggcccccgctgggagaggagacatatatatatacagtggcagaagtcatctcaaacgggctgggacttaaagccgtttgaggtgagtaaacctcacctctgacgggctgttcggctgcgacccgtcacaggtaactagtcacctgtaacgggttaggacttaaacccgtttgaggtgaggtaacctcacctgtgacgggttctatttttaacccgtcacaggtgactagttacctgtgatgggtcgtagctggatgcctcaccgatgacgacatcccgtatgacccgtcagaggtgacggtcatcagtgaccatttcgtttgaccgtcacaggtatcccgtcagagatgtgaggatctgg

SEQ ID NO: 48933 - DNA, 518 bp, Oryza sativa
ctctgatagatctaggaggaagaggagtaaggtcggtggtgtggacgcctctagattcagcctacgcaaggtcggggacggctagatccatcaaccatgaaactagggattcgtcaaccatgaaaccggtggcaacataagtcccatgatttttctcacctttttcttatctctctccactctataccttctcctttcatagatccaagcagaagatagaggagatctgcacgacaacggtctcgagtaggcggtagcagtctagggcggattcttgctaagtagtgtcaaagagacattgggtgcataactgggtcgcgattcggttggacttggctttgtgacatataccacgttacttgtcctggtaacatcgttcctatcctaggaccacgcgaacaatctcatccctcctgtgtaaaaacctaaaaaaaattattgtctcacatgcattgctcgactttgtgacatagagtaacaccatttgccatatgcagtactccctccgtttcatattg

SEQ ID NO: 48934 - DNA, 1383 bp, Oryza sativa
acagaaactccagccgaacattgtacttgtccccttttttggtgggtagcgagtagcagctccgttcaccggtaacggatgttgggaagctcctgagcgtgtagagtgtctggtagcgagggcccttccagtcgtccttgtacacggtggtcacccttctattttcgccggcgtcgacgtacgcaccgtcggagacgtaggtgattccgccaaccaggctgtctgttctggaatcttgatccaggccacagtcgatgcttaggaaacctaatacacacagaaaagaaaaatgacgttacacacaagtgatcgaacggaagaatcaaaatagccaaatctcgtcttcattttgaagcaaaccaagacaatacccactggtgtacagggcggaaaaatctcaggaaattggtatggaacaagaggggttttttcatctcaagattttttttcaaacaccgtgttttttgtttataagagcaccgtgttttttgtttatgcgcttgaaaaagcatcgagaggtcttatcgtctaaatttgttgtgcagaccataagagatcaccaaaggaaatagccatatttttaccaaagaaaataaccgtattttcacacgcagttcttttaccaaagacggctatacaattcaggagacactaaaaaaacggccagcccaaccagctatggttaaatccagtcccttggactctcctcgtccgctccctcccactcccaggcgtcatggcaccatcattgtcaaccacagctagaaagctgcatactttccctccactacccagccagagtgccacactgattcagcagcatcggcgggcctagacagcaacagtgagcaacagcttccactactagaaaaatggttattaccaataccaggcttttatttctatatggagtaaaaaaataccctctggttactgcttacaaaaatagccaaaggcccccatgatttagtcccgcttggtcgaattttacagtcggagccataagaggttcgcttacgaaaaaagatgaacgaattatcataggtgagatgtaaagatgttagcatgcgaaaaggtacgagcgctcaaaaaatccacgcagctaagtctccatctattattttatcttcatcccttaggctgtgtttgatacttggggttgggaacccaactccaccgcacggaaaacggagcggtccattagcgtgtgattaattaagtattagttaattttttttcaaaaatggattaatttgtttttttaaagcaactttcgtatagaaactttttgcaaaaaaacacaccatttagcagtttgaaaagcgtgcacgcggaaaacgagggaaaggggttgggaaacttgtggaaagaacgcagccttag

SEQ ID NO: 48935 - DNA, 568 bp, Oryza sativa
aatggttattaccaataccaggcttttatttctatatggagtaaaaaaataccctctggttactgcttacaaaaatagccaaaggcccccatgatttagtcccgcttggtcgaattttacagtcggagccataagaggttcgcttacgaaaaaagatgaacgaattatcataggtgagatgtaaagatgttagcatgcgaaaaggtacgagcgctcaaaaaatccacgcagctaagtctccatctattattttatcttcatcccttaggctgtgtttgatacttggggttgggaacccaactccaccgcacggaaaacggagcggtccattagcgtgtgattaattaagtattagttaattttttttcaaaaatggattaatttgtttttttaaagcaactttcgtatagaaactttttgcaaaaaaacacaccatttagcagtttgaaaagcgtgcacgcggaaaacgagggaaaggggttgggaaacttgtggaaagaacgcagccttagtctgctcactccctccctcaccctccactcccctcgcctaccctccccctgatcta

SEQ ID NO: 48936 - DNA, 1265 bp, Oryza sativa
cctaatcaatgatcctggaaatatctatctaaagataagtcatatcaaattcctctagatgcgtgagccatttggagacattagtatgggaataagaaaatatggatgcatgtttggctcccatattctgccctacagcttataagccactgtcaaaatttaaattttaaaactaacatgatttgaaagtagattttgcatgttttttcatcaaagtttattttttacattgacttttaaaacttttaaactgctgccaaaataatgctaattataaaagttttacacacaaattaatatttttattttgttaataagccgtacagtttataatcagcactagagttacctacagttggacggatacagtgttgatgtatgccttcaattgtgatatctacgaattttgaaagctaagcacatgtgttgaaggaattctgatatattatagaccatataatatatattattcttgctctactttcagattcagattgccccatatgtaataaagaaagattcctccatatgtgtctttcaaatttaaaactacaagagaaaagcctacttttggtcatgcaactgtagccttggtccgttttcatccctcaactacatatgaaaccgattactgctagtctcattctctcgaagatgtggcaccacatggatagtacatgcgatgcaataaacctccactagttcttactcctactccctccgtcccattttaagtgcaactatcagtttctacgctaaactttgatcgttcgtcttatttaaaattttttatttagtatttttgttgttatgagatgataaaacatgaatagtactttactcatgacttatgttcttttaattttttcaaataaaacggacgaatgggaaaaaggggtttttaaagggggaaaaaccccaaaaaccccgggggggggaaccatggctgcacttaaaatgggacggagggagtagttaggatgggtttatataattttaattgcaccagaatgcaactgctcatcatttaagtggtgttttccggtgattttaaatagcataaaactatccccattaatgtcagtccgaatctcagatgtggataatgaaaggcagtgaaaattttatgtatacttacaaatacttgagggcactaaacaatgtgaaattataggatatctggccttgcaactcgctggtggagagatcactgcataataattttcaagcaatacaacataaatgaaaggttccaaactatatac

SEQ ID NO: 48937 - DNA, 940 bp, Oryza sativa
cttgaagaagagttgaagtctcgggggcattatagccgatgacaggaggagatggaccacctccatttggaataaggcctagagcatactctatgtccctgccactattgctctggtgaggaaggaagaactcccttatctgcaagtcaggaaagaaaattaattacgttatgaatcggctaagcaattatttaaacggagttaattaaatgaaggcatacctaagggataacatctggaaagagatctgtcatgtacatagaagccgattgatggaatagatgcagtttccattcaccctaccatctgtcaaagtttttgctcctgaactttgccagccctatattttcaatgctgcccagaggaggtccttggagattgagcagccgatccatcatcaaggctgatgagatttcccctcggcacaggatcttatcggcaaagaataagctgattaggagttggcccattccaagttgtctagctaagctcattggatgatagaactcataagagacttggatgtttttcccctgatggatgccgacagaaagcatgcatgggctgattgcagctgagaaaacttccctggacttttggtatctttcatgattgatatcttcaaatctaaagtccgatgggagctcaaggtttgctgaatcttcataaggaaaccaaactcgaacatctttttgaaagccatcatagaaactgcagaaccagtccttgagcagttcagccgataattttgctccggcatcggttggtgtggatgcatattctccatatgacatgcatctgcgatgagtgcgctcttctccatcatcttctacaatcggctccagtcttgggaattcggcttctgtcaaagatggccgattgacaactttcatgaccatcagatttaacgaagtctgcaatagccaccatggtccacctg

SEQ ID NO: 48938 - DNA, 598 bp, Oryza sativa
tacaagagaaaagcctacttttggtcatgcaactgtagccttggtccgttttcatccctcaactacatatgaaaccgattactgctagtctcattctctcgaagatgtggcaccacatggatagtacatgcgatgcaataaacctccactagttcttactcctactccctccgtcccattttaagtgcaactatcagtttctacgctaaactttgatcgttcgtcttatttaaaattttttatttagtatttttgttgttatgagatgataaaacatgaatagtactttactcatgacttatgttcttttaattttttcaaataaaacggacgatggaagttagacacggaaaccatggctgcacttaaaatgggacggagggagtagttaggatgggtttatataattttaattgcaccagaatgcaactgctcatcatttagttggtgttttccggtgattttaaatagcataaaactatccccattaatgtcagtcaggaatttcagatgtggctaatgaaaggcagtgaaaattttatgtatacttacaaatacttgagggcactaaacaatgtgaaattataggatatttgcc

SEQ ID NO: 48939 - DNA, 1528 bp, Oryza sativa
cgacaggtagctcaaaaaaaggcaataacatggctaatgaatggtagtattttctgagaaggattggttccaatggaatcggtacaaatattattatgcaaaggattgttttctggaagtaaagaaactggtcaggacacatgcatgtaaatagacgcatcaagacacaatacttcttagaagtgttcgttgagggcaacacacaactcgacacaattaataggcgagaaaataatccaccaaaacagaactattagttctagaaaaagggcccaaacctgtataaagctctgtctttcaattgatctatctagcattaggtcaggtaactagcccccatcattgtcatggatagaaaacatagataagtccccatccaccatgtttcggtctaaaacttctccgctaataactagttgagccctcgcctcttcttcttgttcatccagcttaaagcgccatcgtctttgacatgaacagaagacaatcgcacagagacggagaagagctcctctcgcggttcttcgcttctccgttatcgtaccaagtgctgccggctgggcagaccataaaccttgccaaacagatttgccatgctgccctgtgcttcgcatcaaagacattaaacagggagccttagcttgaagtaagagcaaaatatatgaacacacgcaagaccattaatcgataatgttaagctctgatactattatagagtagggcgatgcatctttattggatcattttttttgtttctgagttttttttctactctttaatttggtgccagtgtacagtagaataatcttgtaccatgaaaattaaaatgaattcctagcagattaactgctacacaaaaaggtacgttggtaactgataacactaagttccatatcatcctatatatcggatgatcgaacaattcaatggactgtttatgctgacagtctcaaactaaatatgattacataaatggttcattgatgactctgagattctagtattggtttcattggagaaggggatcggtccgatcgattggataaatagagatcacgctctgttctcttccgaaactgaactaagatccatgatccaagcatccaatgtgctctatgtaccagatattctgatacttggtttggccagtttagggtgttgaatcattagtaaatcaatcaacagtggtatgcaactttaagctagatattctgatacttggtttggccagtttagggtgggggaatcattggtaaatcaatcaacaatggtatgcaacttaacctagaaatagaaatactccctccgttttttaatatatgaggccgttaattttttttaaacacgtttaactattcatcttattctctttgctgaaatagaaatactcctccaactccgccttcttgggagggcttggcctgagggatagagatgacatatgggcccagataattttttattattctctttgctggcgtcacatgtgctagatcaagtcaaagccgctaaaaatagtacttggggg

SEQ ID NO: 48940 - DNA, 1499 bp, Oryza sativa
ccccaagcatccaatgtgctctatgtaccagatattctgatacttggtttggccagtttagggtgttgaatcattagcaaatcaatcaacagtggtctgcaactttaagctagatattctgatacttggtttggccagtttagggtgttggaatcattggtaaatcaatcaacaatggtatgcaacttaacctagaaatagaaatactccctccgttttttaatatatgaggccgttaattttttttaaacacgtttaactattcatcttattctctttgctgaaatagaaatactccctccaactccgcctccttgggagggcttggcctgagggatagagatgacatatgggcccagataattttttattattctctttgctggcgtcacatgtgctagatcaagtcaaagccgctaaaaatagtacttggggggggtatttgtccggtacaaatagttgagggtacaaaacgtgtgttatttgagtttaagtggataattcggtcgactgcgatagttcaatagctttcggactttttccttttattgtcacttgatttatcgtcaaatgttttttaagcataacttaaaattttatatatttgcaaaataaaatttaaatagaacgaatgatgaaacatttataaaaaaatcaatggcgtcatatattaaaaaacagaggtagtactctataaccaaaacttgtacctcgcttgctttaattgataaccggctgcctgtagttagtaggaacgtatgcagagaagagaaagtcaagatagcagctcaggagtactctgaataaaacccgctcttcgcattggtaccgtctctattattgagataaaaatacaagtgatgtagatagccacattcttaaatgtagttactttgttttctttcatcgaccatctatagtatttctctccctgtaaacacaggtggaactgggtacccgtgacattgcatatctacactcctttataattctttataagtagagaaaatgtcaccccacctacttctgttttaattttacaacttactcccttacacattttaatattaaaaacaattaaatctaaatgaatagttatagaatcaaattagggtcgtattccatatgatgaaaagattggaacccatttcatagaaaaaatatttatagctattttagataactaggaaggtagcccgcgcacatgcatgggcatgtacgtaaaattttattacgaatgtccatgtgtggatggttttctatcaaaaatattctttcactttatcatacactaaaattgaacttacttaacatgctttgaacgctggttacttgcaacatataaattctgaaattaaattactttaaaccgtgttgtttctaattcatgagaaaattttgtgttgaaacaatagatgtgtttcctatgaatgtccaatttttttgttagattctgtaaaaaaaaaaaaatatattcattttattagtcctgctaaaat

SEQ ID NO: 48941 - DNA, 761 bp, Oryza sativa
tcaatgtaaaaaataaactttgatgaaaaaacatgcaaaatctactttcaaatcatgttagttttaaaatttaaattttgacagtggcttataagctgtagggcagaatatgggagccaaacatgcatccatattttcttattcccatactaatgtctccaaatggctcacgcatctagaggaatttgatatgacttatctttagatagatatttccaggatcattgattaggcaatgaaatgttgcaaaacatggagcatcatgatccaaacagatgcttgcaagacgaagtatatctgattgctgtgtaattttcatttttgccttaaacgaattcttttatgtgagattgccacttgcatgatggagtataccggtttactttaaaaaaaaaaattcgagtgaattatttcatgtccgattggcactaagccaacaatcttcacgcttttgccatttactagtaatcatgcacgtgcaatgcacgtttttacatataaaaacactcaaaaattattgcattttcatgttgtgttacccaaaacacacaaacatatttttaagaaccggtgattaaaaagggtcacacttggtgcggcgagggaatttgagactgggaactcatgatcccaacatattcaccctgataaaatttcactaaatattcttttgagctattttagagacaaaattattgtttgttctttgtatgcctctaccctgcaacaatcaatcgttaagatcatctgaaaattggatg

SEQ ID NO: 48942 - DNA, 543 bp, Oryza sativa
tttaaccatagataaaatcaatctgttttcagtaaaaaagattcaatacttagaatgccatatatgtgcatgtaaacttagtcgcatccactgtgaggtttcatacgcatcaagatatttgaccatttgttttgtcccattacataggttcagagcttgaccaaggtgaatcacaggaatcttgtttctttgattggttactgctgggagaaggatcatttagcacttgtctacgagtacatgtctagtggcaatcttagtgattatctgagaggtttgtccattgcaatctttaagtattgaatatttgggaaatctgagggaggatactgggcatatacattacgtagaccaactagtcattccttccttacaacttaaatactctgcatgaccgaaccagctcacagcgaagccaattaactcatgttgcataacagtttgcagaactatgacaagtagtactgcttacctggagagtgcatagttagacattttgagaaaaaaaaaagactggagagagcatagttagtctctacctaa

SEQ ID NO: 48943 - DNA, 690 bp, Oryza sativa
gtgtgtgtttttcgtatcagctagagtaaggaacaaagtagaaacagtgcacccgcatagccaatggcagcttgggggagctatggctcatggataggaaagattgacctttgttgtcgaaagacgcaacaattttccttaattaaaacactaaagtataatattgaatttcgaaactctgtcttacagcctaccccttcggaaattctttggtacttgattaattgctttgacgggaaaatggggaccccccattcccatttcattgacaccgccgcccgccggatctgcactccaaaacactactagaaaaacattttcatagtcggccaaaaaaaaaaaaaaaaaaaaaccccccaaatttttgggggggcccctttttggaaaacattttttgacatacggctagtcgtgactatcgacgatccttaaatcatagtatatgaccatcaatacctacatataatagaataaaatatggtattcaactgagtggtagggtttattactaatcatttccactagcgttggtatatatttggatgcatgcaacaaacaactaaagttgagagggaataaacaagaagaaagaggagaaccaaacacatatccaaactaaaggtagttttggacccaaaagcccaattaaacacctccaaatgggcccaaccaccatgcccatggactaag

SEQ ID NO: 48944 - DNA, 680 bp, Oryza sativa
  unsure (1)..(680): unsure at all n locations
atgccatgatgatgtgcatacaagatatggcttctcaaaggctaatgatgtccgccgtggtcttgcaattgaaggaaaaccatgatttggagnaagctcatggggatgggttctttggaaaatgtagtaagagataacacatcttcgatgtccatgtttagtccattggtaagatgaaaaaaaccattgatagctcgctttggaacatactgatggctctcttcttcaagtctaaaataaaacaactgatttctctctagacgatttcttctgtgttaagacacaatgatttatatacagtttgtcttcataaacaatgccggtaggatccttaataggtgtgggtattgcaaagcaatagtttgcttcagtgtaacagtaagctgtttgtgagctttctaactatagggtatcattgctcaaataatatgtaacaaagatatcgaaaatgtttacatgtttcgttatcatatccttttctgtgttgatttttacatactcattatgtattttttaaataatagtactgattatggtaattaatgctgattacgggggtggggattgcgcagcgcgagttgagcagctggcgcttgcgcgcccactaggaagccccaggtgaagagtgatcgctgccgcggcttttggcactaggctttggctgatgcaggccatggaca

SEQ ID NO: 48945 - DNA, 721 bp, Oryza sativa
cggctcgggggccgatctggtcctccagtcccgtggaccggtggtgaaccacccgcgtggtcccggtccatggtggaccggcccccttaacctgcttccgagtgggcccgtgtgccggcgcccttcccctctcttcctagccactgaccagtgggacccgcctgtcggcgccgccccccctgagacgtcagccctggaaattatggcgcaataaattatataagggctttctgttatagtaataaacacagtgaatcttctaaaattcatatgtaattcatccgagctccgtttaagcccattcaagtcgcagtaaatcaagaaaaatgtgtaaaaaaaaaaaattttccccccccccaaaatttttttaaaaaacaaaaaaattggtttttgttctctgtttcagtagtcttatagcctgtttgcattgtttgccttgtatgtcgttagattccggctcttccgacgctccggtgtacttcgaaatagtcgctgaggttccttcagcagcagagcaaggcaagtcatacttgtcacttgatcatgttgatcctacattgcaaatgttctattgttttccttcaaatactgcatttgttttgcaataacactatgggatgtttacctattgttacagccatactattttggtaccttgctcctttgttagctcgggttataacatgaatagattttgggggtaccgagctcgaattcgccc

SEQ ID NO: 48946 - DNA, 577 bp, Oryza sativa
  unsure (1)..(577): unsure at all n locations
tattaccaataccaggcttttatttctatatggagtaaaaaaataccctctggttactgcttacaaaaatagccaaaggcccccatgatttagtcccgcttggtcgaattttacagtcggagccataagaggttcgcttacgaaaaaagatgaacgaattatcataggtgagatgtaaagatgttagcatgcgaaaaggtacgagcgctcaaaaaatccacgcagctaagtctccatctattattttatcttcatcccttaggctgtgtttgatacttggggttgggaacccaactccaccgcacggaaaacggagcggtccattagcgtgtgattaattaagtattagttaattttttttcaaaaatggattaatttgtttttttaaagcaactttcgtatagaaactttttgcaaaaaaacacaccatttagcagtttgaaaagcgtgcacgcggaaaacgagggaaaggggttgggaaacttgtggaaagaacgcagccttagtntgctaacttccttccttacccttcactcccctcgcctacccttcccctgatctacctcaggggtggaag

SEQ ID NO: 48947 - DNA, 1215 bp, Oryza sativa
aactcatatatgtgcattttttatctattgttttcatataatggcggatgaaaacaaactttatattaactgtagagctcaatgagacctacaccttttttatgactttttgatttatggccgtttcgatatctgaacatatgttgtaaggtcttggatctatttgcgtaagtgaatatttaaaatttataaaaaatttcagatggagacgtaacctatatgaaagttgtagatctaaatgggatctacaattttttagttgacaaaattttcatctaagttcatatattgtgttaaatatgttcggatagcagtactctcaaaataatatcagttgtttttaagacatgtgtttgtaggttcgatagtaaggatgctttcgatggagagagatgtcttgcttgagtcatatgtatgaatataggtgccttgtgggaagtgaattgtgaccatataggtgcctaataaaataccaaatatttattcagatttttttagcaccttcaaaaaaaagccgggtacacccctatataaactggcacctatagtgtgacataggtgccttttcaagaatcagcaccaatgactatccaagtcattggtgccgaataatttgtgtggcactgaaatcggtacctactagaaaattggcgtggcgttttggcatgccggctgatagctggtttctctttgtaggttttactaaattttatttattttatataagattaattaaaaatgttatatttggcagggcctccaaaaacgttgtgagtagataaagagaggaattattgcattgggatttgataactgcttatatctacgggggtttttggggttttttttaaaaaattggggttccccaaaggcccccgggtgaatatttcgaagtatgggtgtgaatgttgggtgtttgggatgatatgtacatatattgggtagagcttggttcatcaagtactctctccatctcaaaatataaacatttctgaaggcttcgtgagaattaaaaaaatatgtgaaataaaatatgaaaaaaattaattgttgagaagataaagtaggtgaaaaattaaatgggagatggttgtgattggcttcatgggaattaagaaaatatgtgaaataaaatgtgaaaaaaaataatagttgagaagataaagtaggtgaaaaattaaatgggagatggggtaccgagctcgaattcgccct

SEQ ID NO: 48948 - DNA, 517 bp, Oryza sativa
atgaatcatattatatgtagataattaactttattggcactaaataatactccaatcaaggtgtgttttgttgtctattgttttggaaataatctcaatatttgaaaatctaattaagatcagttatagttttgctatttctcctagagtctcgatcatctgaattttgtagtttttaaggagttgagttttttgctactgtgccacaattttatcctagagtctcgatcatccaaattttgtagtttttagggcgttgtgttttttgctactgtggcacaatattttgctaggtgttgtttgtcagaaaaattggtatgatgataaaactgtaacggcatgtacaaataacaataaattgcagactgcacacagtagtcatatggatatatatatatacacacacacacacaaaaaaaagacatagggaaaattaattattactatcggtcacaaaatataataaattttagggtatgacacaaatatgaaggaagtaggtagaattaaattgggg

SEQ ID NO: 48949 - DNA, 696 bp, Oryza sativa
  unsure (1)..(696): unsure at all n locations
accctaatagtatcagagcttaacattatcgattaatggtcttgcgtgtgttcatatattttgctcttacttcaagctaaggctccctgtttaatgtctttgatgcgaagcacaaggcagcatggcaaatctgcttggcaaggtttatggtctgcccagccggcagcacttggtacgataacggagaagcgaagaaccgcgagaggagctcttctccgtctatgtgcgattgtcttctgttcatgtcaaagacgatggcgctttaagctggatgaacaagaagaagaggcgagggctcaactagttattagcggagtaaagaatttttttttttaaaaagtgaaaaaaacccccccccggggaaaaaaaaacatggtggatggggacttatctatgttatctatccatgacaatgatgggggctagttacctgacctaatgctagatagatcaattgaaagacagagctttatacaggtttgggccctttttctagaactaatagttctgttctggtggatattttctcccctattaattgtgtcgagttgtgtgttgcccctcaacgaacacttataagaagtattgtgtcttgatgcgtctatttacatgcatgtgtactgaccagtttctttacttncagaaaacaatcctttgcataataatatttggacccgatccattgggaccaatcct

SEQ ID NO: 48950 - DNA, 1392 bp, Oryza sativa
cctcaacgaacacttctaagaagtattgtgtcttgatgcgtctatttacatgcatgtgtcctgaccagtttctttacttccagaaaacaatcctttgcataataatatttgtaccgattccattggaaccaatccttctcagaaaatactaccattcattagccatgttattgcctttttttgagctacctgtcgacctgacagtaatggaaggaaaagcagttgctgtttcattatttcaaactcaatcgcatatatgcagctatatgggctatggttttaagtaggtgaatatctcattggtggacatactcttgcttcaatctttctttgtggtatagcatttgagaaacatcaattctaatgttggttaagtgtataattgaagaactagcataccttcaggtttcatgaaacattactgtttgcttacgaattttcatgtgccatacttgatatttggtgtcaagtttttctttctcaatttacaaaattcaaatagaccttgccatatgacaatttgaaatacttgaatatgaatcaaatttagatctcctttttgcccgcagcaacgcgtggggtgctgactagtttgtattgattaccttattctttttaaccagcttggacattttttattggttcaactagatgctttgtataattgcttagtcatgcttagaaacattagtatcattttatgcatgaataactaatgaatcacttatgattaatgatggttaattaatgatagctcatgatggttagtcgtgtttagttaattaatattcatattaaaacttgattaatgatgcgttgtgagctcatagttgtgttggttgtacaaatgataattaagaaccgacccgcaagctactagtgtgaagcatttatcgtactaaccacaagccagcatgagcgatgactggactatttttatagcatgattcattgtgaggtaccagactgagaagtgacagagataagcccatgggaatcgctggggagtcttttatgggttatggatagatgacaatccgggaatggttaactgctttgagttgtattatgtgaaagatcttgtcacgatttttcctttatagtaccatggtattatctcggggcatggcaacatgtgtggaaacatatcttgtgggtacattgctacacctctagctagagtaaaactattcgaatagtcatgcccaaagttatgggcaagcctagcaaatgcttttcgtgagtagtcccacactactcattagtgactaaattggtgatgataatttgttagctcttgttatggagtttatatctcttcagccgagtttgatagttcggagatggtttgggccttgtatgttgtatagtgttaatcaacattgttattta

SEQ ID NO: 48951 - DNA, 682 bp, Oryza sativa
atatttggtgtcaaggttttctttctcaaattacaaaaattcaaatagacccttgccatatgacaatttaaaatacttgaatatgaatcaaatttagatctcctttttgcccgcagcaacgcgtggggtgctgactagtttgtattgattaccttattctttttaaccagcttggacatttttattggttcaactagatgctttgtataatcgcttagtcatgcttagcaacattagtatcattttatgcatgaataactaatgaatcacttatgattaatgatggttaattaatgatagctcatgatggttagtcgtgtttagttaattaaatataaaaaaattttttttttcccccaaatttaaattttttaaaaaaaacactttgattaatgatgcgttgtgagctcatagttgtgttggttgtacaaatgataattaagaaccgacccgcaagctactagtgtgaagcatttatcgtactaaccacaagccagcatgagcgatgactggactatttttatagcatgattcattgtgaggtaccagactgagaagtgacagagataagcccatgggaatcgctggggagtcttttatgggttatggatagatgacaatccgggaatggtaaaaagctttgagttgtattatgtgaaagatcttgtcacgatttttcctt

SEQ ID NO: 48952 - DNA, 784 bp, Oryza sativa
atttgaattcaaaatcaaatttgaatcgggtatgtaaactttttgacttataaactttgggtctataaactttatgtgtataaactttatgtgtataaactttagatgtataggaatactatatataaaaatatttgaattcaaattcaaatttgaataggatataattcaaattgaaatttgaatcgaatatgtaaacttttgacttataaacttttgttctataaactttagctgtataaactttaaatgtatagaaatactatatataaaaaatatttgaattcaaattcaaaattgaatcagatataattcaaattcaaatttgaatcgggtatataaacttgacttataaactttgggtctataaactttagttctataaactttagatgtatagaaatactgtatataaaaaatatttggatttaaattcaaatttgaatcggatatataaacttttgatttataaactttgaatctctaaactttagatgtgtaaacttgaggtgtacaaactttaggtgtataataattttattaaaatagaaaagtaatgcggtgccaaaaaaaaggaaaccacgtcgaggagagggaggcgacccgatcgctaggggcgatcgcccattaggagtttcgatcaacagatgcactagtgaaaaaaaaaaggaagtggaagaagagacctgctggctggtcgactgcaagaacccctgattccagcacgagtagtacaacaacgagagccaagagccccatggagtcttgaattcctgataattaa

SEQ ID NO: 48953 - DNA, 588 bp, Oryza sativa
agggcgaattcgagctcggtacccatataagggtgctacatcccgcccatgcatgtcggtctcaatatgtacctaaaaccaaataaaacacatgagtataaaaatactcggcaagtgcaatatggaactagaaacacatatacacatcattggcaataaagcatgaacagaaggttttctttctttgataggaaacacattttcaaataccaagtcaaagaagatagtagttcccattccgggctggcatgaattgaaatagtatgttctataccggacaatagtgaatacatactaacatttgccggcaaagccgagtaagggtgatcagctcttgcccacaggaatttgaataaagaatcaaattgcactcccatgactacgcatggtagttgaataattgaaaccggaatcaaagaaccaaattaaaaccatattgcacattcatggcaaacagggaacttgaattatttacccagaaccagaatccgggatattgaaacatgaataacatcgtcaacatatgataaacaagaaaagcaaaattgtgtgaaccacaatatgaatataagcgggcacatgtcacat

SEQ ID NO: 48954 - DNA, 638 bp, Oryza sativa
atgtggtccgttaagcatagtgcctgtttctattatgaatcagcagtgatattttcaatttataccactgttggttggtattttcaaatcatatcattgttggttcatatcgagaaccgacagtgataattgaagtatcattgctgtttattgttatgaacattagtgttggctcggaataccgtttctatgctataatgaggacatgttagtagaaagaaggaattgtaatggggttgatgaggtgggagaaatcagtaccattgagttgagacctaacatctggagagtgtagaattagaagagtaatagacctataattgggacatattgtatggaggctgccttaagaaattaaacaaagaagttaccacgttagcttctatactaacaggtggagattaaaaattttttatggcatttctctttgggcaataggtttcataagcattgactgcggcctggaggcagacagcagctacctgggcgacctgaccggcctcacttacgtcccagacggcccgtacatcgacggcggcgagaatcagaaggtgaccaccgtataccgcaatcgctggtggggccctgacacacgtactctccacacggtcaggagcttcccatctgccaagggtcag

SEQ ID NO: 48955 - DNA, 700 bp, Oryza sativa
  unsure (1)..(700): unsure at all n locations
atatagtttcataatttaatttatatgagttaaaccactgtaaataatattagttttgtaaatgatcaatccatgtcgtcaacaaactattggatagaatcgatattgatatcatcatcaaggacttcgtatctaaaaatatccgaaaaattttaagctaacaggttacaatgtttttatatattataatttatagacgcaatttcaatgttatcggcaatagcttgttgctgtgaaaactctggatcgaccctgtttagagctatggataaagattactccgccaacacctctgcctttacgaaagtaatcaattttttcccaaattttccaaaaatttttttggggggcccccccccccggggtgtaaattaagatgtatcgtcgctgcacaaaaccatcaaatggagaggtcacgcatactcaacaaccaattacgcatatccatcaggcaagagctgaccgattacacacacccaagtaagcaagctacaacaaaagataaactcactcttactaaaacatattttgatatccatgagaattatatatatagtacttaaatctgggactttggtcttgtgttcacatgtaaactggacatcttagatgttaattaacaaagagctngatgatcaagctaaggatggattacacaaagatgatgcctgattatctatacttattttggagttcacca

SEQ ID NO: 48956 - DNA, 608 bp, Oryza sativa
ctattttaaaaaacggaatctgtcggtcggagtttttttggaatttttcggaaacggaaacgaattcgaaaatattttctcggaaacggaatcggaaatgataaggccagtttccgtcggaactcggaataagtcggaaactttccagaaattttctaactaaaataccctggattcatttttaagcactgaatagtgaataccatggtgtttggctgttattctttaaaatatatttgttatgcaaatctgaagttatataagaatattttttttctgcattgggattaatcaacatcattactctcttaaacatagataatttattccatagattgtgttttgtgatgtactgttgagacttaaaaattggacttatatgattgtgttttatgatgaatcgttgaccgttgagacttgagaattggatttattggtttgaggggttttgtattctcataatttttcgttaccgtattcgcgttggttcgtttttgctccgttttcggtttcgataatattcgattccgttttcatatccggagtttccggttccgattccgattgcgaaaaaaaatgaaaacgaaaacgataatgatggttttcgt

SEQ ID NO: 48957 - DNA, 719 bp, Oryza sativa
  unsure (1)..(719): unsure at all n locations
gcgaattcgagctcggtaccccaaggaaagcttccgataccctacagaggccaaggtaggactgaagcggcaggctatccgcaagatggggaattgttggaaaaatttcaagacaacgctagtcacggagtacgtcctcaaccctgcccagccagaaccatttgtgaaatacccattcatcaccaaacccgtgtgggatgagttccatgccgccaaatcaacgaaagagtctcaggaaaaaagccagacctaccgtgatctgcaggcaaggaaccttcacctgcaccggcttggcaccggaggctacgcggggaaacaggcagaatgggacaaagggggaaggggggaatttttggtaaaaaaaagggagcccccttttttaacagcggaatctaacacccaaccagtgcttgctgatatcccggtctagcgggcaaggaactgggcaagggcaagggtgaagaagaatagtgacggaactctttcgttgtgaaatnccgaagatcaagcggtgtaccanaaaatcgnatgttgacacatagaataagtttaattatgcatgtatcttgttgttcgtctaacgcatcctaactgtactctaggtcgaactgaatgctgagagacaggcctcccaagaggtttgctcacaaaaacgcgaggatgacatnctcacgaaagcattgggaaacgaagaacaccgtggacgaacaaagggcatt

SEQ ID NO: 48958 - DNA, 660 bp, Oryza sativa
  unsure (1)..(660): unsure at all n locations
ggcgaatncgagctcggtaccccattttccatttaatttttcacctactttatcttctcaactattattttttttcacattttatttcacatattttcttaattcccatggagccaatcacaaccgtctcccatttaatttttcacctactttatcttcgtaacaatggatttttttcatatttgatttcacatatttttttaattctcacgaagccttcagaaatgtttatattttgagaaggagagagtacttgatgaaccaagctctacccaatatatgtacatatcatcccaaacacccaacattcacacccatactttgaaaaataaatttttttcaaaaccccccccgcgggggtgccccctttttggggggacataacaacgtagatataagcagttatcaaatcccaatgcaataaattgctctctttatctactcacaacgtttgtggaggccctgccgaatataacatttttaagtcatcttatataaaataaataaaattattaaaacctacaaagagaaccagttattacccggnctgcccacaggcacgccaattttttaatatgtaccgatttcagtgccacacagattattcggcaccaatgacttggatagtcattggggctgattcttgaaaaggcacctatg

SEQ ID NO: 48959 - DNA, 638 bp, Oryza sativa
  unsure (1)..(638): unsure at all n locations
ggtacgtcaacactagggttccattgctccaatgtcggcctancggtgtcgtccaaaacctttaacggccgtggtcgggtggctntactttgtggcctgcgtcgaagactaagctgttccggaagtcagcgtcacaggcgccacaacccttcgcggtggctcggactctctagccgccgacgcttctcctgctggtggctatggctcagctgctcccggacccagcgactcgatgtcgggttctgaaggcaacaacagtcgccatttgcaaggtttgtccctcggatttgcttgcctccatcctccgttcttcttgattgtctcaatctgcctcatgccctcatcacctctcttggatctgtcattttgtacctgtcttgtttgtcatgcttggaaatttactagtaattttaaactaatctatgcattctattctcgttcaggtccaatataatactcacaaggaaacaatatgggaaagacgatctagcgatgtcttcaacttcacttccacaggtagctcaactagattataaaccaaaggtcttctccttcagagtacttctccaactgtggtttgatgattaaaggtgagcatatgaaatactccgcaagccacataacaaatatgcagatgc

SEQ ID NO: 48960 - DNA, 777 bp, Oryza sativa
ctgctgaacttcatggaatctctctcgttcatagctgggtcatcaacgtcacgtaacatatcttgcagcatatcagggtccacatcaaccatttcaccgcccaatggagatgggacaaacatgtcatgctcttcttcatctccttcttcatgaatgtctgtaccacttccgtctgcagctgcaccatcagtacccagatcttgctctccatgcatcacccaacatgtgtatctctccatgaatccccggcgtatcaagtgagcgtgtacttacttttcatcttcccacaaaatctcattcctgcaatcgctacatggacaacacatgtacttgtcgtttcttcttatcctattctcctctgcggctttcataaaacttaatatgccatctctatactccttgtactgacgcctcaagccagtcgtgtacatccaactccgatctatcgctgaacaatgaacaaaatattagttaacatctcataacataagtactactaaattaataggaaatatttagtagccttttacttacttttatgattttcctgtttttgtttgcaaaaaaaattacaaaaattcgcccccttcaacctcccaccaaaatagtgaacagtgggataaactacagtcaatggactgctggagtatatatagtgtgcaaagtatatctcaatcgggccaaaaaaatgtcatctctaacgggcgcacactaatctctaacgggcacaaatagaagcccgacacctataagagtcatcggtgacgggcattaagg

SEQ ID NO: 48961 - DNA, 569 bp, Oryza sativa
cacatgtacttgtcgtttcttcttatcctacttctcctctgcggctttcataaaacttaatatgccatctctatactccttgtactgacgcctcaagccagtcgtgtacatccaactccgatctatcgctgaacaatggggaaaaaaccacccccccaaaaaaaaaaaaaattttaaatttttaagggtttaacatctcataacataagtactactaaattaataggaaatatttagtagccttttacttacttttatgattttcctgtttttgtttgcaaaaaaaattacaaaaattcgcccccttcaacctcccaccaaaatagtgaacagtgggataaactacagtcaatggactgctggagtatatatagtgtgcaaagtatatctcaatcgggccaaaaaaatgtcatctctaacgggcgcacactaatctctaacgggcacaaatagaagcccgacacctataagagtcatcggtgacgggcattaaggccatctcaatcgggccttctttggagcccgtcaccgatgacactcatctgtgacgggctcagtatttgggcccg

SEQ ID NO: 48962 - DNA, 3654 bp, Oryza sativa
ataggaatatgcaccccgacgagtacatctacaacggcaaaaatttaggcccgattgagatgacttcgttctaacggcccacgttgtctaggcatgtgatgagccatcacagatgagaggatctgtactagtggacgggagatgctccaggtttcatttgtcccgatcttcatctaatttcatcttttagatcgtgaccagatatttggtatttgagaacacgtacgtaaatttgttttccaatcaagtttagtttttttatgccaccatctaatcttcgtaattaccaataatactcaatcatattaatcactaatggtttgtgtaagcagaataatcacgcgtacacgtatggcagagcctctacagacgtcaaaagagctagctttctttgggatcaaactagcttgctacacacataggctgttgatatcgcttccattgcactaaagatgattagagcaagttcaatagtaatctatagccaatgtaatagccaatttatacaatagttgtttactatactattaatacctgtttctacttatcatacatacattacatcttaaagtccgtgctacagctggttacagatctgtagcccgctgctattctctctctttttttatctttttaaaatatgtttatagctggcttatagcctgctattttacatgctcttacacaggttgataggctgctgatatgtttggccatatgtctgatagtttaatccgttgcactgaagaggatttattcgtgagtcgacgtacacatccgtagattacatgcacaggtatttcgtcgaatgtgcaagttctattcaacacagatttttgtaacacaccagccaaccacgtacctagagtgccacaccaagcatacactcaaaccactaactcccaaaattattagaaattttggcagagtctccgctgtaaatacggacatccacgacaggaaattataagtttaactaataacaatatcattcccacaatacgatccatccttataatcatggggaagaaactattagaaatctaaaagattattacaaaaccgaaccatgatatagtttaagtattattatggatctaggcaatatagtttgatagtgtgcagataaatgtgtatataagggtgctacgtcccgcccatgcatgtcggtctcaatatgtacctaaaaccaaataaaacacaagagtataaaaatactcggcaagtacaatatgggactagaaacacatatacacatcattggcaataaagcatgaacagaaggttttctttctttgataggaaacacattttcaaataccaagtcaaagaagatagtagttcccattccgggctggcatgaattgaaatagtagtttctatcccggacaatagtgaatacatcctaacatttgccggcaaagccgagtaagcgtgatcagctcttgcccacaggaatttgaataaagaatcaaattgcactcccatgactacgcatggtagttgaataattgaaaccggaatcaaagaaccaaattaaaaccatattgcacattcatggcaaacagggaacttgaattatttacccagaaccagaatccggaatattgaaacaagaataacatcgtaaacatatgataaacaagaaaagcaaaatagtgtgaacaaaaatatgaatataagcggtcacatgtcacatagaaatatatcggaaataaatagatagagcaaacaatccatcaatcacacacttagttcgtcatgcacttgcctccaatgaagggttggtatcatgcacgatctgaaaaaccaccacctaatcacaaacaaaacctcagcaaacacattcaacatgcatataaaacaatgaaaaaggtgaacctactgccctatcccatcaaaacgcaataacaaggaacgccgcttgcactataaacaatattgttgcttcaaacatttatatcttgaaatatgaaaaggctattaccgcaaacaaatacattttggaaatctacagaacaaggcctacaactcttatgtggaaatcatatttttattatgccattaaaatggtctaatttgcgcttgaaagcaggcttcacaatctgtctagaaattcagactatccgcactaaaacaatcataactggagttctacttgcccaatcagggtgtactttaccaatatggaaagctaagaaaaacctctacaactttgtctataggcgtcttggctgattccactgtttatcccatccaaaaatggttcaatctactactatccagattatgacataaaaacaacagttatactcaaaaattcgtatcatctaaaccacttgagataaaatcgcgccctttggtcagaagatagatataaatattatctacagcttcctagttatacactttcgcagaaaatatcattttgatctccgaaactttgaaaaaccgaaacactgtaaatctgccaacgtgcagaacagccaattcgaaccacaacaaacaaaactccttctctaaccttccttatccacgaaataaaccactaaaaccaccctagaacaattgatatgacaagggaaaaagcctcacctatggtttctttagagaacttgtgaggagacaataggggagactatgatctaacccctccttttactcctctcctcctcctcgttgcgtttttctattttgctttttatccaagttatgaaggcggagatctagggagagcaatttgttgtagaggggagagatgcgaacataggaggtgggagtcggttcccctctctctaagttttagggaaaaactaatgggttgggtttatgggccttctcatgttggcacacttctaaagatatttttcttttatttatttctgttaacttctttattttaacaagtcaacccaaactaaaaaaactaaatatattttaatacggggtattacaatttcttttttagtttgattgaaataatgaatatgttgctgatttttttggtgttgaattatatcttttatcataagtgcatggttaaggtaatcatgtcaataaattagaaaaatcccagacacaactataaaaaaaggtatttaatcttagttttgaaacaaagatatatattggtatattttctgtatacacagttgaaaactaccctctccatcccaaaatacaacttctagcatttaaaaattcaaccaaaaataaataacaactttacttttaaaaaaatatgacaacttctctactaatttttttctcaatcaattataacctttccccaatttaattctacctacttccttcatatttgtgtcataccctaaaatttattatattttgtgaccgatagtaataattaattttccctatgtcttttttttgtgtgtgtgtgtgtatatatatatatccatatgactactgtgtgcagtctgcaatttattgttatttgtacatgccgttacagttttatcatcataccaatttttctgacaaacaacacctagcaaaatattgtgccacagtagcaaaaaacacaacgccctaaaaactacaaaatttggatgatcgagactctaggataaaattgtggcacagtagcaaaaaactcaactccttaaaaactacaaaattcagatgatcgag

SEQ ID NO: 48963 - DNA, 1254 bp, Oryza sativa
  unsure (1)..(1254): unsure at all n locations
gggcgaattcgagctcggtacccatctaatcttcgtaattaccaataatactcaatcatattaatcactaatggtttgtgtaagcagaataatcacgcgtacacgtatggcagagcctctacagacgtcaaaagagctagctttctttgggatcaaactagcttgctacacacataggctgttgatatcgcttccattgcactaaagatgattagagcaagttcaatagtaatctatagccaatgtaatagccaatttatacaatagttgtttactatactattaatacctgtttctacttatcatacatacattacatcttaaagtccgtgctacaagncctttgggggggtttttttaaaccccccaaaaggggggaaaattttttccctgtagcccgctgctattctctctctttttttatctttttaaaatatgtttatagctggcttatagcctgctattttacatgctcttacacaggttgataggctgctgatatgtttggccatatgtctgatagtttaatccgttgcactgaagaggatttattcgtgagtcgacgtacacatccgtagattacatgcacaggtatttcgtcgaatgtgcaagttctattcaacacagatttttgtaacacaccagccaaccacgtacctagagtgccacaccaagcatacactcaaaccactaactcccaaaattattagaaattttggcagagtctccgctgtaaatacggacatccacgacaggaaattataagtttaactaataacaatatcattcccacaatacgatccatccttataatcatggggaagaaactattagaaatctaaaagattattacaaaaccgaaccatgatatagtttaagtattattatggatctaggcaatatagtttgatagtgtgcagataaatgtgtatataagggtgctacgtcccgcccatgcatgtcggtctcaatatgtacctaaaaccaaataaaacacaagagtataaaaatactcggcaagtacaatatggaactagaaacacatatacacatcattggcaataaagcatgaacagaaggttttctttctttgataggaaacacattttcaaataccaagtcaaagaagatagtagttcccattccgggctggcatgaattgaaatagtagtttctatcccggacaatagtgaatacatcctaacatttgccggcaaagccgagtaagcgtgatcagctcttgcccacaggaat

SEQ ID NO: 48964 - DNA, 1715 bp, Oryza sativa
atgctctattgccaattatgtgtatatgtactttctagttccatattgtacttgctgagtattttgatacttttatgttttatttggttttaggtgcgcattgagaccgacatgcttgggctggaagtagcacccatatatacacctttatctgcacactatcaatctatattgcctaggtccataatgacacttaaactatatcatggttcggtcttgtaataatcttttagatgtattttagtttcttttcatggattataaggatggatcgcactgtgggaatgatattattattagtttaacccataattgcctgttgtggaagtccgtatttacaagggaaactatcgaaattcttaatgaatttaggacttagtggtttctataccatagtgtgtagcattctaggtatgagaatacctggcatgttacagagaccgacaacaatagcctgtgttctgcggtgccctgctcgaaatgaatcaggaggtagtccgtgttgcgctcaccccaagcgcggtgtgtggcggagcatcggcggctcggcgccagcatggcccttgcgctgctgtggcgaagagtgcgggaacgacatggagccacagggcctaagcgcatgggccctccttgaacccccccttcccccctagagggctacctcatcggcggcagctgcggttgcagcgtcaaaggtgtatgcgagccggacttgggctgtgttcttccacccattttcccaacccagctctctcgttttctgcgcacacgcttttcaaactgctaaactgtgtgatttatgaaaaaactttctacatgaaagttgttttaaaaaatcttattaatccatttttcaaaaaaaaaatagttgatacttagttaattatgtaataaaacgagctttgttttgcatgccggggagccatggtaggcaggggaaagtcatacttttgttattgtttgtctctgcatttcctttggatattataaaataatctcgcaggcctccagtagctaattaccagttttttcggtgtcctacaacaaatacacgttcttgctgtgtccccggccaattacacgttttttagatgtcgcttagcaaattttaacctaaataaaagaaaatactaaaatttctcaccaaaaatcaaaatatcccagcttatcttttataaaactggtagacccattacttataccccgttagacatctaacgactttctatcaactttttctcagcttgtatataggagctatttaaccatacattttgatattgaagcttttatcaataaatgatcattttaggagataaacaataatctcaagatgatcatagcatctaaattatatatataatatatgaagtcacgtggctagttgaacagcatactgattgattgtactgagcgtgttggttgcaccaaggaatcttaagtatgaaacaagcatgatgtggcctcagcaatatataagccaattacagatatgaattaaaagactataggggatccattttttttttgtaaaacttgctacagtacatcgtgaatttgtgacacataacatagaacaatctagaaacatataattattacatgatgctctagtttagtggtaatttgcaaagcaaatactaccacatctattttaatttttcttacttaattggagcgagataatttataattgatgcctttaccccatgcca

SEQ ID NO: 48965 - DNA, 971 bp, Oryza sativa
cccacttatattttcatcctggcttacagacatcaaagcatttaaaagatgcttcttaaagtgggtttatccaaaaaatgaagataaaaagaaatgaaaattgaatgaaatttgtctaatttaaaatttgtttttgttgggtttataacccattctaaatacaaatattcaaatattttagcaggactaataaaatgaatatatttaaaatttcaaacagaatctaacaaaaaaattggacattcataggaaacacatctattgtttcaacacaaaattttctcatgaattagaaacaacacggtttaaagtaatttaatttcagaatttatatgttgcaagtaaccagcgttcaaagcatgttaagtaagttcaattttagtgtatgataaagtgaaagaatatttttgatagaaaaccatccacacatggacattcgtaataaaattttacgtacatgcccatgcatgtgcgcgggctaccttcctagttatctaaaatagctataaatattttttctatgaaatgggttccaatcttttcatcatatggaatacgaccctaatttgattctataactattcatttagatttaattgtttttaatattaaaatgtgtaagggagtaagttgtaaaattaaaacagaagtaggtggggtgacattttctctacttataaagaattataaaggagtgtagatatgcaatgtcacgggtacccagttccacctgtgtttacagggagagaaatactatagatggtcgatgaaagaaaacaaagtaactacatttaagaatgtggctatctacatcacttgtatttttatctcaataatagagacggtaccaatgcgaagagcgggttttattcagagtactcctgagctgctatcttgactttctcttctctgcatacgttcctactaactacaggcagccggttatcaattaaagcaagcgaggtacaagt

SEQ ID NO: 48966 - DNA, 660 bp, Oryza sativa
cccgcttggtcgaattttacagtcggagccataagaggttcgcttacgaaaaaagatgaacgaattatcataggtgagatgtaaagatgttagcatgcgaaaaggtacgagcgctcaaaaaatccacgcagctaagtctccatctattattttatcttcatcccttaggctgtgtttgatacttggggttgggaacccaactccaccgcacggaaaacggagcggtccattagcgtgtgattaattaagtattagttaattttttttcaaaaatggattaatttgtttttttaaagcaactttcgtatagaaactttttgcaaaaaaacacaccatttagcagtttgaaaagcgtgcacgcggaaaacgagggaaaggggttgggaaacttgtggaaagaacgcagccttagtctgctcactccctccctcaccctccactcccctcgcctaccctccccctgatctacctcaggggtggaagccagtagtgaaagcggtagagggggcatcgacggcccttccctttcccagatctggccaaagaggagtaggacagcggaggcaacagctgcagcagaagtagaaggctgtggtagtagcagcagaagaagaatcaaaaagcagtggtggtggaggcggcaggagcaacacaaagcag

SEQ ID NO: 48967 - DNA, 592 bp, Oryza sativa
tccattctcggggtatatccttctcctgttcctgtttccactgttagcgctttactgctatgtgcgctatgttcctgttcctgatattcatgatgcctctagcatgttattgcgttattgtaatgttcctgttcttgacattcatgatgcgtatagtatgctactggttatattaagatcaccatacactgcttatgtcatgattattgctttaaagttttggattaaaatatgccgattcatgaccatatttccaacaattacaaccaccttccagccagaattcatttagaacctcagaccaggctttattggctaagctatgactaacctggttctgagcgtgatggatcttcctgacagagatttccctgtccccgtcaatgagcctccttatctccctgactaggtgcgcagaggccgacaggtctttttctcttgattgcagcatctgtgtcagcgttaaccaatctgtttccacttcaaaagggagcatagtccagtgaagcgctaatgcaattccttccacgcaggcaaggatctctgcctcaagcgccccattacagcgctccataaatctgcaggcagaaaa

SEQ ID NO: 48968 - DNA, 945 bp, Oryza sativa
ccatcccttgtcgacaaacatttccacccaaactaccatccaacctagcaccgaatttgcggtgccctcgcctgttctccagaaagccattgtgccgagtggcaactccatgaaactagttttcttttccggccaagtagacgtccttcttcgtaaccacttcgtgatcctgcatttcgctgacttccagaacaacaagtcccgggaatttacagtttccatcgacaacggcgtgcatagcagcccatacagtacaccgtacctaaatggtttgtcagtcaccggcagctggtccagcgattctgaaggcaagtataacttcaccattgctgcaactgccatatcagctctgccccccatcctcaacgcttacgaggtctacggtcgtattgtccatgacaatccaacaacgttctcccaagattgtaagctcgctatatctgtcggtctcggttgaggtacactaaacaaacattatcaactctccctcttgaactcctattttttttcctcgtatgctagttgatgcgatcatggctattaaatatgagtatggaataaagaagaactggatgggtgatccttgttttccacatgaatatgtttgggatggtgtgaaatgcagcgatgcaggtgataaaatcatggggataatatctctgtgagtatatttgaaaggtatgcatgtactagcattattaattgtatacatcaggctaaattttgttggattacttgaaattattatgcagtgatctttccaacagcgaattgcatgggtcgatatccaattctttcacaattgttactgccctcaagtacttgtaagtatatctgagatcccctctgccttcagttgttctgcatttaaaactcccaattgacatgactatgcatcatcttccattaaaaatgaaaaacaccgactaaatattatctagaggg

SEQ ID NO: 48969 - DNA, 1722 bp, Oryza sativa
ttgatatgacatgtaagtgcacagtaattttgataacaatgttgtataagttaatatctatttgttattttctttaaaatataaaattacagtcctatataactaaaattacatttgtaaattcaattgatatgacatgtaagtgcactgtaattttgataacaatgttgtgtgaataaatatctatttgttattttctttaatatatataattacaatcctatataactaaaattatatttgtaaattcagttgttatgacatgtaagtgtattgtaattttgataaaagtattgtgtaactaaatatgtatttttattttcttttgtagtctgttggatgtaaatttaagggtagaaaaaatatgggtgattttttcttagaaatcacccgacaaatagatagacaatcctgtaaagaaaaaaagaacagggatggggacactgatatcaaggaagatcgggagatatcaagttttccttttgagttacgccaagatgtttttctaaaatgaaaataacccattagcataaaatctggataattatatttgtaactaaaatttcttcacaaattacctctaggaaaaatctggttaatttcctgtcctataatccctggttctgtttaactttcagggctgagctaaaatatcgaataaatctcatcgacccaacctagtttggtgatattttgttattttaaacctttttaatttcaaaataaaccatgagaaacttattttcaaacaccggcatagcaagataatattgctacaccgataaaatataatgatgtggctaggatttttacctgacaatgttgccatgctagctgctcataatgtgataatgttgtcaagctacatcagtctaattagcatggtcaaaaggagatttgacaaaaaaagttttcagagtgtttactttcaaaataagaaaaatcatgtttgacagaggttttgactgtggtggaacccacttgtcataggggtaggctgtaagaacagagttttgaatttcaatatgctactttactgttttaaagaacaattgttgtgttatttttttccggggaaacccaaaaaaaccccccaaaaaaagggggggggggtcaatctttcctatctgagccatagctctccaatctgccattgtctatgtgggtccactgtttctcctctgttccttactctctagaaaaagtggaattatcatagatatgggtcaaaatcgctattaaataggtgaaagagagattattcttttacctagttttgatagtttttggcgaggtttactcattttcgtactgatgtatagtggagaccgtactgctgacaattgggccttgatgaggggggcattgactgactaggttgtttacctactctctcaagcaagttgtgcgcaaatcactatcaccttgttaagacttcaagactcttctctcctgtatgtccggcgttgacgggctttttgttatcctataaggtatcttcatcgatctccctatttttaactccctaaatctgaagaaagataatactttttttaaaggctccatatttctctgcatgcttcagatatcattttaattttgtgccatatatctcatccttctatatcttatcgatcttatactcccaagaaaaaaaagcaggggaagacaccatatgggagagcaatggagatagagatacacttttgactcatatttgag

SEQ ID NO: 48970 - DNA, 3726 bp, Oryza sativa
atatcaagttttccttttgagtacgccaagatgttttttctaaaatgaaaataacccattagcataaaatctggataattatatttgtaactaaaatttcttcacaaattacctctaggaaaaatctggttaatttcctgtcctataatccctggtcttgtttaactttcagggctgagctaaaatatcgaataaatctcatcgacccaacctagtttggtgatattttgttattttaaacctttttaatttcaaaataaaccatgagaaacttattttcaaacaccggcatagcaagataatattgctacacccgataaaatataatgatgtggctaggatttttacctgacaatgttgccatgctagctgctcataatgtgataatgttgtcaagctacatcagtctaattagcatggtcaaaaggagatttgacaaaaaaagttttcagagtgtttactttcaaaataagaaaaatcatgtttgacagaggttttgactgtggtggaacccacttgtcataggggtaggctgtaagaacagagttttgaatttcaatatgctactttactgttttaaagaacaattgttgtgtctttcgacaacaaggatcaatctttcctatctgagccatagctctccaatctgccattgtctatgtgggtccactgtttctcctctgttccttactctctagaaaaagtggaattatcatagatatgggtcaaaatcgctattaaataggtgaaagagagattattcttttacctagttttgatagtttttggcgaggtttactcattttcgtaccgagtagataaaaagggacagtaaattgtatttttttatcttatatttagagccaaggccgtccatggaggggggcgagcagtgcaaccgctgcccccaaatcgtggggaccaatggtgtgtagtcaatttatttgcagtatgcatcgggacaccaacgattatcaaactggtaaggttttaaattcggctatatagtttcataatttaatttatatgagttaaaccactgtaaataatattagttttgtaaatgatcaatccatgtcgtcaacaaactattggatagaatcgatattgatatcatcatcaaggacttcgtatctaaaaatatccgaaaaattttaagctaacaggttacaatgtttttatatattataatttatagacgcaatttcaatgttatcggcaatagcttgttgctgtgaaaactctggatcgaccctgtttagagctatggataaagattactccgccaacacctctgcctttacgaagtaatcattcatcattgccgtgtaaattaagatgtatcgtcgctgcacaaaaccatcaaatggagaggtcacgcatactcaacaaccaattacgcatatccatcaggcaagagctgaccgattacacacacccaagtaagcaagctacaacaaaagataaactcactcttatctaaaacatattttgatatcaatgagaattatatatatagtacttaaatctgggactttggtcttgtgttcacatgtaaactggacatcttagatgttaattaacaaagagcttgatgatcaagctaaggatggattacacaaagatgatgcctgattatgctatacttattttggagttcaccatgtaataacatctacttcaacctccaagagtgtgtgacccaactttacgttttactcactccgtctcactcacaaagacacgagtgaacttgacacagtcttgactaatatttaattaactttaaatttctcacatagtaatatactataatatttgtagcaacaaaatcatagtcatataaaagtaatttaaataacaatccaatgatattgttttcatcaaataaaacttaatttataataaaatatttattggtaaaatatttaaatagttgaattttagaatgtgtgtgcattttagtgagtgtgacggagggagtagtgtgcataatacacatggctgaaaatcttatcaagtttatttctgatgtaacaaatagtgtcatatggatttcccaataagaagtacagatcaaattacagaacggcttcgcagaatccaaacaaacacatgaatctaaatgcaaattgattttgggatgaccttggaactagctatctccagcaatttcatagccatttcatcccaactaggatggttgttcttagcataaatatccctagtatctgagtacttgatagactacgtcgatacaaatataaacccctttttgtcagtagcgtgacaataaatatttgacaaagatatgatcattcttcttcataagtgataactattcaccactggaaaccggccttcaagccattttcggttaattcataagagaaaagaattagagggatttattttacaagtattacaatgtgaaattaattttcctttaagccccttcaaaccaaacgaagacttacctcgatctacctctcttctgaaaggattcagatccaaacaataacttcaacagcggaaaagcaaataatgtgaagagtatcgtcacttcaggaagagtatgtaattaaccatttaatctatccgcatttgtagccatccacaataaacagacaagaccgattctgatatagtgcaatttatactatgcttcgtacaagttaatgtggcatctctctgtttccctgtctgtagtcggagaaaaaggaaagatcattatattaaaataatgatccagccttttttgagaaagcccaaaacagaggttcaaacgtaaaaacaaaactcagtacctaccctgaagtcggaggattaggttccctttcgcatcaacttaaaatcatatttggcaatttgtcaagttacagttttgaagtcttcgaagtgttaattgtactagtagttacacgtacagatctagtcatgccacttggatgcacaatgtgcctacattaatatttgtccgtactaaaacaggagagaaacacatatgcatgaacccaaaactaatttagtagtactattattcttgaaaagtctattttacacaatcctaaaccctttttttcaagggaacgagcaggagctctactatttcaattaaaggaggggagaaaaatacaacagtttcagatcaccccaaggaggtctgaacagggtaacagggtaacaagcagagtggttacagggagttttaggaaatggaaagcaactaacatcagcaaacggcgtaagatcacctacgttgtgttatactgggcctgttcccacgccttgcacattgagatgatggaatcagccacttgctgaatagggctgcacgaaaaactcgtgactcgtcaaattggaattggataagtcaaaatgtcaaatgtgtagtgcctccattctcacacaaaggacggcgatgctgcagcggcatcggatgagtggagtggtgggagcgtggacggcaactcgcaagcaggagctcagtggtcgcacaggccctcgccaagttgagctcagaggaagcgtccctgtcaccctccctcgacggggacgtcggaagcgagtgcaggcccttacattggcagcgatgtgagcgcatgttctcgttggtgtgggatatcagtggtgcacgagctcgcccgccaacccgtcacctgtcggcctcaactcgtcgcatcccacgcccgcgcgtccatgtggtattctcatggcatcgcttgc

SEQ ID NO: 48971 - DNA, 1135 bp, Oryza sativa
attggagcttccaccattgcagacccacagtcgccattttgggtggttgagctcgcgagccaaacaagctggctcgagctaggccacgagccaagctgagctagctcgttatcctaacgagctagaccgagccgagctgagctggctcgacatccacagctattgcgatccgtgtcgtaagcaccattgaagattctcacatttctttgaagccagataccccaagtagtatataatgttgtgccattgaaaatcctttttggcgctttgatcatctcattccggcacacttatcacctgtacagtaaattcccatcaaatagagatgttgccagcatatggagacccagtctcatccaaatcatgctccaaacctgtttcgcgaaaggtgcctcgctgtctctgtctcaagcccgcagagggagcaaattgggttgctttcccaaccctggatctatagtttgttggaggttaggattttcctttgcaccatgagccagccgaaaaatttgcatttattttccatctttgccttccaaatgtatatccgaacctatcatcctgtatgcttcctaggaattggacccgataagctgaattggctgagtaagcaccatttgatgtccacctccatgttaatttgtcttctctctccttgtgaaggtgcacctgctgaatgagctgccgcaggagaatgaattctctaacttgagtagtcgagttcatccttctcatctgccttagccagaaatgaccttggaattcccgtgctactgtcctgttttttcttttctggtcacgagttgatacagacatgggattagctccttgggtgacctaccatctatcatcggtccttcacaagctacctatccgtttcatcacaaggtaggatggaaccttaccatggtttgtcatatgcgtccaatcgaaccagagctaccttagttgcaatgatccgtcgaaacaatccaaatcagttatacctatgcccgctaaatttttttggcagcataccctttaccagttcactaagcaatgtccgtcgtgtgtctgttccgaacctgtctagaggaaacctcgatgaaatttgtccatattgttttcagtccacttctttaggtgggatactgtg

SEQ ID NO: 48972 - DNA, 994 bp, Oryza sativa
ggcatgaggcagattgagacaatcaagaagaacggaggatggaggcaagcaaatccgagggacaaaccttgcaaatggcgactgttgttgcctccagaacccgacatcgagtcgctgggtccgggagcagctgagccatagccaccagcaggagaagcgtcgccgcctagagagtccgagccaccgcgaaggttggtggcgccgttgacgctgactccgggaacagctaagtcttcgacgcaggcaacaaagtagagccaccgacgacggcgttgaagggttttggacgacacggttaggcggacatgggagcaatggaaccctagtgttgacgtacaaaggaagctggcatatatcagatatatagcttgcatcataacttattttgttttataatcgcttctgttactgaattgttattcaattctttttgcgtgctacaaggcaagatgacacttgggggcaaacctccctcatagcctcctaggttgatggggtgaccacctacggtgcatgtctcgtggcattactccacatattttttttcgtggcaccccaaacgctcccacatatttggtcggcagtcgcagcggtgggagcagaatcttggactgccgtgagacggcgatgaggcgtaggccagaagaagcaagactccggtgggctcgtcaacatcagcaggagcttgccgttgttgatgcagtccaagcaatgcttcccctgcatctccctgaaatgcttttccatctaagcttcggtcggacatgtggacaaaagtttgggcttgactatggtgtccatggcctgcataagccaaagctatgccaaaagccgccgcagcgatcactcttcaccttggggcttctagtgggcgcgcaagcgccagctgctcaactcgcgctgcgcaaatcccacccccgtaatcagcatttatttacaataatcagtactattatttaaaaaaatacataatgaggtttgtaaaatcaacaca

SEQ ID NO: 48973 - DNA, 508 bp, Oryza sativa
cgggcggcaaccaggcgagaaccaccactagcctcttcccttcctcctctccacctcgccgccacctaagtaatcaccggcgaagtcgagcgggtgcaaggatggcagcggcggggctcccgaactcctctcacgggtgtggcgcactggggtgctaccaagaccgaagggattaccccaagtggcggtcgtcggtggccagattaggtgttgttttggctggattcggtccccacacgaccggatctgatgccccagctagtggatccaaacggtggcaatgaggaggatgcacggtggtccaacaaggaggtgtggagaagctggggtcgcgcgatggccgaggtgatggagcagcatggaagcgtcgacggagtgcgtgcaagggtgcagcctaggcaacgacgcttgttgtgggagttaccgaccttccaatcgtcattacaaggctataaatagagaagagaagatcttcccacacacacttaagaagcatatcttaggctac

SEQ ID NO: 48974 - DNA, 671 bp, Oryza sativa
atcatgaatatcaggaacaggaacatagcgcacatagcagtaaagcgctaacagtgggaacaggaacaggagaatgatataccccgagaatggccctccgctggattatgaggcagaattgcctccgttgatgttgttgttcgcgccaccggctccagctcctggcggcggcgcaccacctccgccatttcctccagcagcggcggcggcaactccagacatggcgagcagtcgtgcgggaggcactcccaaaaaacctgatcatccgcctacccggtgcagatctcaggtgaaggtgtggtttcggaggcactgctccttccaatctctcgtgctcgcaagagatcagaagcgaggaagcgagaacagcataggcgcggaggaggaggaactaacaccgggaaagaagcaatcgatcagaacagatcggactcgcggcctccttatctatcaggagagagaggcaatcgtgaaaacgtggacgcgctgttgcggagagagtcgtgggaacgtcggttagtggctgcaaaagaatagcgacgtgacgcacacacgccggtagccagccacgcctcgccctcgccctcggccacgccccggcccggcccgcgcgcgcgtgcgtgtggcattccgacccccacctcaaccagtcaactgggagcctccaataa

SEQ ID NO: 48975 - DNA, 649 bp, Oryza sativa
gagattgcataagtgattatagtgtgtagaagagattcatactcagagtcaatataacccataatccagctgcaacggctgaaatatgagttccaaaatctgctatttttgctttaaaattttgacccaacaaaatgtggttcgccttcatatccccatgaattattggcaagttgcaacccttatggagataatccaagcctacaaataaggaaactattgttagaagaaaagatgagccctaacacttttgctttgttttttttggcctgctattatagaataccttgtgcagctttaagtgcaactcttacgcgtgtctttcaattcaaattttctcccataccaattttcccttttaatatattcacagacaaacagtttgaaaggaattctacgagcaactttaaatagcaattaagggagttgtaaaacactcgtctcttgtgtgtgtgcacacatcggcagggggagcaataacataaataatcaaaatagtttgggcctttaacaacaaaaagtagttaatgcggtgatcctcaaagatcatactagatatcactttgtttcataggggactagcaaagcacagatgttaattacacctattaaaaaagctgtgcatcacatatgcattcatgttttaaaa

SEQ ID NO: 48976 - DNA, 773 bp, Oryza sativa
tgggggggtgggggcgccacggacgatcgatcgcccgttagccaacaccgccacctcttcctctacccggccccttccacgtctctgcgcctgctacccctcacgctcccagttggctatggaggagcttcacgttcggatccagctttgcccccaactaaaccagcacttggacgaccacattgagcagaacatcccacaagatcacaaccataagaggctatcttcattctaagcatttttcgaacgattcttccttctaaacattaatcaactgcatctctgcaagcaaatatcaaccctcaaggacaatcgaactcctgaccgccttgactggcctttccctaaataagtaatatgggactattcccaacagccgagcagagcgaccgtcccggcgcacggcgccgatgacggcggctggcatccctactcaccagaggtttgctgccaccccgaacgcggagccgcttggcagcctgcagggagcatgatgcatgggtggcagcggagaggtggaattgtcggaaattgactgccgccgcgagtcgatcgctcgatcgatatggataggggctcagttttttctaagtacaaaactgcccccttgctaatggggggattactctgttaatccacttttaatatccacccattgatgtgctttaatttccgtgcaggtttttatttgagaagcatagtatcacttcccttccctattttcttttagggtgcacaaaaaaaacaggaagaacaaccccacaatctggaaa

SEQ ID NO: 48977 - DNA, 667 bp, Oryza sativa
taagctgattaggagttggcccattccttgttgtctagctaagctcattggatgatagaactcataagagacttggatgtttttcccctgatggatgcgacagaaagcatgcatgggctgattgcagctgagaaaacttccctggacttttggtatctttcatgattgatatcttcaaatctaaagtccgatgggagctcaaggtttgctgaatcttcataaggaaaccaaactcgaacatctttttgaaagccatcatagaaactgcagaaccagtccttgagcagttcagccgataattttgctccggcatcggttggtgtggatgcatattctccatatgacatgcatctgcgatagtgcgctcttctccatcatcttctacaatcggctccagtcttgggaattcggcttctgtcaaagatggccgattgacaactttcatgaccatcagatttaacgaagtctgcaatagccaccatggtccacctgctccaactactgatctgatagctatcttagctgatgcattattcaacatttggtatagatagccgagaaggattttgcctagaggaaattgctttttcgattctagggcttcggctacaaattaccaattggttgtaggaaaaaaactggatcacagaagaggaacttctctagc

SEQ ID NO: 48978 - DNA, 1278 bp, Oryza sativa
aatacaaagttattgtatcatgtgcatcttgagatgtatttgatttttcttcatttcgtacatttgggctgaggcatttcttttttttttgggtgatttttgacatctgtgacgggtgagaactaaaaccagtcacagctgtttcgtcacctttgacgggttgcaaagagtcatccgtcacatgtgtgagtcacctgtgacggctatattttttagcccgtcaaaggttttaattaccagtgacgggctttcacccgtcaaaagtgaggtgtagtcatcagtgaccacttgtctctgaccagaaccaaatccgtcaaaggtgagggttagagcccgtcacagataactggatccggcctagtgatcgcacgagctccatagttttgttttcttaaaaaaatcaataccatctaggtatttactaattcagactgcaattgttaaatcatccaaacatgacaattgagcttccgaggacaacacaatatgtattaatttaaacttcaaattattaaatcataaaaaactaattattactccacaccaacaagaaatctatagttgatattatattattactttttcatattttttaaatttggatttattaaatcaaaatggcatatataatgattcaaacgaagtgcaactacagtttcacaccaaaaaccgggactactttcaaattgaatctatttttgaatcagtgtgcatttaggatccttttttgtctgtatgaattaaaatcattttattttcttttgtaaaaatcagtatcgctgctggtcgtctcccaaacatagctggtaatgtggaaccgcgagtaatgcccagtttgtagtgcgttgtttagctaaattaataaaatcagaaaatagcttcaagtgatatattggttaacgtacaactgactaactgagctgcaaaatgtacaagatccaaggaaattaagaacatatataccttactaaattgtcatcgtcagggctagatcccacgttgctccgaacatagagggagagtgacacattgcccatgacagccgggtagggcaagataccgagaggcctcaactccaccgtggacacgaacggcgtgccctggccgatgttgatgaggcaaaccggcgcctagctcgcccatgccacgaacaccgcttcgtgaacattataaccatcatttccgtcggtggtgtctatactcacggtgtcccagtgtttcacaccaagggtaaggttgaaaattagcgatgggttgtccatgccgtcgtagttgcca

SEQ ID NO: 48979 - DNA, 1044 bp, Oryza sativa
tcaattttcatttctttttatcttcattttttggataacccactttaagaagcatcttttaaatgctttgatgtctgtaagccaggatgaaaatataagtgggttggtcctacaacctggcatggggtaaaggcatcaattataaattatctcgctccaattaagtaagaaaaattaaaatagatgtggtagtatttgctttgcaaattaccactaaactagagcatcatgtaataattatatgtttctagattgttctatgttatgtgtcacaaattcacgatgtactgtagcaagttttacaaaaaaaaaatggatatagtcttttaattcatatctgtaattggcttatatattgctgaggccacatcatgcttgtttcatacttaagattccttggtgcaaccaacacgctcagtacaatcaatcagtatgctgttcaactagccacgtgacttcatatattatatatataatttagatgctatgatcacttgagattattgtttatctcctaaaatgatcatttattgataaaagcttcaatatcaaaatgtatggttaaatagctcctatatacaagctgagaaaaagttgatagaaagtcgttagatgtctaacggggtataagtaatgggtctacccgttttataaaagataagctgggatattttgatttttggtgagaaaatttagtattttcttttatttagggttaaatttgctaagcgacatctaaaaaacgtgttattgggcggggacacagcaagaacgtgtttttggtgtaggacacccaaaaaactggttattagctacccccccgttaaaaccctttttttttttttaaaaaaaaaatttttttggggggccccccggcggataaataatggatgaagggaaaactagcatgggtggaaccatgaattgggcaacacgcgttagagttatgcttggagctgccccaggtatgcttccaatagaagacaatggcaaatacgcaaagaaagaatctatgctatgccactgaattatcccactttaaca

SEQ ID NO: 48980 - DNA, 535 bp, Oryza sativa
atactagggatatttatgctaagaacaaccatcctagttgggatgaaatggctatgaaattgctggagatagctagttccaaggtcatcccaaaatcaatttgcatttagattcatgtgtttgtttggattctgcgaagccgttctgtaatttgatctgtacttcttattgggaaatccatatgacactatttgttacatcagaaataaacttgataagattttcagccatgtgtattatgcacactactccctccgtcacactcactaaaatgcacacacattctaaaattcaactatttaaatatttaccaataaatattttattataaattaagttttatttgatgaaaacaatatcattggattgttatttaaattacttttatatgactatgattttgttgctacaaatattatagtatattactatgtgagaaatttaaagttaattaaatattagtcaaaactgtgtcaagttcactcgtgtctttgtgagtgagacggagtgagtaaaacgtaaagttgggtcacac

SEQ ID NO: 48981 - DNA, 591 bp, Oryza sativa
caagagaaaggtgtagagatctttctcaaatatttattactccctccattccaaaatataagacacaaccacccataacccaaagatcaagaaacaattattattatctcctagtttggatcaccctaataaatgtaatgcatgcatccaatagaattagaaattttaagggtggatgatttaaaaaagcaataatttaatggagaagaggtcctaattaattgtatgcatgcatgtatgtcttatattatgaaacatcaaaaaaatagttggccttatattatgaaacggagagagtatcacactactgacaaaaagtggtttatatttgaatcaacatagtctatcaagtacttagataccagggatatttacgctaagaacaaccatcctagttgtgtgatgaaatggctgtgaaattgctggagacagctagttcgaaggtcatcccgaaatcaattcgcatttggattccgcgaagccatttcagtaattgatctttacttcttaaggggaaaatcaaatgacactattttgttgcatgggaataaactgacaagatttcagcgagtgtattatgcatactactcc

SEQ ID NO: 48982 - DNA, 614 bp, Oryza sativa
aatgggatgtgaatggctgtgatttgttagatctgtgatttggatgcgatcggtgatttgtgatgcgatctgtgatttgtgaatgatgttgggagatatgtaatatgtgaactatctgtgatccatgctatctattatttgtgttttgtggtgtgacggtgattgtgattttttatcttttattttaatagtgatttggaaatattgaacatgagaaaagaaaaaaaagaaaaaaacatttagtcccggttgattacattaataggaactaaagatttagtcccggttggtgttacgaaccgggactaaagatgcatttttagttccggttatttcaatcgggactaaagatggacatttttagtcccggattcgtaatcccggttaaaaaaccaggactacagagggttatcaaccgggactataaaccctttctccaccagttatttatataaataaatttttccaactttgtttttttattttttaaaaaatttatggtgtagtaggaagagaagaaggggaggaggatggaggggggggagaggagtgtacaggggatggggatcgatcgcccattagccacagccgttgttgatcacaccggctatact

SEQ ID NO: 48983 - DNA, 2073 bp, Oryza sativa
taaaaaaccaggactacagagggttatcaaccgggactataaaccctttctccaccagttatttatataaataaatttttccaactttgtttttttattttttaaaaaatttatggtgtagtaggaagagaagaagggaggaggatggaggggggggagaggagtgtacaggggatggggatcgatcgcccattagccacagccgttgttgatcacaccggctatactccatctatctattaaggctcgatttatcatgcatggtcattaaaattctacttttgactttattagttcctcacatgatatgtttttctaagtactttaacgcactactatagatagggtttttccatacggctgagaaccatctttccatctttccatgacatcatttttgcatgcggacctcttaagagacccgtatgggaaaatcgatttttccatacgggcttcttaaggagctgtttgcgaaaatgccgcgcgatttttgcaggcgccactagttatggtccgtttgcaaaaatcatggggtctcgcacagaaaaatcacttttgtagtagtgcgttgatatgttttaattttgaacagcctttcactactgcaaagagcattttttttcaaatagtcaaaaatgtattttcgcatgcagatccgtggcctgcctgtaactgaacgatcataaaaattcgacattttttttaggctgttaagcacatgcatgcatgtgaaaatcgtttttgacgcgcatgccaaaataaaacactagatcctacaatatataggctccaattcagaaatttacaatacaattctacaatcaatcatcggtgccgaatcagtcgatttagcactgctttccgattcatcaagaagcaggaaactaaccaaaaacttacagccgaggattctcaagggcctcaaggcctgagaaggtgagcgcgcgccatcgttaattgaagctgcacccgcacaaaacaaaacttcagcaatcctcgcagcgcaataattaatagcactggagatctacggtgaatcggcgaggtcgtcgtcaaatttaagtaattattaattattttcctatcatttgatttattgttaaatatgctttcatgtatatatataattttacatatttcataaatttttttaataaaacgaatgatcaaacatgtgcttaaaaagtgtcaaacatttagaaacggagggaatatttacatgtaaacttatagatttgtatttaatgagttttatagttacataaaaggttagatttccacgcatgagcagccacgatttctgcagcctctctctgccataatctcgcttttgtaccggtcccacgcctctcgccgtacgtcccaatttgtacttatcaaatcccagattacattactttgtatacttctctggatcacaaataatcagtactgcacatatttacgcaatatatagtttgaaatatgctaacatatattgtcaacttcttctcaaaaagttattgtttgatataggagctagactagtcgtcgactagctactagctagctagcgatcgacaagcggaaaattgattttacccgagcaacaaaaagaaggaagagaaaagccagccatatatttatatctttcgtattttcttagcagcaaaagcacacgactgtgtgcacgtgcacgtcgtcgtcgttacgcggaggaggctcatctaacttatactatagcttcctctaacttcagttggtgagagatatgtgtcgcttatatgtgaacccataaaaataggttctacctgttagggatctatgtctctgtaatttaaaagtcagatgagttcctttcgcattacgcccaacggtcctttccgaaggagcacaatttgtcaatttgctagagtcagttaaaacccgtacggaaggtcattaataacctacgtttacatatgatgtacgcagctgagaaaaaaaaacaaataattcattcattcggtgctccacagggttattactcttgtaatacgtaatttaatactactcttacatttagaaatggagagtttatgtgtgtgtatatat

SEQ ID NO: 48984 - DNA, 2009 bp, Oryza sativa
ccaccgaagcgcagtatctcaaccgcccgagccaggcgcaagtcgtagcgggcgccagatccatcactactggccgctccacagtcgtcaccagccctggatctgttgcctcctccgcccaccgtagtcgccggcgccggattgacagccggcagtccatgcaggcgcgagatcgactgctccaccacctgttgtcggcgccaacgctggatccgccagccccgccgtttgcgcaagggaggggcgcccttggcccaaaaccccccgggggggaaaaaaaaaatttaaccctccgggaccaattggagcacggttccgcccctacccccgtggcggttagggggggagggttgcctcgtcgtcgttgtcggcgttggcagtcagaaggggatgtcggtggcgccgctgcccgcgttgccgcccactcgctggatccactgtcccaattgcgcgcccgccgtcgccgtagctgcagccgctccctagggtgacgaatctgaccttcccgagggaggcgccgcctgatccgccgcccttgctcccggctgccggcacccactctcatagagggagagggagaggacaaaataaaaagagagggagaggagaggtgagagagaggggggagagtgatataatagaaggggtgagagtggagatgggttggaaaaaatttgatgtattgggagcgaaaagagggtgtagggagatgaaaaaaattagggttgtatttttgtatgcggacctcttaaggggctgcatgtaaaaatatgagaaatttgaatcgaattttatggtactaaatcaacttatgtgaaaaagttatcaaaaacaaagttgtagaactcattgagatctacctttttcttctggtcatctctccatccaagtttgattgaactatataaaatttaaatattaaaatataagatattcaaataatttttcgggtagtaaatgattttaaatgaacaaattgttaacaacaaagttgtataacttatcaagatctacaacttttgttttgatcattttgctatttgactttgtttcaaatataatttgtttttggggaaaaaaatttttttttcccccgggggaaaaaattttaaattatgataacctcagacaacattttgaagtactaaacgatttcaactaaaaaagtcgtgaagaacaaagttgtatataactcatcgagatatataacttttattttggtcatttcttcatctgacaaagtgatagtaacattattcataaaatttacacatctcttatatagttttataaaataaaagaaagatatgtaatttttgggaaaatattactatcactttgttggatgaagaaatgaccaaaacaaaagttatagatcatgatgagttatacaactttgctgttgatgaccttttcagctgaagttatttactacttcaaaatattatttaaaattttgaaattcaaatttttaattgacaaaacaaagttacaagaaaaaatggccaaaataatagcagaaagaacacaatgacatgatagagcatgattttggaaacatttagaaaaaatgatcatccaatttggagttcatgagtgagataaactggtttcaattttttaaattttatatgcaggctcttaagtggcccgtatggaaaaatttattttttcatacgggcgtgttaagtagccgtatgcgaaaatgccgctcgatttttttcagacgcggcaagttatgttccgtttgtaaaaattatagggtcttgtatagaaaaatcgtctgtgtagtagtggctgtagtcgtgttagaagcagcggttcgagcggacagccagacacaggtcaccttgatttttctgttctgttgtccctttcactgcaaaactcttactatctaattttacaaggcatgatcttaaaaaaaaatggtctacacatatacacataataaatgagtaaatttcataaaactatagatattttttttgaaagaaagataaaatata

SEQ ID NO: 48985 - DNA, 720 bp, Oryza sativa
tcggagatcaaaatgatattttctcgaaagtgtataattaggaagctgtagataatatttatatctattttctgaccaaagggcgcgattttatctcaagtggtttagatgatacgaatttttgagtataactgttgtttttatgtcataatctggatagtaggtaaattgaaccatttttggtgggataaacagtggaatcagccaagacgcctatagacaaagttgtagaggtttttcttagctttccatattggtaaagtacaccctgattgggcaagtagaactccagttatgattgttttagtgcggatagtctgaatttctagacaattttttttttggggtttttagaaaaaaaaaaaggcccccctttggcccttttcaagcgcaaattagaccattttaatggcataataaaaatatgatttccacataagagttgtaggccttgttctgtagatttccaaaatgtatttgtttgcggtaatagccttttcatatttcaagatataaatgtttgaagcaacaatattgtttatagtgcaagcggcgttccttgttattgcgttttgatgggatagggcagtaggttcacctttttcattgttttatatgcatgttgaatgtgtttgctgaggttttgtttgtgattaggtggtggtttttcagatcgtgcatgataccaacccttcattgggtaccgagctcgaattcgcc

SEQ ID NO: 48986 - DNA, 1461 bp, Oryza sativa
cgcatcacaaatcacagatctaacaaatcacagccattcacatcacattaagaaggaaaaaaagaaaaaaaaggtaaaatatcccatgccggccaccgccggggcgggggccgcctgccaccgcctccgcgcctccgccgcctgccctccgcgcgggcagccgccgccgccgggccctccgcgcggggcagccgctgccggcagccctccgtacctccgccgcctgccgccgccaggacggccctccgcgccggccgccgccaagaagacaggggagaggggaaggggaggaggagaaggaggaagaggagaaggactgaggaggagaactagtggaggggcagaaaagctaaggataagactgaggagggacagacagatcgacgcgccaagagataaacatcgcgccggcttggggtgatttttagtcccggttggtataatcaatcgggactaaaaatctatctgtagtcctggttgtttataccaactgcgactaaaaataatagggacctgacacgacctgacaacttcttcaaccgggactaaaaatgatctttgtcctggttggtaacaccaaccgagactaaagatcaaaaaatacccctcagcttttaaaccgggactaaagatgttttttagtcccggtttttattggaactgggactattgtggaatttggccgaccgaccaataatggtttctccaccgccggggcggccctccgcgccggggcagccctccgcgccggccgccgccaagaagacaggggagaggggaaggggaggaggagaaggaggaagaggagaaggactgaggaggagaactagtggaggggaagaaaagctaaggataagactgagtagggacagacagatcgacgcgccaagagataaacatcgcgccggcttggggtgatttttagtcccggttggtataatcaatcgggactaaaaatctatctgtagtcccggttgtttataccaactgcgactaaaaataatagggagctgacacgacctgacaacttcttcaaccgggactaaaaatgatctttgtcccggttggtaacaccaaccgagactaaagatcaaaaaatacccctcagcttttaaaccgggactaaagatgctttttattcccggtttttattggaactgggactattgtggaatttggccgaccgaccaatgatggtttctccaccagtgaatactatatataaaaaatatttaaatttaaatttaaatttgaaacgggtatgtaaacttttgacttataaacttttggtctataaactaatatttgaattcaaaatcaaatttgaatcgggtatgtaaactttttgacttataaactttgggtctataaactttatgtgtataaactttatgtgtataaactttagatgtataggaatactatatataaaaatatttgaattcaaattcaaatttgaat

SEQ ID NO: 48987 - DNA, 1022 bp, Oryza sativa
aactttgggtctataaactttagttctataaactttagatgtatagaaatactgtatataaaaaatatttggatttaaattcaaatttgaatcggatatataaacttttgatttataaactctgaatctctaaactttagatgtgtaaacttgaggtgtacaaactttaggtgtataataattttattaaaatagaaaagtaatgcggtgccaaaaaaaaggaaaccacgtcgaggagagggaggcgacccgatcgctaggggcgatcgcccattaggagtttcgatcaacagatgcactagtgaaaaaaaaaaggaagtggaagaagagacctgctggctggtcgactgcaagaacccctgattccagcacgagtagtacaacaacgagagccaagagccccatggagtcttgaattcctgataattaacccaggagcgatctatcggagtttcgaccatgaccaataactagctatatctccactgcatacactaagtatgttgagacatgccgactggcgtacgtttacttgttacaagccacagcgtacatctcggtcactatatatattggctgcatccattattggttcaagccctgggccgggtatacttcactgtcgacctgtcgttggtgccctaagctgattggcttttgatttcttggagtttttgttaaagcattaattctccggactttggcagacttgactctttctttctacttcctccgttccacaatgtaagaattcctagcattattcaaattcatagagatactaatgaatctagacacatataaaaaagatatacatcaatcaaaaaacatatacatcaatcaacacataaatctaggtaagacaaaaggtcctacaatatgaaacggagggagtactgcatatggcaaatggtgttactctatgtcacaaagtcgagcaatgcatgtgagacaataattttttttaggtttttacacaggagggatgagattgttcgcgtggtcctaggataggaacgatg

SEQ ID NO: 48988 - DNA, 521 bp, Oryza sativa
ttaaaatttatctctatagtaattgggcattgcgagtcagctgccacattaaaaaaaagataaagacatgattaagtgatcatatcatcgtgaccgtatattatatactgagaatttgtattgcagataccgtgacactttatattagttcccttttctttctaaaattttgaattaatgaacataaattgtatctatttgaacttagttaacactttcttagttaaatttttgaatgcaaaatttgtagttacaaatagtgactaacatggactatttttgcatcgtaatatgctataattttgacaatgtaatttccgaactaatttgtgcattaaaaccctcatccaggaatcagccgaggtacacaaactgataatttaatgtacagattcatcaaaataactaaaacgataaatacttacataagaggcacttagttctcaccatgaagaaaactgcagcggaaaataaaatctagcgaagcttcagctcactcccacaggcagacaactgggatc

SEQ ID NO: 48989 - DNA, 1076 bp, Oryza sativa
taatgttttctaagcatggctaagcatttatatatataaagcatttagttgaaccaaaccaatatatagggttctagctaatcgaattataacccataggaaaatagagtcatcttcgaccattaattaattggaaaaggctcaccacccgatgagattcaaaaataatgcataagttgaaataaaacaatagctttaaacgggttcaacatgctcaaagggttgtttggaaactgtgtgacttgcttttgaaacaagcgtcttcaattcgtctttaggaacttctccaacgaacgaacgatcctccgaaacaacggaaaacaaaaaaaaacccccttcctttaaaaagggaaaaaaaaccccggcccaaaaaaaacgagaaaaaaactctaataaaaaccaaataaacagtacaattaaagttcataaataggtagagcttgaatttagatgaattatgagacttgaacgacctcattccgagttcgtatgaattaaatatgaattttacaaaatttaatttcaattaaacctattaaagaaaagactattccaaattgattaaacaatttacaaatgacttatagctgtgacaaaagattaaaacatcctccggaaatagattaggtcatatttggtagatgacatatattaaaaaggaataatatgccattgaaaagaaagaacagatttatatcgattttggacggctgagattaatctcgaccgagtcgaccaagatcggatggcttggattgacacacggcagcggcacaacagcggttgcggtggcacacatacagcagcagcacgacggcgacgtacaacgtctaaacagcgacgcggcggcaacaaggcagctagcgcagcggcgacgctagggcagcagctagcgacacagcaacggctgcgctagggttagagcaacagcggcggtgacacgaccaagggattgaaacctaacccgaggggacacggatagaagtctcaccgaaccaaagcgaccggagagggggggtcgacgatgacgatccggcgacacacacggaaacgatgacgacgctaggggcaaacaa

SEQ ID NO: 48990 - DNA, 518 bp, Oryza sativa
tgcatgcctgccgtcgactctagaggatccccggaggaggaggagaggataagagaggaaaggtggagtggagtggatttggtttttatatttagtttgcagtgatttttccaagtggacctcttaaggaggcgtctgtaaaaatctgattttcgcatgtggccacttaggaggctcgcctgaaaaggttagtccatttttacaggtggatctcttaagaggccgcatgcaaatgttattttgcatgcaacgctttgaactgaccccgtgggagggatttttgtaggcggaagcagttatggtccgtgtacaacctaaaaagggtctcatccagaaaaatcaattttgtagtggtggctgtactccgtatgagatatcctatctcacatgattagaattgggaagaaatccacgtaagtaaagtttttcttaccttgactttgcaatgtgttatgcaactacgcctaaccaaaatcaacaaaacatgtcttttagacttgtaggtttcatgactgcat

SEQ ID NO: 48991 - DNA, 631 bp, Oryza sativa
cccgcggcaaatgagaaaatgatattttgtacgttttcgtttccttgagttaataggaaagccgcactattaagaggaatgatgcattgacatacgaggagtgatcaaagtgctcaaaatctatttttaaaaggtgtttctcctcagtttggtgtgttctggattttttcggagttttccgaaactcaatttcggactttccgaaaacacacagaaccaaattgtcgcttctggaaattttcggatatgtccgaaagtgattttcggacttttcgaaaaaaactgcgaaggcaaaagtggttctgtatattttcggacttgtccgaaactgattttcggattttctgaaaatcatcagtagagtcaattttgcatctgtatattttcggacttgtccgaaagttattttcggacttttccgagaacatccagaacgatgttgttggtactagaaattttcggacttgtccgaaaagttttcggaatgtccgaaaaatccttcgttgactttgctgttggtgctgagctggaattttcggacatgtccgaaaatctttcggaatatccgaaaatctcaattattgtgcataacgggcagaatctgggctgtggctataaatagccccctccc

SEQ ID NO: 48992 - DNA, 675 bp, Oryza sativa
aggcgaattcgagctcggtacccatataattaatttgattgttaagactggcatgaagagggtaggtgaccacatcgatgctgttcgtcaagcaatcgcgtggttaactgcttctaacccgcggattgctgcatggaagaggttttgcaatgcggccggtgtgaaagctcgtaagtttgccaccgatgcagagcatcggtggaatgcaacgtatttaatgttaaaagttgttttaccttatagtagtttactttctgattttgttcagtcacgtggtggcccaagaaacagtgacgggtcttcagtactgaacgagcatgtttgggcaattgtcccaaaaaaaaaatttttttttttttaacccccccccaaaaaaaaaattttttctagaaacttttatgattgtactctaactttgtcacaagtttattatccaactgctaatataattttgcacaaccttcttgaaattgctactttatttaaagaatacgaaaatgatgacgttctaactgaacctgtctttcacatgaacaaaaatatttgaaatattgcgaaaaatatacctatgttgtatgctcttgcttttgttttagatcctaggtgtaaattaaggggattgtctgctattttatcacttgttggagatactatagggggatccctctagagtcg

SEQ ID NO: 48993 - DNA, 698 bp, Oryza sativa
  unsure (1)..(698): unsure at all n locations
accctattatgcagagatctctccaacagcgagttgcaagggcagatatcctataatttcacattgtttagtgccctcaagtatttgtaagtatacataaaattttcactgcctttcattagccacatctgaaattcctgactgacattaatggggatagttttatgctatttaaaatcaccggaaaacaccaactaaatgatgagcagttgcattctggtgcaattaaaattatataaacccatcctaactactccctccgtaccattttaagtgcaaccatggcttccgtgtctaacttacatcgtgcgaaaataaatttttttggggaanaaaaaacccaaggagccaattttttttttttcaaagaacataagttatgagtaaagtactattcatgttttatcatctcataacaacaaaaatactaaataaaaaattttaaataagaccaacgatcaaagtttagcgtagaaactgatagctgcacttaaaatgggacggacggagtaggagtaagaactagtggaggtttattgcatcgcatgtactatccatgtggtgccacatcttcgagagaatgagactagcagtaatcggtttcatatgtagttgagggatgaaaacggaccaaggctacagttgcatgaccaaaagtaggcttttctcttgtagttttaaatttgaaagacacatat

SEQ ID NO: 48994 - DNA, 989 bp, Oryza sativa
tttgccttaaacgaattcttttatgtgagattgccacttgcatgatggagtataccggtttactttaaaaaaaaaaattcgagtgaattatttcatgtccgattggcactaagccaacaatcttcacgcttttgccatttactagtaatcatgcacgtgcaatgcacgtttttacatataaaaacactcaaaaattattgcattttcatgttgtgttacccaaaacacacaaacatatttttaagaaccggtgattaaaaagggtcacacttggtgcggcgagggaatttgagactgggaactcatgatcccaacatattcaccctgataaaatttcactaaatattcttttgagctattttagagacaaaattattgtttgttctttgtatgcctctaccctgcaacaatcaatcgttaagatcatctgaaaattggatgagttgaacaatctagctgtttgagcatacaactccaaggtagtataacagggaattggactaatcatattgaaaagctatgtgctctttagaaatatgaaatcgaacagaaaaaaatataatattgaccaatcagagatttttttaatttttttgaaccttttagtttttagctataaaaataaaccttcccaaaacttattttcaaataagttccttttttgccatgcgcaaatgcgggtggtgtgactattgtttcgccaagcgaggtgaggcgcagtgggtatgaaggttcagatttagaaataagtatcgagatggtttatttttaaatttaaaattttaaatgttcaaaaaataacaaaaattcccaatgaaaagcgtgtgactatacttccattgtctgttgcataataaccttttacctacctaagagggtggcactggagagcacaatcatgtatagttctcttaacaatcatgtatatgtactttcaaagtgcaagtcacaaaggcaatatgatacatccaccgctctagtgtatttat

SEQ ID NO: 48995 - DNA, 547 bp, Oryza sativa
gcgaattcgagctcggtacccttctctttctggttccgtttcctcttcctttcccaaaacggcaccacatctgtttcccgcacctttcctttctaggcaacccctcctcccgtatctttttcccctccccctctcggacttctcccagccgtgcgcctcccccctctcccagccatgctcctactttgccctctcccctacgagtccctccctctccccctctgccgggcctcccttggcccacctaatcctattcaatcttcccctatataagccgacctctcccctcctgtttcctttttttttgtgttgcagccacccctagcctaccttccccttttcccccttttccccccttcgggggttttttttttttttaaaaagccgccttcttcaacaccctagccggcgatgccctagtcgccactgccgctagccgtcaccccttgccgtcgtcgtcttggtcgttggcgtcgtcttctcaggtgagctcttctctctcccatgtcgtttaccggtgtagtttatccctaggatttaatctaat

SEQ ID NO: 48996 - DNA, 609 bp, Oryza sativa
  unsure (1)..(609): unsure at all n locations
ccctctcaactttagttgtttggtgcatgcatccaaatatataccaacgctagtggaaatgattagtaataaaccctaccactcagttgaataccatattttattctattatatgtaggtattgatggtcatatactatgatttaaggatcgtcgatagtcacgactagccgtatgtcaaaaaatgttcaagccatgttttggccgactatgaaaatgtttttctagtagtgttttggagtgcagatccggcgggcggcggtgtcaatgaaatgggaatggggggtccccatttccccgtcaaaagcaaaatttttaaaaaaatttcccaaaaaaaagggtttttttaacccccccccaaagaatttccgaaggggtaagctgtaagaacagagtttcgaaattcaatattatactttagtgttttaattaaggaaaattgttgcgtctttcgacaccaagangtagagtagtggtcctatccatgagccataactcccccaagctgccattgctatgcgggtgcactggttctactttgttccttactcttgctgatgcgaaaaacacacactggcctgggagatctacttagctccagtgcaggacc

SEQ ID NO: 48997 - DNA, 559 bp, Oryza sativa
  unsure (1)..(559): unsure at all n locations
acacttagttactcaaagctattttgtaaacacgatcctagagctacacaatattattaatcaaggccgtggacccacacgaacctgccttaacccaaggcctacgatgattcagaccgaactggcaactccgaccctgggtggttctctcccaaggcctttcccgggttttcccccccccagaaaggggccccccccaaaaaaaacccccccccccccggccaaccattcatattttagtgtaagcaaattttaagaattaaaccactaacttgggtacattgctaggcttgcccatatccgaaggcactgctattcgaatagatgtactctgatcagaggtgtacatctttacccacaagacacatncttactccgcattccatggccttggaacccgtcgtaaacatgtgacataacccttcacctatcctagccgtgaacaaaagtaccgacccaaccctgcctacggccggtatcccgggataggcaggccaggattgagcccctagcaacaagatctagaccgggtgcgccacacacataggggtgagaccac

SEQ ID NO: 48998 - DNA, 854 bp, Oryza sativa
ttttcgaccgcctcgtccgcggccttttcagccatgtttttccgcctcctcttcttcctcccgttggggctcgccatcacactcttcgacggcgtccacgtcatcggaatcggaggaagaagaaccctccgcttcctaggggcaagcttcacctgcccgcgcgtcgcaggaggcgaagagcggcaaaacaatacctgtcacatagacaataaactttatttgcaggaacaatgtaggtttcggcatgagcatcggtcgaaagggggcgccacataccataccacatggtttgcacggtctcggccgaagctccaatctcacccttgcccgtgaggggcttgttggcggtatggcaatgagggctacaaatagtcccatagggcatgaggccctttttttttttttgtcgaagccatgcgaacagtggggattgaagcccgagacgtcaagattagtcagggcgaagtccccccatggcgaagactatggaataacgacggcgagaggcggggaatcacatgggtaccttgccaagccataaggcctcttgggcgaaggatgcagggcgaagagtatatgccgaaggcgccatagcaagttcgcccccgcaaggaccgaagaagtctttccagcccatcaagcctaggggctattgggccgatgatcgcccgactgcccatcaggggcccgtgaacctcaattacactatgtacccatataaatgtccctttcataagggcaaccatgtaatttcccatgtataaccacaaccctagtagtaagaaccagtaatgagggctataaatgttcccatagggtcatgtaatgggggatccgaagaaaaattctcaatt

SEQ ID NO: 48999 - DNA, 1116 bp, Oryza sativa
tagggcgaattcgagctcggtaccccataccaatttttctgacaaacaacacctagcaaaatattgtgccacagtagcaaaaaacacaacgccctaaaaactacaaaatttggatgatcgagactctaggataaaattgtggcacagtagcaaaaaactcaactccttaaaaactacaaaattcagatgatcgagactctaggagaaatagcaaaactataactgatcttaattagattttcaaatattgagattatttccaaaacaatagacaacaaaacacaccttgattggagtattatttagtgccaataaagttaattatctacatataatatgattcatttctggcatattaaccccacactttccttgtgtagtctgcaaatgttgttggctgggcatctttcataggacagattgatgaaacacaaacaagtcaggaaggtgcaaaatccctgaaattatgctctgaattgagtaagactattaaaataaattaatctacacatgtattggctgcattttgttttatcatgaccgttgatcatattacgaatttctgcaaataaaatataccttctggaacaccatagggtattcttgatttttttaactttaagttttcattccaaattgagtacaacttcaagcttattaattcctgagtttggaattattgaattaattaaaacgataaattcaaactccaccatgacaacaaataggtagtgagtaattcctgattttcaaattattaattagattatgaaatgctatagtggacactgcaaaccaaactgaccacaatccattatgtaccaattattaattttagaaaaaaaatcatgaaaaatctataaatcagagtccaagccatgtacaactcaatacttattaattccaaattttattcattagattaagaaaagaactaaatcaagaatccaatattaagtaaaggtattactaattaattccatcttcgcaaattattaacctaagaatatgaaagtaacaaatgagatgatagctaagatgtattatatatatactttataatagctaatttgaattttgaaattataaatttgaaaaatcgttatgtccttagaa

SEQ ID NO: 49000 - DNA, 507 bp, Oryza sativa
ctttttcttcttgagggaccagatcgatgtggtccttcagaatagtgaagttccgcctccctaggactccgcatatcgtagggaactttttgacagctttcgtcggagccgtcggatatccaacatcgtccatctctgttatggtgtagacttccttaggaatcttattctgggtcctaggattccggctcgatgtagtcccagtagtggccgtcgacatcggttcgccttgctgtgacatgtcctatgtcactgttgtacggggagaaagtactttttaaacacaaaattgcatctacacacattctcttatggtttgatatacctctatctcctacctacgttcgcctcatcgacgaaaccatagcatccatactcaatagggccggagcagccgggaactcgacctcgacatcagtataccactcgaacttgctatcaatgtcactaacataagatagtggcaacggtagcaagttctagtgggatatggatgtcgaggtcgag

SEQ ID NO: 49001 - DNA, 901 bp, Oryza sativa
ccccgatagcttcgctcggtaccccgtcccaggtgatcacttatcaggtctccatggcgctcctggttttgctcgcttactactacgaaaactctttttgcatgcaggcgagaagcatatttgcatacggttgtgcccatcgtatgggtaagaaggtctgcaaaaatcacgtttttcacatgcggccggcgtaaccgtattttcacatgtggtcgcttatactggctacatgcgaaaataaattcagcaataaaaaaaaaaccaaaacaccctcccccaaccctagctgccaccggagcgccgtatccccgccgcccgagccaggcgcacgtcgttgccggcgccagatccatcactcccgccgcccaccgtcgtcaccagccctggatctgttgcccccgccgcccaccgtcgtcgccggcgccggattgacagcccgccgtccacgccggcgcgggatcggctgctccaccacctgttgtcggcgccaacgctggatccgccagccccgccgtttgcgcaagggaggggcgcccttggcaccgaatccgcatgaggcggtgccgcccctgccgccgtggcggtgagggggggagggttgcctcgtcgtcgttgtcggcgttggcagtgagaaggggatggcggtggcgccgctgcccgcgttgccgcccactcgctggatccactgtcccaattgcgcgcccgccgtcgccgtagctgcagccgctccctagggtgacgaatctgaccttcccgagggaggcgccgcctgatccgccgcccttgctcccggctgccggcacccactctcatagagggagagggagaggacaaaataaaaagagagggagaggagaggtgagagagaggggggagagtgatataatagaaggggtgagag

SEQ ID NO: 49002 - DNA, 672 bp, Oryza sativa
atgaatgtaagcatttttccctcatgttaccttctctcgattttttcctaacatgtttgtctagattaaatttttaagagagaatctattgaatttgttgttctataatatgctactgagccatacttaacttctataatatatcattgttgtgcagtaagattcattagtattgtatactcactccgtcccaaaaaaaattgaatataggactagatgtgatatattctagtacaataaatctggatgtatgttcaaattcgtgtgtcacattcaatactagattagttttttatgagacagagagagtaatttttttaatgaccgaagtacccttgagatgaaaacttttaaaatctgctgaaaatttcgaaatatcatattgtaaactagcactagaacttacggcgcgcttcgtggcgcccttgctgtgtaaataaggaaaataaataaggaggccctgaagagcctattcagtggattggctgtagcaccgctagctatagcattcaggttgtgaggaaaaccagtgatggattaagtagacataaaatacatagactgaatgttaacattgtttgtggagaagaatgcataatctagagtacattatacatcacaaatacaaccattggaactaacatcgataaataggcaggaaattatggggta

SEQ ID NO: 49003 - DNA, 1256 bp, Oryza sativa
  unsure (1)..(1256): unsure at all n locations
aacgggtacatactccctccgtcccaaaatataatgccacatccacccaaaatcccttatattttgggatagagggagtataatatatcacgtgtgttgattttttattaactagcacctttaaatataataaattaaaggtggtggtttttttaaaaaaccgatatttattatattggtgccgatttttctctagaaccgacacctatttattcataaaggtgttggttgtcgattttagttggttcgacacctatagtgttgtatgctttgtgcgttttcgtggtagtgacactagcaaaagtttgcttattagacattgcactaaactagctgaactcttgtttaactattgtaactcttacgagtaacaattaaggatttaccactaaaatcacatatcatagacacatagaaactcatatgttatagactgtaagtgacaaatctatcacatcttaaaatgacaatattaaatgcccccgtactcttttcacatcttaaaatggcaatattaaatgcccccgtactcttttcacagatggattgagcagacgacaaggttaattactacctctatcccaaaatacgtgtcggtctggattgtttagcatgtactaaggttaagagataaagactataataccccttaatagataatgtatattttgatttgagatggtggttaggggtagaatggaaagaaatttgaattgaaagtggttgatgtgataaccattttggaacaacttttgaatgctagaaagactagtatggtggaacagaggaagtaattaagggccagtttggtttggtgccataccaaaatcttggtgtgctaaagttgcaaatttggatggccaaaacttttagattttactatctaagagatgttagattttactatctaagagatgtgttgttaaaatttggcaccaatccaannnnnnnnnnnnnnnnnnnnnnnnnnnntgaattggtaggcacaatttggaaccaaaccaaactagccttaacgctttcactcaattattaattggaactagcccgagatcgaacggacctcgattggctgaaccataatgcaattaaccagagatgagaggtatttctgaaaatattgatcaggtggcaagttaatcttccccattcccatggtgtttaagtaaacatatgtacttgatggttcattttatacacggaatgttgaaaaaaaaacagaactttagggatgtcccatactttggtattttgat

SEQ ID NO: 49004 - DNA, 1042 bp, Oryza sativa
cagcaacataagaatctctgagcatcttgctctgctctccatttgttttttatctgttcagatgcaaccagagtgcagaaggggtggcgcagaaggtctggaacttctccaaatgcaggggcatgtgtagttaccgtttatacaggtaagccatgtgaagaacatgcatgccatggtagattataattttaaggttagatacttagatttgatccttttaatttggtagaaagaagaattgggagatgctggcagagatactggatcatgctgtcaatacgttgggttacacttccgtccataaattgttgaacaagggttcatatgtggtggctgttgcagagatgttgacatcaacccctctagaggtgaagtccaaatgatattttcttcacaagtaacacaaccttctggattgtatatttatttttttagaacacgcaggagatctgtgtatcatttcattaagatagagggaaaatgattgcatatttaaaggcattgccaagtccaaagaaacaaatcataatatctagttggtggattatttgtcacttctactaaattaattatagatacatccaatttgttaaaagcagtgtatcctgtagatatatatttgtagtcaaaagatgcaacaagctctctttcgcatgttgtttattcataaagcccatagcatcgttgcaaacttgcattgccgcttgctttttttatcatatatagtctattaatctttctcttgggaagtatcaaaggtgtaaacttaaaattttacttattttattgtttgccccaaagaagaaatagaaccaattaatttataagctatgctaggcatgaaaacattacattgtgtagttcttttcgaaaaggagcatcatcttcttttagaatgatttaagacctgaccaattaaggagatacaaaaatagaaatcacatgtagattggttgctgtcacatttaatgatagaaataagttagataaatccagttcttttgaaagcacttcaatcctatagatgccaatagaaataata

SEQ ID NO: 49005 - DNA, 2783 bp, Oryza sativa
gagaaaccagtgaactcaagaggcaggtgggtccgggtgctcagtgtgttattatcattcgggaagcctcacgtaccttctggcgtgtggattacttgtttttcttttttccaataaaaaaataaacttgtttttcttttgagactaatctttataaacgagtaaatgggagatgaggtagcaaaatcaactacttccttcgtttcacaatgtaagccattctttatgttaataaatctagacacaatgtaagtcattctagcatttcttacattcatatttatgctaatgaatctagatatatgtcattctagcatttctcacattcatatttatgctaatgaatcttcgcataaatatgaatgtgagaaatgctaaaatgacttacattgtgaaatggacggagtataattttatttttcttaaaaaaaactctaaatagtttagggctcccttcgttcgaaatgtatagtaggtgaacgttcgccgactaataatctagcgaatcgctcagatagggaggattagaggaggcgggatggagtggtatgtgttctttcttttctaatttctcttttttatacgattttcctggtacgtatcaagcatatatattcttatctttccaatttttcagtttgcctttatttacgtgatcctcattgtacgtcaagatttcttttaccttctttttagatttcctagttttattaatagagatatttttatatgaattattcacgtgaaaactttctacatataaattttacatatataattaaaatttctacgcatatcctttatatatgtaaagtttctttatatagactttatatataaaaagtttatatgtagaaagtttgtgttataaaatgtatatgtagaaagttttaatgaaaataaattataaaatgaattctgcttataaattttatatagaatttatatatgcaattagcaaatttagttttataaatatcaatggaaataaaaaatatgctaatcagctctagatatttttgggaaaaatataatcttatcatcaaaacaaacctcagaataaacgctagtcatgctgagtatgcgtagatttggtttttaaccaaagatcgacgctaatcatcattagacgcgtaattaggcatataattagggggaagcctgccggttcggatgtaaagagggataagctgttgtaacgttcgtgagccacgaacgttcacgtactagacgcgtcccccatcgttttgcagaagttgttgcttttcagcacaacttgtgctaggctgatgcttatctataactatatctatactaatataaaaaggagttgccacttccaatcctacaggtgaaatcatcatccctaatccctaccgtccatccgcatcacatcacatcatctaccatgagtttgcaatgcaacaggtgaactcatgcatccacggatccaatcaccaacggagcaatctcctcctcaattctcgcaaatgtcgcccccatcatcatttcgtgattactcccccaattcatgctctctttcccgggattaaacatcacacattcggcgccgtcccttgcaccaccatgcgatggagagatcgcttcaggtatcattgattcgctgcaccttgatcgtcaccaggccactatctccaactctcctcgcaccgctgtcgcctgacgaccaacggacggacccttcgctatgcgcggttccgcaagattgctggggcacctccgctacacctccgacgtgcctcgcgataggctcttggtcgaattggcatgactacatcttgatggcaccagcaccgaagccgacgtccgctttctccggcaccaaccttgttgccggccgctggcttcagcagttctggccatctgcataatcagccaaccaacatgcttggttgtgtgtcgtccactgctttcgtgcgagcatagaggacaggttgttgctcggggcaccactccaccagttggacctgattggttcgatcagaccggttggagctgactggttcgatcagattaagggtatccaaagtcgaaacacatatgagaattcatatgctcccttctgattcatttgtttagtacttttgtgaatgagcatagatgagcatccatgaataaattacatatatattaagtagttcacaaagtaattatatatctaacctgagtctatgtaatatagcagttcatatgtgttacctccctttttttgtctaaagaaaaacattattgcttcagaaagagttgtaaagttttgggatacaattaactaacaagttacacatatctgacaggttatgtgttcaaactttttcccggatcggcattatagcagtttaaaaaaacattctcagaacatgatgggcagcggccttcgtttctctgggaccccaggtatccctcatcccctgcggcaatttgttcaatcgaatcattaagagtagcgatggtcaagcaaataggagtggcttttgactaggagaagaaaatgcctgactcaatggtgtggcaaatgctgcatcagacggtagttggcgggacctgtgctttagaatagcatgtgtggagctgatcagtatagtgggtatttaaagatgttctaattctttgactcttttggttcgatctcccttggttataacgaaacattcttttttttttacttttggcatagaaagctaatttgcacaaaaattatggctacgcccaaggatgtggttaaagttgaaaagtttgattttattggttattcctgagaacat

SEQ ID NO: 49006 - DNA, 1001 bp, Oryza sativa
cccctgtgctttagaatagcatgtgtggagctgatcagtatagtgggtatttagagatgttctaattctttgactcttttggttcgatctcccttggttataacgaaacattcttttttttttacttttggcatagaaagctaatttgcacaaaaattatggctacgcccaaggatgtggttaaagttgaaaagtttgattttattggttattcctgagaacatgaaagatttatattttatttctgtagcctaaaaaggtagatctgaatttctgatttaatgtggcactgcaatccaccatttgatactgctagccatgctaaaaaaaactaccataattgtctctacagttaatacaagcatatgcagatatgctggagatggagtaagcataatggaagaacaataggcctttatttgatggcttttagctttaagatgctcaatgaggagggtcaaggagattttgttcttttatttgccattgattggcctttggttgatatatctgatttcatgtactccacaggtacaacaaaaaggtaatatccatatatgcaggattatttctttactttaggttttttactattttactatgattagacaaggataaatggatatattttgtatgaacctattagataaactcagcttagtgtatgcagaggtacaagcatgaaccagttgattctgaataggaattactactactctttttttttacgaatttgagtgtgtaccttttcattagcatggcttaaatgcttccaactagcagtagttggtgaattgatagaattttggtgctttttggtgaaatatattctccaaagagataaaccttattttagataaagaagatattttattttgaagcataagatgtgctatatccccagcctctgccccaggggcacgcggcgcgaccaaaacacattccatgatgctctagaagtctagaactactacaacatacataattttatttttatatca

SEQ ID NO: 49007 - DNA, 826 bp, Oryza sativa
cagatcgcttgatctctcagttctatatttctgctgacaactacatgaccatatctacatgttgctcaatgttttgattttctgtgagctaattaaagttatgagttcttatagcttaagtactgaaagtttacaaattcaccaatagatgtaaggtttgtctgagtttagtgtctgaccttgacccttgcagtgtgtgtaaacaatatactcatgttaccttttaaggttacgatttattctctacaaattcatactaaattcatattatacaagttcatacttaacaattgatttggatttctaggtatttataaaatccagattattttgtgaacatgaacatggaatgtatctaaattctgcgtgtggacacagccttgccatgtttctcaagtatgaatatatccttgcacacactgtttcccccctatttttacttttcttaaatatatattatacaaatgtgcttttgattaggtaacttttctctctgttgttgtagctatcaagttgctttcttgtgtgcttttgatgaagtcgcagacttttatcggtcccagcttatcacaagtgaaactcgacatggcatagttgttgccacggcattggaggttgataaagcttcaagtaagtcgtattttcatgtttcgatcaattcactgtcttttacttgctgtcattatcaaacacgaaagacatttatgtttcagattgcctatccaccatagctgcaactacaataatgtttttgcacaatcgtgactaccagcggtatgctttgttggaaggtacaacatctcaatattttgctattacttttgaa

SEQ ID NO: 49008 - DNA, 642 bp, Oryza sativa
ctaaggataatttaaatcatatcaatcaagacaccatgcacacattctccaataatatatgtatcgattaaaatgccttagcattcacatattctttcatgctgcattaattgtattttgatgaaatccgtgtccatgcgattatacgacgatcaatttaagtaatttttaattccattatatgatgatcaatttgggaaggagggagtagtatagataaaaattaatagaaaaccaaataaccatttaataatattgaagttaaaaaattagtatggtaaaaattgtatttaatccaaataagccaagcaaaccagagacgcttctcttctcaccggaggttgcgcctggagactgcagagtacacatctggattttggacctactaggctactagtagtcacctactacagaacattcctgcactttattacaagttgcttatacctttcagagttgcaaaattaaaaaaatttcagaatacagccaatagttggacaggacttgcatgtctcttctgtacgcatcatctagtctggttggttagataagttagttagcaccagtgcatagttttgtacgacctaatactaatatggacatactatttgtcatggttctgaaatatttataccaattgcc

SEQ ID NO: 49009 - DNA, 708 bp, Oryza sativa
ttaagattgcattttttgcaataccgtagtcaatatggtagttttttctccattttattttgacctaaaactcaaaactcagtcatatgaatccaaactctcctatgatgcttttttgacttacatttcagtctaacttgtaatgattactgtaattcaaaactaagagatcaaggcatcgagctgtcttttgttcgtgtagatgaaggatgtttgatgatttgtattattttccaaggctgatggtttgtatttgtattagactgatgaagacatggctagctaaatgtgttctcatcctgaaccagaaagtttaatgtgttgtgatgatgattttgacaagcaagtaaaggcacatatagcttgatagatttcttgatcacttttgttgctccctatacctgtggtgatcagcctccatgaggaactccaagtatttagcttttaatgaacacaaaatgcatttttcgaaagtcttttaagtttctttgatacaactgattgtcactctacttaattctactggttatttgtgagtaacaattgatagtgcaatacatgagtaaatcaagtgtacacgtaaatcattcgcaacatatatttgcttccatatcataggcattgtctgatatgcgcttgagacataaattatcattagtaaacaagagttgtgcttgtgctttagcataggcatattacggtgttatg

SEQ ID NO: 49010 - DNA, 565 bp, Oryza sativa
tatagggcgaattcgagctcggtacccatgaaatttcatagtctagcatctaactaaacaaaatataaactatgaataaatttattattgagcagtggcattataacatatctgcccccttccctaaaaaagggaaaatatgacacgaagggcctataacagtgcatgcttacttctagtgattacacaaaagaattaaaccgcaagcaccaccattatttgccattgacactatttatatttgataaatagtaaacattctatagcataaaccaaaatccatactatgatagtggtgcacaatattatttattctaaaaggcgcaatgggactgcaaaatgattgagttgcgcacattttctcctataactattatgcctaaagggtagagggtatatcgataaccttaactcctggtggaaatgctactgggtgagcgatccgcctcgctcgcgcagagcgatcgattccccccccttcttccccttccttccttcacctgggtttcttttttggcaccgtattacttttctattttagtaaatttatgcacctaaaggttat

SEQ ID NO: 49011 - DNA, 676 bp, Oryza sativa
ctattatttgtgcacaatggactgtttggagttcacagatcaatgctgaaatgcaacctttttttactacgcatcttttatgataacttacttttacacaacatatcaggtccaaccacctaggtgtactaaaatgttgctctagctggggcattaaataaataaatattctgaaacaaaattaatgaatgtatgggggcttagatcacaacttgtagaaacacctaaaattttcaacaacaaacttaaaagtatcttagaagaaatagaacttggtatatttgattgtggaccgattacttagaagacaaatttaaaactggacttcatcaatatgtatgttaaataaattaagaggtacacgtatacttttaaaaagaaccatgtggtttggtatcttaaccaacttggttacataatactgatgtatattatgcttgcagaggaaagcagtgatccaagacctttacttgggcaggaacccaccaatgtttacagatattagggttgtcaggcaatcaactgatgatgaccatctggtgtgtaattatatgcctcagttgttcaattgctttaaaaatgttctctttctgggtatttactcaaaatcgaccataaaatttataagataagttaacatgccaggttttagagataggaatgaacttcctatctg

SEQ ID NO: 49012 - DNA, 1925 bp, Oryza sativa
aacgaacatgtgcaagagagtttgttgcatctttcgacttcatatatatccacatgatacattgcatttgaataaattggatgtatctatattttatttaatagaaatgacaaacaaccaacctaatggacattatgattttggatctttttgggcaaggcaatgcttttaaatatacaatccaagaaaagaataacttgtcttgttttgcagtgagcggtcaccatagctataatatgagacatgagccaaacataatgctgctcttgcaaaatgtataagaaaattccttgtgtgcctaagtcttcactccatccttctatacatgctcctgattctttctttattcctagataccaccgagtttacgtactaatcacctcaactcattttgttactattcgatttttacaaaatatctatattgcacctcgctcaaacatatctagcttcatataaatattgaggttaaaacctttataaaaaaaatgaatgacacaaaattgtttgacccaaaatttgaaattcaatttcgaaattttcaaatgtattgaaacaaaatttgatgaaatttcaatacataaattacacaaaccaccatttttctatttctcctcttcttcgacaccaaaacaaatactccctccgtcccaaaatatagcaacctagtatcgaatacacaacctaatagtactataaatctggacaggacaggaggtttgtccatatttgtagtacaagtttatgttcgatccagtactagattgctatattttgggacagagggagtatctttttaatcaacttcaaccaaattggaaaaaatttccatggagataagtgaatctactctccaaaaaaatcaccaaatttgattgaaactcatttcaaattataatttttatatttcaaatttggggtcatataattatatccccttctatttttttagaactgaaacaattttcaccttgagaatgatgctttttatgaagcaactcacccaatgtgtatagaggggattagaaaaaatctagggcatgcaagacaagacaaagctcaatggcatggaaaggatggagcaaagactcaggggaacataaggaattttctaaggtatagcttggtgatcactacaacaaaagtatacattcatgatggctcaactaaaatggtcgttgatcattgagtaccaacagcaataccaaacaaaaactaccgctaataatttgactcatgacacaaaaggcaagcacattttttagactggagcatgtcaccaaaggtcctcacttatgagtcgaggtacaggatcaaggaacacggaatgctatttttgaaaggttttaaaacaaggctgggatgggacgatgatctgaggacaagcaacacggcataattccatgttttggctgacttttgactcatactccctccgtcccataatataagggattttggagggatatgatatatcctagtactacgaatctggacagggagcctgtttagattcatagtactagaatatgtcacatccctccaaaattccttatattttgggacagagggagtactgcactaataaacccacctacttttctttggagatcatattagcccaaacaatgtgatagctcaagaagagcaatttatcaaatttggagattcaattaataaatattggagtttaaggacctagcatgaacagggcaagttcgtgatccggctaataaactgaaaggatttcaaaaggtaaatttgatagtgaagtaacgccttcatacgtccaccaaatgcacgcagattatagtatctgcttcttagttcttaagaacaaaatttggaacaaactggcagaacttttgtaggtactagctaaatgttcgtgctttgctacgctaaaagaaaatatatcataatat

SEQ ID NO: 49013 - DNA, 540 bp, Oryza sativa
ttcccaatcttcttaatcccctatccctcaaactcacccttagggctcctttggcagcccaggatcccactgggatcccagcccattccctgggagaaaggcccacgggggaaattgtcacgggttttattccatgtccatttggaagcccacgaggcagggatttcccggcccaatccgcggggaaaccctagggaaaggaccccgaccttcggaggtcgggaatttttcctctctcaatccgccgctgcttctcgctcgcgcaacaggagtcccttctctctcgtgcgaacaacagcgggcgccgccgcgccttcttcttcggcgagacccgccaccgtcgggactcctcctccggcgagaagggtaagcccttctcctcattcctctcctctcctcctgctagggtttccgttctcctcctcctctagggtttccgcctcctctagttagctcccaatctcgctctccggccttagcgcttgcatcacaggcaccgacacgtgggcgcggcgggtggcaccacggcagccggggtaa

SEQ ID NO: 49014 - DNA, 695 bp, Oryza sativa
ttggggaaggtgaaatgtttctaatccctttcacaatatttctggcatttttatgcaagcagagaggactcttgtccctttggatgtatatatcatttactatctatgaattatctatttgtcactattgaatttactatttaagttttgaccactaatatattttaaattgtttgactaaaatgaatgagagtcttatcattaatttggtaaccaatggtagctagcagtattgtgtacttctaaatgtttacaaattacaattcgttgctagaaaaacaatcgtcaaaatttatgcagtgagttcaacagtgataagtacatgaaaaatggaaaaaatatgtttgagttctgacaatgtggacatatgctcatgatttttcttttgactttgaaacagtaggggaatcccctatggtatattttatattaaaggggcgtttatgtacaatgattcactatttaatatcttcttgaggggtgaaaaccatttaatactgcaatacttcttgaagtcttactactaaagaattttccttggtgtttagggcagctctgcttcaatcattgtgtactatgataaactatcaccagaaactattgttttttaattgccatctcatctcacttcatttatcttttacgttatcttgcagcaataccctagagcatatttgaccgattctggttctggc

SEQ ID NO: 49015 - DNA, 577 bp, Oryza sativa
attcgtactcacgcaatagttcagtggtgtaattcggacttttccctaataaaaatagatttatcgaggagtgagcgtaacttaactgattaggctactggaggtgaaacttgtctatccggattcaaattttagatttgacacggtgctcatatttatggctaattattcttttaagtgatgcatttgtgataacttcgttaatctcaagatatattcaaagatgatgtgtgtttataaaagcgagtgtgggtacatatatgagggcttcatttttctctactaatatcagcctcttctcttttctctttagattctaatatttgttcttctcttctttctttttaatatttgttattaatgttactgaatttttcctatgtaagtctccaatacccactttaaaatggggaatttaactatttgccacttttacatttgacaattaaccaaatacccttcttaagattgtacttaagaatttgccattagagagagaagcttttgtaactttttgccactttttgccctgtggagtgccacatgtgcatgccaacatggaccaacgtgaaaaatg

SEQ ID NO: 49016 - DNA, 672 bp, Oryza sativa
atgaaaatggccttggcctccaaatatctaccatggtgagcatcgccaagacccttgcatagcgtggcttggtctcaggcatgcccatgacgaggggttcttgttggactccctggtgagcatcctaagctgcggtcaaggtcagcaaattgcttgggtgttggcttcctagatgttggcacgatcattggcctagctagaggccaaggaaagaaaggatcaagaggaaggaaaaggaagaatatgacaagtagagcaaggggcatatttaaccttgcatattgtttctctcttagttagtcggaaatggatattttaatggacataatgtccaatagcaaataaccatttcttgagagtgtccttcccaaagattgatttcttagcaaaatttgccttttatatttggagtcgtgcaaaatattttgtgcgtatagatgttccccgtgtacccatctccctccgtcgctgcaatgtgtaggatcaagatgtcaactagagggagggtgaataggcgatttaaaactaaataacacctaatcaaaactaacctaagttgctaggctcggcgagggacaagtctaactaagcaactaagttatattttgcaatcctagggtgatatgggctcaaatatgtatctacgaatgtaaattgcacaaatctaaatgt

SEQ ID NO: 49017 - DNA, 723 bp, Oryza sativa
cccttgcttttttctgaaaacaatgtagtctattcatctttgtcttgggaagtattaaaaagttaataacaatatattttttttgtctatcacttcttcttttgcaaagagaagtacaactgattggttttttataagctattctagttaacatcacgtagtgtttggaatgttttaagaccttaccaaccaaaagtatccacaaataaaaataacatgtactccctccgtcccataatataagggatttcgggatggggcgcacactggtgcgtgtgtgtttttccacatgaaccactagtttctgggttcttccccttgcttccgaaaccgtcacaccaaacaccattattttatatggaacacattaaattccttcctagaaaagggaacccaaaactgaataaatacgccaacggagctagccatggggagcataagtttcatttgccatgtgagtgcccgtgagtttttccctttctacaattcatcttccatagaaactgtggtggatggatctcaagaggagagatgaaggagctgaagaaagctttgtcaaaccactgcaacttaaggtgaaggattaccctttacttggagtccatatctcggaatgccagatctatgacctagagaaccacatgatctgttaccaggtgagcaatctctttagcttctatggttcactatggatctgtttggtggtttttattccattcaata

SEQ ID NO: 49018 - DNA, 1640 bp, Oryza sativa
  unsure (1)..(1640): unsure at all n locations
tgcctcgcactgtcgcacatagtgacatcgcatagagaaacacgaggctatgctgggtaaacgtgggggtgcaccaaaagtcaaggctgtcaggcagggagggagctacataagccaggcgcagcatggaccaaggtgatttccaggtgggccatagagcgttaggaccaatggcacacacgcacccaaccacatgcccacggtgaaccacacaaaggatccaaggcatcacaggatgaactataaacaccacctaattaaaccgacaaaccaaacgtgatatattcatcttattaatcacataggtaatatgttctgtgtagcaacacgaaagacacatgctaaattttggtggcagcatgccacagaattactgggcaaattcctatcgccagcagaaaatgatgtgatattttttgttacagaaaactaatctgctattgcctcttttttttctggaaaatgaatctccatatcgaatctaccatgtgctctgagaagcaacataccatagtttttttaatggctatctaatttgaccatgcaaaaatctgcataattcaaggtaagaacagagagaacagataagagctgcagttacaacaggctgtgtatgtggaggaatgatataattcaaggtccaaatattagcaggatctcaaggtctaaatattagcaggatccaggatcactaagtagaaataaacacactcgcagtttctgtttacagtggcgccataccagattctggataggaattttcctaccaatatatcacccctgtcctaagcacatatccagttatacatgcatgcttaataggaaactaatctggatagaatctttcctaccaatatcacctctgtcctaagcacatatccagttagacatgcttgcttaatagagaactaatctgcatattgagtgttatttttttgctgtagtaaataaatctgcatattgcatttaccatctgttctgagaagcgacatcattcataggcacaaatggatggggatctaggacagaagccctgatgtacttgtctagaacactaacttctttcaaaaaccagagtcagtattgtgattttttttatcaaacagtcaacatgcttgtatagaacactaagggtgtgtttggttcctggtcaagattggatgggatacggtggtccatattttgctggatatggcggtccagttttttgtttggttgtagggacaaaggtggatttggtgatccaattttttgtttggttggaggaagtatggtggatttgtaggtgtggtcacctctcacttgagatggtgaatataccccatcaaattaatacataatacacattccattataaatacacactccattataaatacacattccattataaatacacatagaaaaaagaaaaagaaaaaagaaaaaagaaaaaaaagcagtgccagatctgggctcgccgacgccgctagcagcctcctcccgccggcttcctcccgccggcggcccgcttctgccaccaccgaggctcgccttctcccgccgccgcctttctttctcgtcacccgcgccagctgccgagctcgtcacctttctcgcccgccgccacactcgtngccccgcgccagccgcaagctcgt

SEQ ID NO: 49019 - DNA, 1121 bp, Oryza sativa
tacattgatgtgccacataagctacagtacatcaggaatgagaggagtgcatcaaaatactttagaccatgatggatatttcgaaagtgcaaatgaggggtggccggtctgtaaaaacagttttctcctaaaagatcgacattggtcaagcgaccttaatctaaaaaataatttcaaaggtacttcagaatggtcaaagctcagttctgcgatagacattgtcatagacatttggatgcatgtgtcatggaagtgcttatactattaatatgaacatgtattttggtttttttttaaaaaaaaaaaactggcacatgattgtcaattttgcctaaccatagcaaaataggtgtgtgaagtttaaacatagcgaactatgactttatcaacccactcaaatcatgctccttatgaaaagttctagatgagaaaaattttaggtttgggagtgtctagattgaaatttttagtcgtttttctacccacttggatgtcaatccaatggttctcatcactcccactatcattctttcttaggtatatataaatatattgtttgtaggaaactaggaatcatggcatggatcaatgaggaggcactttctaagccaagtgatcaagtcaaggtgcaaacttatcacgaagggtatgtattctagctcttcttcctccgaacatacaagcataacttaaaatggaatcttattgaggagtacttttatatttactgaacttgggttgtagtctttcagaactcattcgaagtgtttttgcggcctgcaatcctaatcggccaataacacatacgctttctggccaaactcctctacccttactctcataaataggtaaccataatcctttaacgttcacattaaaaccccaaatttatgatattgatctagcgtcctttccatgttctcttgcatatttctttcattgtcttgtaggagctaaccttcatatgaggtcaatgtaccaaggaaaggttgataacaatcaaaatcgaaaggatggagtaacgattgcgtgagtgctagtcctcagaattaattggccagaccatcaaacattgttcctcattgattggtagtaattaattgtctagacattgtggaatg

SEQ ID NO: 49020 - DNA, 1204 bp, Oryza sativa
agaaactgcaatgtttacagtccccaatgaaacatttgtatccttttattgatgatgagtattgatccgagttccaaatagtacaaacatccttctggtcatagagactcagatcttgtaggatggcatgttggtcctcaaactggttgtaggcttccactgacagacaggttaaagatgttgcctagttcatcctgttcagaaactagttccagtatgatattagactttgttatcaatgaaaagaatgtgcctgatgcccattccattgatctttccataacataagagggttcggtttgttagacagaccacttgcaaatctgcaatagccttgaaagattccattaacttcatattgtgtccccccacaagaaagattcatctcttaatctaaaaggtggtttacttctattaatatatatagttggctgtgtatatccgtttggatgtagaggctggtttaatccattatctaaaaaaaattaatatatatagttgccaaagcatgcaaatgcacccgaggaatatcaaaatgtcttgtgcaggtttttgatgagcagagtattatgcaggtctaacagtagaatctactcaaattgaaattctttatcttgttgaaaactggttgctttatttaactcaactccacttagggtggatcatttgtagtaattaactagttgaaaccctgcgctttgctatggaatacatggatgattttatgctatatataatataaattatggatatatatgttaaataatgtgaaaatgatgtgaggatgataattgacatgatttggtatgcttggagtaataaattgtatatatgtcatggttccatgagctttaaaataccatagataaatattgctagtgagtgatcatgtgtcatatttagatgttaagcttatagtactaagtagtgggtatagaaggtatagatgtatcattgggttttgtctctcagtgacacagcggtcagttacccaatctctaaaaaacaaacccttttcaccataggcgagcaacgatagcgagctatgtactacacattcgaaaatcgaaataacctcgtagtcttgaagtatccaaaggtgttacaaatttatcgtagaaaatgtgctctctttattagcatctactaaacaaaacgaaattctctctcttttttaaagtcaagtttcaatgtacgcctgaca

SEQ ID NO: 49021 - DNA, 661 bp, Oryza sativa
ccaaccacgttggtcgccatcagaggcatatgtgtaaagcctcatgcggagaaatctgaaagtttttgtggccttttggtgccgggtaaaaggagaacacatggagatctcaacgcaaaagaaaatcgtcatagcgtgttataagttaactgagaaaaaatgggtgttcaactcttaagagccagaaaatttgggattgttcaactttcaagagccagagaactgaagcaagcccgtctgattttgatgtacggtatggccataggggggaagaataatctcaaatagagaatacaggagcattattccgttttatattatgaaagtattctaggagaaattttactgtcgtaaataagtagataccaaaaatatttactgttaatttatatatagtacctcctgatacattaattataaggatattgagaggtataccaaaatttacatacaagcatgatatcttccagtattttctaaagaaccataaaaagtctcatattacaaagagaaattcaagttattgttaatcattatggatcagaaattaattaatttatacacatgctggtgtcacatcgtttttaaatagtacttataaaataaccaaactatatttttaggacagaaagtttgttatttttaattgaacacatgaata

SEQ ID NO: 49022 - DNA, 1088 bp, Oryza sativa
tagggtttgtctttttttgaaacagagggagtacatgactagggtactaggcatgttatatttgaaaacaaactatgtacttggtttctattttttttcttcttttacctctctctatccctgcacctggccttcatctgagcatatgtataacttatggttaagtgaacatgtatatgcttatgtggcattctaattacgtagaggagtagaattacgtagaggagtagacgttagtaagatcagccatgcatggtttgttgttttagccttcgtttacacaaactacgaatgttcctacatggaaattggcatcttataagtttaggttataaaaaaaatactctttttttaaaattgacaatattgcacccacttcacaggttcgtataccactaatataatatattctttttttaaaaaaaacctgtatcaaagtttgcacaaatcttaaagtaccatctgggcaaacttgtactcctgcttcatatcataagttgtttagttttttcctagtcaaatttctttaggttttcccaagtttctagaataatatagtagtatttttaatataaaacaaacatattatcgaaaatatttaatttcaattttaatgaaactaacttagtgttgtgcattttgctaatttttttttgtcaaacctaaataattttaaataggaaaaaaaatcaaacgacttataatatgaaacggagggagcaccttgtatagcagtctataggccatccagactatcttgacatatgtccgtagcccagctctctcctcgcttatctctgatccttctcctacctgctgcccccaggtaatgtgtctgcacattctttgtgtgtgtacatgaagtttgagaggcgttttgctcaagaccgcgcaacgattccatatgacaccgcatcgttgtccatgcctatcatgttcatccagagcccctgttgatcttcagataagagaaaagctcaaaattaaagaaggcttgtttattgatcatgtcaaggataggtatcgacggcgatgcgctggctatggccatggttgtgcggttcttgcgcaataacgttttgatctcg

SEQ ID NO: 49023 - DNA, 874 bp, Oryza sativa
tatcaagctgaaggcaaacacccaaacctgccgataaaatatgtcaccatatattagtgaaaagacaagacatcaaaatgcgataaaaacacattatgatgataatatgcgtgaaaaagataagcgtgtgtgtatcattttaacctactcgtttctattttttcatgccaataatgtgcaaaactgatttcttttctatattatttgtattaggaaattcatcaaacaatgtgcatgcattgttaagtaggcactccatacatgttacaattgctaatgatcagtactgttcaaatacagaatcattctgcaaacgcaacaacgttgaatgttgccagttctcggggcaaccaagcaatttcattcttacaaagagctcctggtatttattccaattgtttcacatggttatatgttgtactgcttgtaatatagtccctttcataaagaaaatatataatgaattgcagtttgggtcatcttctattaccaaagttttttttttgagaggaacgacggcaggagagctgccggaatttaattgaaaggagaaaacaaaacaaaaaacagtttcaatcccgtcaaagggacaaaagttccaggttccataggaaaatcagggaggcctaaatgccgtcttacgcaggtctagatcctgcttaacaagacaagcgacctcaacagctgtacaagaaatgttttgaaaaattctcctattcctttctagccaaacattccaccaagttgttaataaagctcctctaacaactttcttttgggactctgagccttgtcgattgatttgttcccaccatgaggaggtttcggccggctgtgagttgaggactaccaaattatgccatttacagactaa

SEQ ID NO: 49024 - DNA, 545 bp, Oryza sativa
atctagtggtgaactggtgaagtggtgatggcacttcggttgcgtgcaagtcagagtcaatcctatatcgacatgtcaacggactacaaatgggatttgaagggacgatataaagattttgaacgtggtattcatgtgttcaattaaaaataacaaactttctgtcctaaaaatatagtttggttattttataagtactatttaaaaacgatgtgacaccagcatgtgtataaattaattaatttctgatccataatgattaacaataacttgaatttctctttgtaatatgagactttttatggttctttagaaaatactggaagatatcatgcttgtatgtaaattttggtatacctctcaatatccttataattaatgtatcaggaggtactatatataaattaacaggtaatatttttggtatctacttatttacgacagtaaaatttctcctagaatactttcataatataaaacggaataatgctcctgtattctctatttgagaatattcttcccccctatggccataccgtacatca

SEQ ID NO: 49025 - DNA, 1189 bp, Oryza sativa
ttattagggtgtccaaactaggagatgataataattgttttttggttaaaggtggttgtgccttatattttggaatggagggagtactgagttattattatattttaaaaccgacggacgctgtaaaggcatgcacgcagcagctcttccagactcctgaccctccgctatgaaagggggcaacaaccaaaatcttaaatatcttgatgtggtcattgacgacaaagacagtacaggtgaaagggcatctaaccacgtaaaatagtattggtttgacaggaattgtgtgctggaagggcttcagtgttggtttctgctaaatttgtgtggtctctctttatttttctaccgcaacaaatccaaaatgcccaaaatgtgttggaagctgagtggcttggttgtacctatagctagtacttaaaacgtccatatatatgccggcccacagtttggaagtatttgatgtatatatctgatcatgttcaatcgtgtgtttattgtgtatgagagtgggtgtagcttcttaaacgtacccaaaacctaaatgttcacatgcatgatataatctaccatctccgtttcagtttataagactttctagtattgtccacattcatatagatgttaatgaatctagacacacatatattactagattcattaacatatatatggatatgggcaatgctagaaagtcttataatataaaacggatgaagtaattttttgcaactcctgtccaacttgactcttgtttgtcaacgaatgcatgtcctgataaaaaccaatgccaagttttttctttttttgaaaaaaataagcaaacaaatgatcggtagcttgctaattcgtcgatgcacatcttatgaattagatacacacgcatgtaaaagtaactataattagcttatcctgctgcaaactaaacaaaggattaaatttcggttcactatcgtagctctcatcacctcgccgaccgcacaacttgcattgcttacttacgttcagcctctcagctgtatgtttaactaatagcgtttagtcactaactgctcacaatttttagcaaaaccacccccgccatatatattgcatcctagctgtaacatatagccaaagaattgttccctcggttctaaaatatgcttcctctattttataatatatgacgtcattaattttttgataa

SEQ ID NO: 49026 - DNA, 1296 bp, Oryza sativa
ttggtataaatatttcagacccatgccaaatagtatgtccatattagtattaggtcgtacaaaactatgcactggtgctaactaacttatctaaccaaccagactagatgatgcgtacagaagagacatgcaagtcctgtccaactattggctgtattctgaaatttttttaattttgcaactctgaaaggtataagcaacttgtaataaagtgcaggaatgttctgtagtaggtgactactagtagcctagtaggtccaaaatccagatgtgtactctgcagtctccaggcgcaacctccggtgagaagagaagcgtctctggtttgcttggcttatttggattaaatacaatttttaccatactaattttttaacttcaatattattaaatggttatttggttttctattaatttttatctatactactccctccttcccaaattgatcatcatataatggaattaaaaattacttaaattgatcgtcgtataatcgcatggacacggatttcatcaaaatacaattaatgcagcatgaaagaatatgtgaatgctaaggcattttaatcgatacatatattattggagaatgtgtgcatggtgtcttgattgatatgatttaaattatccttagtcttggtgcataaacatatatgatggtcaacttgggaaggtgagagtaattcataaattttagtgtaaaaacttgctaaggtttcgatactacagtactataattttagggtgggtaaaaattgacttcaaactagacaagtccacagttatagttaacccctggaatttaaacccaaggcttcttctttgtgcattgctagtaatctgatgaagccatatgtgcacatttcactcatttcaaatccattttctattacttttctgcatacatgtgattaattcatccctattgtaatactacttaattgttgttttagccattaatatccagttttctaccatgttaagaattgctatattcagtcagaaaaaaatgtaatgcttcattcagaaaaggttaaacatatttagacgaagcccttttatttggaagaagaaaataaaagagttggacatgaacccgcaatttttatggcttaattttcctaattgtgccgttaaattaaattcaaaaaccatgtcattaggcgaagaagaaacatatctttggtctttgctaagtttttttaaagaacgaatggtagaagtctatccgatatattaaaaagaaaatactccctccatctacttttaatagtcatatttttaattctgaaa

SEQ ID NO: 49027 - DNA, 1125 bp, Oryza sativa
catatgggtcccactgatatttttttaattctaatgccacataagtgccacgtgggactaagactaggtcaacaccaccacgttagcaaaaccaccctccaaaaccgctgggagagtcaaattgtactggtttcaataagccggggagtcatcctatccaattttctggttgaggggtacgaattaggttcggcctacttttttaagggagtcaaagtgaactttttcccagtggcaatgatgaaattgcaatagttgggcccgtaacctttttatagctgggcctttataacttttttaggccattagtaggaaggccgttcatggtccaccgatgccggagcttccgtgggaaaagtctattttattttccttaactgcagatcgagtttctcactttcctcaaccacaaaatcagttatagagcatcttttaaaactcaaaaccagtataaatgaaatccctcagcgtactacctttttgtccaatattatgtctacatagtgtgttgacttgatcttcgttcttggttaacacctacttcctccgttctacaatgtaagacttcatagcatttcttaaatttatatagatgttaataaatctagagacaaatgcaaagtatatatattgatcattggatgaatcggtgagtccaaaatgtcttacaatatgaaacgtagagtacttgtcatcataattgagggatgtgaagtggactttttctgcttcagtgtgcccaataacttgggcctttgagtccacgacgttgagagatcgacatttgtcagttgcaagtaagcaagttcgtcaagctgtttaatgatggaggcatgaattaagcataataacatatgatatgacaacggatcattaggcatgtgatgtccgtaagtgatttattccttttggtatttgctatttgcctatttgacaccagtgtgttttcttgttggtttgcactcaaaatttagaccgtccaatctggtatcaagatttgtgctgttatgttattgggcccgcaaccagcccatgtccggacccgttttcagggagaaaaccgacccgaacctgaggttcttctcgtaccatctactccctccgtcctaaaatataaaaagtttt

SEQ ID NO: 49028 - DNA, 554 bp, Oryza sativa
tacaaacgtacactaaactagtttggacaactggggtgtttataggtggaggtgatgatttactatgacaataattttaagtttacgaatggcatagaaaagtattaggcacaaaaaatgttcacaacttctgagaaggatgaaagttgacacttaagactatactcctatggattggaggtaaggaagagcgagacataatctataattgaaggtcatgagagcatgaacaaaattgaatgctgggtgaaaaaaaatgtaacatacccatcaattcattattctgtggactcactttcttctttgcgttcagcccccatctcctctggcggaagtcatcatcggcctaaagtcagtatcggcttcagagtcttggaattggaatcgaccgatgggagttatcaaatcgccagcagttgtgttcatggtggagtcagatcaattaaaggaaatttatcccaaagattgagttcaaggagaagagttcgagttcaaggagtatgcggcatggcaaggtatctattaattaggaataggttggtagttctttttat

SEQ ID NO: 49029 - DNA, 645 bp, Oryza sativa
ataccttgaaccggtatgaagtctttgtcgtccaaaacgagatcagaagagaaaaatgagcaaaagacatcatttttcttgactctcatacataccatatatttcgttttcttaacaaatgggtagtcaaacatatacaaagtagtagcctgtactttaaatattctaactaattggctggtctgaatcgacaagctatattgggggtgacaaaaagcacacaatttcaaaaagagaacatcatttgctcctacttttctgaacatcaagacagctggggtgccaccgtgccacgatatattgtattcagatcgacattgtggacactgcattcagatcgaccacgattgcaaatatcaacaaatataattcactgtattttgccctacttctgttgcaacatttcagatcacgtcgagacaaacgagcatgggaatggcagtgtatatgatccgtcaaagcttatcatcttgcatatttacattatcttaaaattgctaatccgcaatatggaggattttcaaagaaattttgtttactccttttgatttcaaatgtaagttgtttaaacttgtacacataaattaagaaaccagctcaaatgactaaggtacctttcatttttactacattgaaaaagatgat

SEQ ID NO: 49030 - DNA, 706 bp, Oryza sativa
catattttgtcagttgcaggttcaaactgactggcatgctcgcacctcccaagatttggacctgcattctaagcagatcttctagggtagtgtgtgtttttcgcgtcaacacatttttggcacgtccagtgggacacaagttttgcacccaacatgtttgaagaggaagtcaatgctaagaaaaaacaatttactatgtcgatggttgaaacacttcaagctacagtcgatgaagtagttcatcgtgcattgttcgaacaatctggagtttgggtggatatattgcaaaatttgatcaaaatgacggttgatgagttaattgtttaaaggcgccagctcggggggcaaacatatcagtatcagcagtatgttagctgacaagtgcagggagatcgatgtttttttttataaaaatcttctttcagggtagatcgatgttgatctagaccaataagcagattttgttttaaaattctcatccaatcaactcttttttctcctttcacccatctattcttttttcttttcattcttggttcatgcttaaaattggtttcacgcgtgagaaacgatttcatcttttgcccctctgcattaactctcttgtcacctaactttttgcttatgttgcattatatttaacactatgcaaactagctgaggtggatgtttgaaactgtccttagaattagtttatacaaatata

SEQ ID NO: 49031 - DNA, 781 bp, Oryza sativa
gtggtcatacatacgtcacgtggagaaattttaatgtaagtcatattctttgacatttctaatcatgtgcttgtacttgttaataaaggttaatttgtcaactatactagtgaccagtcatggtcaaacgcatacgcgtattctagtactcaggtgtatcacgccctcggttaatttacactgcttggtttatctccattcttaaatcgcagataacgaaaaaaatgctgatttaatggattacagataaaagcgatgaactcttaatcagactattacaaaaacgaacggaaatgagttttttctttactttgaccaatataatatgatatttcctgcattagcgtttatattttataagtttggacatttaaacttcacaaataacacttcctaaaatgtctaattacgcagtgtaaggatgcatctaatcacaccttttacttgattgtaacttcagaaattatgtttgcttttatgttgcctaagacgcaagttaagattatttgaaccaacaggacggaaaaattgacagcacatacaagagaagataacactatactcttaaatgatttttctggatgagaccctctttaggttgcacacggatcgtaactggtcacgtctgcaaaaattaatttccatttttacatacggctccttaagaggatcgcatgtaaaaatcgatttttgcagactggcctcttgagagtccgcatgcaaaaataaacatatttttacaagcggaactcttaatgggctgcatgcgaaaatatatttt

SEQ ID NO: 49032 - DNA, 683 bp, Oryza sativa
taaccacacgtaaaattgattttgatcgtttggaaaaatacccttttagtagtaatgcacacaaacaccacccacagaaaatatataccccgaatccactggccccatcaacggatccagctcttgtacacttatgcagacccagctgcatcaatgacaatgacaaggtgtaggcgtgtagcgtttcacctgcatttccatttataacgtcctattcgtttgtcaaataaaatcccttgcccacaggtccgtacgtgcaagtcacacctgtacagacagctcgcctaggcttacctgcctgtctgtttattgtacatactccctctaaattaataaatttgtattgctaggtagtgtctaatcatctgtccagttttatacttacttcttccatccaaaaaaaacacaacctaatacttatatgaaacataatctacataattcgttgtattagattttgtcccattcaaatactaggttaggttttttttaaacggagagagtattaaatgatgtctaattaagtactccctccattccataatataaggcacaactactttttttgatgttccataatataagttatgtatgcatgcatataattaactatgacctcttctccattaaattattactttttaaaatcctccacctcaaatctctaattctactggatacat

SEQ ID NO: 49033 - DNA, 845 bp, Oryza sativa
ttgtttttaccaaaaaccaacaacacaagccactccctgcagcgatgaaaagacagcaagtagaacagtagattctttgagcgatctgccacattggtcgatccgcaactagacccaacaccattacaccaggcgacaaacaccacctgacaccttgtgtccaacctactgcagacggccgctgcagccactgggttaccatcatcactctgcccgtgccgctccatccatcctagagaaagagagatggagagagaaaagagaagtcgagtggaagcagaggatggtgccgtttggaggaactgcggaattcaaagatgggtatttgagcatagcctcacttgcccatgtgcctcaacattagccaaggctgctatgaacactagcggatgattggtggagatgtggactgttgagcatagattggtaagtatttatagaaaaaccaagcagaagtaagattgataattgtgcacggtgaaaagagtaagagagatgcctggggtgtcttgtgaagctcacaagccaaaatgtgtaaacaaaggctgggtgtgagaaaacatgacaggctacctagatacattagttcaaagtccagtatgagcctacatacccaatttcatgagaaaaaaacatttcttcttgcatttatcgagaactgtttatgaaggtcatatgtagagcataagataaacaacagtatgggtaatgcccactaaacatcactgctaaaatcatttaagaaaaaagaagggcataatgcgcagttaaggatgacaggtgacatgttatccaactaacggagccattgtttcgcttattcgcgggataagcaaaacggcata

SEQ ID NO: 49034 - DNA, 692 bp, Oryza sativa
aaacaaatcaagttcaaagatatgtagctatgtcctctcaaacggtccagaccttttatgcctgtcagcttgactttctttgccttctttatatcagaaataagctgatttctgtttcctttcataggggtggctccttctttcatgtcattctttaacccttctcttagttccttttcctgcgaaatgacatagtcgtgttggttattactagaaatacaagtgagtaattaacacagagtaataagcttgacagcattaaggacctttgcttttgcagcccgcagttttgctttggcatcgttccttctttcagctgcccttccattttgttcttcaatcaattttcttaactttctgttcaaaggttaagacacagttaacaattcaatataaactataataaattgaatcattccagtaaatgtggtaaagaagcacttacacggtagagagggcctcatcgcaaagtaaattaagtacatgcagcttacaaggactcagcttgttgtatcccaatgttcccttgtttacaaattcaagatgcaattcctttgacataaatgccaattcattgatatatgcacttaaatcatttaaccatgcatctccatttgttatgtagattgaattcctggaaacaaaataacccatttttatcgatttactaccaaaaatttgaacaaaatgaa

SEQ ID NO: 49035 - DNA, 776 bp, Oryza sativa
gctcggtacccctctcccaaaccaaatcaagaacagaccagacatacaccaagaaaactgaagtactgaacgaacccccaagaatcaagcagcagctacaagggcacaaacctagccgggcaaccgccggcgggcgtcgagcagcgaggaggaggaggcggatctgcgcctcagcgcctcctccgccggtgagtcgcgccgccttcgatccccctgtccccgcctgcttggagccgtgcgcccacgctaccggcgcgccgcctcgtcgtcattaccccggctgccgtggtgccacccgccgcgcccacgtgtcggtgcctgtgatgcaagcgctaaggccggagagcgagattgggagctaactagaggaggcggaaaccctagaggaggaggagaacggaaaccctaggaggaggagaggagaggaatgaggagaagggcttacccttctcgccggaggaggagtcccgacggtggcgggtctcgccgaagaaggaggcgcggcggcgcccgctgttgttcgcacgagagagaagggactcctgttgcgcgagcgagaagcagcggcggattgagagaggaaaaattcccgacctccgaaggtcggggtcctttccctagggtttccccgcggattgggccgggaaatccctgcctcgtgggcttccaaatggacatggaataaaacccgtgacaatttcccccgtgggcctttctcccagggaatgggctgggatcccagtgggatcctgggctgccaaaggagccctaagggt

SEQ ID NO: 49036 - DNA, 704 bp, Oryza sativa
tacagtagttcatcagctctttttctgaaaagggtgaaacctacaaatatccatgaattccaaccttagcatctagtgcttggatatttgtatccctgatatttcttaatcgctttttcttcagagcaaaccagttactgatggtttcaagcagtttcggataggagcctaggagggtgacacctcgccatcatcaatcagagaagaaagctagctagttgctcatcctaaagtggactgcgatatatattatgctgcagcaatgtggctagctagctaccttcatcatccatctatccaattaatttcaacacagagagcactttttatctattaggtgtcaggacaatgaatcatgcacaacatattcaactccattcctattcgatgagttccgatgaaacagcatgatagattctcctccaaatgaggacagcgcaaaaataggacagctggaccaatccattcagtcagtggtctccaatgtccacgcagatgtgctaaaaatcagggaaattgcagtccatttctctgaacttttgaagtgatgatattataatttcacaactgaagctggcagtaacttaaccctacctgcagtgtgttggcagtttgcatgcaagatcaacctatctcctcacaaatatcagtacagcaatctccatgtagatgcatgacagaatgagaatctgagttcatgagct

SEQ ID NO: 49037 - DNA, 594 bp, Oryza sativa
tgatgcctgatcgagatggatggtccaggatggatcagtgatcagtagtgactagtacatgcattttattttttttggggggggctttaaacttggggacaggttgagctcactcgatcgatcgagacctgcgtgcttatatatattcagatacagatgcagcttttgacaaatatatacttcagtaaaattgatatgcagcgtttgtaaacgttgtgcgaaacacggcggtagaaatttggacacctttttgcaccaacttcttcaactgctcctcatttttttgcctgctatgatcgctttatatgcatgaaggattttaatttttttttagttctaaacgtcaactagagaaaatagagtatgctgctggacccctggacgcatgcatctcgtcgactatatttatagaagagaaaaaatatatatatgggactataataagaatcatcagactttatagtcagaaacaaaacgaatatgtatgtaatgtacttacgtatgtacaacacattggcacgcctagttcaacagctgcgtaggttaattgtatacgagttctagctgatcccgtcttaagtgatgaactactgc

SEQ ID NO: 49038 - DNA, 904 bp, Oryza sativa
cttcctccacctcattctctctcttctctatctcttcccctcttcctctcttcctccctagacgcgcagtgaatgttaagctcgagcgttgtcaccgtctccctctggtgcaacccctccctctcccttggccacgcacggctgtgatggtggccggtggtggttgctatgggcgactagttaggacttaggatgggccctcggtggatctgagtgatggaataggagaggtagccagtgagcgagagctcgccagcccatccgtggaggcgtggtggaggccaaaacggagcatcactgacccagcctcttcgcgtgctgcactgagcccataggtggcacgcttgcctgttcgcttccagtccgtgcgccttggcacactatgagccctgagttgggagagggaggagggaggaggagcggtgcaggtccttgccgtcatcgtctttgtcgccacagccgcatgacatggaggtcgaggcgaagggagaggaagaagatgaggcattggagtcacgcttcgcgggagagttgtcctgagttagcaaggagcttcaaggcggcggcggtgcagcgacgaggaggaagctcgggctgttgaatagttccacattggttgtggaaggctaaatgacctaatatataaacggggaagcccctcacctcataggctagcttttgaggtgagaaaggctctttacgatcctacaactggtatcaaagcctgactacttcaacatctctgacccgagagacactgtgtgaaggcctgatggaccgtgcatgtttgcgggcttgtatatctgagggaccgtggggatacgatgaaagggcagtgaatggttgagggacatcaatgttgtgaatgggggagattgttgaatagtcccacattggttgtgga

SEQ ID NO: 49039 - DNA, 641 bp, Oryza sativa
tatccctgcacctggccttcatctgagcatatgtataacttatggttaagtgaacatgtatatgcttatgtggcattctaattacgtagaggagtagaattacgttgaggagtagacgttagtaagatcagccatgcatggtttgttgttttagccttcgttaacacaaactacgaatgttcctacatggaaattggcattttataaggttacgctataaaaaaaatactctttttttaaaattgacaatattgcacccacttcacagggtcgaataccactaatataatatattctttttttaaaaaaaacctgtattaaagtttgcacaaatcttaaagtaccatctgggcaaactggtactcctgcttcatatcataagttgtttagttttttcctagtcaaatttctttaggttttcccaagtttctagaataatatagtagcatttttaatataaaacacacatattatcggaaatatttaatttcaattttaatgaaactaacttagtgatgtgcattttgctaattttttttttgtaaacctaaataattttaaataggaagaaaaatcaaacgacttataatatgaaacggagggagcaccttgtatagcagtctataggccatccagactat

SEQ ID NO: 49040 - DNA, 640 bp, Oryza sativa
aatgcgctgatttgattcgagggatggcttgggagaagtgagggattgaggcggtggatcacaggaaggattttgatgaacttttcgaaggtggatttgagtggaatggtgaaccctagtttgccggcgcagctctgtactgtagcagggagtggggaaaatggcgagagttccggcggggaagacgaagcgtcgattggatcttgggatttattgttaagggtatcggaggtgcaaatgggcctaagcctgaacagtacctcagcccagtactttaaacagcgtggcccattgtgctccttagggacttaggcattttttttgctttggcaatttatgcgcacaatagtgttgcccaatgctgataaaatcctttttacgcggtcatataattctttggaattattgcaatgcaaattaaaaggtgcccgacagaaaggtgttatgccgtttttgtaagcttttttaggctacgaaagctgtcagggttaacttagaatgacttgtttttatcatagtcattttcttggtatgttatatgcctgttttcattatggtaaatagtcatagcctaggctattagacttattcattaccataatttttataatatttggtgggtaatctttagagtttttta

SEQ ID NO: 49041 - DNA, 706 bp, Oryza sativa
atagaattgtacatcatatttatacagggttacaatgtcttgatcaagaatgagacatgggtccatttaaatctttatctcttctatcttcttcatcatctcttctacaaatctttatatgttctaataaatctgccaggatgaaaaatataatctgaaatttaagtaataaatataaaatagtgatacttcagcaatcaaatttgaaggacggccattgatactagcttaggaaaaaaaaatgcatgcacatcaaccaacatattgcaattgtcagctacatcagcgtaaacaaactcttggtgtaagcactttctttttagatcaaacaccctacatgcagatacacaccattatttttaaatcaaacacatttgaagtccatgtttttgtactgatagttttccagcaatactctatttcaagtccatatttgaaagtaagttgagcatgcaattcaaattgaatcctggcaagaggaggaatgcaagagcacaattatgaattatcattatggacatgataaggaaaaaaaagtagtagtagtagtagtagttgttgttttaattaatcagtactactaggtcactttgtttggccagtgtattgtgcagggagtgagagagagaggagattgaaatatctgtgtgtgcgtgtctttgtatataggttgctgccaaagcttgtgttttttgaatgcacaatg

SEQ ID NO: 49042 - DNA, 648 bp, Oryza sativa
tgttcacaacttgttccaagaatgtgtatatatttaatttcataggtgtgaaaagggaaggcatttaatgtacaaatcttttttgtcaaatacatttaatgtgcaaatctggaagcataaatggtaagctgcttgtaacagatgtaaatgatttaaatccctcctaaaatttgtaactagtaaatccctcctaaactatctcttttcagttttggagtgtggaaaggcctagagccatggctatatattttacggtgaagtggttcaaccatcatctaacacgcttagaagtgtgagtactgcgaccaggcaatcttctatattatttctattgtatctataggattgaagtgctttcaaaagaactggatttatctaacttatttctatcattaaatgtgacagcaaccaatctacatgtgatttctatttttgtatctccttaattggtcaggtcttaaatcattctaaaagaagatgatgctccttttcgaaaagaactacacaatgtaatgttttcatgcctagcatagcttataaattaattggttctatttcttctttggggcaaacaataaaataagtaaaattttaagtttacacctttgatacttcccaagagaaagattaatagactatatatgataa

SEQ ID NO: 49043 - DNA, 583 bp, Oryza sativa
tttcctgtgaaatcatatacagattaaactatcataaataaaatttttcagtagttgttagtacttgttactcatcaagttcccacgtgtcttgatcgagggcacaacatgttcacagatagattagcatccgattattattaagaaggtagcccgcgtatacgcgcgggtattttgtttaatgttgtttgaaattttattattacaaacatttatgtgtgtatgatatttttgaaatattttttactctattttaaacgtatattcgttaataactgttgggcgtattatttgaacctctatatcctcaaatttatgagataaaatatgtcccaatattggagttagttcatatctatttatattgtgtgtgattcttttttaaaaaattttggagtttccaaactttatataacattttttgttttgtatggtatagatgactttaagtaacattttaattttattatatattaatgaaatatattttctattaataatataactaatgatactacttcatgtaatcaaagatagacttatattacttatattcccctttgtcacataaatggaaggagtt

SEQ ID NO: 49044 - DNA, 2296 bp, Oryza sativa
tcatttttacaaatgtaaatttaaattagcattatatatttgtcaagtgatatcagcctcgtatgttaagattgaacgaacaaatatcattgatgggatattttatatttataatatagatttagtttaacaatgatttgtagagtaatatatttatctttaaatagtagataatactatttcaaaagaccatccatctttttcgaatgatacacctttttttttatagtaaaggattttgaaaatactatttcaacagaccaccgtgcatagatttttctttgttccgaactttcgatggatagtggttaagctttatttctttttccaagtcgtatgtacttacagactacttatgctctttttctttttctagcctaattgatatatggatctcccgtatacggacacagagtaacaagttattagtttttaaaataaaatacatctaatctaatggtctaaattattggttcaccaatttaattaaaaatcgacggtgatatttgcttaaatttatagagtaatagattttatctttaaatattataaaactctattttaaagataatcaattttttagtggtactaagcacgtatgtttttttttgctttgttgttttgttttttttgctttgttgtttttatagtaagtctgtgcatagttttttttctttcgatataaacagtaggtaatagattcattgttttctattcttacgtatgtacgttacctgtatatacgtatatacgggatggatgcatatgtccgcgcggggtaaggggaggactaaaatcagttttgttttctttttccggtgaatagtagtaaggtattagtttctttttaaataaaatacatctaatctaatggtccaaattatcgggtccaccgatttaaataaaaatcgacagggagattagacattaccacgtggtggtctagaagcgtttgtagaagtgccacgtggcgagtttcatggactttttagtataatagatagatagattttttttaaagaaaatgatactcccagctgagcaggatgccaggatggaagggaaagcgctgagaatgaagagttggaaaacgtgacggttagaactggtacctcagtcgagcgtcacaggcaaccacatccgttgacccagcaaccagagaggaggaatgcccgtggaaggtcccaacggaaattaggtgatctcgcatggcccatgtatgcttccattccacccgtatatttggcgcgtctagtatcgtcaaatctctacccatgcacatggtcactccggaaatgctaatgggcgggtgatcgctcccccgtccgcccaacgatcaccctttactcctcccctatactcagatacactcctccctcctctcctccttccttctcctcttattctctttctactatagtacaccgcaaattttttttaaaaaaacaaaaagttagaaaaatttatgtatagaaatactatatataaaaaatttaaatttaaattcaaatttgaatcggctatgtaaacttttggcttataaactttggatctataaactttaggcgtataaactttagatgtatagaaatactatatatataaaatatttgaattcaaattcaaatttaaatcggatataattcaaattcaaatttgaaacgggtatataaacttttgacttatataaactttagatgtatagaaatactatataaaaaaatatttgaattcaaattcaaatcagatataattaaaattcaaatttgaaacgggtatgtaaacttttgacttataaactttgggtctataaactttaggtgtataaactttagatgtatagaaatactatatataaaaaatatttgaattcaaattcaaatttgaatcggatatataaacttttaacttataaactttgggtctctaaactttagatgtgtaaactttagatatacaaactttaggtgcataaatttactaaaataggaaagtattacagtgcttaaaaaaaaaagaaaatcaggtggagagatggaggggggagggggattgatcgctaccccatcttccggcgatcgatcgcccagtaggatcctccggtcactcacacgaaccgtaagcgtctgaccatgtatgccgggccaccatccgtggtccgtggacaagggcaaggctccgaacggccgaacattcccaaatcgtatcgaatgagggcctactggtggcagttagtacttaaccatcttctgccgtatggagcgggaccacagacgggttacaggagttgaggagt

SEQ ID NO: 49045 - DNA, 1016 bp, Oryza sativa
gattccgcatgttctgagattaacgggagctggaaatggaatcccgtgttgggatttgttgtggccggggtgagggcccgattttgggatgggtttgtggatggatggatggaggaggtgagtactacttccctccttgcgttgttctcctccgctgagctgcattggtgcgttcccgatcagagctagaatttcttgtctagttcttttttccactccctgtttggtaattggtgcgccatcaactgattttacttctcctcctccgtcgctgttgcacgataacttttacatttcatggaaaattgtagagtatttttgatggttttgattaaagcaagtagctggcaagccatcatctgtggatcatttttatccttaaattcccatcaattcatttatgatatgatgcatcgcatcaggacgcatcgcatcaagtatgacgtaggctgatgtttcagcttgataaaaaaaactggtcaacaatggagtctgtacctcaccttgattcagccaaagtggccaggtaggagtagatgccaaggaattttttcccccttcctgtgtgataattggtgatctgtggtctgctagcctacgtcagcaacagctttgcttgcaaatggtgaactcattgggatggtgggattggtgtggttaataaagtttttgtctatgatcacacagcttattctggattgcctgatgctgagtcgctgacactgaattcagggttcacagatcagtacatcttagtggaacagttgcacagcatggagtagttacgatggttgtttgtcgtgctttttacctttttctttattgggataacaaggccccctttttgaatgtgtggctttcctcagtcaaattttaacagcaaatatgaattgttttggtgcttaggagtagccgtgttcttctttttgaatacgccactgtggtgttcaaggaaaaaaaacgccatgctgctttctttaaagttaagattgtaaaccttttttttcaagaactca

SEQ ID NO: 49046 - DNA, 752 bp, Oryza sativa
tgctcctgctgacccaactccagtcggtatagccggtcaaacaggggcattttggtcattaagaacaaattttagtcacatgtggtcagcaatcgcggatcaggcgtagaacgtggcatgtttccagtatcgtgcgatttgtaatggcatctttacaatttgtcaaatagtaattgcatttttccaaaccttcaaattagtaatggcatgtgtctaattaacccttttaagtttctagctgtgtttagttacacgctaaaacatggaaagttagaaaaaattggaacgatgtgatggaaaagttagaagtttcaagaaaaaaagttgaaatctaaacagaccttaattgcctattcaagtattcaaccctccagcatgtggggcatcaccaatgtatatgataaaagcctggttttttctccaacaagagttggttaagcttctcgataaaagtggtacgtttttcaaattgctaaacggtgcgtttcgtgcgaaaactttctatatgaaagttgttctgaaatatcaaattaatctatttttcaagtttgtaataattaaagcccaattaatcacatgttattaccacctcgttttgcgtgaaacacttcatctttatcttcatcttcatcttcagaagattcaaacaccacctttcatataaataggacttataacaatctcgacaacatatatagatacaagatattattagaagaagagagaagtagagatagatactattatttatt

SEQ ID NO: 49047 - DNA, 593 bp, Oryza sativa
actgtgcagtcgcctgcaaatttgtaattcatcagttaatcccctagtcgttgattctgcattaagatctatgcacactactgggctggtggagaagactttctagatatggaccttacttacagatatattgaatatgctctaagttttaaccaaatttttaggaaaaaattagttacatttttatcccaagataaatatatttaattatagatataataaaactaatttgattttgtagatattactaaacatagttaatcttgaagtagtctaatttaaataaagttaaaacggagatgatggcggcggcgacgacgcgaagctcctcggcgatggtggtggctaagcaaagcttcaagactgattcaaaacgatcatctgggatacattattgaggaacccaagctgcaggtttgctctctcacattcccaaattccatttttctctttttcaagttctctgcaaaccctaatatttaatcccctctctctctctcaccggtactgcaggtggcatcaacagtggatatggaggcaactccgtacttgctcttggttacagtacccatcctggtgcacacacgcgcact

SEQ ID NO: 49048 - DNA, 1184 bp, Oryza sativa
gtctcttcaccatcagtccacccaggcggcgcgccaaccggcactccttaggctctagttttagaaagagtctacgcaccgggcgcccgatgggggtgggaaaaatcagacacccacgtcagcatgacatcatcagcatgcatgcaaaactaattaaaactatttttttctcttaaattatttatccaaatcatgatccaattgcacggtgcaccattaaattcattgcaattaaaattttaaaacaaaaccacacatgaatatattccgatgaaaaaaatagcttattattgaattatttttaaatattgcatgttgttccaccaagtatattgggattgtttcactaagtagatcgaaaatatttcaatcttttaaatcgggcactgtttcacctaatataaaaacattgtttcagcaaatagcgaagaatgtttcaattcactgcaacatttgatccatatatactgaaacattataagtacactaggtgaaacattttttgtggaacaaaaaataaaacgaattctcttaatagagggattctataatatgtggctgattcgttgcaaaagaatgtttccattcactgcaacattagatctatacatagtgaaacattgtagatctatacatagtaaaacattgtgagtgcactaggtgaaacatttttggtggaacaaaaaaaatgaaacaaattcccttaatagagggtttccaaaatatgtgggtgatttgttgcaacggaatatgtggtggagacacgtggcaagtgggcagggacacgtggtggggcccagggagaggcacgtgcgcgttgttaggggtggggagcgcccgattttgctcacccgccggtcgactgattcccagcattctcgcatattttattctaagagtgcaaaagctgtacatcatgtgttacatgcaggtttgttagggcgttcacaatgggatgaggtgtcgttcggcctcgaacgcacacgttggatgggggagagaaatcagcgccacttgacaggaagggcccaccaattcctagcgcgtgtgactagagttagccatccgttcttggcgccgaggctgcgtggggcatagatagcattgtgaatttagtcacttgcattgtgaatcaagtggcttttggtgttcttgagtccagccccaagcccaggcgcagcatt

SEQ ID NO: 49049 - DNA, 1270 bp, Oryza sativa
caaacacataattcatgaaagagttagccaatgcaaacttgatatctatcttatctgtactctgaaaatgtttagttgcacatctcaagctcaagaattgggtgcactgaaagagatataaaggaacctattattactgaaggcatgtattttttaagggatatattttttacatggtgttcaataacatactttgaccattaatttattccatgttatgctcccaatgaatatgaaattagcatcatatgaaaggacttcaaagtatgaatatcacgagcttgcaaataagcagagtggtagctaaagcgacaacccataaaaagatcaatgttgcagtgctgatcaatttattttcactccttgctgcgaatcatctaaaaacctggactactgtcatattacctgaagatgaattattgcgagctgaataacatggaaaattctggtatgcaatccaaaggtgtcaaacctgacatgaaaaaggaaaatgatcagatcaccagaggctcatcataccataccatcaatcttaagtcaaccaaactcatattatttgcaattgactgaaacctctgcatgaattcattattttcatctcttttccttatggctatcaagaaaccatcactacccattgcagtcccatttaaagtatttaacatttaagaaaacattcagtacagtaaaatggaagattgagatttgcatcttctgaataatagtgccaaatataaagcccttcctgctaccagttgtactaaaaaaaattgactgccaataaccaaaatgctaactactaaaaaaatcatccagtatgtgaagctcctaaatttttccttatgctactttgtaaaactatagtacagagtttctggcaagaaaattggttcccaggtcgtcaactcatgatggatcagcaagcaatatcactgcagtcttatatcttcaaactcccattttccagaaaaaaaaatatagtgtgttaggaactcatggagttgattttgtaagatgcagatgggcaacattcagccgtcatacagtaataaatcgaaagaaactaagatttatgttgttaaagaagataaccttggatgaatcctaattcaatcataacaaagccaagaatcataattcagtcttaatgaagccaagaatcctaattcccagtgtaccttggatatgagattgatgtcaatggaggtgcgagcaacagtcgacatagtagttgaccctagttccgaagcacgcactatattgccaaaaa

SEQ ID NO: 49050 - DNA, 1057 bp, Oryza sativa
atgtcttcatcagtctaatacaaatacaaaccatcagccttggaaaataatacaaatcatcaaacatccttcatctacacgaacaaaagacagctcgatgccttgatctcttagttttgaattacagtaatcattacaagttagactgaaatgtaagtcaaaaaagcatcataggagagtttggattcatatgactgagttttgagttttaggtcaaaataaaatggagaaaaaactaccatattgactacggtattgcaaaaaatgcattcttaatacctattatcagcaagatacgtgatgggagccaccatgaaaagggctaagtgcatatgcaacatatatacttaatgcatgttccacgttccttggtaaaaatacctttcttgtgtttctgtttagtatctagctatctaccacctaaaagcgtccagaatacataatggacagaagaacaatgtcaatttaatttctagacaaaaaccaaggacaccaaaaaggatcttacaaatgtaaaacgtcgaggaactaatgtgaatgtgaagaatgtaactaataacatcaattatcaactttttccaaaattccaaacacgatataactgataaccaatttacttgatgccagccacacatcaagaccatgaccagttgatggtgttcatttgtgctacgaattatgtaataaaaccgtctcaaataatcaaatatgttaggctaaccagttggtgatgtgcccattaggtagttcactattaaaagtggttattcactgaatgaatgcttgtgcgtcttttggtgaatgggagtaatcatttttctcatcctgatgctagaaaaacagtggtttgaacttcatgcataattgtctgatgtggaggttggacaatttcaccttgaaggtttcctgaaacttcatatttcagagaacatatttctcaatgggaaaaaaaagaaagaggaaaaaggactgcattctgcactacgcgctcaaattagtaatattacaaaggttgttcaaacatacataaaagtatggtagcatgtcatgttaatgt

SEQ ID NO: 49051 - DNA, 1273 bp, Oryza sativa
aaattactataggatcgtctaaacagaatgtcagttgacatgaacaatttcacagattggtcttactttacaatatcgcaacaagaaccaatcgagtttttgaagggcaaattctgaagccaccagtctaaactatgaggtttggtgggggggtaaatagtgcctgacggaaacatggtctaataataagttaagatagcagcatttgtaaacatgagtaatatcaaaagtggttaagaataaatacatggaaatggctaagaatttgtgtttcatcatgtacaaagacagtagtttgtaaacatgacaaaatacggaagcaagcagctaggtacggggggaacataaagaaaatatgagactttttcacagtttacagcacgcattgtagcactttgtccaacttataaaggacagcatgcaaaatccagcttggggttgcgatgagtccatccaaggtaaaaaaattctggcagcaatccaatccaaggaagaaaaaaaatctaggagcaaaagaggactcttgtcagaaaggcaatagtgtttggactattcattcattccaattgcaatttaagttgtaccagtcagcaagtcaaaagatgttgtgcatattcatatcatctcagatcgcaccgcatgaaactgtaatgcatcagatatagaaaaccaaaattattcacagtgcaattcttaaagaatgtaaactaaagaatgaactgaaaagagacgatatcgtctcaaattcatctgggacctgactgaacaaccaaacaatgtttttgcctcaattaaaagagtaccctctccttcaccttgatctgcagatcaacttgtttcatcaatatatattcactcttgataacatgcctgaagacatgaataatttcctagtcagtcttacgttagacacagatgtagctatgcaagactgattttgtaaaaaaaaaattacacatgccaaattggcaaggttaaagaccagagaagaaattgagtagtataagtacacattttttttaatttctttaatagccatttttaaaaatgaaattataatattagcaaacatcatttccttctattcgaaagcagggtaatcaaagaacaatattccacaaaaacaaaaaagggtgataaatatgaaggaactgccatatatatgatttttcgaaatcttagctgattcaggtaattaccttagctaagatatggtagtgtttaagttgctaagagagaagatgcatgatttattgaagtagctgcccttgat

SEQ ID NO: 49052 - DNA, 532 bp, Oryza sativa
acagcgacatcgccatgtgtgagctctgttttagctttggtttcagaatgttcagatcggcatctgctgtgtgcatgatgcttgtccctgagaagaaaactcactggtcggaacagaggcaggaacagctttgttatgtggaggatcatatacttctagtgaacatgtatacatgcagacaacaagaacagctaaaagggcagtagcaaagaaccaaatgcaagatagtttgagctactaacactgcatgaacaaagtggtctctgcatagctctcagattttttttttttgaacgagcatagctctcagatttatagtgcaggcttcgactgcctgcctggtcctgtttatttacgttttaaaatttaaagagacgatgaaatcaggaaaatgagtgtggagtaactctgaaagttcagcaaattggccaagtgatagcagtggcttgactccccaagtcaacgattcaacaaacagaaaaagtgagtgcgtagtactcagtataaataaatactacctccgtattttaat

SEQ ID NO: 49053 - DNA, 684 bp, Oryza sativa
ggtcaagcttagcattggctacatgatgattatcaattcctttaattaccatgaattgttcatgtaaacccccaagcccagctatccagtagcataaacagtgttgtttactctggaaaaatataaagtccattccttcctaagttccaatgagaacttcagccctacaagtgtcttcagaacagagaacagcatgattcatgatcctcctatagtctagtctatctaggtactttggtgaatcctgaaacatttcgaacagtcaaacatgcatggttgcggcaatttttgagatacgccatcaaaatatagtaatcaactcacttagtttgcataaagaactagtaaccgtagactatgcttccaaaagagatcaaaccttgctcattggtgatagtggtagcgatattcctccaaaatgaccagcaacgattcggcaatgagctactgtatgtccaggtccagagatgcttcagtaatcagtagttcagtgattcagtcactccaatgtgtccagagatgcttcagtagtttagtgattaagtcattccaatctggcatccctcttcatctcttcctccctcttgatatccttcttcttcctcatcttcaccctcgggttcatcggtcgatgctgcaaatgctcagcctggaaggcaaccatcggcctgagcacccccacca

SEQ ID NO: 49054 - DNA, 649 bp, Oryza sativa
ggtcgactctagaggatccccctagtcaactaaggaacaagccaatttttcattgatgcgcgcctgctaaggcccatatcttggcctcgtccttgatttttgtcagaagaccactcggtgggagctccttatgctggaatgttctgcgatttctttcattctagatctcctaggcgactaggagcgttagggagcgtagaacctttttgggtgcctcttttacacttgtggtttaatcccaccattctaacaccgacttgatgtaccgcccaggtagtcggacgctattaacgcaggaagaagctcatgagatcattcgcgagcgcttgaggtctgacattcgtcgggggcgcatagaactggacgccgacttcttgcagcagcttgttgatcaggttcgcgatcatattcttcagcgtcagcgccgtggcactgccactgtcattgccatggatggagtactggaggaggatgcgtacaggaacggtgggttcggcgcttgccccgcgtcgagcaaggccatggtcgaactgcaggaggcgatggcaagcgaccccagggaacccgggtgcgctgtgtgcctcggaggatttcgaggccggagagaagcttgaccaagatgccctgttcgcaatggttccatgcgacc

SEQ ID NO: 49055 - DNA, 1072 bp, Oryza sativa
cgagctcggtaccccctgaagagaagataaagtgaagtgaagattagggtttcgtcctggttcccagccgtcgcctgtggtgttgggtgttagaccgttggttccgctgctgctgctgctgttggtgtttcctcgtccgcgtcgtcggttgtattctcgggctgtctgagctgcaacctaagttaagataaataagtcctctatttattttaaggattgctatgattcatatttgtcaccgtgggtaccagcactatgtcctgggactggtaccgagatcgcggtttcgtaggaagcggttcgcgccgttttccctacgacacgctcctgtcaggtgccgttttacggcggtatcagattggggtgtgacatcctcgggccgccaccacgcaaatccaggcgagggagggccagatccggccattggggctccggatccgccgcctcctccccaccttgccgccgtggccgccacggaccacgccggtggggagcttcgtcatcttcgtcctttgcgctgaggagggagacgccacgaagagaagaaggcctcaccgccgccttccctgcccgctgccggctttgccgccggcgggctccatcggcggccaggtggggggagggaggaaaaggaggcgcgggcgggtagggtttttcgcccccgagccgcccgacgcggggggagggggggcatcacttcccgtttattgactgctacaaatgaaaattattgttctatggatggatatactcccaattgtactagtagtaattaattggaaaaaaattatactgatatcctacaaagctgcatgccgatgcattactgtcgtacgtatcaaagcagggaaccgatgatagacaggaattcctcaaattgacatcccgccatacatcggcaaagttttcagtaacagaacagaaaccaacatatatgcaaccaaaggaaaatggttcagcttagctaccattaatttgaacttgcatatttatagagtgatatattacatgttaaaacatcttctcaaatttttttcataactattagagtgacaagcaaacaacgaggaga

SEQ ID NO: 49056 - DNA, 533 bp, Oryza sativa
aattcggatcggagaaggtaaagcacaggattacggtgtaacgaagaagacgcgcattcagttttttcctataaaaaaaatgatgggctaaaaccaccaggacggagcttccggcccgttcccagcccatttgtatatttctgcaagtataccaccacatgtaaggtctagtgaaaattaattattttattactcctgagtgtactgattgccaaatatatcctgtcagtacaaagtggcaggccgatccattactgtcgtgcgtatcaaaagcagggagccgatgatagccaggatctccttagattaatatgtggccatacatcgccaaagttttttggtaacccatcagaaaccagcataggcacccaagggaaaatggttcagctcagctaccattacttgttcaaactcaaagaaccaaagtcccagcctcaggtgatcgataggggcgtatccgagtatgtgcatgtttcagatcgagtagtcactcaggcaagctccgacgatgaacatcgtctttaaaaaaaaga

SEQ ID NO: 49057 - DNA, 505 bp, Oryza sativa
ctatagggcgaattcgagctcggtacctttatgggacggaaggagtacttcccataaaaaccaacatagtaccagatgtgacacattctattactatgaatatggatatgcctttgttcagatttgtagtactaggatatgtcacatccggttctaaattaggttttttatgggacggagggaatttgatgtttctagtcccatttaatttagttagtttttttttcgaatcaggagtaataagcaaaagggtgtgtttagttcacgcaaaaattagaagtttgattgaaattggaacgatgtgacggaaaagttggaagtttgcgtgtgtaggaaaaatttaatgtgatagaaaagttggaggtttgaagaaaaagttgggaactaaaccaggcctaagaccaagggccatacatttgaagtattaaaattttgacgtgtcacgtcagatatacggacatacatttgaagaattaaatgtagactaataacaaaacaaattaca

SEQ ID NO: 49058 - DNA, 1645 bp, Oryza sativa
acataacaatgatgaagaagaagacgaagcaatgatatgcatccgtttcttgttccctgagtagattagtttaatgttcggtattcagcaaggaagcacttttttcccgctttgttatgtttaacgatgaaactagaagaaagtgtagttgctcatacactggggttatgatatcttttgattatatagagagtattcaccgtgcatctttcatgaaggcaacttcttaagttaaattatcggaattttttaaacaaaattataatattaatcgctcgtgagaccaacttcgttgtagtttaagccattcttcagattggagttaaaaatttcttgtcaagtggaagaatttcagcgccgagaccttctgaatcgaaggccaacatttcgagttgaaacttatattgttctgaatcgaaggccaacatttcgagttgaaacttatattgttttgagttaatgggaaaacgttgcatgtagaggtggccactgcagatagcggcagggtcgacacaggcacgcagcaccggaacataagaaacgaattcgaggcagaatcccaatcagatcgaagaaacaatagtgatgtcccagttaatcgagagtgattcggattccgatctgcctcttacaaaaagaaacgattctagcagcttaatcagcaatagctcaatactctgttggttttgccccatagccaccgtacgtctccgatctacgttcgcggccaatccagtcacatatccacttcaaaactcaaagcaacaatggccgatgaacagatcagagacctgaacttgtcggagacccatacgttgctgctcatcaacctttatttgtcacacgtacaggggccgagctacgttccacacggtgttgaatcagcatacatccacatcaatcgtgatatcgaagaagatgacgacacgtacagtgatgacgggttctgcgccgtcccggcctccagcgacgccatcgctgcgctgccagtgccagagacgacggtgagtgagaccgagacgagggaggaggaagcatgtgcagtttgcctagagggatttaaggagggtgacagagtcaagaagatgccttgctctcatgacttccacgcgaattgcatctctgaatggcttagggtgagccgcctctgtccacactgccgttttgctctgcctgctgagagggattctgaacagaaaaacccagaaggggaagcgtgagatagagcatatatggatttatggttattggagtttggctgcacattgtaatgtcaaaaacataattggtattaggagtttacaacgaattagaaattaatttgatgcacatctttttttgtccatgcaactatgcaaggttatttttattttgagtaaatttaggcagtacagtggcaataaaggaacacggagactataaagtgcacctcatgtgcttcctcggtgagatgggccgtgccggcctgtcacgaacaggccgactgtgcttgggcctgcgtcccccacccatgcgtgcgtgcaccaggaaaaagtacactgaaggtccctcaacttatcatcgagttacaaaatcatcctccaaccgcaaaaccggatacaacgcatcccccaacttacaaaaccagtgcaaaccaggtccctta

SEQ ID NO: 49059 - DNA, 1553 bp, Oryza sativa
ggcctgcctagaggaagatgagtgagatagggaaagagagaggaggaggaagccagagcctgatgacgtggcgtccagacatgtgagtcccacgctgactcaccagtcacgtaggataaaaatcagggtcaaaaccatcgaatgatgtaaaacaaacggttttataagtttttgactgttttttagaaaaaatgcagcgtcataaatatagattaatcttttctttgtagacatatatgaaattctgacacggagctttggtgctcactgtgtcttctgcgagtgataaatcacatactctctatgctgaaatggtgcgccgcttgcaactattctggaatagttaattgctgcgaatatgctacaatatacttatgtcacgtcggtaaagatgcatgcatgctaatatttttaacaaaaaaaattaagtggtcggcgattgctcttgcaatttgcagcagtcgcaacttgcgaacgacgaacatgcacgcatgcaatgtgatcagttcgtctgtcgtcgatgctgtgtcgatgagcagtacgtacccaagcacagtgcacactgccactctctttgtgtgcaagtggcagtggcctacactacacacatactagtacagcaatgcgtatgtctcgttgcttttcacggtgctgcagttctaatctccttttggtaagtagcacgcacgaatatatcgagatactcgcatgctgtcacgtatggtcggcttcttcaacatggcctactgatagaattggggcaatttggcaatgaggtgagacgattatatattctgttcttcggtcagcagaacggcgtccacggtcgattacactgttggtcccataagccattaacactgtcactgtaggcactgcatgttctgaatcagatgagctgagatatagtcagatgtctaaacagcggtttggctacacgggactccaaagggtgatcgatcctatgcacgaacaccatattgccatgcaagctcggatggcttcaggaagcatcctcgcctcccggaaagtgtagatgcgtactccctccgtcttaaaaaaaaaaagacaaaccctgagttttcgtgttcaactttagctgtccgtcttatataaatttttttataattcgtattttcattgttgttagatgataaaacataattaatattttatacgtgacttgtctttttattttttttttcataattttttcaaataagacggacggtcaaacgttaggcacggaaaccatagtttgtttttttttggacggagtgagtacgagcaaggaacatggctgattgcatgactgctcatacagtaccgtgcccaaacttttgctaccctttcacgatcgcgtcagcctaacagatcagtagtagcatatccatcgcctacagataaaggtagataggcccatatgcactcgatctcatcagctagcgtttcacgatcagttctctgtctaccaatctaaaaaaagatgacgttactgctgctgtgtactgtcaggtacgcagtacgaactcgcgccggcagggggcgagctt

SEQ ID NO: 49060 - DNA, 1919 bp, Oryza sativa
cggtggtgctctcggcggtttctattgaggtggcggcggtcgcgctctcagccgattctattgtcgtgaaggattgctggtagggggaggagtgactcatcttaccctctttttatgatgaactaatatttttctgtctagctaagtttttagaaatattctgatgagatgaaatagagtttagaacgtgtttatactataaaagtatattcgtttttataaatgtctaatataccccatagaattttggtatgtccgatttgcccctaaacgataataatgaacgaaatctgtgctggactttttaaaccgaataaaacggggttttagaatgtatttataggagaaaagtctagattaccgctctagtttgcatttgtccgatttgcccttgaagtctaatgacggagaagacacgtcccaaactattcaaacctgaagagaacacgaggtttagagtatgtttacactactctatgtctaccttttttgacggttaatcttcacatatcacaactttggacgagctattcgaataaagacgatcactttgatctataaaaagatagttttggtaggttatagaataagagatttcctaaataacgctcaactgttttgtttatacaacaataatttaactcctaacatttggttagtacaaacattcatacttcaacttttctctcttggtgagcttatcgacttcagcaacaacactacaatggctaagataaagggtaaaatttcaggcaagttcgggggcttgtggaaaggttaaaagtgatggagttcttatctaggaagaatgaggtagcagttgaccggcagtaggtaacaatgaagacgatgcaacgaggatgtagcggcaccaccggagtcatgaataggaggcatgtggtgggcgggatatgcagccgagaaatcaagtggcttggtgatgtggaggaaatctcttaaaagatgatgtagagacatctcgctagatttgaaaaagataaaaacttgctttgagaagggagtggatatatagaggaaagcagggttaatgaggcgagagaaagcagtcaatgagggctcatcgacgctggtggtagcaccgttgaggcaaggacaacaacatgtctcgcaattttcaaaccaaacaaaaaagtttgtagagacatctcactagatttgaagaagatagaaacctgctttgagaagggagtggatatacagaggaaggcagggttaatgagtgcgacagaaagcggtcaatgaggggttgtcgacactggtggcagcaccgtcgagacaaggacaacaacatgtctcgcaattttcaaaccaaacaaaaaagcaaaaaccgtgtatcttaaggaagtaaaaggaaggcaaaaaccgtgtatcttaaggaagtaaaaggcacaaagatataagattatctattgcatcacaacttattaaccgagagctgggccttttttttaacaaaatactcatatagacattcccctctaatttgtccctaaactctaataacggagaaaaacgcatcccaaattcttcaaaccgaaagaaataaggttttagaataatttttacactactgctggtccactccctttttccgctgttaatcaccacttatcacaattctaggcgagctagaagcaagtactagtatattattatcgaataaaactatcattttggtttataaaagctaattagactggccaaatctttaatttcttgaagcgcatcaaattggtatttcacgcactttatttctgctgcaaagggtacatgccatttctcttgataaaacagaccatttagtctcataataggcatggatgttcccaagtataaaagccttcagcaacaaacgcgtcagtcagtactaagcactgatccaagaggaggagactaaa

SEQ ID NO: 49061 - DNA, 1670 bp, Oryza sativa
agggttaccctctccttttcttggcgagcttctctgggtgaaaactacatcttttagatgggcgatggcggcatcctggatgtcgtgaccaccatggtggcatcgtttttggagcctcgtctctgtggtattgtcgtaggcctagcggcgttcgcccacgcttagcggggctcgtttggtgctaggtttcaccctcagcggcttgtgcttgggtggtagtgcgtggtgtgtggcaatgcatcttggtgcattttgatgttttctcttataacttttattccttcttaatatactcgggtggcctcctcggccttcctggcggaaaaaataaacgggaagtggattctaaactctcgaggtgacatcacctcgttgtttgtatgtcacacaaatctctactattataaaaattaaagatgtttttaccggtactttggtacgttatccgtgaataaatcggtttttaagttcgttcgcttttagaaatacatctctgtatttgagtcgggttttaagtctgttcgcttttggaaatacatatatgtatttgagtcaagttttaaatttgttcgttttttaaaatacagaaggagtcgtataagaaatctttttagaaaaactcgcatgctaacttgagctgatcggacttctaattgcaactcatgattttctagaaaaatatatatccaagcgaattcccacagtaaatttcaccttaactaaactatataataataataagattaaaataactttcacccgttgtaacgcacaggcattttttctagtgaataaaaaatttagaaaaaaaatcaataagatagattaatatatgataaatcacttcacaaacatgcaaattcaaatttaacttctacaagttgtagcgaaaaaccaaattaaattgtgggtagttaatgtatattcgcagttaaatttgttttttttttttgcaacttgtacttatggagtgatttatcacatattaatctatcttgatgaattgttttatttcttataacaatttaggtttaatgcaaataataaaggatgtcccctcggtagtttaaaatagtttcccaaataaacgggccatctgaccacacgtttgccgagctggccaactccggcccggaagctccgttccggtagtatcagcccatcatattttcttcaggaaaaacggaagtccatcatattccaacttggcatcctatgcttccgcgtccgcccatagatcccacacaaatccgtccgagtccgactcatcccaaattccccggccatatccttttcttcgcctgagatcaccacctcctcctaccagcagcgagaacaaccagacggaggagggttaccccctgcttctgcttgcgttcgcgcacgcatggatcccacaaccaccacgacagattccgagtgcgacttcatcaagaagatccctagttggatgataaggaattcgccaatgcattgtatggaggccggccactttggcaaggatgccgcctcctccgccgcctccgccaccgcggacgccatggcacatgcactcccctacagcgatcttcaccacctgagagtcgccaattcggcagagcagagctgctcggtaaacatcaagtatttcgaggagggcgactacatgtggtctatgccctgctcccaca

SEQ ID NO: 49062 - DNA, 564 bp, Oryza sativa
ggggagtggctcgaagtccatcccgattttggctagtaagctcggcactttcccatgtttaatctttggcccatttcaccatttggtctggacacaatctggcccggttatatatgcttgggccgaggttacactggtacacaattttcccttgtatttttcacaaggaataagtccactttgactcccttgcaaaaccggatatctcgaccccctgaactattgaaaccggtgcaatttgactcccttggtagctttggagggcggtggcgctgacgtagtgatgttgacctagtatgtggagttgacgtggcgcttaggtggcatttgaattaaaaacgtatatgtgggacccgtttgtcattcacacacataaaaaattgtgggacacactgacatgtgggccccacatgtcatcctcctcctctctttcttcttcctcccctcttcctcccttctctctttttttctctttctcttctctccccttcggtcggccgcggggagcacaggatggagcggcgacgggcagggtctagagcgcggcggcggcgggagctgaaa

SEQ ID NO: 49063 - DNA, 645 bp, Oryza sativa
cgttccttggtgagcaatttatttttgtttttgtgatgcttatgcacgctgatttgtttggatatataaggaggatgtaatcacaaattttttatggggttcttctctaatctgttactgggggatgtataaatgctttagatctgttactactgttgaatgcataaatggttttgagtaaatttcacaaaactacaagtattttgcacaatttatcacaaaactatatgtactttgtacaatctatcacaaaactacatatttaagaacttgtttctcaaaactatagatttagtgtattcgtttatcacagaactacatatttagtgtcttcatttatcacaaaactacatgttttaataatgctaaaacctatagttttgtgataatggagacactaaacctgtagttttgtgataaatgaagatattaaatctgtagttttgtgtaacaagttcttaaatctgtagttttgtgatatattgtgcaaagtatatgtagttttgtgataaacgaagaaattgaatctgtagttttgtgaaacaagttcttaaaattgtagtttatgatcgatcatgcaaagtatctgcagttttacgaaattaactcaatggttttatctcctactgtgaatgtataaaatca

SEQ ID NO: 49064 - DNA, 684 bp, Oryza sativa
cgagctcggtacccgacttacatggattaattattatctgtcctaacatgactatgaaagcaatgccgtccaggtggtggggccagcctcaacttcaatggttaggttagtgctctccttccacggattgaatgtgaaccattgcactactgctagacatcactatgcaattgtttgctaggataactttaattaccatatttaaagtgtatcggtttagtgtaaaattttaatacctatatatatatttctcgtactttctgaaagattgaaaacttctagtactttatcatgactatgcaagcaatcgcagtacctactacctaaacatctgatcacatgccatctaaggtcttattggttatacatgtattctacctgtaattatccccatttcataaagtctctaagagaaagacaaattaatttgaagactaaagagagagaattttcatgaagagtgtaatcgttaatgagaggaacacgtatactcatagtaaatggaaaattcaagtacgcatataacttaaccacgccttatctctttcttaatttcaactggcatttaataagtgtacagtaaaaatgacctaaattaggaatggcagtgagggaaatttgcaacaattacgtccttgagctgaaaatgctagaccgtttgcaatatctcaatattaaacttag

SEQ ID NO: 49065 - DNA, 660 bp, Oryza sativa
tcacgatctgatttttactcctttcatttttcaactctccttttacaaaaccgctttcaatatttatcaatgctctctattattagtttacatttaaccaccgataaattttaaaaggttaaagcaatgatgaacgaaagctatgcagcataataacttttataaataaaatggccaaactttcaaatatatactaccagttaaagcgaattcaactaaaagctactaacttcataaattattaagtgaagtgttactgcagattaaacttggatgaattaatattttcataaatgcacttaacaaaatagcttaaaatataaacacaaggtctacgcaatgtggtagaagatttttttctagaaaatgtatttttcaaagcattgagcaaataatatgctttaaagtttggtgaataatttgaaaggaataaggctgagttattttgagcactttgggttagctactcccttgtattttgtgagaatatttcccgaagtgttaaatggtatgtgttttgcaaaactttctatatacaaattaatattctgaaaaatcaaataagtttattttaaagtttataataattaatacttaattaatcatgtcctaaaaagttttcttgttttacgtgcggttgtttagcactgctcgaacgaa

SEQ ID NO: 49066 - DNA, 758 bp, Oryza sativa
caaaaacaccacaaggacccggcctttagctagtcggacgataattgatggtcttgactgagaagtcgtgatcatgcactgccaggcatcggcatcgtgtgtccatcgcttccctgaaacctcgctgtcccgtacgtcgccggcatcgtcgacagcgatgcacctgctcgcgtagtacgtgaatgcgcctgcacctagaccaatcgataattaaactgtacccatccgacgaaagagtacgtactggatctcgtctcgtcgagagatatagctcgatcgatggatcgatcagtcatcagtgcatgcactgcacccaccaagccaacgtattacgtatacttagctgcaggttcagtgaacggcttgcatcgcgtcgatatgatcgaatcggacctagctagtagtagtagtagaagggaccagagagatgtgtataggagtaagggtgtgcatgtgtgtgtttgcgtttcttttttcttttcttttttttggcaataggggaaaatttggactgggaaacttgtactgccaatcatatcaaaatgtcttcaattaatagaaataatagtatttttgggtggttcatataggtataatgattagtaaagggtattaatgaaatgaaactcgaatagaagtagatgagtgcatagaaatggacttattcagagacaaataaacctataagatttaaaaatttattatagaatatatcagcttacatctactttttttatcacaaccaataataatcaatc

SEQ ID NO: 49067 - DNA, 680 bp, Oryza sativa
cacattggaagaaacgaaatttagcacgaattcgttccgctaaattctattaaaagtgcatacacatgtgtgattattgattaaacaccctgttgattggagatatgcacccatgacttcatcgtcttatctacgatcatccaatgcttgactcgtccaattcttatactttatctttactagtaatatgtctatgcgttgcaaaagacactacaatataaacaatattcctaaacggctaaaatgcatttctgcagatggatgtagcaactgcatgccctcaggtgtatatagaaatagggatttcccagacaggtaacacaaccacacgtgaaaataggatttttacacacgacacgtttacccgactgaaaaataaaagaatttttgaataaataaataaaaattccaaaaagaaaaatcctaaaaaccctaactcacgtatctttctaaatgcgcgcgcacaccttacctctgttaggacatgatcacctcctaaagacatggctggtatattttattttgggattaacgaaatctcaagtatctcgttatcgattggtatcttgcgaaccactaaaataataatttacgtgaacgctagtgcacctaaatctacttaaccgtaaatacgagcacctgagttaaattagaagccagtaaacccaaacgatcggttt

SEQ ID NO: 49068 - DNA, 586 bp, Oryza sativa
cgagctcggtacccagtcttctttaaggttcaattcccagagggaggaaaaatatctgtggagaagtacacatttgatccacaaatagctagaagagagcttgctgccatgattgtactacatgagtatcctttatctattgttgatcatattggatttaaaggtttgtgactgcacttcagccattatttaagatggtgactcgaaacactattaggtaataatgatatctattagtttcagttgtctattaaaaatatctgcaattaagaagaaaaaattaacatttatgcatttttaggaaggacattatggactattacatgaaagaaaataagaaagccctagcctacatggctggaactaagtcaagagtggctattactacagacttgtggacatctgataaccaaaaaagagggtacatggctgtcacagcccatttcattgatgattcttggacacttagaagcattatcatgaggtacttgatgaacaattaatttcatttcctactgctacatatttaattcagcatgacattagatttcatttttgcatcaatctgaatttaatctaggtttaa

SEQ ID NO: 49069 - DNA, 553 bp, Oryza sativa
ccttcgagcacaatcaagttccccgaagatagtgctggaaacgctaggaaattgtaggttatcttgctgcgagtaatgtgccggaacaaattgattgaggaatagttgaaactggaaagttttggagtaccccagctagatatgctaatcccctatgtccctctcgttcgtggtgcatatccatttattgcataaaacaattattattgtgcttaatcgtcaaggaaatggaatcagcagatcggtagatcaggtaggtaataattcctgaatcgtcagaacaataaccataaatggaattgatggtccaaaagatcgacactatcctccgttttatttttaacatgctgtgctgctaactggatgatactgctatctgtttttgtatccgtaatttcctaaattcagaacatggtgcatcgcagtagttgacatataggggcacctgtgcagatagtctttactgcctcttctgtctattgttttccaggctaggcctgtctactctacttagaactgttaatatgcactactcactagactttggagctca

SEQ ID NO: 49070 - DNA, 1185 bp, Oryza sativa
gacccgtaatgttcacccagatacattagcaacaaaacatcatcttactttggtactacatacaaaccttaatcaactaaagaatttgcaaaacacatgttgcatgtacccacctgggagttatccagcacgcccctatacacctggccaaacccgccctctcctagaaagcgatcgtcactgaagccccctgtcgccgcatacagctccccgtaggtgaatgactggccatgaataagcctctccataccatggttcgagatggaatcagcatttgtggtatttaaattcacatccatctctgcagaaacaatgataacagatgagcatgaggcacactaatgcaatggtgtcagctatttaaattcaccaagagaaagaagacaaattaaaccaaaccattgtaagattgcagaacataaggtaataacattaacatatataagacaaagtaaaagtatttctactagtattgttatcaaaacaaccgaaagcaatacagacaaaaaagtaaaacacgcgtattttgtgatattactccccccgttccaagaaaagccagtgaaagctgacaagaaacacccaagcggagaccttactcaggagatcaggacaaaatcatgccaatgcccaaacaccatttctttacgaaatcaatactccactggcaagaaatcaagtaaagagtttcaacacctttcaaagaaaatcagaacagcacaggcaaaccataatatgaaagaaagggcaattcaatgcccagaatcacgttccacgacattagtacaccatcggcaagaaaattaaacggactatctaaatttccaaaaaaaaaatctgattacttgcgacatagcacggattagaaaatagaaaaatcatggtgccttctgaactgttttttagaaggttcaaagcatcccaagttccaacttccagaaataaaaagaattcaggtccatgccttgatgctaacgagcaaaaatctcaatatacgtttaagaacatcacaagtcataaccgatgaagcaaagataaggggaggaatccaaaaccacggtgatcgcgcgagagccagcaaccatcgcccgcccggtgaatccaagaagggagtcaagaaccctcgcataggaagtcagaaaaccacgaagctcgaccagtcatcgcccataaacgggtcgaaac

SEQ ID NO: 49071 - DNA, 863 bp, Oryza sativa
tgtgctcggtaggagtttcaacttcgactctgtgtttttttttccgcacgccttccgagccattaaaggatgcattgttttttcttaaaaaaaatatgtcgaaagttacttaaaaaatcaaaaatcatattgattcatttttcaagtattttgagctaaactctctccgattttattactcttgacattttgaacaatgttttatatacctttgactatcaatactttaaagatatttagttaaagtcactagagcaatagatttacctacaaagtactataataaaagtaaaattttatttatttaatttacatattataataaaaaacatagtgaaagatatatttggagaccgtatagttgtctaaaacatgaagaattatagaaccggagggagtacttaattacttatgcgctaatgaattactccgttttatgtacgcgggaaagaagttcccaacccttaccttcgacacatcctaaacattggaaaggaaaatgaaccacattgtaacaaaccgaatcgacataccaagctaaattgtccaaggaagaatggaccatcaccgaacttcgacagggcagcttctatcttgtccagagcagcaactgatgatgatacataatttcagtaaatcagcatgtatgcaaatgaattttctcgaacagcatgcaaatgaattaaaactgcaaatctccttatctacaaacatggcatagatgctgcaatgctagattgacacaactacttcctccgttccacagtataagtcattctagtattttccatattcatattgatgctaatgaaattagatagatatatatggttagattcattagcatcaatatgaatatgaga

SEQ ID NO: 49072 - DNA, 672 bp, Oryza sativa
agtagttcgactattttcctagtaaaagttatttagattcgaccaagtttatagaaaaaattaaaaaaaatctacaatataaatatattttgatgatatgtttgttttatgttgaaaatattactatattttctaccaacttgtttcagacttaaagaattttgacgaggacaaaaatcaaacgacttataatattaaacggagagaatactccctccgtaaaaaaaaacccaacctaggacagatgcgacattttatagtacaatgcagggtgtatttagttcacgccaaaaatagaagttttattgaaattgaaacgatgcgactgaaaagttagaagtttgtatgtgtatgaaagttttgatgtgatggaaaaattggaagtttgaagaaaaagttgggaactaaactcggccgcatattcattgtactataaaacatcacatctcatctaggttagtttttatgggatcgagggagtaagcaataaggtccgtatccttttcaatttaagacctactaccataagacgtactctcttcgttccataaaaaaccgatatagtactagatgttaacacattgtagtactacgaatatggatatgcctatatctagtactaggttaagttttttgaaacggagggtaccgagctcgaattcgccctatagt

SEQ ID NO: 49073 - DNA, 1352 bp, Oryza sativa
aaaatttaatgttcatgtatgtagaaaagttttgatatgataaaaaagttaaaagtttgaagaaaaagttaagaactaaacaagcatctagtgtggtggcgttttgggattgacgcaaaacccactatgccactgtgccacaaatgaaacggtcgacgttgttttgataccgggccggcagcatggtgttttcgcttttgcagtgcatcaataatctcgtgccgagctagaagggcaacaggtcaccgacgttccagcctcggcaccaaagcaagatgaaattagtacttctacagcttttgcaacaccaatgtccaatgagctagcatgtggtggtggatatagttcgcatgtttgtggttttgcaagtgaatggttttcacatttcgacgtgtgaatccaaatgacccgatggacacacataactgtccgattagagaagctcatatgatggactggataccacgttggcgtgaataatctcttttgaagttttggtccttcctcacaaataaactccgatgaaaactttttcatggaccatcctatgtatacctacatgaccacaaatattatgttcctgtttgaaagggttccaccttttttagaaaaaagttcttctactatagtatataaaacaaagttttcaaagagggccaaccggtggaaagtactaggaaaaaattttcaaatatgatttgtacatctcaaccacaaaaccgggtataatgactcctcaatcaatcaagaccagcgtaaaatgactccctcgatgggtttgagggtggttttgattgatgtgatatctatgtggcaaccagtcttaaaagaaaataataaaaaaagatgtaggacccacttgtcaataacactatatatctcctttcttcctctctctgctctcattgggcgtttggggtgatgcaatggcggaagaatgccagttcctatatctcgctccgaacgaaggatggagcggcggtggtccaaactcagcagagtgagaaagcggatcaaccgagaaaggcggcagagtgtgagtcaacggcacactccttgacagccaacctcgacactctcatggagccgctagacgagccaccattgttggtgattgaagagaccgagttccccctcccacaaccttccatggcgctatccctccctatggcacttgcccacgttgcggacaagaccatgcggcaggggcttatccccatgcccggcgacagcgagtgtcagagaggaggggtcatcgcgacgtcattgagcaagaagctgcagcgggaggaagaagctccggctgagggcatcaatgaggcctttacggtgccgtggtgtaggatgggttg

SEQ ID NO: 49074 - DNA, 575 bp, Oryza sativa
gtgggaatcaaatgagagagatagacttaaaggaaatttttcaagaggttaaaatggatgttaatttttttacatttttcctctaaaatagtaggaataggaaagtttcctatgttttttcttttctcattcctacgaattaaaggtatggatagtgtaggatttcagttttttttcctccaatttaaaggggctaagctttggtggaaagatggctatttcccaggcacaaaataatgataccgaccactatagcgaaaaggcaaataaaaagatagtaataataatgccaaacaattccagctccggaagaaggaagaacgcggcggtgctcttgctcacaaatcactctcaaggccccggcttaaacgccgtcaaaccatgccgtgacgatctttcccaccggagcgtgggccccgccgactgctggccccacacccaatcctcggcccaaccagccccacaaaggcccagtccacagcgacccagcaaaggacgcggccacgtggacggaggccatctccgctgcgggggtggattccgggccaactgcgggagcgcgcggctttagattt

SEQ ID NO: 49075 - DNA, 871 bp, Oryza sativa
cgcgttggttatcttgggattttgatgagccgtagtcggatggcacatgaacaggttcatcatccctgctacatgggagcgttccatgtgttctgcatcagtaatacaggttgttaaattgttaagtacaaagttagcatttgacattttccaagggattaaaaaatagtccaatttgaaggatcaagttggcgtttaagcaagcgcaactgctctatttttaacaccggagtcaattgtgcacatgtttatgctataatttttggcagctacacgtagtcagttcttcgtacagttgagttactaacattcaccaaagtgaaaaatttcaggtgggcttggtccaatttgtgtggcgtacaacaccgacaatccgtccatctccttgctatcctaaacacaatcattctggttgtggagacacaaagggtacaggttgtttcctcaatacctaacaataatcgtgaaatatgcctgtggagctagccgccatgaaccgaaaaacaaaacgtaggaggagggaatttatgtcctaaatcttgcgagacataaggcaacatagaaacctaaaatgcagaaatacctatgcgagattgtttagttcctaccgaaattacggtaatcctagaaacattaagcaggttatttaacttttgaccaataataaaacacctcttgtaatccgcatgcttacctctctgagtcatggtcaccagcctcctccccagagccgcagttcttagcattttagggtccaagccattctcctcctcctccttgcaatgaacagatggtgattgctcggacacaacagagcaccagctcccttcctgggaggagttcacctgagtgcatgaaccagccgaggagc

SEQ ID NO: 49076 - DNA, 612 bp, Oryza sativa
actggagggagtatctgtctatcagtgatgtatgtatagaaactagagggtgcagaatagaaaactaggatttattgatttatttgcttgattattagaaaaataacaatatactgtaaaacttctccacactattgaaattattgccatgtttctcttaccgctagctaagtaacgatttgctttggagttgtatatggagttaccacaaatcaatagtgtcccaactaaggccccgtttggcaagtcctaaatccccacccatccctggggatgggccaggaaatctgatggtgtgaggattaagatccatcagtttttttaatgaaatcactatcgcctctttctatgatctcaaatttaagccatacaggattaaacactactactacttgttttgtggaacatttaaagacccatgcaaaataaacaacttacatgtgccgatggccacataatagccaaactgattatataactcttgtataagactttacagtaaaactgacttacatgctaataggtggattggtgaaaatgttgcattctaatgttgtaaatgaaaaaacaacttcgcgaacagttttctctaaatgtaggacaattgtgcca

SEQ ID NO: 49077 - DNA, 525 bp, Oryza sativa
gtcaaattacacattcaaaggctaacacattataaattacttctctttttgcaagcattacaccagtgaaagttgaacatatcgtcttacatcagggagtaatgctggcccttcgaaattggtgtcaatgtacttgaccaaatccaagctttctcctttcacctgattgttgtgctcaagtgaaggtacctatcaaaaagtaaaagtgcatacacagacccggcaaaaaaaagtaagtgcacacctatagcaaattaagctgtaaaggatttttcttttttattggagcagagttgagacttgacagtaacaaggtgttaggaaacgataggcgaacaaacgataaataataatagatcaatcatataagacacgagatttaacgtggaaaacccttccaaaaccggacagaaaaaaccacgggcgctagccagcaaaatatcttcattatatctggggtgagattacatcgccgcacggcggcttacaagaggtatatatatggtggaaccctaaaaagatgac

SEQ ID NO: 49078 - DNA, 1413 bp, Oryza sativa
tacacatcctcctcggcctaccatgcacagtgcttgcgggcgccaaacacaagtctcaactccttgttctagaaaatctgggcgccggggaaatgcaaattccatgcatagctcatcatccagaatagagtttggacgtctgaccggcttgcgaaaggagttgacaaaacaacagccattgccctctctgtcgttgtaaagccgagacggccttgcatctcgtcaccatgtgaggatatacaaagataatctgacacctcgttgctagatgggtgggatatcaacaattggtgccggctcagtgggaggaagctcggtcagtccatcaatggtgggagagcctagcaaatacgctcaacgtcctaaaaaagggtcttcgatccctcatcttgttagtcgtctgggaaatctggaaggtgagaaatcgacggattttcgaccacaaagaggtggcaacaagctttctcctaacaaaaatcaaagaagaggctagcctttgggctttagcaggggctaaaagattgcacgagttcgtcccgcaacttgtatagtgtatagcttacggtgacctctctctttttcgctttaccctagaggttgattttcttctactctattaaatgaaaaggcacttttgtgctattttccgttaaaaggaaagataacgtcacgaaacattctattaatagcacaaactcctaacttgttgctaaacgttctagtgaagggtgttatgttttcatatcattcaagtgtgccaaatggcttcataaaaaaataagaccaagtctatgtaatattataggcaccagaatcatcgtatgtatggtcatatataccaatgatttcaccgaaacactcacactaatggtgctttgaaaggacttatgatgtgactcaacaattcaaaaaccttatttcccttttaaaaaacatatttctctgtttatattataatatgttttaactttttaatcagacaaactttcttaggtttgactatatttataggaaaaaaaacataacactatctacaacattaaattagtttcgttaaatctaacatttacatagtattatatttgttttgtgttaaaaatattactaccctattctacaaactttgttaagttagaggtctgcttataataagtcaaaacgtcttattaatatgaaactgtagggataataaatactagtaaataagtttgacaacaaaagattattttcaatgacatgaaagtatatttaagaccaacgacattgagtaacatagaattacaccagtattttattactcaaacatgacttttacaccacatgtcaacttcggtttattggaagcaaaagctgcaaaacatgtactaaaaaaaagagtagcaagaaaagaggattgattttttgtgtgtgtgt

SEQ ID NO: 49079 - DNA, 533 bp, Oryza sativa
atccatcggtagtttccgagtttccactacggctatgttcgactgccattattttcactgtgctgcagccaactagcacagtgtgttgtttctttcggctgtggcagcgcagcggctgtaccaagcggccgaacaggccctacataagtacatatgtgatttccaccacatattttcccagcatatccatataccatacgatttagatagcatgcttgtgctaccaggttttatgccttatctcacaacaacagtgttgtgattttttaagaaaaaaatatatttattttttaaaagaataaaaaatacaattacaatttcaaagttttgcaaaaatctcctcccgctctaccttagggaggggcataaagcaatctatgtaacacgacaattttgtaggtgcccccctcccgatgatttatctccctatgtaacatctcccatagggcaatttattgggggggtggctgcaaaattggcacgacgcaaaggttgatgatgcatgggtcgtgccatgacaattttgataaatc

SEQ ID NO: 49080 - DNA, 1492 bp, Oryza sativa
  unsure (1)..(1492): unsure at all n locations
aaaatctacatttggaagttccatataatttgagctaaaagtcgtatgattttgagttgaagttgaaagttttatatgagaatgctactaagaaggagaaaaatatgtacactgaaaatgtacgtgcgctaattagcgatcccctttggtccttttctgagagcggcgcctatgttgttactgctgatacattagtggtacacggaagatgatctttggcttactttcctttgtttttgagacactgacatatagacccgctggatagagggttcacatgtcaaagaaaagtaagttacagagtctcaatccggtggtacactggtacgcgcttggagattgtccaacgagacaaacggaccgtccgatcaagcgagcagctgtgatcgaagccgtctgctcaccttgccagcggccaaacgggcatattgaaggagcagagatatcgaacacgtttaagaaaagggaaaaaaagtaggactattgagttcgtgaaacaccaacgagtaggaagaacctggaccaggaagtgtcatgtgctcatgctaggtcgccggtgccatcacacaaagcagctgtgcaagaatctgctccttttcaagagtgtttggcaacttgctaacattccttcatcagtcaagtggtaaaccccgcatcgaagttaggtgaaaaaacaggtgtgagctttcgaagccaatcaggcgctcacatggtggtgcccagctttatcaacacaagaacagaatcaggcttacattatcttacatataatagtaatattcacataaagtaaatttagacctaattaaggaacgtaaaatgcatcacccaattcaaaaggaccaacacagcaacagttcgctcatgaagggaaaacttgtttaggtttatctgtttggagatacagcactgcaggaataaagtagtgcatgcaaggcattaatatgtttggacccacaaagtanagaaaatattcatcagtgtcactgagatgcaatgatgtgttgaatacaactctgatgttagttagatgtcaaaagaattgcacattnttttagacctcaagcaaatgcacatttgcacgatggaaatcccctccagttatataatgaggctgtagcagtgtatttacctttacacatcattcagggctaaatttactggacaagaaggtatgttattatacatcatgaaataactatgatttcaaattgtgtctaagcatgccattgcaagcaattttccaattaatgtaaaagcttaaaggcaaccaagatcatgttgttgagttccattgaagaattcagagattgaggaaagcacttatccagatgatcttttatttcacaaccgtttggtggcagtgcacgtattccactttagcttgcaatagatcctaagcagccaaatcacaatatgttgctagagacatatgtatcttttatgtatcttttataaccaaccaacacgatcttcaggaatggaccaaaga

SEQ ID NO: 49081 - DNA, 512 bp, Oryza sativa
ggtaggcatgacgaggctcgcgccagccgcgctccggagggccaccgccgcatctgggatcccctcgtcctcctcgcgctcgtccgtgcttgctccgttcgcgcctcgcctcttctccaccgaggcgtccggagaaacccccgcggcgggcgccgccgcccaggggtcgcaggacgagcctttcttcaagccttctgacgaaggtaggtctcccatccttgcggagccgattgctttttttttccctgtggtgatctgtaattaggggtttgaggtttaaatgtttataatgtctttagccgcttaggatttggggtcaggaatgtagattgatggattagatacagtaaaatacctcactctgatgttgcactaatgagaaattacattctttttattccatattggtgcgaatatctcacatgacgagtgtcaaacttttgaaaatgcgaaccacagcttctaaaagttgtacttttgcactatcatattgcaatacggtttttttttcc

SEQ ID NO: 49082 - DNA, 549 bp, Oryza sativa
cagttatataaagttcggtttccctaaaaaaaaattattacgcgcgatcgagcaagcgagcgcgcgcgacgcgacacgacgccctcgctaaacaagttacactaatacgcgtggcacgccgagcgcgcacgtcgtcaaaaggctggaccccggaccacacaagaaaagcgcgcggaaggtggggggtaaatatgcaaaggcggttcagacgcgggagtcgcccaaaaaaaaagcaggccgtctcgaccacagccagccgtcggggggggataagcgaaagctggagcccgtcgccacaagccttgtggtttgatcttaataccatctcgctctccacaaaagcacgagtagcattcgatcggtcactccgttccctgcatctgcatgtgccctacttacatttcatttcattcacctgctttaattttgtctctcgatcgcttgattcagtggctaattatagctccaaaaattaccgggtaatcctagtgctcataccgaattagtaatactctaattactccaattatcaagatcgcagatttcagc

SEQ ID NO: 49083 - DNA, 717 bp, Oryza sativa
tctaagatagatctaacgataataggttcaccgatttaaataaaaatcgacggagatttatctattttattagggtgccacgtggagacttgagagtatttatagggtgccatgtcacggtttgagagtgtttgtaggatatttaatggattttgaagtataagatagatagatagtactacgtacatatggtttttctctttatcttatatggtagaaaactatattttatatttttctcccgattatgctatgtaccttttttactttatcacacatatattttttcttccgacgaacggaacataggctttattgtttttttgggaatcatcgtactgtacttatgattttttgttttgccgacggtacgtattttcccttttatacagggaatgtattatatacacacctaatgattcgtaataggtccaccaatttaaaagaaaatcaactatagatatagatataatctaatggtctaaaaatgatgggtccaccaattaaatgaaaatcaacggtgagattagacagtgccacgtggcggcatatgagtgtttatagagtaccacgtggtggtttgagggtgtttttagaaagtttaatggacttttagtatataatagatagatgcccgacatattagaattcctcagcaataggaaaatataaattataaaatatatcatgagtagtttgatgcatatgttatattaa

SEQ ID NO: 49084 - DNA, 1750 bp, Oryza sativa
cttaaaattaagaaccggtagctatcatcagtcatcaatacacgtttataacagaaaccggcaccaatagtccctaaaatcatagagacctatggacaacacataggtgctataataaaccggtacctatggacatagctaggtacctataagcgcgatagtatagataccagtttttatgttgaaacagcatatatgggtatcacatatgtgcctcttgataaaaaccagcaattatgagcacatagatgccagtttacagttaaaattggcacctatgatgacgtagttcatatatgtgtgtttttttatctaactttttcatataaagttgaatgaagataaactttatattaaatttgtagagctcaacgagatctataatttaattttgtaattgatgaccttttgatttaacgtcatttggatgtccgaaaatgtgttataatgtctcggatcaattttcgtaagagagtattcaagaaacaatctcagatggagaaaaatatatgaaagtagaagatctagatgaggtctacaatcttgtactccctccgtcccttaatatttgacgccgttgacttttttaaacatgtttgaccatttgtcttattcaaaaacttttgtgaaatatgattggaaaataattaataattacttaatttttttgaataagacgaacggttaaacatgtttaaaaaagtcaacggcgttaaatatttagcaatggagggagtagttaacaaaattttcgttcgagctcgtctatagtgttaaatatgaattataagtttggatcagagtggtctgaaaagatgcatttgtttccaagacaactaatgtttgagagaggtctttagttccaatgttgcttgaagcatatctatgaatatgggttgtaaaaatcatgggacttgtggaagggaaatattactgtataggtaccaaatattctttttgggatttttagcacctgcaaaaaactaaaatagttgcaaccggcacctatagtagcacttaaacaggtaccaatgacttgggtcattggaagttattggtgctggcaccggaaccagcacctataagccctttagaatcggcaccaatggacttttgtgaagttgtgttatattgcaagaattcagtgttttgttagtatgtatgtacgaggacagcattttttttttctttccatcccctatgtcattgtcatctcagaatggaaacaaggcattgcaaaacatggtgatgaacaggtatccgtgatttagtggtgagaaatatattgatcaagcttgaaattcttggacagaactgtatataatctgaagatacaaatatttcaaaatgacgaccaagtgcaacgctgaagtgtcattttaggaagcgagaacaatggcaattggccccgccgaggtcttccgcaccctgctcaatgccccttatgtcacgaagaggaccagactatacaacatcttattgtttcttgtgtgtttgctaggcaaattttggttcattatcttgcagcgcgttggacttgcggtgcttgcgcggttgcgccacaacccacggagaactcatttgatgattgttttagccgggccaacatcttgttacaaggggttatcagcaaacgattaaatagtctaatcattcttggtgcatgaactatttggaaacattcaaaacgactgtgttatcaacggggctgccccaggcgtttcagcttgtctagttcccgcaagtgagg

SEQ ID NO: 49085 - DNA, 2720 bp, Oryza sativa
catcggttttttacttaaacatcaacacattattttagatcatcaaatcaatcaatatttttctaaaaaaaagaaacatctcaacccttcctccatccccgttcacttgcagtgtgcagcattacttttcacagcttttatatctctatgataattaaaatttaaattatttttatgagcaaagaaaagaccacaaactaatctccacctattaggtctagccaactattatttttctaagtgaaaacaataacttaatgcccatattgactatattaactggtaacaaaaaattacattatgaacccacatccatattgaagcctcttctcaataaaggtaaaatttacaataggacatcccaaaaaaagtataattagctaagagacactgcaagaacgtatatctgctatgggacaccgcaaaaaactggtaattagctactagatacccgtggtattattttgttatatccaaaggaaaaggggagagaaacaatcacgaaagtatgattttgcccctttctgccatgtgcggctcgcatatcgctctaacgccgtggtagtcacgacatgggcggtggagggtatggcagcgtggcgtgccacgactccgagatcgacaacaatagcctgcgctctgtgacaccctactcgacatgaattaaaaggtggtccacgttgtgctcaccccaagcgtggtgtgtggcggagcataagcgccagcatagccctcacactgtagcggcaacaagtgtggaaatgacatggagccacaagcccaggtgcacgggccctccttgaccccctcccccctctctagagagccacctcaccaccggcgggtgctgttgctgcgtcgaagatgtttgcaaggcagacttagtaggtaagggaaaagttatacttttgttattgtctctctctgcatttcctttggatattataaaataatatcgtgagccaccagtagctaattaccaattttttcggtgtgccacaacagatacgcgttcttacggtgtctctcggccaattacatgttttttaatatcctatagcaaattttaccctaaagaaaagaaaatactaaaattgctcactaaaaatcaaaatatcacagctcaattttttataaaactagttgacccattatttatatcctgatagacatctaacgactttctatcaactttttctcagcttatatatagaagctatttacccatacattttgatattgatgcttttatcaataaatgatcacttcaggagataaataaataatcataaaatgatcatagcttctaaattatttatatgatctatgaagtcacgtggccagttgaacaacaaaccgattgtactgggcacgttggttgcaccaaggaatcttaagaatgaaacaaccatgatgtggcctcagctatatataagccaattacagatagaaattaaaagaccatatctatttttttggggtaaaacttcctacagtacatcgtgaatttgtgacatataggatagaacaatctagaaatatgcaattattacatgatattccagtttagtggtaattttctaagaaaatactacaacatctattttatttttttcttacttaattggagcgagataatttagaattgatgcctttaccccatggcaggttgtaggatcaacccacatatattttcattctgacttacagagatcaaagcatttcaaaagatgcttcataaagtggatttatccaaaaaaatggagattaaaagaaatgaaaataaaataaaatttatctaatttaaaatttgtttttgttgggtttataacccattctaaatagaaatattcaaacatttttgcaagactaataaaatgaatatatttaaaatttcaaacagaatctaacaaaaataattggacattcatagggaacacatctattgtttcgacacaaaattttctcatgtattagaaacaacacggtttaaagtaattttagttcaatttatatgtttcaagtaaccagcgttcaaagcacgtcgaattagtttaattttagtttatgataaagtgaaagaatatttttgatagaaaacaatccacacatggacattcgtaaaaaaattttacgcacatgcccgcgcatatgcgcgggataccttcctagttcagttttaaattattggagacggtttatcatttgcctgaaaaatattactcacaacatttctttatgtcgtttagctcatgacctttgaggatctgatttagttttacttcagggaattatcatcttgtttcgcccgttttcattaaaattgaaagggttatattttcactaggaattgggcgcgcatctcacttttgtcattcagtgcactaaaacaactgtattttttttcagtagtgatttaatcaaattccggggttttgcacatcagcagcactccccccaaaaataacatcaatagaaaacccaaaccaaaaccagtactcgctgtaaaattatgcacctcattgtaatttgaacaggggcagtgccatctcaaatacaaaactggagttttagttttgcgttttgtctcgaacatagaacatcactatcccaagaaatagtcgtgagttgctaatgcttgtcaagttccttcctggtagctagcttgaaaattatgcagactattacgcaataaaatttgtgcatataccatgcttgtc

SEQ ID NO: 49086 - DNA, 1308 bp, Oryza sativa
cacatatatctctgtatgacatatgcaatttcggatgggaaaattgaacttatattagaacgtggtatgattttgagaaagctcccaaagaaaacatatgtatggaaaacatatgtagcatgagcctgatcctcctccagcaaaacataaactttataagacggtagtactgacaagaccgttcctcacatggccatataagtgtatatttattttctgaaaatcctcacatgggattcctcactgaaattcatgtttgtgtcgcccgttttattaagggtgagactaatcacggtgaatctggtcgatcgcccataaccacgggcatggctattctaatagttttactctggccagaggtgcacaactgtacccacaagacacaacccaccgccatgtcacgcgcctagccggacacgtcaccatgctgagtgattgtgacaagacccttcatataaccccctctgaccaagcacaccacacctcaggtttcaccccccactcctcaacaggcagtgggcagtcccctctcgtgcctaggtgaatccggaagcgacaaaggccgtcgcagagcccatcccgctccatcacgcgcacccttgcctggatgcgtcagccagaggaaagctatacttcaagtcaggcagttacctattcccgcttgtggcaagcattgtatgtcttccagggtttcccacgaatcggtccaattgccctgggtgtgaccagcaaaaccatgcacccacagcctaccattcagtcacattttagttggataattatgaccaatgaaacatggccggatgtcccgagcacgcagctcgtctagatactaagaggtctaatactgtaattatcccatcaactaagttacccaaggttgacaaaggacagacatcaagtaaatatgacacaagcaagcagataggtaaactctaatcccatgtaattagcaaaacatgcatatttatttgcaaatgataaaacatttgtaaattaggatacaaatgctcaaggggaatgtgtgactttccttgcttcttcaaacaaatcttctggactcttttcctcgtgaccgcggacttccgaaatggcggaatctactcgctgacatgcaaaacgaggaaaaactcaaataaaaaccaagcaaacaatacataaaatgtaaacaaacatgtagagctcaattttagatgaattttgcaagttgagttgctcaatttggagttcgaatgaatttattatgaatgtaagaatttttgagcaacataaatgaatttctagaattattatcgaattattgtgcaa

SEQ ID NO: 49087 - DNA, 732 bp, Oryza sativa
gagttcacagaaatttgatttactctaaaatgtgttgttttcaatttgttatggtttttagaagtttacatgtttttctgttgaaaatataaaagctttaggtacttcatttagattttttccaaattttaaataggttgggtccacaggtcagtgagaccaatatgcaaaaaggttcctaggtttgaaccaagccacagttctaggcccatactccctccatactcgtaaaggaagtcgtttaggacaatgtttaagtcaaaccttaaaaatataaatcataaataactatcgagttgttgagtttgaaaatgtaaaaattatatgaatagatttgtcttgaaaaatacttttataaaaatatacatatatcactttttaataaatatttttatagaaataagaagtcaaagttgtattttgaaaaccgtgtcgcggtcctaaacgacttttatacggatcgagtatgtcattgagtggaaaggttagacattgagttgtttaaattctcaaaacaaagtcgtgtttccttctcccaccgtgcgccgcctttcgtcccgatcctgttcggattctcctcgcttttatttatgtgttcggtttcgtggtttttccttctcctcgctcgcacaaattctccatggactcgcccgacggtacagatgatccacccccgttcgcagcctccggtcattactcattaccgccacgcgatcgtcgtgctccaccctt

SEQ ID NO: 49088 - DNA, 724 bp, Oryza sativa
tagattctcagactaggatcaacactatgcaaatccataagccatgtagccaccaaattaggaacttggtttagcttgcttagaaatagcagccgcatgattgatcttgatggacctttaccatcaacatatcatcggtcttaccgattctcttccaggttgtgggataggttgcaccctgaccagcatttcctgctcttcatctggagcatatgttcgtgcctccacttgaaactgcaaggtggtggggatagtgatcaaccaagtgtattccgaccctgcctagcctcctagaagcccagttaaggttcaaatcttgtgatgttctacgccaccattggagggccaaatcagatttggtggcattcaaatattgccattctggattgatattaagttaaaagttggagtaccgcatgatttatatttttctaactgacgaaatcaatagaatgtttgtaaagcatgttcctaaaagcatggtaacaaaaaggtttcttaaaagtcgattggagcaaggtgaaacctataggggcatttggtacgcaccactttgaaaccaaagagcaccacatttttgaaacatgtcacattagcccatggtcttaattctgaattgaaccgcaacaatttgatagatgaacacttaaagctcccaattgtatcagattgagatgcattacattgcatcaaacatatattgctaactgataattgtttgatg

SEQ ID NO: 49089 - DNA, 726 bp, Oryza sativa
acacggtccgtctgaagcattgcacattaatttgcatctcaaactgtagtagcatgaggctttaatctgtctgatcagtttgcacctaaacagcagctcaacagcactgcagttcagctgaaaatgttgcaaaagtttacccaatgaggactcacatagggggtatatatatgagatgcacttcttttccttgtcatgtccataatgataattgtcctcttgcactcttcatcttgccatgattcaatttgaatctctggattggcataaacaaggattgtcccacacaaagctatactctagtctgcattttctatacaagaagtatttgaatacttttttttctaccaacactacaggttgcacccttactttgtgtttttaattcttggatgtaggcaacaggccttgccctcgtatattcagccttgttctgacaattcatatagcaactttgaagcctagctccaatgtttcagtgcagacattgaagcagcaaggaattaagccattgtgccgtcagattaacagcatgaacattaaatccactgaagcaacaaggatgtaatgcttaattgtacacattgtgacaaaatctgaacacaatgaaacacgtgagtgcatattttgaacagaaactgaaatcctgaaaaaaaatcagtgaataacctgaatgaaaactaaatgcataacttgacatgaatttgattgtgcactagtaatgta

SEQ ID NO: 49090 - DNA, 695 bp, Oryza sativa
cagtataaaatcgccctcccccagggcggcaagggggccgcctgcaaaattccatgccccctcgccgcccatttgcaggcggccccccacacagtacaaaatcgccctagcggagggcggcaaggggcccgcctgcaaaattcatgccccccctcgccgcccatttgcaggcggccccctgcacagtataaaatcaccctagcggagggcggcaagggggccgcctgcaaatttcgttgacggtcgtcgcccgagagcgaacggccgtctgccacgtcattttcgccgccctctgggaggtcccagagggcggtaggcgactacttccgtcaattttcaaaatggaaaattatttttgtaaaacttttaataaaaaaaattataaataaaaaaaattccattttcttgggtaagattgaactagaagaagtaatcagtgaaccaaacaacctttaagaccattttagtattgtgtaagcctagtattaaacatatgtttagcgctgatatcaaagacctcaagatatatgaagcaactagttgaatgtgggtgcgttgcaacagaatgtggtaagattcgtcaaaaaccaaatatcatatgcctgtttggggttctctagtgtacaacttacaggcttcttttcgggtttttgaagttcggcctaattagcctaatagccttctatacactagtg

SEQ ID NO: 49091 - DNA, 562 bp, Oryza sativa
  unsure (1)..(562): unsure at all n locations
tggtcagtatcgcttggttaaagatgaccaagtccctgaaacccataccgccaagatattttggcgtagacagccactcccacgagggccaatgcatcttcttcctcccgcctcttgagcaattcaagcatgctagaggcatcagtcgagacattttcattttctaaaaaagttagtcgagacattttggcaggtggtcaaaacatatttactactacctccgtttttttaatagatgacgacagtnttgaccgaaacactggtatataaaagctgctatggaatagagagcattctcatgagccttaaaatttgggggggattgatagatttaattggttaattgatccattgaaatcaattaaattaaataaattccaaggctcattatgctacgaattcatgtgtattcattctctaatgggatatcaatgggacgaggagttttgagaattaatccaattgataagggaattggtaacttatatcaattactcctaattaatggatggttgatggttgtatagtgaagaatggatcattactagttgatgacaattag

SEQ ID NO: 49092 - DNA, 580 bp, Oryza sativa
attaaatggtgaaagatatttcagacggaacgaattggacatatatatatatatatatatatatatacaggggaacatgcacagtgactaattggggcgatgtggcgattaaattcttatgagtttaagccggaacgttgttccattgtgtcattgggataggggcaggggatcaagctatttggccatatggccaatcgctgcatatcattttacctggagccctgggtctttggggactgtgaaaatggaagaatttgactatttgccacttttacatttgccaaataaccatattccgttcgtaggattgaacttaagaattagccatataccgttcgtaggattgaacttgccaatttgccattgtagagagatggttttgtcactctttgcccacttttacactgcgaaggggcacatgtgcatgcccacatgggccaatgtgcaaaaagaccactgtacccctgctagctagttgtatgtttctcaagcgctaaagcctggacgcatggaattttaattttaactcattcaccggtaagaaacttggtcacatgctcattttttctattttaaa

SEQ ID NO: 49093 - DNA, 747 bp, Oryza sativa
gtacagtagttcatcaccaatgctcaaatagttccaagaaaattcttgaacatacttggacactcaaagtatttaacaaaactgtaaccagctcatttaatgattaatttaatatgtgaataattactgaaatgttctttgtattattaaaattagtaattgagctccgaaaaatccgagaaaattccagagagtataattaatcatggagaatttaataaaaattaaatccaaccatgatttatatttaggagtttttacttcccacatttaacttcacttgtaaattaatgaacatttaatataaattctaatattaatttactaaataatttataaatcctgagacagaaattcaggctgtgacattaacagtcttgaccgaaacactggtatataaaagctgctatggaatagagagcattctcatgagccttaaaatttggtggggattgttagatttaattggttaattgatccatttaaatcaattaaattaaataaattccaaggctcattatgctaggaattcatgtgtattcattctctaatgggatatcaatgggacgaggagttttgagaattaatccatttgattagtgaattggtaacttatatcaattactcctaattgatggatggttgatggttgtatagtggaggatggttcatcactagttgatgataattaggtgctctattcctctttctggtctattgggaacctacatcaattacttctaattg

SEQ ID NO: 49094 - DNA, 735 bp, Oryza sativa
agtatgaatagaatttgctggtaaagaaattaaccatgtaaaaccggtactggacaaagataaagaaaacaagcgcaatttaaaagtatcactattagcctcaccacattgcgctaaaaattgacctacatgctcccatgtggtcctaccatcttcaccactaaacttggtaaattcgggaactctataattacgaggaaacggcatattatcataatagtcaggatacggcttttggtaaaccttagcacgattcctagtttcaatcccgaatttatccctaataatcccaccaattatttcctccatattatcaggcctatgttgatttggtggtggatttggtggcctaataggttgtgtttgcggcgcaatatggttatattggacttgcctagtatcgggaggataccccctaccaacatcattataagcattaggaacatgtgggggaacttggggattagttgcagcagtagatacaggaggatcaaatgttctaagatgatacaaataactagcattagtccagggcctggtctgatcgacatccagaggcgcgatcagaccggcctaagtcccggtctgaccgccggggtaatacccggtcggacctgccatttggcctgtcggaccgacagtgaagtcgcggtctgaccggccatcaggcccggtcggaccggctgtgtgcgccactccatcggttctactatttgtttgatctataagggcttg

SEQ ID NO: 49095 - DNA, 666 bp, Oryza sativa
gtaaagatgaatgatagagtcattatattttaataggcataaccatgtgctcaatataacatggcaacttctatatcttcaaaactagatgacgtgctaagaaattcttttataactacataaatattatttgctcatgatgcaccaaataactacaagcgactccaacaaaaagttttccataacaagtcactgacatgttgttcatggacccacatctcaatgagagaatgaaggtcaacttttggtcttttgggccaaataaggattttatcccataatatttgaataagtaaattatcaaaattacattatcattcataagtaaaatgagttaggtaaaaggaaacgtaaagaccgcaatatccatccatccatccatgtgtgactccaagaccaaccgaaaaagaaaaaacacattcccaaactcaaaccaacaaggtcaacagaaaaaaatgcttgtgtcattctttctgacagtagttggattcgggttggatcagtttttgggtaaattacaatagccaggaagttttgcaccactaatcaaattgatatattccatgtcaatgcaatatattccaaaattagatcgcagtatactgcatatgatatattccatgtaaattacaatatgatatattccaggcatgcattgacatggaa

SEQ ID NO: 49096 - DNA, 626 bp, Oryza sativa
gtgagcagcaaatacactctaaaaatttgcttagatattacaaatggtgtaaaacaaattataattcttttcatcgatattctctgatctattttaggtttttgttgctgtggaatgaagggtacacgcagacgtacccaccatcgagccagcctcctttggggtatcagaactactttggcaaggagcagcacccacctttgtattacctgccgtcgcatgaaatcaaaatggaagcaaaattagatcgcagtatactgcatatgatatattccatgtcaatgcatgcctggaatatatcatattgtaatttacatggaatatatcatatgcagtatactgcgatctaattttggaatatattgcattgacatggaatatatcaatttgattagtggtgcaaaacttcctggctattgtaatttacccaaaaactgatccaacccgaatccaactactgtcagaaagaatgacacaagcatttttttctgttgaccttgttggtttgagtttgggaatgtgttttttctttttcggttggtcttggagtcacacatggatggatggatggatattgcggtctttacgtttccttttacctaactcattttacttatgaatgataa

SEQ ID NO: 49097 - DNA, 1431 bp, Oryza sativa
agcattcactcctggggaagggagctttactcccgggtgccaacccttcgtagtcctagttgaaataaccgggactaaagatgcataccacgtcaaaaaaacgcgtcggatgtgggattcaaactcaagatctctcacctcaaccctcacgcgtgttacgaaaacggtatgaaaatttcccgacggtattgataccgtttccacaaaactaatataataatactatttttaccgatggttaccgttttcaaaatttagttttttttaatttctgtcagcatggcattgaagttgacactaaggccttgtttgtttcagcttaaagattattgtaatctagattattaaattagattactctaagctgaattataataatgacataaaataagctacgagttgtttatttctctggattattagaggcatctaagggtagtaggtctttagccactcaataatctgaaaaaagcttctctagaggagattaatggattatagtaatccggcttatagattataataatctagcataataatctacttgtttgtttcagcttactcctaataatctagattataataatcctaagctgaatcaaacagggtctaaatagatgaattcataaatatggaaatttttcgaccgtttccgttcgttttcgaaaaataataaaataatgataccgtttccgaccgttttcatctctagtatacacatctgacttggatagagatgctttatttttaaactaaccctggaggcatctttactccgggttggtaacaccaagtggagctaaaaatatctttagtctgggttggtttatgaaccgggactaatgatcaatgtttagtccggattggtgttaccagccaggatgaaagatcctcctattttagtctgggttggtaacagcaactgggactaaagtgatgatctttagtccttgttgggggcctgacacggcctgacaattattgaaccgtggctaaaaatgatcttaaatcccagttagtgttcgaaccgggataactgtgatttttgtcgtggctaaagatattctttagtctcggatcctattcgaacttgggcaactgtgatttttgccgtccaagcaaagattagtgttgatatttcttaaacggcattactagaaatataattcccagcaatgacgaagaaatattcatggtatatttatggtcacaaatatgatccgtaagcgcacggatataccattttagcatttcaccccggagtattccaagtatcatatttgtttaatcccaagggaagatatgattagagagtactatgctaatagtttatatattacttgtatacatcaaggctatgttggggttaagttatttaaagggtatgtgacacacagaagaaagaactatgatacttttgctagatataat

SEQ ID NO: 49098 - DNA, 1247 bp, Oryza sativa
ctatattatgccatcttttggtatccttgtgcacttgcatatttgctgtgtggcttgcagagtatgtcatatgctcaccttgcaataatcaatcaacctcagttgaagaaaaggatccagaagaagacgtttggcttataccccagttgagctgcctgtgggagtggagctgaagccatcgctagaccgttattccgctgctgattttcttttgttttgtaagtatgtaacgttattattatgatggatttctatattaaattgtcagtttgtgtacctcggctgattcctggacgaggattctatacacaaattagttcggaaattactagtgaatttctaggcgtgacattgtccacgaacccgcttataggcaaaattagtacgtaacctgcaggtttgaccaacgggttacctatcaatttgatctataaatgagttttcatatctatgatgcggtaaactggaccgacgcgaaaacccataaaatatgatttatttgacctataagtgaactcgcgggtcggcccgcttgcatccctaccctggcggggaagaagatgccagtaagcttcatttagttccttttttattcaacttcttttcaaatggatcttcagtaacatatcatatgatcatttgttttgaatggttcctctcttttttgacatgaagttgaaactttgaaaacaccctatggaaaaaggtaagattctgatctacagagggaactcaattgcaagctgatagaatgtacttacgaactgtgttctcttgtatattcatacgtagttgtagcatatatttttcgcttatgaattctattggacttggtaggccagactagagtatctgtgaggtgtcttgatttactcttttgttttgcacccgtgctagcaacctttcattatcaaaactgagatgtgccatctatagaacatcagaactatgttacacattttctagctatgaatatactaaaatgttctaccagccaattattttcttttttttcattcataagccttattttgtttctgtttatccataagttctgtagaaattggcaatatatatttttaaaccatacattgtacaagttctgacctacatttatgtgtagtaaaaattaattgatgtcatgtggcaccatctctacaatgttggatccgccctcatggtttcttatgagtttgatctcctcaataatatgaaaggagcgtggtactcacgtgttcgaaggaact

SEQ ID NO: 49099 - DNA, 641 bp, Oryza sativa
agcgtgtcgagtggtaacgatttatgatctaatacttgcatggtttctggtttacgcggtagaaaattttgatttatgctatcgtagcctacgcgtattccatcaggttgtgcatcactgcctactccgctgatagctgctccacttccacgaccgtctctgaaccaacgcagctccacgccctcggctaatcatctggaacatctgcctgaaagcaaggtaatccctgtagatattgcgatctactaagacataagtgctaagcctaacatgatcaccctaatgcggaatttaggattactgaccgttgtttgaagccattgcaattgttctcgcttggtccggagtggatgtagaggatgcagaacctcgaaccacctcgcgaattgtcggtgtaggagaagtggtcgtagcagtgagtacaccggcttaatcccgaagaggtcgccggtgatcacctgcggggtggcggcggccttccggtcggcctaacatgatcaccctaatgcagaatttaggattactgaccgttgtttgaagccattgcaattgttctcgcttagtctggagtggatgtagagatgcagaacctcgaaccacctcgcgaattgtcggtgtaggagaagtggtcgtagtagtga

SEQ ID NO: 49100 - DNA, 1540 bp, Oryza sativa
tacacattttctagctatgaatatactaaaatgttctaccagccaattattttcttttttttcattcataagccttattttgtttctgtttatccataagttctgtagaaattggcaatatatatttttaaaccatacattgtacaagttctgacctacatttatgtgtagtaaaaattaattgatgtcatgtggcaccatctctacaatgttggatccgccctcatggtttcttatgagtttgatctcctcaataatatgaaaggagcgtggtactcacgtgttcgaaggaactgcatatacaaatgaaagtacgcgttgatgcgtcctggaggaatggtggtcttgcataccgctggattaggaggtcaaataataggtggcatgagttaaagttagatcattttcggctatttattctactccttccgttccacaatgtaagtcattctagcattaacattaatataaatgtgagaaatgctagaatgacttacattgtgaaacggaggaagtagatgacaagcctttactgcgactagattggtttttatggttcatgttatattaaggtttttgttacaacaaatttaggctcaatgattatttaacagcattttacgcattttacgcaatgtaatttaatatgtctgtttatttttttcccgttgcaatgcacgggcacccaactagtagagataccaaattaataatgtgaacacatgttggggaacatgttgttggatagacccaacatgagacaccgcaagagccatatgtgttgtgtcatcagtgatctcatttagtgttggtgttgaatccttagacctgagattatcatggttcccaacatgtgtagtagcttacttagagactgataaacgctactccgtaattgggtagttataaaagtagtttccgggtatgctgtgaaacatgtagtgtgatatgaataatcaagatgggatttgcccctcctatggagagatatctctgggcccctcgatgttgtagattatggaaatgcatggccatgccaaaggtgattgatgagtcaatcacaagttatataatctatcacaggttcgagtgaatgattgagcgattagaggatagcacatatctagccttgagcttaatcgatatcgtgaggcaaagtggatcatacaagtatacactagaggttcagccaatatgatctttatgtatgcccggtaggtcaatacgttctgctagggaccgctattgtcacgtggaccgaaaggagttttcgggttacagccgagtgtacatgaatctacagggtcgcacgcttaatgggccggaataaggggattggatggagatccaatatgagtttaattcggatagggattcaaataggagtcctatgggccttggaggcccgaatcatggatcctatatattcgtgaggggtgtgatcggcggaggtattgcatcatgtgagaaactctagccgccactcccctccccgagcaaaaccctagccgcgagcgggtgctagcacatctgcgcgtgg

SEQ ID NO: 49101 - DNA, 665 bp, Oryza sativa
taagaggcaaaccctacattgattttgcgtatgttgcgtgaaggcgacggctcggtttatatagagataggtcgcttgatcagggcgcccgcacgatctctactccgtgtaaccgaaccggataagtcgcgcgtaacttatccggactccacgctgttttcacgcaccggatttttcggaatgtttctaaaacaaaaacaaatccaaatttcccgcagcaaaacaaaactgcaaaaggaggctacatctgcgcaagagtgaggagctaattttgcggaccattcgacgcgtaacaacgtgcacgcgcgccgcctgcttggccaggtgagcgtgcgcgtgtgttccccctcttctctccaccacacatgcttcaagtggctaggagggcatcctcccttttaagaaggtccccctctcctagaataagcaaggtggtactaaactccacatgcatgccatcccatgaggtgggcttttgtgatttttcaaagaattaatcttcgaatgggccttagcccatctattaattccaacattgctttggtccgataagtatgtggccctaaaattttgagttatcaatatacaaaatgcattaccgatgatgtagaacagggttaggtgctgcagctatcaagacagaaactgttccatttagcattcta

SEQ ID NO: 49102 - DNA, 622 bp, Oryza sativa
ccatcaatattactcaattaataaagactagctatgcttgcaatgcataatttgcaaataaaatatcaacttccactatatactatactactaacatagatgtaggagaagcacatataaatggagaagaatcgacagaaagtaaatggtcaatcaatcatacgctgtcgagatccagacttatggatgaatgcgcaaagaacacagaattcacacgatccactaggccttctggactgacgagacaacagggagacggcctgccgaaaattgggctgtttgggccagcctccccatctccgccgttgatcccaggttttggggtgtggatgtccaggatgcctccctcaacgacagttggagggcagaatgaacattttgcatcacctaaccgtcataactgccctatgtaaggacctcacatcctcactctctgcacacactcaagaagaagagctctctccctctctcaagtttagtagtatcctagtgctagtggagtagaaattataaaagtattcttagtcctcgggtcttcacgagaattttggtatgtctctagtagctatcctctcttcttttgtaagacctatggaattaatagaatattcttctttataca

SEQ ID NO: 49103 - DNA, 727 bp, Oryza sativa
cgttttcgtaacacgcgtgagggttgaggtgagagatcttgagtttgaatcccacatccgacgcgtttttttgacgtggtatgcatctttagtcccgcttatttcaactaggactacgaagggttggcaaccgggagtaaagctcccttccccaggagtgaatgcttgtttggttctatggctgatttttggggaaatttgtgcccaacccctactcgtcacgtgtgaaggaatcaggccgcatgtatggtgtggggccactctcttttggattgagacgacggttatgcaactttttaccaaccatggatggaggtttaaaaatagacttgaataattgtgtattccttatcttggtctggtcacttttataatgtttaggtgtgtttaattctatttgaactacactcttgttcgagtgttagattgtaataattggctgcagctctgtttagcaaaggccgggatgttatctattccattatctaaaaaataagtgaaggaatcatgccgcgtgcatggtctggggccactctcttttggattgagatcctcttccttaagtcagatgacattaaattctttgacatgtggacccatagaactagaaaaaaaacgggtaatttagaaccatgccattataattttgcaaagtttgagatatgccatcggtatctcaataacatgtaggacccacatgagtcaatgacatgtgggtcaggatggc

SEQ ID NO: 49104 - DNA, 663 bp, Oryza sativa
tgaaagcgttctggaaatgatgtagtgttgcaagcgcctgaaaaaaaaaacaaaccacctcagagttcaaagcgagctgacggctgcaccaccaccagtccatgcacccatcaatacaaagttcttgcttaacccaaaaagagattaaattgacctattagacgtttgtgcccataaatcgagcctctctatgtatatataattgtagaaaatattttaattttgctcttagtatataaaccaataattcctgtgcataaaacaggacaagcttgtccacatcggcataacaagcaaatatggcaacccctcattctaaaaataaaatgacacatttttcagagaaacaacaggttcagggtcaaaaccagcccagcagaagggagtcaggcagctccatctcatgaaccaactgaagtttctcatgtcactggtactgcaaaagaatcccctccataattttctggtaaagtgtcagtggcaaatcaccataattttctcttaatcacaagagactaatcacaaaatgtgtacatcttcaaacttaatagctgatttgcaagccacataatagaagagcctgacagccgcaccaccaccagtccatgcccccatttatacaaagcaagacaaatcatctgtacgggaggaggatttttgtcc

SEQ ID NO: 49105 - DNA, 503 bp, Oryza sativa
ccccccccccccccgagggggtcaggccacgtgggtgaccgcggctacccaagcctctagtcacgatacccccggccccatgtcaccgacacctgcatatacatatacacgaacacttgtggaatatgtgagattaagcacctatcactatattggatgttttattatctgaactttatgcagatgttgtcggtatagaatctgcatttaacatccgccaacattcactaaggttagggtaaaggaaataattagggtaggttaaaagagttctaaagaaataatacttgaaccaaaattaagaataaaagagttcaaataacaatgattttaattttgctaatatagtcaaaagccagcatgatgcagtcaaattttagtttaaaatttgaggatgttacaaacctacccaccttaaataaatctcatcccgagatttgcttaggagtcttcaaaaagatacgggaattccaattgtaaataatcttcccgtttccaggttg

SEQ ID NO: 49106 - DNA, 596 bp, Oryza sativa
aattcctcttcatacattagtattagtggtataatgctaagtgtagtagtatagaatagtgttcggagtcctcggagtcttcggaagagttttcggtatggctctagcagctcttgtaatctcttctgtaatactttccgtattaatgaaatactcttctttatatatcttcggtgctttgcttagtcttagtactggtcttactttatatctgcattatatgaattgtgtgggtagcctaccagagaggtgtaatggtgcgagtttaatgtctaatttatcagttgctctatgtcgggtgcacggctatagagtagtatttagtaatgttagcatggtgcttagattattaaatatcattaattgggcatatatgttgcaggacattagaggtgggccgctgatggtgatagctcagtatgggtatttctccacgttagtatatattcctaagacaaattcgaagggagggtactcctctatatgtagccccggttggacggccatgacaggttgtcgtaagtatctcgccaacccagggtggtctctcgaagtaccaggaggacactgttagggggtattggccacatgattgt

SEQ ID NO: 49107 - DNA, 548 bp, Oryza sativa
tgaaaccttagcgtggtgtggatggttaggggagggttatgcggagggtcttgtcacgatttccccctttgcagtatcatggtgatacttcggggcatggcgacatgtgtggaatcgtgtcttgtgggtacagttgtacacctctggccagagtaaaactattcgaatagccgtgcccgcggttatgggcgatcaaccagattcaccgtgattagtctcacccctagtttagcttaatgaactggtgtagttcaggtggttggttcggcctgttgcaacgtggtgtagcgttggacagtgattggttaatattgattaattactacaactgttttactgccttcaactactgcttttaaatgctagctttatgcaaaagaacctttagcctcctttggttatatcctgcatcatacctcctcttccggtatgacttgctgagtacagtgggtagtactcagtcttgctctcttttcccccacaccagagtagaagttctttctcaattggagccgtctcagagaggttggtttcgtcgctgccgtcaa

SEQ ID NO: 49108 - DNA, 680 bp, Oryza sativa
tacgtagttgtagcatatatttttcgcttatgaattctattggacttggtaggccagactagagtatctgtgaggtgtcttgatttactcttttgttttgcacccgtgctagcaacctttcattatcaaaactgagatgtgccatctatagaacatcagaactatgttacacattttctagctatgaatatactaaaatgttctaccagccaattattttcttttttttcattcataagccttattttgtttctgtttatccataagttctgtagaaattggcaatatatatttttaaaccatacattgtacaagttctgacctacatttatgtgtagtaaaaattaattgatgtcatgtggcaccatctctacaatgttggatccgccctcatggtttcttatgagtttgatctcctcaataatatgaaaggagcgtggtactcacgtgttcgaaggaactgcatatacaaatgaaagtacgcgttgatgcgtcctggaggaatggtggtcttgcataccgctggattaggaggtcaaataataggtggcatgagttaaagttagatcattttcggctatttattctactccttccgttccacaatgtaagtcattacagcattaacattaatattaatgtgagaaatggtagaattacttacattgtgaaacggagga

SEQ ID NO: 49109 - DNA, 731 bp, Oryza sativa
cttataaatatagaactatctattccatatttccatgacagttttgtgtgtctttctgcagaataatgtaattacactgaaatagatgatggtctgagttctgaaatgcagtccaaaacatttttaccaagcaaaggaaagcatcttgattctactataattcccatgctatgtttaaaagaggacaagattatctagcattccagcaacttctgcatatgacatgttaaagcacttaataatacattctcagtttataaattagaaatatatttacttcttatatgtcttacctacaaataatgctattcttatccggatacacaatatcctcatgtatagaaataatgctgtcatcatgctgagagagagagagaggtcatttgtgaagaagagcaatactgattcagaactaatcatcagctgagaaaaataaatcatattatagtttcaggtttgtcactctatttagtaaataatgttgttccacttttttttgttaatgcgtaagttccaatcttagcatacctttgtcgagttaaaatgataactacacaagtttcttctgtctttgacaccttggtctccacagtttcatttcacttttcaaggatgaatacaaattaccaaaggggtccgtgattgagccctcaagagaatcaagacatgtgcttaaaataagtagtaagctctatcttcaccatttcttccctttctttgtcgttttttta

SEQ ID NO: 49110 - DNA, 705 bp, Oryza sativa
atagggccaattcgagctcggtaccctatctatatggaaattaaatcaggccaatatatccagtgaaaccaagtggtattggttgataccagtaaacatgtgttttctctggcattttaagttgcagtgttctgatgacttctaattactaatgatgtgatgcatatattctatggctggttctgtatttctttttatttgaatgtaattcgcttcaatgatttgatgtggttaaaggagaaaatatctaaggccatgtttggtttctcaggagtccaggagttggagccatgcaaacatgcatcatgctaatgtcgacctgagcttccagattaggccctgctgtattgatcaatatattcaggtcatttgaggctctaaattaattctgatgataatttttattctgctgtatttgacgggcctcatgcatctgaagatctggattactgtggccgaattcgtagttctgattttggggtgttaaatactgaaatcaataccgctgtccttgctgtcatggagggtatatggtgatctggttacttcgattacatcgagttggaatgtcaatgctctctgaacctcgaatttattactgagttaccggattagattattggcttcggaagctgaggcttgtgcaaatgatcctgcgtgaagtatgcacataatttgtttcccagacgagtttctgcttactat

SEQ ID NO: 49111 - DNA, 664 bp, Oryza sativa
ttggttaatactgattaattactacaactgttttactgctttgaactaccgtctttaaatgcccgctttatgcaaatgaacctttctagccataccttgattataccctgcatcataccccctattccggtatgacttgctgagtacggtggttgtactcagccttactctattttccccaaaaccccagagtttgagtacatgtcagatggtggcttctccgaggagtaggcttcgtccgtgccgtcgaggatgcctgtggagtggcgttcccgctgcagttcaagtcaaggcttagctccatttatcttttaattttccgctgcatttatgtaagacttttataatgtttgtaagacgtggatctgtatgtcaactttgtcgtttgtgtaccccggctggtcctggatgggggttttaatgcacattctgcttagaattctatcgggaatttctgggcatgacagcaactatagccacgaagggcaattttttccattaccatgtacaggtaaatggtctatgatactcgagtataattatgattataattctaaaccctgattgagatgacgtgtaatggataaggcttaactcggtgctcagtctagtcctgaataaaaggacacggatagagatggatgaagtcgttgcgacgatggat

SEQ ID NO: 49112 - DNA, 739 bp, Oryza sativa
ctaatcacgaaaaacattgttcaacctgcccatgatcgcgggcacggctattcgaatagttttactctggccagaggtgtatcaccactgtacccacaagacacagctccacgacatgtcaccatgcgcctcaataccaccacggtaccttggaaaggaactgtgacagtacccctcgcacaacacaactcaccacagtgcaccattcctggatcataatcaccccctctacaaccagaggcatggactccccagcgaccctcatggacttctcgccgcttctcagtctggtgccccgcaatgaaccatgctatacgaaaggtaaatccgttgcccacgctggcttgtgcttggcacggtaaatatttcacaacaatagctcgtgaaccgttccttaattgtcatgagcacgaccttcaaaaccatgtgctcacaacccaccattatcaagttttaattatcaattaattatcataacacaattaaccatcgtgagctaccattaaatataaccataagtaacaatgtagtgtgattcatctcatttatggctaagcaattatatatatagcatttagctgaaccaatccaatatataaagtccaagctaatcaatttattacccataggagaataaagtcatcttcggccataattaattgggaatggctcaccacccgatgacattcgaaaataatgcataagttgaaataaaacaatagctttagataggttcaac

SEQ ID NO: 49113 - DNA, 557 bp, Oryza sativa
atatgccattcttagtaaataaaaaccaagctaacttattcgtaagaaacctttggattctcccagttctctcctcaagcaacgatcttattgaatatgccaccatcgtaattctgatagacaattgtaatatataccattagaaataatacactgtagtgtagcaaaactgatgtctagactggagagataaaccttacctgaattcaaaagaaaaccaacttacagaggctacatataaattgtttataaattatatatgtttaaattacaaatagtactactccatttctttttcacaatctttgccatgtactttcggcataaattcaatggttaattaatcggggtccaattacatagaagcatgaaaacaaacaatttgcttgaaaagttcaaaagtgaaaaattgaagctattagtgcagattaaatcagagcacaatgaaaaatccaaatacactccactaacccaatttaattgctaggctacctgtatggtagccaaacccctcagccattaaatgcttagacagatccctcgagagtagtagaaat

SEQ ID NO: 49114 - DNA, 627 bp, Oryza sativa
ccagttaaggtggaggattgatcagagtcatttatatgatcctcaggcccaacactgaaatgaaaagcccagtcaaaaaaacactagaatgaaaaggtgccacatgtatagaaatacatatctgaaatagtaagttatcatggggaaaaaatggctcactcattgggtaattgcagatttttgatgggatgtctccatctctaaagcagcttctagtattagtgcaagactgcttcactatggaagacatataatcctttgaataagcattgtagtccctttctttacttggcactgcatgagacaccttgatgtgagtttatggaaattgttcacaatttttttataaaaaaagaaatctctaaatgctatacaaatgggagaacctatggcaatgagcatagtgttgatattaggttccaatgttgtgattgcaatgtcccatttttcgaactttcttctagagttcacctagaaaaaaagatctgatcagtacttcaatcccagctgatgagttcttttagatggaatggatgcaggttctgtagaacatcataaacatggcaagattagggtctctcaaaatttcatcaccaacagtggcattagagcacctggtaaattggt

SEQ ID NO: 49115 - DNA, 668 bp, Oryza sativa
ttttttttctaaaaccctacactgagctaaaaaaacccgatccgaatgaacgaccaagatttttcccacaagccaaagaggcaaaaccccaaattttcctgaaacaaatccaagcgcaaaagggcatatgcatatgaaaaaaaaaggggttcagagggctcttaggtttccagttggcttgtcctacggtcaaggtcggctctgataccaacttgtcacgcccagaaattcgcgaaccagaatttctaagctgaatgtgtattaaacccctgtccaggaccagccagggtacacaaacgataattgttgacatacagatccacgtcttacaaaaacataaaggattacaaatgcagcggaaaaggtaaaagcgagctaagcctgaagacttgactcctgcagcgggcgattccattccacaggcaacccttgacggcagcgacgaaaccaacctctctgagacggctccaactgagaagaacttcaactctggtgtgggggaaaagagagcaagactgagtactacccactgtactcagcaagtctaccggaagaggaggtatgatgcagagatataaccaaaggaggctagaggttcttttgcatatagctagcattcaaaagtagtagttgaaggcagtaaaacagttgtagtaattaatcaatat

SEQ ID NO: 49116 - DNA, 799 bp, Oryza sativa
tattacaatctaacactcgaacaagagtgtagttcaaatagaattaaacacacctaaacattataaaagtgaccagaccaagataaggaatacacaattattcaagtctatttttaaacctccatccatggttggtaaaaagttgcataaccgtcgtctcaatccaaaagagagtggccccacaccatacatgcggcctgattccttcacacgtgacgagtaggggttgggcacaaatttccccaaaaatcagccatagaaccaaacaagcattcactcctggggaagggagctttactcccggttgccaacccttcgtagtcctagttgaaataagcgggactaaagatgcataccacgtcaaaaaaacgcgtcggatgtgggattcaaactcaagatctctcacctcaaccctcacgcgtgttacgaaaacggtatgaaaatttcccgacggtattgataccgtttccacaaaactaatataataatactatttttaccgatggttaccgttttcaaaatttagttttttttaatttctgtcagcatggcattgaagttgacactaaggccttgtttgtttcagcttaaagattattgtaatctagattattaaattagattactctaagctgaattataataatgacataaaataagctacgagttgtttatttctctggattattagaggcatctaagggtagtaggtctttagccactcaataatctgaaaaaagcttctctagaggagattaatggattatagtaatccggcttatagattataataatctag

SEQ ID NO: 49117 - DNA, 686 bp, Oryza sativa
ttacatagaatggattactgactcaagtctggtgtcattgatatacacaggagagttaatatagaatatatgatgttactaatatatttatcaattgattgatttagtacatggacgtattttagtgtatgcaggcagcgcgcaatggcgcgccctagcatctagtaaaattaaagtttctcctgtgcaacctatgagtaggcaatggttacaaagtataaagttccctgctccagttgatctgttctgtctctcaattgcctaaggtggtgagaagcgggtgttctacaatttttaggcgtaagggtaagcctccgtgcacatttacttaacatgagagagagagtactcaaactatgcacttgtacattttaaatataacaatggtagcaactcctgatcaacaaccaagtttattttcctttcgtcctttacttgggacgagcaaaggtttaagcttgggggtttcgttgacggttgttacagacaatatttgactgccaatagaactaaaataatgaagaattagctatgcttacaatgcatgtttgttttcaaataatatatttccacttgtacttggagaataacatgttgcaggaatttatcaaataaaataaagagaaattggagaaaacctcactcctaaacaagcaaatggatacggagggaccacatgtcaagtg

SEQ ID NO: 49118 - DNA, 617 bp, Oryza sativa
ttgtctaccgacaaatgtatgcttttttatacatgttccatttaataaaagggttgtggaacaaaattaaatgctaaaaaaagtgtcctcttcatccgtagtgtgttagtttgcagcagagcacatagatgtatggtaacaatgtatcgttgcccatttttttatggtgttaatgcagcccagacatacagggttcaatatcataagaatgttagctgtccatataccatgttttcttttggtgcctaggaaactaaaatataaaatatatttgttatatcttaaaagttccacctgttacaacatatgtaatatatagtagttagtatgttgccctccctagtacaagttatacagtccgattcataaattagaatatcaggtggatggcttgatttgcttacaacaactacttgatgctacaattgtagcactcaaatcttttatgcattgcaatcgcacttaggcctgtatatatatatatatatatatatatatatatatatatatatatatatatatatatataaaccatgcatatatatgtttcaatacatatatatgcatacatatatatatatatgtatatatatatatattatattatattatatgta

SEQ ID NO: 49119 - DNA, 653 bp, Oryza sativa
aatttttactacacataaatgtaggtcagaacttgtacaatgtatggtttaaaaatatatattggcaatttctacagaacttatggataaacagaaacaaaatatgggttatgaatgaaaaaaaagaaaataattggctggtagaacattttaatatattcatagctagaaaatgtgtaacatagttctgatgttctatagatggcacatgtcagttttgataatgaaaggttgctagcacgggtgcaaaacaaaagagtaaattaagacacctaacagatactgtaatctggcctaccaagtacaatagaattgataagcgaaaaatatatgctacaactacgtatgaatatacaagagaacacagttcgtaagtacattctatcatcttgcaattgagttccctgtgtagatcagaatcttacctttttccatagggcgtttttaaagcttcaacttcatgttaaaaaagagaggaaccattcataacaaatgatcatatgatatgttactgaagatccatttgaaaagaagttgaataaaaaaggaactaaatgaagcttactggcatgtttttccccgccagagtatggatgcaagcgggccgacccgcgagtcacttataggtcaaataaatcatattgtatgggttt

SEQ ID NO: 49120 - DNA, 688 bp, Oryza sativa
gtgccatgtgcttagtggtctgaccagtatggtaccgtagtctgactatggccctagtggtcaaactggggacgactcattttagtttgacttttggtcgcctcgggtttgcatggttggacaggtcacataacaacagtctgactaaggccagctaagattgggttgattaggacttatgtccaagttggttttgagttggatggctattgcaatattcttagtgatttacacacattacatatgatgtgtaaacgctaatttgaatcaagttcagaagaacttgtggtaaaaaaattgtttcttggtttggttatgacgttatgtacagttattacttgagggtgagcgtggtcgatgaccttagataggaacaagacagatgggggtgttgaggttcagtcattcagatagtcaatgagttcatgtgggacacacgggtagataacagtgcatgcgaaggtgagatttccatatggaattcatgggagatgtgcatcttatggaaaagtataataatttaaaaatagtccaagtttggcgaggacaaactcggttatgcgagtctttcctctacagctacgagccctagataaagaaagatttgtggcttgtgacagccatgttgcgggtatataaacactcggggagagcaaaattgttgaggatttttagagaagaattaggg

SEQ ID NO: 49121 - DNA, 633 bp, Oryza sativa
ttgctttacattataaataatgtggtagcgttagaacgaccatattctaagtaaaataagttttactaagtggaagaaacataaagccctgtattactaatctttttaatatacactcaaatcttagtttacatctgctaatatacaatcatgtggccaataccccctaacagtgtcctcctggtacttcgagagaccaccctgggttggcgagatacttacgacaacctgtcatggccgtccaaccggggctacatatagaggagtaccctcccttcgaatttgtcttaggaatatatactaacgtggagaaatacccatactgagctatcaccatcagcggcccacctctaatgtcctgcaacatatatgcccaattaatgatatttaataatctaagcaccatgctaacattactaaatactactctatagccgtgcacccgacatagagcaactgataaattagacattaaactcgcaccattacacctctctggtaggctacccacacaattcatataatgcagatataaagtaagaccagtactaagactaagcaaagcaccgaagatatataaagaagagtatttcattaatacggaaagtattacagaagagattacaagagctg

SEQ ID NO: 49122 - DNA, 686 bp, Oryza sativa
ttttccttgttttgcgtgccagcgtgtagttctcgtcgtttcggaagtccgcggtcacgaggaaaagagttcggaagatcaaagtgaagaagcaaggcaagtcacacattcccctttagcatgttgatcccaatttacaaatgttttactatttgcaaataaatatgcgtgttttgctaattacatgggatcagggtttacctatctgctcgcttgtgccatatttacttgatatatgtcctttgtcaacattgggtaataaatcgactagctcatgttacttatgtgacctagctagaactatatgcttagccatgcttaattaccactagctcagttgatgggataattacaatattagaccttttagtatcagaatgagctgcgtgctcgagacatctggccatgcttcatggtcataattatccaactaaaatgcgactgaagggtgggctgggggtgcatggttttgctagtcgcacccatggcaattaaggaccggttcacgggaaaccctggaagaatttctcgtacttaccacaagccagcgtgggcaacggctgggcttgtagtgtagctttcctctagccgacgcatccaagcaagggtgggtgtgatggagcggggcgggccctcgacaggctttgtcgctttccgaattacctaagcaccagaggggattgccc

SEQ ID NO: 49123 - DNA, 606 bp, Oryza sativa
atacagaggtaccacattgctaattaacataatgactaggtcagtccccattctagaaactgcggtcgcacccgttcgtttgacataagtacctggtgacaacttatatcgatcgagacagtactagccatccggaaatcatccaattcgtatgtcctgtcccaatctaagtataaaacattttaaccagattgtaagcaaaataagcaatactaaattatctgggtttctatggttgaattatgcatgtgaaagtagagtattgagtagaaaggttataaataaataacttgtaaaatataggcttaaacgatcaaaatgtgtatagtaacttgccttgctcgatgtcctgagattgactgatattatctaatgtgtcataagattcctcaagaccaagggttaaacatgtaaaattcaaattcaaaagggattcaaataaaatccaaaaataggtaaaaataaaataaaatataaaaatagcaaaagtggtctcaaaagatagagaatgattttagaaaattttggatcaagtttcactggaaatgaatctatattttaaaaaatatgggcttctaaagtttgaaaaataaattaaatgttaaa

SEQ ID NO: 49124 - DNA, 631 bp, Oryza sativa
aatttctccatcgagtccttgcaacatgtaagctcctttagacacaccttatagatttggaacggtcttttccaattcggcgaccacttgctgaatttgttatcccaagtcccaatcagcaaaatcaacttccatacatgttcaccgtccgaaaaagtcttgggcaccactttcttattgtaatgtcgagcaactcgttccttatccttggtaacctttgcaagggctcttaatctagattgaaccaagtcttccctttcatcggccatgagattataatattcattggctgttaaatcattttgtaactccgttcttcttgagccgattctaacctcccatggtaacacagcctcatgtccataaacaagcttataaggagggacttggatcgacccatgacaagccatccgataagaccacaatgcttcatccaatcgagtatgccactgccgaggaaaatcagaaatctttctctaaatcaatttgatcaaactcttgttagatgcctcggcctgcccattagcttgtgcataatatggtgaagaattcaacaatttgatacccatgctatcggcaaactgaacaaactcattggacacgaagatttaaccctgatcggttgtaaggt

SEQ ID NO: 49125 - DNA, 607 bp, Oryza sativa
atgtcatataagaaagcgtgcaaactgatctcatgtcaatctagtttttttattgtcatgtgcaaaaaaaataaacctcatggtttaaactactcttacctatccaaaatgtgcgacaaactatgaagttttatcccttgagcacctatctttttgtgatgaggaccagctgggatatgattatggctatcttgatcaactaatggtgcatgctttttatattagatttacactagccgccaacccgtgccttgcacgggctatatatcacttatatattataaatactaaattatgcaatttctttgtattataaaatttaaaaatgtaatcatatgttaccaattggtaactttgaatttcgttattaaataaataaaatgaaatattcaagatggatacaacttcatatttattaatgaaatttagatacatcgatttggactaaagattgagctcataatatataatgcagtgaaggcatgaccaataattttgcatccataagaggaaataagcagaacatgaaaattatattagaccatactaatccacctaatattttcgtaattgcattatggcaataaccatatatcctataggaaaa

SEQ ID NO: 49126 - DNA, 540 bp, Oryza sativa
ggcgaattcgagctcggtaccctactcaagccgattacttacatttgtagtttattggaatctatgcatgtgacacatatgactttggtgattcattattgatcatacttcaattggctaagtgttttgatgccatgatgattattgtttcaaaagccatttgaattagtattcatctagacatgttagtccttcccatccagccacgtgactctatagcctggccctccccccgcgcctcgcgagtcgcagaagcagccggggggcctcggggtgccacgtcacgcccttcgggccctcgcgctgcctcgccccaaggccctcgcccaactgtcatgtggcggggggagcgtgcgggaaggagacctaggctgaaccgccatcaatgcgcgcggcgccccaactgtccctcaccgggtttaatgctgtaagggcagacgtgtggtgccgtccgactaacccacgttaatcgagtgtgaccagactgtgacaggcctgtcacccgtcacgtccgattgaatgggtggttcgtgcccccac

SEQ ID NO: 49127 - DNA, 582 bp, Oryza sativa
tttttctatgcatttacataatcatatataacttaagactatggaatatagcttgaaatacaatgcaacataatgtccaaagcattcatacatatacttccaatagtagtacatctatgtgcaaagtcgtatcttcaaattcattttacatagacagagacaaaattatgacagaattacaaacttaaaactgtcaaattttatttttgttacggctaaaatattatgaatttgaggttaggattttatccctaagtgtaatactattgaaagtacatacgtgaatttttctagattttttagtgacatttgttagttggtgtgcacgtgtgtacacgtgaaagcttgtgtgcataacatatgttgcctcaccacaattggatcagaaactctacacttgttgtctatgagtttttaaccttatggttacgttcttgtatgattgtcgaggaagtttagtagcgcatgcgaaacgaaagctcattagcatataattaattaactattacaaacttaaaattggatttatttgattttttttaaataacttctatgtattctttttaaaataccattcaacag

SEQ ID NO: 49128 - DNA, 906 bp, Oryza sativa
gcatttttcttgatttactgagacttgaatgggcttaaacggagctcggatgaattagatatgaattttagaagattcactatgtttttactataaacagaaaaatccttaattgatttattgcgcaataattaaattcctagggagagagagggggcggcgccgacatgcggggcccacatggcagtgactcgggtggcggtccgaggtggactgggtccacggaccgggaaagaggcagtgcaccacgtggtgcacacgtggcgctgacgtggcgcacacgcggcggccacgtggcagccacacgggcggtggggttagatggccccgatctaccgcccgatagatcggacggcggaggcggctcgcagccggcgcgcacgggcacggctcaaaccggcccagcgaccatggcgcgcggcgacgcggctcgacgcagcggcggcgaccggcagcgaccggccgggggcagagggcggcagctaagcggctaggcggcggcgcggcggctaagcagcgcgggagagaaagaggaaggggaggaggtgtctcaccgacggcgattgacgacggcgagcgacggagggcgatgacggcaacgggacgagctccggaaccacctagcgaacatgatgaatggggttagagagagaggaagatggaagggggcgaggacgccggccgaaggcggcggccatggcggtgctcaccggcgcatggtgcagagtgggttccgacgtcggaatccgacgggagatgggtggacggggtggcccgcacgacggcgaatgcgacggcgtcgacggcgcggctcggcgcagcgactagcgatggctagcggcggccgagcggtggcgacggcggcggaaaggagggcgacggcgctagggcggtggagtgcacggg

SEQ ID NO: 49129 - DNA, 512 bp, Oryza sativa
cactagcataatatcttcaaatcttggcctcctgtgtcacaccctgaagttcttttcccaagcctaaattgaatttataattgttctcgagaaaataccggtgtaaaagcaagagtgaaaccctaataaattaatgcaaataataatcagaattggcatgtggaatttttcttgagttctacatgtcgaaatgtgctaacaagatttttagtggaattttcagagctctagaaataattttaaccaattaaaattgagcacaagcaatatttaatccctggaaattcatttctgtctttttctttttctttttcccccttttcttttcgaatgggccgccggcccattctcctccccctcccgccagccggccgccttctccctcctcccttcgagtcgccgacaggtggggcccacctgtcaggcccgtcttccaccttaagccggcgccggcgcattccgcaaccgccgccccgctcgctcccgcgtttccaggccacgtctccacatag

SEQ ID NO: 49130 - DNA, 719 bp, Oryza sativa
aatttaattattgcgcaataaatcaattaaggatttttctgtttatagtaaaaacatagtgaatcttctaaaattcatatctaattcatccgagctccgtttaagcccattcaagtctcagtaaatcaagaaaaatgcatagaatccattaaaaatggttttgttctctgtttcagtagtcttatagcctgtttgtattgttaactttgtatgttgcttagattccggctctcttgtcgctccagtgtactttgaaatagtcgccgaggttcctcctgcaacagagcaaggcaagtcatgcttgtcacttaaacatgttgatcctatattgcaaatgctctattgttttcctttaaatactgcattgttttataatgttactatgggatgtttacctactgttacagccatgctatttttgtaccatgctcctttgctagcttgggatataacatgactagatattggactagggattgcttagccatgcttagttcaactagcacacaatgggggaatcacattaatgcatagacttcaggttctagtgttagtgttggattaaagccaccgtcttggtgttagtcaattaaaatataccatatggtgggctgtggatgcatggttttgatggtcgcacccatggaatttaaggaggaccgattcgcgggatgccctgggagaacttatcgtacttaccacaagccagcgtgggcaac

SEQ ID NO: 49131 - DNA, 1034 bp, Oryza sativa
cccaaaagaattggagagagaaacacctatttaagtacaattctacccttcaatttttttcttttttctttattgttccttatcttttctctctctcattctttctctatttctatttgctccttattcaagcgagctcgaggatggcagtgcagcgaggtgcgggccggtgcggtgccttgactagggagacccagcgcggttgtgcgcgggggatggggcctacttggtgcggcggaggtggcgctagagtaggaggggaggtggtgccgacgcggttagcgttgtcggcctaatgctagggcagctgtggctgcgaggagagcagctttggcctagcgggcacagggcaactgcgatgaggagtccttccctgtcgaggaccctccccctgttggtggtgttgcagcagccggtggtgcccatgacggcgggtgtggcctggatggtgtgcacggaggagatcgcggtagcggacgccgtggtacgtctccctgtgctacatcttcctgtggcgcaggatgtgccgcgccgatttgctgaccagcgacgacgctgccgtggctagacatgacgtgccgtaagagctcctcggcggctacctctggccggccgccggcatcgccgcatcgcgccgcgctctcctagcgccgccgcactagtgccgatgcctggccgagctcttcctccgttcggccgcgcccccatcacaccggcgctgccaccgctcgttgcgcccctccggcctaccactctttcatcgtcaccatcctaatggagattttttttttggtgtgtggtgatgcgcaggggcaatcttggtattttgaaaaaaattctcaccactttaagcaaggaaataataaaataatacgtccagtgtcctacggcaaatttcacagtttttgtagtgccttgggcagtgtcacgttttcgcggtgtcgctcagctaattacacaatttttacgtgtcctgtagcaaattttgcgtatattgaaggtccatctatttggattgatttttaatatattct

SEQ ID NO: 49132 - DNA, 615 bp, Oryza sativa
ttcatatcgtaaaactacgagcataccttgattgacaaattcttgatgggaatatgcatctcacatggtatccgctgcgtgatttcatcaatggggcaggggggttcatcatgtgcttgcactgcttccatgctctatgatcctacttgccccgttgaggcgtagctgctactgcgattgcctgaggtgctcaccatgacgggcataatagacagttgtgtatcaagtccccgctgttcggccaggagttggtccacttgtcttgacaccttctctgtaatccttgcatcgtagttcgaggctctatactcaagatctataatcttagcctcggtatctctcatgctccttatgtgactcttgtacgtgcggatgtcctcttgaaatccttatttccaaggaaccatgcatttgcctcgcgttcgtcctggatgctcagcattatgtattgcgagcataagctcgtccttctctctgttgggccggaatgttccctattccccgagcatagccatccactgcatctataagtcggcttgttgattcgcgaatctcattgcgtatagcagggagccatcaacgggaatgagcgatccgccatgtgcatagtgccaa

SEQ ID NO: 49133 - DNA, 703 bp, Oryza sativa
ttaaaaaaaagttgaaaaatacaatttatttgcaaatacttaacattattgtaatatttgtgtatcacatacttttcaaatattataaaacattaggtgaacaatgcaaacaacaacattgcaatatttacaaattaattagtagctaaaatactagttgaaacatttaaaaaaactatgtgcaacatttaaaaacactcactagtagctaaatttatttttcatcataatataatcatatgcggtcctgttataaaaatttatttataacagatttaatggtataatcggattgtaaattggatatgtaatttaagagaaaaaatagtttaaaattaccaaaaaggacttgaaccaacctaagcaaccctgctttattcttatactcagtgcatgcatgtagagtttttaactagcatgagtgttggttttgatgtgcacctgaccacctataccgacagaggcctgggtgtggtgctcgatccatagtagcttcgggatagagcgcccaataaaaatcagattgtacactacatgcatgcaagtataccatattttttctcctaaactacttattcaatctacgaaccgatcatcccgttgtatttgtcacaattaaatctttacaacaatatattatatgattatattctaataaaataaaaacatatgtttcaaatcattaaggctgtatttagatggt

SEQ ID NO: 49134 - DNA, 3621 bp, Oryza sativa
atatttgagccgtcgtattttgaatgccgaaacgaggaatgactttatagaaagacttcgtttatgtctatactatgctttttcgacgtggcaacattacttgttatctactacttgcatagttgcttgtcaagccgatgttattaaacatatgttgcaaaggccaattttgagggggagaacatgatttggcttatgaacaattaaaatatatcaaaggccaaactgcagttgattttatagtagatcatcatgtggatgttgcttatgataatgaggtttacttgcttagtgtttgaccttggaaggtttagtttaatggttcttctggtaaggaaggacaaggtatagctgtagttttgttttcgctcagtggtttatgctttgagacatcggttcgtttagaatatttttgtacaaataatcaagccgaatatgatgttttttattcagcttataagtgttgcaagctatagtggctacagatgtagaagcttttggtgattcggaattagtgatacaacaagttgccgggtatataaatgttttgatgggtcactaaatagttatgatcaatgctcggatattattgccaattttgatgatattttcattcgacatattgctagggaggaaaaccttagagcaaatagtttagctcaacaaacatatggctataatgtgaagagaggagtattcttgattttggaaaagtcggtgtttgaattcaaaagtttggacaaaattggcaagattacagaccaggagtggtttgactggtgcattgcagccggtctgaccggtggtgaccgtctgtctaatcgcctcagcatggccggtctgaccggtggtgaccgtctgtctaattggtctgaccggctctgtatggctagtctgactggatattggaagaatgggacgatcgatttagaggccaaattgattgtaaattcgggcatttgtgcctaggagttagaggaaaactggagaatccctttgatatattatttgaaagatcctagtcttagggttgatcagaaaatttgatgacatgcatttaaatactttttcttgatggagagttgtatcgccgaaatgtagatggggtgctattgaaatgcttagataatgatcaatccaagatttccatgggagaggttcatgaagggatttgtggaaatcatcaatgggcccataagatgtattggtttcttaggagagtgggattttattggccgaaaatgattgtgattgtttcaagtattataggggacgcaaagcttagtcaacagttcggcaatgtccaatttaatcctatcatcaaaccatggttgttccgaggatgggctttggattacataggtcaaagttatccttcattctcaaaagggtatcgattcatgctagtaacgatagattatttcactaaatgggccgaagccatgtcactcaagaatatgactcataaggaggtaatttactttattttaaaacatattattcatagattcggcattccttaaacattaactacggatcaaggagcttcttttatgtctaaggaggtaagaagttttgccgaatcttatggtaatgaattgttgagttcatctccttactacgctcaggccaatggacaagccaagtcgagtagtaaaacattgttgaaattggtcaaagaaaagatcgaagaacatccaaagaggtgttatgaggtgctttcggaagcattgtgggctcataggatatctaaacatggtgttatcaaggttactctttttgagttggtttatggacaataagccattttaccggtggaggtgaatcttgtctctgttagatatataaagcaagatgatttatcggttgaggaatacaaagcattgatgggagacaatcttgatgatgcgaccgataaacgtttgaatgctttggaagagatagagaaggagaaaaagggagtagctaaaccttacaataaaagagtgaaagcgaaatcgtttcaagtaggagacttggtgtggaagacgattttccctttgataaaagagtgaaagcgaaatcgtttcaagtaggagacttggtgtggaaaacgattttccctttgggttctcgatctaaggagtccagtaagtggtcacctagtagagagggtcctattcgaatatgtggaatcgttcgaggaaatgcatattttctggccatactacaatgagaacgattttagagagcaattaatggaaaatatttgaagaaatacttcctaaatgtttggcaagatgcataggaggtcatatggccggtaattggatcatcgccttgagataacatgttctatgcttttaggttcacaatgttcaccaaaaagttaagggcatgtgtttacacccaaagttggtgccaaggttcaaattaggaaaatattgccgaaatttggaagagcactgggggccggtctgaccctcgtgtgttggccggtctgaccagtggtacgcgggttccttcccagggccagtctaaccgtcgtgtgttggccggtcagagctctgcttgtaggccggtatgaatggtggtatatggccggtcagactagcagagtccgatcccgagtctgtttacgttgggtctcgggattcttttttcgagagggtatgtttcgtgtttccattggtttctattccgagttggatatggagggggacctataagaggcaagaccaacccttgtatataggacaaggccggttcaattggaaaaaaaaacctatctacacattatccaatctagccaattgaatcgctttttcaatatttctcctagttctagcctagttcgtccatctttgtcgatttgccctgtaaatcatccaccttcgttgcgagagtgcgaaatcccttcgtaggtttgtcctgcgaaatgccttctgttagatatttatcgcttgttctacctaaatcggctccactagccggtttaatctatcaaacccctagcttttgctagagtgcggtggttggcgactctatatcaccgcaaggtgtttaggtgtcccgatcgtgattgtcttcttggaaaaaaaagttactaacagaaggcatgatgatgagacaccggtgctgatcttccgataaatacacataaggtaattatggagaactcattattgatgatccaaaagcctcctcacaataactggctaccactccgttggttaccaaccataccaaaacggattgacctctcattctaataagggtatctcctgtaatcgaatcaagagcagaaccaaaacaatagaatatgcaatctgaacataatacaaatataacatgaatctcacaaattgaggttccatcaactgaactactgatgaaactgtaaatggcagaataatctaagcaaaatctaactctaaatgatgatgcccactaatgatatactccctccgtcccataatataagggattttgagtttttgcttgcaacgtttgaccactcgtcttattcaaaattttttgaaattattaattattttatttgtgacttactttattatctacagtactttaagcacaacttttcgttttttatatttgcaaaaaaaatttaaataagacgag

SEQ ID NO: 49135 - DNA, 945 bp, Oryza sativa
gcacttagtcctcacaccgaaaagaaagcagcggcagtggaaaaaaggcgatcctagtgtggcttcagctccactccacaggcaaaacttaactggggtctgagccttggtcctctaacttcgtcttcagctcaaaagcactacacttctaaaaagggggaaataatagcaaggctgagtacaaccaccgtactcagcaagccacaccaacgatgcagacgtgcaaggggaacacaaggacggtttgcggctatttgcataaaggcggttgtaaaacattttattgagcaaaacagtaaaactgttgagtgattatagtaatattaaatctccactgatcaatgctacaccacgttgaacaggcccaaccaacccacctgaactacagtgcattgggtcgatttattaagtgtgagactaatcacggtgaatctggtcgatcgcccataaccgcgggcgcggctactcgaatagttttactctggccagaggtgcacaactgtacccacaagacacaatccaccgacatgtcaccacgtcatcatgtacctatgatgaacacgtcaccacgtcgagtgattgtgacaagacccttcatataactcttccgtaaccatccacaccacgctaaggtttcacccccacccctcaaaaggcagtgggcggtcccctcttgcgccgcggtgaatccggcagctggacaaccggacaccccggccgacccaactccatcacgcccaccctcgtcaccggtgcctaagaaatggtcgagctatacttcagatcaagcagttacccattcccgcttgtggcaagcgctgtaagtcttccaggggtgtcccgtgaaccggtccttaattgccatgggtgcgactcacaaaaccatgcacccacagcccaccattcagtcgcattttagttggataattacgaccataaaacatg

SEQ ID NO: 49136 - DNA, 1007 bp, Oryza sativa
gatatgggattatgtgtataattgtttactgtcaaaggagacctagggtctcatttcagaggaaccatgttctaacctcgagttaataaccaacctgctgatggaaaagaaaatcaagcgagtaaccaaagagacatttgtttggactaagagtttcagatgtgtctttttcggatcaaaggcaacgatagttagtatagcttttggcgaaacacttcaaggtttcactgaaaggcagcaagccaaaggacctcatcgtccccagaagcatccacaacccacattaaagagtaccacctgttagagataggccgaaagatgattgataaaagagattggcaaagatgttctctagcaggaaagaagtaggccgaaaggtgattgataaaggataaacagaaacatgctctgcatcgctcaaggaatacccctgatagtaattgccccgcaacagtcaccttgtcattgaggtaaaaaaaaatcatcatgagtaagcaagatgacctaggtaaaagtgttttcatgaaggcaaggagtgaaatattcaactcggtatcagatgctacacggagtgaaaagtgcaggcaccagttaccaggcaatgccatgtcttgggagatgatccaatgggaaggaactcatcaaggtcgaaggtgtaaaggaatacgttgaatgctaaatgatgacaacatgatgagaatagtggaaagtacactgaacataaagaaagtgaatccgagttgtttgttcgtgggagctattcccagttatgaaccaagtgatatgttcgaagatagtctacagaggtcagattaaaaacacatctaacaacgaagctttagatttggcaggatcacgatcagaccataacaagtctagcagtaaagtcatttggggagacgtcaaagcatgtcaagtgggataagttggttctgttgagaaacatagttcaaaggcaaagttaccgacccttgcatcgaatagcagaagtaactagcacccggaga

SEQ ID NO: 49137 - DNA, 865 bp, Oryza sativa
tcctcatgcccaactagtaagtagtaaaaacaagttgatttataaagatcaaaattcatcccaaaataaaatctgtcttatgtagtgcacgtagtgaactgctcgaaatccctctaatatcaaaccactggttacaaaattaaagttatactcctattttacacgacttgtggtcttgtggatatgagaaaacacttgaaactgctcttatgtcagttttgcgtatgttggcatgactggtaaaaaatggaatcgctcgaaaccattctaatatctctcactactaaaaaatgactttcctagacgagctcttcaatatgttgagacggaccataagtgtcctcgtctacaaaaatcgacccatcattttcgtatacggctccttaagagacccatatgcaaaaatcaattttcgtaggcagccctcttaagcaaccgcacgggaaaataaggctatttgtcgggtcccagaactaattacttggatctgactagattaatgtatcaatccctagatcagtaaatattgatacatacaatatagctagttcttcattgcatacattaaagttttacaatactaaaggttttacaataatagttacttacatagttaatcctacgtagatctaatatacggcggaagtttctatacattctgactagggaggtataaaagcagtaataaacaatctggaagtgttatagcaagaatttataaaaatgtagactttaaatttctaaccagggtaccatatgagtcccggtactcaattccatgagtacggctattcgaatagtttcaaagatattctactgcagcagatgtacgctttacccgcagtccacgacttgctgataatca

SEQ ID NO: 49138 - DNA, 1128 bp, Oryza sativa
cccgctctatcatcatttgcaatcgttgtcttttagattgacccctatttcagtatttcttcttttcaatgtctagtttttgttatttctaaactgcatttttataagaattctcattttctctcatttcagatcttattttttattttcaattttaattaatattgtattatgttctttgtacactgttctttcaatattccctattttgttattttgaatttcggttatttctaaattgtattctgaatttaactcttattttgtttctaatttatttttatatttcatgttttatgctgcatcttacttatttcagtgtgtgttgtaaatgaaccttaacttattttatgttttactctcttctttcaatattcttaattttctattccaaattttagttatttctaaattttattcctacttgaaaacttatttttttttattttcctaactttttaaaatttttattaatctcatgttgtgttggacatatatgttttttcatattctttttaatattaaatttcagttatttctaatttgtattcggacttgaaccctcttttttcctcctttctatttttagaatttatgttctttatttcctgaattttaattaatatcgtattgatgtctccatggaatattcttccaatatttaatcccttcagttttgaaattcaagtatttttaaaattaatccttttaaattttatttgtaaaataaaattttacttgaactttcatccttttttttaataatgaattttaaattattttttttttgaaattcaattattttttaaaatatattctacaatgaaatggtaaggattttttatttccaaattttaaaataatcccatgttgtgttccagatgatctcttctttcattatttttaatatcaatttttagttatttctagattttatccctacttgagctcttctttttatttttataatttcaaaatatattttatttttagtttgaattttaattaatcttatgtggtttgctagatgaactattatttcaatatttattactccctatgtaccaaaatataagcatttttttactaacacggtctccaaagatactactttgatcaacaatattt

SEQ ID NO: 49139 - DNA, 1622 bp, Oryza sativa
tcgggaagggggctaaaacgatagaacgaaggatggggatcccattttataggcgtggggagggagccgggccacgggaaggagcggggaacggtggcggaaaagccggccggcggccatggaaggtggccggagttggcacgtccgttcccggcgattgggggcgccattcaagggggaattaagggggaaagagagaggagggaaaggggattaattccccctaatcaattttggaattcccggtttgaatcacgtggattttggggaggtttggcgttaggtttccggggagagagagagcaggtcgtgcggaaggaggaagacgaccgcacgtgctgcgcgcgtgcgggaacggctcggtgtgggccaggtggctgggtggcgcggcttgggccgggcgggaaggagggaggggaggggcggcccagaaggaggaggagaggagggagtgggccgggaggggaagaggaggcccaagagaaggagagggagagaaagagagggaggagagagggacttcagccgggggccgagagggagaggggagaaaccttgggccagacttggcccaaagggaaggagagggttatttttaggtttttctttttaataaactctgataattgttgttgttgtttaataaatatttttggtgctctgaaaattcaagtaaaatttgagggctccttttagaccaaggagaatttaacaaaaattctccggaccacattcgaatttttctggcatgtattttagtgtttgtcaatttcttttcgaattttaattaattctattattccttttagaaaatgatttttattttgggatgaatttatcaggacgtgacaaatccaccccccttacaggaatctcgtccctgagattcgaggagcctagcaagaagataggttgggcggtcttctcttcttgcctgacttcttccgttccgtcttctataacaaacttgcctagcacaacttctccactctggactgcttggctcgatctcctgttgcagatggaatcttctcttcacctgacttgtccctggttgaacctttagctgactttgactgggttgcggcacttgaagatgggacttcagttccagaacttctcatagttcatatctttggcgtcaacctcatacaagttacccacttcatgttatgcgtcgatatcagcttgtcattactaggataccatgcttggagcttccttccagcttaccaccaaatgcttcagtctaagatatcccacttaccaaggataccctgtttgacgacttgccactaactgcatcatattagctttccaggtctccgggtgctagttacttctgctattcgatgcaagggtcggtaactttgcctttgaactatgtttctcaacagaaccaacttatcccacttgacatgctttgacgtctccccaaatgactttactgctagacttgttatggtctgatcgtgatcctgccaaatctaaagcttcgttgttagatgtgtttttaatctgacctctgtagactatcttcgaacatatcacttggttcataactgggaatagctaccacgaacaaacaacttggattcactttctttatgttcagtgtactt

SEQ ID NO: 49140 - DNA, 989 bp, Oryza sativa
cattgttgctctatatatatatatatcttttagcagagtgatgaagagaagcccttgttagtacgcttgcgtacttaacaagatgaccggagtgcggttccgttctaggtctcgttccccagtcgactacttgtggcatgtcaaccgggcccttgaattattttgtcttccgctgttgttctctgataattgttggcctacctggccctaatgtaagcacttaactttcttagcctaaattcattcgtgatatgttgtgattcggctatgtatgtgtgtaccaactactgatctagggattggtactgataaacacagaagatttccgattttcaaaattgggggtcgacaatttggttgctttttagcgacaggctaaacacaagagacatgttggacatgaaaaattgtgccccactaaatgctgacttaacctgtgttttgtgttcacttcagtgcagagaaactctatttcatatgttttttcaatgccccttcagtaaaagatgttggaggtggaatttcttggaatacatctttggagttctttcatatgcttgtcttggctagtgatgcggacatcactacctcggatagacacaacaatcctccaacggtcatttaaggacagataacaagagctcgtgcgcgacaattaaatttagaggtgagctcgttcctatgttcttctttgtatgaattcgagaatagattgctacctaatgattatattgtgattaggaacaatggaggggacaaggagacacttggagaaggacttagagccatggaggatcatcggggacgtccaagtcaaggtggaggcccaaaccaagtcgacgtcgggtgtaattcggagtccaggaccagtctgcactaaaacgggcgcccaggtcgcatacgtgctcggattggggcgttctttatatggatggaaagctaagaagataacctttccaatggttttagtcccatgtccaaatttcttt

SEQ ID NO: 49141 - DNA, 738 bp, Oryza sativa
ttgtaagacgtggatctgtatgtcaccaattgtcgtttgtgtaccctggctggtcctggacagggatttaatgcacattcagcttagaaattctggttcgagaatttctgggcgtgacaagttggtatcagagccgaccttgaccgtaggacaagccaactggaaaccctaagagccctctgaacccctttttcatctgcatatgcctttttgcacctggaattgtttcgggaaaatttggagttttgcctctttggtttgcgggaaaaatcttggtcgttctttcggatcggattttttttttttttaaaaaaaaaaaaattagctcagtctagggctttagaaaaattttagttggagtttattcgacagtcagtcgggaatttattgggggttatgcattaggtcgtgtctatattcgatgggggcaatgttatgcgcatcattttccatgcaactagtctatgcattaatttattgtttagttgcattagtgtctttatttgagttcatgaaaaatgttctatgcataaaaatcatcctgctcggttatttatttgagtcttcttttgctttgtttaatttggatttgagcatgaattggttcctatcccttgtctactttagatgtcagtcctatccctcgtttgcaagcgccgccccgagcttcagagtcgccgcccttagctttatcgccttcttagtctgtttgcttgctagttttcgtgtttaggtttg

SEQ ID NO: 49142 - DNA, 670 bp, Oryza sativa
gtgcttgcatgatttgccctcatgttcactgtcgtaagagcttgagctactacaaaaagcaccagaaacttcaaaataacagtggtggcataaagcaaacaggaatacaagtttcgcaagaagcaaaatatctctatttttttcagtgtagcagagaaagccaagacagcttgaaggctaaaactagggaaaaacttgttgctatgccgatcaatgtcatccaattgaatgattcaagccgtaacaatgtaatgcaagactatggcattttttgtttcaaaatttccctggtacctagattctgaactatgctttagctgcctaaacttgatgccatgatagctcctaatcacagataaattgaattcaaaagaacaaagcatcatagctccggtaaatgccatggattgccaccctctcaggcttacagaatatttaactgactgaaaaggaattttaaatggagatgcgaacactcatcttcaatagtgagctcaaatcatatctaagaaatccttgtcctactgctgatagaaccgatcactgactattaaactaggaaggaatgaggcttttgcctactactggtgcgattgttacacattgaaaaagtacatcacagaaattctccaaaccatgtaattcgagctagcattcagtgctcattact

SEQ ID NO: 49143 - DNA, 1040 bp, Oryza sativa
cggagacctgctctcccaatcactggtgcacgctggcgagcaggatggaataaactatgtgcgacaacactgtatagaggaggaggcaaaccctaaattgatttcgcgtgtgtgttgactgaaaacacggcggcttaggagatttgcttcactccagtgcaggtccaaggcttgtctcaagtgtcaagagcatgtaggctgattttatcctgcaaccagcaagaaagacaaaaacgtaattagatgaacgatagccaatcggccgatagggccgatgacttattgtcaggacccaaccgatacgggtaaacctaattggctgtggctttatgatagtcaattagagccaaaaccctaaatatgccctattggttgtaggactgtttcttttagtttttatcaatcgttttaagacaatattatggaaatagccgatagatcaatacttagagcgaagaaagataatgtactggctaatactccaatacagacttatataaacagattaatctataaaaatataccaaataacaattgatcaccagatatgaagtttaagcggtcaatctaactcgatgtatttatataaagcaatctatctatataagaggcaattataaataaacagatcatgaaactcgcgctatcatatataccaggtaagatggactgaaaccccaatactatccttagttatgattagttccatgttagtttcaattatatgattctaagcacggctagggatgatgcatcacaaagtatgcaaagaacataaagtctagacaaaattgctacaggatatcgtgactaggcaaaatttgctataggacatcgtgacttcacggttttagctgtagtacaccgcacgaagtgacttttgggggaaaacactcccaaaagttggatatttgctagtgcacaccgcaagcattaaagtaataattaacggttagagaggatatagaaatcgtgtgaaatgtcaaaaatgcccttgggcccacatgtcagctatcctatctcttttctctctcaatccc

SEQ ID NO: 49144 - DNA, 1353 bp, Oryza sativa
gcgccgctggccggagccgtcgcccgcgcgaagtgaggagagaggggcgccgtcgcccgcgcgaagtgagaagcaatttgattttgatcaaaatacaaaacgacttataatttcaaatggagtgagtacttatcggacttcgctaatatttttttctccagtattttagttaatcagtaataaaacatactagcagtgaagctcacccaaccacccaaccagcctgagagcgtacccgtacataccaccgctcatgcatttggtacaagtcggatatgcaatactgaagcttaatcgttagccctcgatggtgaaaatactatcacaattacatgtgcatataagaaacccttacgacttctttggatggcagaatttttcgttttttttgtatgaatcattttaatccccatgaaattcattaaaaaaattctcaattccaacggaggctttaattcacatttcagtaatacatagagttcgactgttcgagtgatcagtagagcagcgaggtgtgtggtacaacgaggcattggggggaaataaaattaagactccatacagcttgtaaaattaagaattattgaaaagtttggatggattttagatgagaattcgtaactattaatatcaaattttatcgctattaataaaaataaagtttgcatattggttttatagaatttagtcacatatcggtatatgatataagtagtaccgtatatatggagggattatcaactaataccccattgttatccacaaattcaatgtgtaatcttaccgatgatctcggccttcacctaagaaaaacctcacatcaaccaatgataatcttattatttgcaattagctagaacagtaacactaacgatgaccttgacagttactatcatgaggaagtttctatcccatttctcatgcctcgtcttgttgtttcgatcgttatgtacagcaaaggaaaggaaaagggaagattaggaagattcgttttaacgagataagtcattaccgtatgattaattgggtattaactattttaaattttaaaaattaatcatttgattttttaaaacaacttttcatgaatttttttttaaaaaaatatattattaccagttcggaaatcatctgccgaacacagcctagacgacatcgataccttttcctggtggcaagcaaagtggctagcttaatttcaacatgcaagtagctgcagccaaacagcatataattttggaatattgtaatagaagaatatattgtaccccgtccgttcaaaatatatatatgacgtattttaattaaccgttaaataagcaagtttgactatagtcttgcactattttgctt

SEQ ID NO: 49145 - DNA, 926 bp, Oryza sativa
cgaaagaagaaggatttgcggcatggtcattcttctcagatagctgggggttcttcttcaaagagtactggctcttcttctcaaaagagtcctagcagtttagatacacaggagatccttacgttactacatcgcctcattacttctgatttgataggtttagttggttcggctgctttgacttctgcacaatctggctctgctatttatggttctcactcttccaatgagagattatcatctgcttcaggtattttttccatggattcttgattatggtgtttccttccataagatatcagataagtcttgcctttcgtctatttgttctccttcagttcctataactgtctgaaccaccgattgtacccctctttctgttgttgttctcctttcttcgtttagtgttcctatcatttcctatgttccaaatctgaccatacagctcatgttcgttggacaacttgctgattacggttgccatgttattcttgattttgactcgcgttgtgttcaggatcatagcacgggtctcctggttggtattggccctcgcttccattattcacagcatctttgggagcttgactgactgttttctttccttgcttctgctatagcatccttcactcagtggcatcattgttggggccatctttgtggctctcgtctgtcacctttagtttgtcaaagtttattagggtctatgactggagatatatccttaaatcaatgtcatggttgtaaacttggtaaacagatacaacttccctatcatcctagtgagtttgtgtacaagcatccttttgttcttggttattctgatgtttggggccctgctccctttacttcaatacggggtcatcactactatatctgtcggagatatgggcctgggggtatgcaaagtgaggggatgttacctt

SEQ ID NO: 49146 - DNA, 514 bp, Oryza sativa
tccgaatgattagttcccaacttaccataccgaaaacagtctatactccctccgacccaagatataagaaattttaaattgataagaaatatcctagtcctaagaatctggttaagttgttcagattcttagtactaggaaatttttcatccacttaaaatctcttatattttggtgtagggagtattagatttgacatgtactagtactacttacgaaccaacctttgttgctacaataaaaatgaaagtaatgctactatgtctctatgagaccagaagaaaggtcattttagggatggagacaatactccctcccttcattctataataatcattggttactcatccaatttatcctaaaataagtacatgtttagtaatcattgcatttgtgtttgtgaaagtagagatactactggagaagtgatctttgctggctcaagctaaaatcacattagtcacggttcgagtaaaaaccggagtaaaaatatctatagtcctgttttaaagcc

SEQ ID NO: 49147 - DNA, 561 bp, Oryza sativa
taatatgattttacgacataattatttttagacatccatccgtattaattatttctgttttgaactttctatattttcagacagagccatttgtgcttaagattccccttttaaagtagtggtggtaataatctgccaccccacctgctatcgttgctactttttcttgagttgcctgaaaattttcaatatcacacattagtccaatataagtgaattgccacaggcacactgtacagtatatgagttattatattattcaatgtgtttaaacattgtcaagtgctcctcgttgcaaacaatgtgtaactggtttgatgcaaaaaccacacatctatatactcactccgtcctaaaatatagcaaaatactaaagtagtactcgattagacaccacctggtactacgaatgtggacagacccctatcaagattcatagtactaggtggtgtctaatcaagtattaggttgctatattttaggtcggatggagtatctttctctcagtagcagcatggcctttagttacattgatcaaagcaaacatcatggtcataaggg

SEQ ID NO: 49148 - DNA, 1151 bp, Oryza sativa
aaaattaagttaaaacatgtacatatacatatacaatggtcccaagtctaaattcaaaacataaacatatatacatcgttatgtgagaggtagtgactcaagtcgtgaaactcgctaatttgttaagctcatgaagttgctaagtcgttaagcacgtgaaacacgctaagtcgttaagctcgtgaagtcgctaagtcgttaagcaactcatgtaaatcgttcattcgcgtccgtgaaactcgctaagtcattaaactcatgaaactccttcgttcgttaattcattcgttaaactcgctaagccgttaaactcgttgaagttgctaactcgtgaaacttgtttgttcatttgcctgcgttcgaccgttcgttcgcgtgcgttcgttcattcgcttacgttcatttgttcatttgttgttctaacactcatgtacgttcgtggttcgttcgttcatgttcatgcgttcatttgcattcggtcgttcattgttcgtagtcccggcagttgcagccctcggcgtcggccgtggtggcgacagtggcggcaacatcaatagcagcggcgtcagcggcgtcagcatcagtagtgcagaggcagtggttgcccgcgtgcccgcacaagtgacgtcggcgtcggcagcaactgcggtggaaggccgcgggggcaacgggagattgcgacaacgatgatgatgaccgcggcgcttgtggttattgtggccgtcgtccgggcgagaaaaagagagaggaaggaaagagagagtgggacaccgggatccggtggcgcccacaccttgagggaggcgacaatggtgagagcggcgtaggtcagctgctgcaacaatgacgatggcagcggtggcagcggctcgggcggcagtgtactcggcggagatggcgcgcaaccgagattgagatcgagaaactgctaagtgttgtgcacggggaagccgatggacccatatttatagtccgggatctttagtcccggttcgtggttctaactgggactaaagatataaaccgggacaaaacatattttctcgctattccgaaattttatctttagtcccagctaaggttaataaccgggactaatatttgaacatttgtacattttagtgcttacaaacttaaacgggccaaattaa

SEQ ID NO: 49149 - DNA, 633 bp, Oryza sativa
agcacatttcgacatgtagaactcaaagaaaaattccacatcccaattctgattattattggcattaatttattagggtttcactcttgcttttacaccggtattttctcgagaacaattataaattcaatttaggcttgggaaaagaacttcagggtgtgacacaggaggccaagatttgaagatattatgctagtgactaaagttaggagggtataatctgaagggaatcctattagtcttagcattaatgaaatcggtagggtctgaattgccgattggtcccagaaaaaagtgattcggatgttgcaaattggggattgcaacttgatgagtaagatgctataggaaaaaggggaaacgattgaactacgagagagaaaacgtgctaaaaagaacgatttagccgacggtacttaccttagcatactcgatgattggcgcactcgagggttcggcggaggtcgacattgtcgaaggtggagttgtcgccgcaagggggttcgcctgcgaagtcgccggagaactcgaggaaatcgccggagaagattggggaaagtttcggttggggcggtgaaaacggaagtgacgccgtgaaaatttcaaagcagtggttactatttaaaagaggcg

SEQ ID NO: 49150 - DNA, 626 bp, Oryza sativa
ttgagagcttccatgagagtaacacggggggtgccgagcaagcaactgtgcacaaatcgactcatactcggagcgaagacgggtgagaactatgttttgctaaatcaacaggaacctcatggcttcaaagatgaagaggcaggagtgttccacacaaagttcaagcaggtaattattggagagaggaaaaaaatcgtttctagggagatgagaagtctaacctagttctggcttaagaattagcacttgtattcatctaagaagcactagacccaaatatatataggtatatatgtagaaaaccccttgtacaaatagaaaatagatatccgtctaacaataaccttacaaaaattaagtatagtggaatgagatgcgaaagcctttgttattaaatcaaacagatattgcaaaactattattagctagtacgtaaatatgcaacctgaaattaaatttaccaacatagcatttattatattggaaccggaggaagacaattatatagtaaaaaatatggttggtattccatagaatgattctatgtctaagttggcatgatgaatcaatgggctatttagaaaaatttgtcctctatatacatatgtcggcccagagtaagaaaa

SEQ ID NO: 49151 - DNA, 737 bp, Oryza sativa
tcatccgaaaaccaccctaaatgtcaaaaccgcgatgaggacccacctgtcagccaccctgccaaagccggaggcctgctgggccggcccaggttcggccgaaccctagcggcgtccagtcaggtcagccctccacgtggacgtctaggattgcttctcaatgacagttgtgaggataaaatggacatttcgcatgatagtaaccatcataccgaccctataaaaggaggagctcattcactctcttaacacactcaagcaagctcaaattcctcttcatactttagtactagtatcttagtgctaagtggagtagaatagaatagtattcggagtcctcggagtcttcggaagagtttcggtatggctctagcagctcttgtattctcttatgtaatactttcgatattaatgaaatactcttctctatatatctttggtactttgtttagtctgagtccttatcttaatttatatatgtgtcgtaccgattgtgtgggtagcctaccagtgaggtgcaatggtgcgggtttaatgtccgaattatcggttgctctatgtcatgtgcacatgtgtagattagtatttagtaatgtaagcgtggtgcttagattataagatatcattaattgggtatatatgttgggggataatagaggtgggccgctcatggtgatagctcaatacgggtattcctccacattagtatatatccctaagacaaattcctggggagg

SEQ ID NO: 49152 - DNA, 1882 bp, Oryza sativa
tccgttcggccgcgcccccatcacaccggcgctgccaccgctcgttgcgcccctccggcctaccactctttcatcgtcaccatcctaatggagattttttttttggtgtgtggtgatgcgcaggggcaatcttggtattttgaaaaaaattctcaccactttaagcaaggaaataataaaataatacgtccagtgtcctacggcaaatttcacagtttttgtagtgccttgggcagtgtcacgttttcgcggtgtcgctcagctaattacacaatttttacgtgtcctgtagcaaattttgcgtatattgaaggtccatctatttggattgatttttaatatattctccttagtttcatgattattgaaaagtgttgggaattttaaactatttaaataggtcatatgttaattatatgtggttattgaaatacattaggtattttaaactatttaaaataggtcatatgtttattatatgtgattcttgaaatgtaatcggaattttaaactatttaaacaggtcatatgttaaatatatgtgataggaattttaaaatatttattttctttaaatgaatactactaggcttttgcccagtagtgtaattttataaatagaagaaagttatttacaaaaaggaaaacaaaaaattataagaggatcaaacccccaaagcaatcagaaatgttgtatccagtaagaaacatgttgcctaagttcaccattcattctgcacatatgaagaagaatatcattcctaaaagcataccaccaactatcaaaagcaggattgacgttctgaaaaatctttccattgcgctgtttccagatatgccagcaagctatgaaacaaatctccaagaaacccttccctcttaatctcagtctggctgatgtgcgctagggttcccaatcttccgaaaagttctgataaacaacgatttgggtggagtcgcgacacaaatcgatccggcttcttgaacacgcacgctcttgggccccgcaatcgcagcaccacgtctcctctggttatcacccgtgtcaaaacgcggatgacctcgccgagaaggcaaatccctgtttgccaatcgaagaacacaaacaagaacgagatagaaaaacaaccaaaattgcagatgaatgattaagctcacgagttacaaaccgatctaacggcgaaactgttctcgacagattaatcgaagtaaaacccaaaaacctaaagatggcggcaggtactgatatatagagtttagggtcgtgcaaacccctctcgacgcaaccctaatgggttccaacacgatacacgggccaaaggcccaaatacggtgacgcagcaccgagacagattctggacgtcaaattgttcggtcaattcctgttgactcggaaagaatttggacatgggactaaaaccattggaaaggttatcttcttagctttccatccatataaagaacgccccaatccgagcacgtatgcgacctgggcgcccgttttagtgcagactggtcctggactccgaattacacccgacgtcgacttggtttgggcctccaccttgacttggacgtccccgatgatcctccatggctctaagtccttctccaagtgtctccttgtcccctccattgttcctaatcacaatataatcattaggtagcaatctattctcgaattcatacaaagaagaacataggaacgagctcacctctaaatttaattgtcgcgcacgagctcttgttatctgtccttaaatgaccgttggaggattgttgtgtctatccgaggtagtgatgtccgcatcactagccaagacaagcatatgaaagaactccaaagatgtattccaagaaattccacctccaacatctttta

SEQ ID NO: 49153 - DNA, 764 bp, Oryza sativa
ctgtttgtactactcaactccgtatagccgccaaactgtttggcaccgagtactacctagtagtacaatacacgtactgggagtaccagcgtttgtttgttggtgttgaaagatttttttttcttttttttaagagagttcgtgttgcaacaatagaaggagcggacaacagaccgtagaaaaaggctagactttttttttttaagatactccctccggtttcattttaattgacgctttggacaatgacacgctctacaagatataccttggatcttatttttctattataatatatacaataaataaatacatgtttacttttattacagtgttttgaaagacaaatctatatatgtttttctagtttctttaaactaaatatttttaaagttattgatggtcaaagttataaaagtttaaccttaaccttgtctaaaacattaattaatatagaaccaaagggagtaatagattaactggtctccacagcccaagaaaaatgaactaccttgtggctttgtattgctatgctaccgtggttgattgcaaaattgcagataggtaaatgacctttggctacacacaggggcggagctaccatgattcctgggtattcccgggaatacccaacttttttatcaaaaaacaagtatacttttagtatatacacatgtacacatattagtgcacctaaatcctcaattcttcgatccaaacacagtccaactggcctcttgcaacgcctcctaccaacccgaccc

SEQ ID NO: 49154 - DNA, 678 bp, Oryza sativa
catgcaatacgtttgatcatattgtacccaatctacaaatatcccccatttctatcaaatgttgcatccttttacaatgtcatgtgggatgggtcctaatactcacccatttattgtttaccttatgccattgataacttgggtatcaaaatgactagatgttggtttaggaaatgcttagccatgcttagttcaactagcacacaaatggggatcaccttattacatagactttgtctattggtatagctttagattggtgccaccgcaatggtgttagttaattaaaatacactgaatggtgggctgtgggtgcatggttatgctggtcgcacccatggcagttaaggaccggttcacgggaaaccctgggagacttaccgtgcttaccacaagcgggagtgggtaactgcttgatctgaagtatagctcgaccctttcctaggcaccggtggcgagggtgggcgtgatggagttgggtcggccggggtgtccggttgtccagctgccggattcaccgcggcgcaagaggggaccgcccactgccttttgaggggtgggggtgaaaccttagagtggtgtggatggttaggggagggttatgtggagggtcttgtcacgatttccccctttgcagtatcatggtgatacttcggggcatggcgacatgtgtggaat

SEQ ID NO: 49155 - DNA, 798 bp, Oryza sativa
attaatgttctagtggtactagttttattgtgaggtttaaacggatgagggttgtagctgagtcaatgacatgtcagccacggcaaattcaaatggacgtggctttgcatacaatattttttacgaacgcaaaaaatttgcacgttaatatattataagaagatggcataatttagttacacaacacaaacggtcagaaagccgttgtcaggggccaagaaaaaaaagaaacaaaaaacaaatacataaacggttagctacagaaaaagaaaactcctaccacgagggagggatgggtatggaaacccactacactccggcctgcatctaggcagggagctggagaagagcgaagatagggcgatgacgttgtaagccgcaaccgtctcgatttacacaggaccctccgcctcgatttacacaggaccctgcttagacaccaacccaagcttgcatatcagattgtgctgcgcacacgagaccgtatgactcgggccgtcgagcgcgagtttggccgcaatcctctcgctgtggctcggcacttccccatggccgcgatggcaggcgacggaggcgggtccagtgggagcaacgcagggggcaggccggcagaggcctagagcagctggcaagaaaggcgcgtagagcaacgttcaagtccgccatcggccgaccctcaagatcgagaacgaccatctttgcatgccaatactcgtattagcggattgtcctgcctgaaatcgttggaattttcagtcacctttgaatttactggatgtgcaatatagaccaatattc

SEQ ID NO: 49156 - DNA, 641 bp, Oryza sativa
gtcggcgcggcggtgagcctgctgctttggccggtggcggcgccggtggtgatgatgaaaggtccaggcgccgcggccacctcatctcccgcgtggccttcgaggccaaccccaagctctactactacctcctccgcaccgccgccgccgcgtgacgacgtacgacgacgacattacgtacgcacgcattgtgatcgttgcttgtggttctacttctacctattaatgctagatgctttcttgcatggtcgagtatgttcgttcgatcgatcgggatggctgcttgtttccttgttgctctgtaatggtttgaaactaatatatatataaacggaggagtatttcagaaaattttctgcgctctagttctctcgttcttgtattgaatgaggcattcttgcgactctgaacgtcgatctatatcccatatcctaagcctcatcttaactatgagtctagacacatattcttagttataaaatttatctttttcacagagagaggagtaatagttgtgatcgatattgtcatactctgtgatgaagccaaagtaactttttgtacatttggagcttagtgtaattttctttttatattttcttatgtgcgacaaatggtttttataatggtagaatgattaa

SEQ ID NO: 49157 - DNA, 611 bp, Oryza sativa
atgacaattaatatcaaatggagggagtatatgtcacaggcatcacataaaccgtggtcgtaggagaatcggatgtcgtggttgtgtgcatagaatttttcttcttttccaattgatgaggatcggatcccttaattaggcagaacaatccgcgtgtcaaaagcttttgacgagtattggcatgcaagccacgtccattcgaattcatccgggcccacatgtcatttagggtgcgtttggttggtgaaaagaaaatttttagatgcctcattggacgtttgatcggatgtcggaaaatgttttcagacacgaatgaaaaaactaatttcataacttgtctagaaaccgcgagacaaatttattaagcctaattaatccaccagtagcacacgtgagttactgtaacacttatggctaatcatgactaattaggtttaaaagattcgtctcgtgatttccatgcaaactgtgcaattagttttcgttttatctatagttaatgctacatgtatgtgtccaaagattcaatgtgatattttttgaaaaaaaaggggaactaaacaaggccttacttagcttcccaaggtaaagcagcttgtgcgctactccct

SEQ ID NO: 49158 - DNA, 898 bp, Oryza sativa
aaaagtagctagtaacattttcaacccaagacaaatttattatggaaatatattcaattattgatttgatggaactaatttagtattataaatattattatatttgtctataaacttagttaaacttaaaatagtttgactttgactaaagttaaaacgtcttgtaacctgaaacggagtgactaccttcgttttcatattaagtcgctttgatttataagtcaactatgttcaaattttattaaatttatagaataattaaacaacatgaaaatagctttattatatctagcattaaatgtatatttataatatgtttgttttatattagaaatgtttgattcgaaaaaataagccagatcatcatataatatgaaatggaggaatttgaaaacttcaactcatcggtgccttcctcggtcaattatggtgcagtggttagctggtactagtacgtatcatgatgttgatcgtgtacctcgtattatccttgaccaagtgaatattgatgtgccatccaatgtacctgtccaagaatatggatccattcaaaaggacataaaagaatatagagtgttgccgttccccggcatttccatcggaaggaggactgtaattacccaccgtacccttcaatcgcgaaaacaaccttacacataaatttcttcttaaagatatttagatggtatacatgaaaatcacgtgtgtagatttatctcagaaagtacttttacaaattgtgattttattaggttctaaaaaaaatgcaatacgaagtattagcggaaacagtatttttaagactatgtcagaattgctttttgtttgatgggagggagtcaccgctagaaaatcgatttttcacggcgtttatctattttttttctctgacgtctat

SEQ ID NO: 49159 - DNA, 1008 bp, Oryza sativa
tgaaaaaaattaatgtgttccatgaaatgaaccgaaggccgacttgtgattagcatcgatcgggaagggacaaaggcgatatgccagctcttatataagatagaggatttcaatggtgtgtgaggaccgttctaattatataactaggtgaaaccccgcgcattgctgcgagaatttagtatgataacaaaaaaaataacgtgtaagatagctagataacatcagattaagtaaattaatatggtctatgataatttaaatttaaatagtatgtaaatggtgattcaaacgtaaaaagtaaggtggtatgactttatggaagaagaaaattagggagatagtttggactgtagattaatcatctaaagactaaaaacaattaatgtgatatgacttaattatagaaaaaaaggagaaagataatttggaccatagattaatcatttaagcagtaagtgaggatgaactatataagtatataggatatacattaaaatattgtgtgaattatgttggatgataatttaacaagtttatatttgaaaagctcttaaattataaaaactataaaaatatagtatgtttgcatgatgtttaaatgtgataattgttagtggatgatgatgtgtcatcttgttaattagtggatgatgatgtggcatcttgttagtggatgatgatgtggtatctttgcatattaagcttaaggagttagtaggggataactttatatttatagtaagataggataagaattgcaggagagttttatgatagaataattgagattagccacgcgaattgttattggcagtttctagtaaaaaaaagtgctttcatggtgacacaagactacatccacttggcactatcatcatttttgtcccggttggtgttatttaatctcggattcaggtctcggtttataacccaggactaaagagtttacaaaccgaactaccgtgggtttctcgagcagtggcaggaggaagccaattaagtgcagca

SEQ ID NO: 49160 - DNA, 656 bp, Oryza sativa
ccgcgtgccgcgccatcatctagtagcaacataatcattttatttcaattagttttcgacaataataatgaagaatatttatagttatgtaatcatattatatataggttcgcaagataatcaaatataactattcgagttcatgtagtatcacttaataatattatattagtatgatagagtcgtggatgcatgactatgactatgagtattaatactcacaaatattgctatgagtgtattaattagtatagagatcagaagttatacttactttatataaaaataatatcatatcggtaatgggacgacacgtaaaaataatatcttagaaataccatattgatgatggaacacgcaaagaaaattagagtacctaattaacaagggtatatctaattactaactagttagctactttttatgagatatatatgatagtactactataatataatgtagctagctagctttttatgagatttgcaagtattagatagtagctaggactctgtccatctagaagaattagcttgctaaagtatgtatacacatcctctctacatgcattattggtaaattagccatccccatctacatcgttgatcactcttatctaacttgcctccttcaccaactctccgttgtacattact

SEQ ID NO: 49161 - DNA, 761 bp, Oryza sativa
ccgcgccgccgccgccgccgccggtgtgctgcgatgaccttaatttatatatatgtgagtgcgaaattaattagctgattattggttagtttcaggttatttttttagtagaaaattaatttgtttgtgatcgatcatatatatatgtggaggactctcttaattgtttttttgtttggtttgatttgatttgatgtgtattgcatgcaatttgcagtttgggtgtgagatcttaattatattaattaaacactatatatatacagtgtgcttatggtaaatgcatgggttttgaactgaggttagatttattaattcgaactatgtttgacattgctatgactatagtgattattgcatattgtgaaataattcaaacttagctaattaaagttgagatgctttttttgaagttttagatccacaagaaataatagcattgcgaaattttatttagcttatggtagacatcggtagctagaagaacaaactttggaatattggttgtaagtaaacgccggaattaatcaatgaattccattacctcgaatttgcttctctgtaacaattcgttccatttgttatggcttgtatatattcaatagtacttaataactcgcaagacacttgttaaataaaataacaacactagctggttcttggttttgcataatttctagaaaattactgaggagatgtgaaaaagggacttgtagaatgtaccgttatcacgattcatgtctaacaaaataatccactag

SEQ ID NO: 49162 - DNA, 699 bp, Oryza sativa
attggtaaaggtaaagtatatatagtaaagccacgcactgtagatttattcttggacaaaaccatttggtgtttttaaagtaaccacaatatgaggataaaatgggtaataagcaattaatgctagcttcttacctggtaagatacattgtggtagagatggtagttataaccgagtagtatgcttactactagcaataaaccattaaaatatactatttgctcgtgtatgcataacaatcttctcaagtagcattaaatgtgaaccccatcttaattaccacttcagcactaaacattatgaaacctgctaataacaactattgtcggatattgagacccacgttactatcaagttggtaaataaatattgtggttacccttatatctcggacacgcctttctcattaattgtccaataatattcaattagaaaagacaaacacatggcatcattggttttatatttatcctttttctatatgtcgaagcgtataatcatctgttaatagtgcagcatatccacaatgtgtcgcgacataaaaccgccaataaccttccatgccatgacatcaattatctgccctttatttggacacaactagtattcatggctcgaatgtttgacgtacattgataaatatgattttgcaagcaccttaaataaacaaatttcacaagcacatggcaaatgtgaact

SEQ ID NO: 49163 - DNA, 2167 bp, Oryza sativa
ttaggttgggaattaattgggtcctgcaagaaaacaaagtatggtttggactagccgctaatatatactagtatatattttttaagcaaattaattaaggcatatgctttgcctttgtgtatattgatagagcaggggagatgcaaatatatatatatagttgattatcaattggattgtgtaaacatatatttatgttgctgtatatatagcacatactattacaaattaaaagtacacggtatgaacatatataatttcaaattccctaccgtgtacttttgtaatggttcgatggcaataatagttaagaaacatcagtgtcttaatccaaccacaatgtccacccttttcaggagccaatagccactcaaaagagaaaacaattaaaggatgtgttattacaagataaacataattaatagggtttcctcccttggatacaaaagaagggggccctggagacaccacagttggttgatccttccaaaatgtcaattaattagtaagacacatgattaaattccagatacccatgaagcactatgtccggtctgttgtatatatgttcagcatccaaatatgcaaaatttgggtttgattcttctctggccagcaacagacctggcatgcattgttggctacacctttctcttccaatgagcacattattatacaggtaaaggtcaaagctaaaatacatgccaatgagttgacctctaatgatgcattgcatttagctactatctagcattagtacacatgatcgacccttgtatatatgcatgcatgcaatccaatttcagtatataatatattcttataccaaacctaaacaactaattaaattaagagaagatagcaactaatacttgatgaaaccagccaacaaaagcaccttatttctcttgtttaatttgtttcatatagcgtgcatatatatatttttatatctctgttactgccagttcaattaatctcgttctgctctgcatgtgtgtatatatatctcccttaggattatttaataagaaactcatatatatatatgaatatatcacacacacaattaaccagaaatattaggttgccagaacacacacaattggtatatataaattaagagatacacaggtaagtacattagtgtattaattaggatccgtgattaattatatataatctgtacacttactttgttaaaaaataattatgtctatagtatatattaattatctgtccgtacgtgcaggagtatatggttcaaactgtactgcctgcttgtgtcgtcagatatggacgactcctttgcgtttgcatacatcatacaatgctgaatgcctgaatgcaacactagataaactgtgcgtgtacacgtacgtacatgtacatacactatacgtacctaatacacgtacttagacgccggtagctgacgtgtcaattcatctcttatgtgggctccacagaattgatggcaatggcgtcgtacgattttcttgtacagcttatctatagctgaggatcgatggacctctcgatggtgatgaattgagtgatcatcaatggaggctttcaatccgagtttgaagctgatctctactattataaaaattaaagatgtttttttattagtactttagtacgtcatccgtatatgagttggtttttaaattcgttcgtttttggaaatacatgtacttatttgagtcgacttttaagttagttcacttttgcaaatacaaaagcagtcatataagaaatctcttttaaaaaaaactggcatatatactaactcgaaacgattagactcctaaccatagctcataatttttaaaaagaaaatacatccaaatgaaattgccacagtgaatttcaccttatctaaaccatatagtagtaataaggttagaatagacttcactagttgcaacgcacgaacaatttttctagtgaagataaaaattaaattgatgtatgtaaaacaagaaaaatcattaacacatgattgattaagttttaattattataaacttgacaaatggatatatttgatattttaaaacaacttttgtatagaaagtttttacgcgaaacacaccgtttagtagtttgaaaagcgtactaaaggaaaccccggtaaaatatcttaatcttagaaaagaaa

SEQ ID NO: 49164 - DNA, 657 bp, Oryza sativa
aaatagatgatgttttagtatacatataatcgaatgtcgaaatcctaacccatcattagtaaatggaaaaaaatatacaacgattatttgatgtgtgaaatagaattagagaatttattatcaaaaaactttaacgtagctgtatttttttaaaatatttctatgggttatatgaatgtgtgagacagtattattgatatcttgaatgttttatgaaaaaagaaagaagatgttgtaagaacaatctgggttaatggaaaaagtcagagaagaagaaagtggtggtggtttcagattacagttgaatgagatgctgtcggccaggtcggctacaacaaacaggcaaagccaaataaccttgtaacacaaaatgaaaacaagaagatacaaaaggtcagggagaacatatcttgaccttcttggggtcactacaaagatgatgctaattaaagtcaactctacaataataaacaggaacaatatatggtctctgcatttcacatggatgcatgctaaattgtgtctaattgtttaattattggattggaaaacccatgttatgattctgaaggaattgccttgttttccatggattttctgtgttctgataagttattccaattcagtgtatatataacaatcacgtacgagtcgatt

SEQ ID NO: 49165 - DNA, 686 bp, Oryza sativa
gtttgaaaattgtgccacgagtatttaaattttcatccacttgttatagaataaactaacgggaccaaatgtaattccatccatcccacctgcggtttctcccatctacaagggctaaccttctgagcgcgctccatctctctcttcataacagacaactttcattatccagattggaaaccaagcccaacagcacaaacacaaagtcttaatactccgtacaagaacaagaacataacacgacttcattgggaataagcgaaacgacatatttgtaaacgaaaaataatttacgaataaaactttcatatatgtgatcttagcgatataaaagcaaagactgaaaaataaacttcgttgaaataacccaaaatcaaatctaaatttaaggttgaaaaattaaatttaggctgataaacataagcataagcgaaaatatgagaccgcacgaaccttctaccttctcttgacagtcttttatcatgctataatgcaccacatgtaccccttatgccaaaattagctctaaaattatatttagtgatttaaagtttgaatgccactgacaagccaacaagtaaactacagagcaaattaatatggtgcaatctgtcatcttccaatgttgacatcctcttgcttggctagtaaccacgttttagggcttggtccggagagcttaaaat

SEQ ID NO: 49166 - DNA, 1601 bp, Oryza sativa
acattaggatggcacatctaacaagcacatcctcttaacctagtggctggctgctagtcccaaagcatcttttaactgtcttgtgccggagttgatgcatgcatgcagccatacatgggtaaatcagtttaaattaatcacatggaagctaaaacgccaagttttatcatccaaaaggtctaagctccaaacgtcaactaatttgaaaccggagggagtacatgtttagggcgtgtttggttgcctgcatccatgtatagtgagcagcgtgtttggttgtgcactggctgatataagcaaatattatatgtatatgcatgcatgcacgaggacgaacgaagtaaccgaaggcacgcatggaatgatggaagaaacgtgctgcaaacaaacatgcatgtatatgttgctgtgcatctcggaggaagaatgatgacattttttagtcaaaatatactaaaaacgtacgtaacaaaaaagaaaaaaaatatcgggaggagcaggtagctagttagctagctatatactccctccgtttcgaaatgtttggcgccgttgactttttagcatatgtttgaccgttcgtcttattcaaaaaatttaagtaattattaattcttttcatatcatttaattcattgttaaatatattttttatgaattgcatataattttacatattttacaaaagtttttgaataagacgaatgatcaaacatatgctaaaaagtcaacggtgtcaaacattttgaaacggagggagtagtaggttaattggtgaactcaagcttatggaaacctgagctcatgcaatatatgagtaatatacagttatgtcgatctagttaattaatactccatctgaaacagatgcagtatattaacctagtatactagctagctaatatactgctacttctgtcgctctagtatattaaacagatctggttgtaagacgttttgattttggtcaaagtcaaactacttcaaatttaactaagtttatgcataaatatagtaatatatataatatcaatttagtttcattaaatcaataattgaatatatttttcataataaatttgtgttgagttaaaaatattattttttttctacaaacttagtcaaacttgaagctagcatgtattttcttggttcaccttcctctgtctctcggtccatattctacatacccatattggaacatagacaatgggttttatttttttatttttaacgtaaaccgaattttatcatattaacatatttaatttgtatatagtgatgaatgacaccatatagtctatatatgttgctattttctttaaaaattattaccatatattttgatgccatcctccccttcattagctattacattgtataaacccatctctctttatttttaagtttttatgtattatatatgtagagcgcggcatgcgcagctagccaaatacgtactccaacatgtccaataactaaacgcgtttcacaaaattatctgactatatcatgtctatcatatattgtagacgcccttaaaccctaaaaatccaatataatctagctagtatctcaaaatctaaagggtgcctatacta

SEQ ID NO: 49167 - DNA, 722 bp, Oryza sativa
aagaaagtgcgaggaggccaatacgtacgggagcatgacagtacaacatgtatacttcacatcttttcctcatttgatatctctctgatgttatttgagaggaatatttttgtatacggcttattattaattcgcagccacatgtttggcagcacatgctatatattagatgttgtattatcctgcaagctaggactgcatgctgtgaaccgcaaagccgttcattggttgcacacttgtatataagcctacagtttgctactagtatacatgatatccaaatcatactagtttattaatgtgaaatctgaattattttatatctattcaatttaccaccgcgcttatttattaatttgaacatgtttactcattttttaaaaaaaccgaatgaattacaaaagacatacacgtagtgaggcaccggtgttggtggctctgtatgaagaaaaaatgattcttctaaaatacctctttgccttgtcgcttgtgttatgctatatcggacctcttctttccattgccttctctcttcatccttcgcagaactagaattttcttaattctagagttgagctaccgtagttcgcataattttatctttattctctctctttttgaagaaaaaggaaaaacttacatatccttgcacaccagcactccaatctctatggttttcctttctcgattaattatagcttttaacacaaggttgcaatatg

SEQ ID NO: 49168 - DNA, 716 bp, Oryza sativa
gctggatcgaaaccggcccaagtagaggcgcgtgctgggcagcttccccagcccaggtccaggttgcggcttggggaggagggagtgcccgcacgtgcgcataatatgccgtgggctgaccggcaggccgggaaaaagtctattctaggtccctcggccgaagaaaagtaccagctaggctgggaaaaagtctgttctaggtccctcagccgaagaaaagaagtttaattttgtgaagtagaaatttgacgaaggctagaattaaaaataagaaatattgaaataataatagcgtagagtcacggtcattgttgtcgcggaagggaagcggacggccagatgcggctgctacctaccgtgctacggtcatcgatcggccgtcgattggtctgagtttgctcgcttattcgctggtcgaccgtgctgctgagccaccccgtagatctacccatatcttcagagtccatgttgactcgcaccgtataaaggtggaaatcaaaccggctttgtttttttatctccctttcctcggaactatatttctttctatcatttgagactttttctagcgagcaaaagtaccaaaagcagtgtaagaataacttcggttagaaccaaaaatttttagttttaatacaccgtagcgaagcacgggtattttgctagtacaatatcaaatagagaaagtaagcggtcatcagattgatcggtgtaga

SEQ ID NO: 49169 - DNA, 1428 bp, Oryza sativa
  unsure (1)..(1428): unsure at all n locations
taatggttgtccttactatcctgtaatttagaatatgcagccaaagaggaaacgttttgtttcttctgaaattgtaggataatttttactgagttcagtgcaatgttgtgcaattatgagttttttttctgtggcattttcgtatcttggtaattgaaaatgctgctgaaagcctgaaatacagccattctgcaacatatatgatgcagtagatgctacttcctctgtttcatattctaagtcattttagatttgtcctaactcaaacatttctaagtttaaccgagtttatagaaaaaattacaacactaaattagttccactaaatttattattgaatatgtttttatagtatatttttaattttgtgttgaaaatattgctatattttttttataaatttgatcaaacttgaaaaggtttaacttaggataaatttataatataaaacagaggaagtatcatttatctccattgttctggcttttgtccggtaaacacaagagggaaaaaaatcatctgttcttatcaggattgcgtgatatacactataatggcattagtataacaatataagatcagagcaggtaacagcagtttaagtctcataaaatacatctccagcgactgagaggacgacaaactggagattctatccaattcaataaactactgaggaatctcagctgatcagagctcaccattagtgcctgcattgtttaatgcatttcggcttaacacccggcaaaggagttgatcaatgtacccatcatgcctaaagaaacccacccaaccacaatggcacaaatcaagggggaaaagaagtcatcctctgcaaagaattttttggcacaacttggtttattctgcaatccatagtcatgccaatccatagtcatgccaatcaagtgatataacaaaatgtaagcatctgtgaaattatccacctaaggatttcaattggataatataaggggggcagaatttggtagcagatgtcagaatctgtgaaattatcaatcgaatcagaactgcagctgccttgccccaggaaattaatcgaacaaaatggttatcttcgtgacaccaatatgtatgctggttcagatcacaagttaatagatgtttgaactttaagtgcagattattaantanatnnnngattactgaaacagaacagcttcacatgctgaactttcagtgttacatgttgcagatctaatcccnnctattctcagtcaccttaaagaatgaccatttggggatagagtaataacctgagaactaacttgtcttttgtcacaatttcctctcagatccgattttcaatctagagtagacccagccaaaccaagcgcaatccggcaaacttctttgaacatacatgaatttgaatgcgcaccagataaaggtgcatacataaataat

SEQ ID NO: 49170 - DNA, 508 bp, Oryza sativa
ccacaccaacttttgccagatgttcacccaattgtgggtagtaggtattaaatggagcaacctgttggtacagaaaaggagaaatttgactatagtaaaaggttaaaatcaaagcacagtatgttattaatagcacatcaataagttcagcattggacaaacttcatactttcttccagctgtaacccaacaacctaaaaactatgtaagaataagtttagagcaagtttaatagtagagctaactgctagttataaacccacattagagttaacatgtataatagattagctataaggttggctaaatttttcatctcctctctcttaggctgcgttcgtttctccaacaagagttggatgaaattttggatacttgtggcatgcttttcaaactactaaacggtgcgtttcgtgcaaaaattttctatatgaaagttgctctacaaaatcagattaatccatttttcaaatttgtaataattaaaactcaattaatcacacattat

SEQ ID NO: 49171 - DNA, 821 bp, Oryza sativa
ccttacatgtgccatattttggccaacaaccaacgttggattgctagagctatcaactcttcttgccatgtctgaaactacaaaacccatttatcctatcttactataaagttatcccccactaactccttaagcttaacatgcaaagatgccacatcatcatctactaatccactaattaacaagatgtcacatcatcatccactaacaatcatcacatttaaacatcatgcaaacatgctatatatttatagtttttataatttaagagcttttcaaatacaaacatgttaaattatcattcaacacaattcacataatgtttcaatgtatatttttattatgttttatgatatcctatatacttatatagttcatcctcacttagttagtgcttaaatgattaatctatggtccaaattatctttctccttttttcctctaattaagtcatatcacatcaattatttttagcctttagatgattaatttacggtccaaactatctccctacttttcttctttcataaagtcataccaccttactttttacgtttgaataaccattctacatactatttaaatttaaattatcataaaccacattaatttacttaatctgatgttatctagttattttacacgttattttttttgttatcatattaaattcccgcagcaatgcgcggggtttcacctagttattactatgggcatatttggtgcagctccagatatagcaacatctctcttggatcttaagcctaaccaaacaaaaaaagtttcatctaaattggagtggagctggctagagcgctctc

SEQ ID NO: 49172 - DNA, 526 bp, Oryza sativa
ggttataaatggaacatgttaatattttcatttatgtgaaaaaatagggctcataaatctccgtttaagattcatagtatataacactattttccgccactataattaactactccctccattccaaattgatgtacatatttcatagatacactaaaaccaaaaaaactaataactctctcatactatatttactttagcaacaaactcgatgcatgcaccatccccactatttcctagccaatagcaaatcaagatattgcatgtgggttataaatatttgtgtgcatggatgcatgcattaatgtctatttactccaatgcacaaataacaaatagacttaatgaatgaacataaatatgtatatcatttagtaataatcttaaaaaaactatatgtagatcaatttagaatggagggtgtattaaatagctaacactggacacatcataacaaacaacttgttccctttcctccccgcatctccctatcttatcactttagcgcgaggaaatgatggaaata

SEQ ID NO: 49173 - DNA, 697 bp, Oryza sativa
tcttcctactacaacataatttttttaaaaaaataaaaaaacaaaattaaaaaaatttatgtatagaaatactatatataaaaaatatttgaatttaaattcaaatttgaaacgggtatgtaaacttttgacttataaactttgggtctataaactttaggtgtataaagtttagatgtatagaaatactatatataaaaaatatttgaattcaaattcaaatttgaatcggatatataaacttttgacttataaactttaggtctctaaattttaggtgtataaactttagatatgtaaacttgaggtgtacaaactttaggtgcaaaaatttactaaaatagaaaagtaatgcggtgccaaaaaaaatcacgtggagaagggggtgatcgagcctggcgagcgatcgcgcattaagaattttggaggactttttctacaagtgattctttttccagatgagcgtaatttcaaaatcttaagatagatctatgttagctagaaataagggagaagggaagagttgggggtggctagagggagggagtacgtgctggctaccggaattttgtattttagatagatctaatgggtaaaattaatggttcaccgatttaatgaaaataaatttttattatttattataacctcatataacaatttaagagtgtttttagagcatttacattgtacatgc

SEQ ID NO: 49174 - DNA, 868 bp, Oryza sativa
agcccttgttagatccaaactttttcttcaaacttccatcttttccatcacatcaaaactttcctacacataaactttcaacttttccatcacatcgttccaatttcaaccaaacttccaattttggcgtgaactaaacacacccatagtattaggccccgttcgatctccacaattctggcacgcaaaacgagaaacctccttagcacatgattaattaagtattaattattataaatttgaaaactgaatttatttggttttcttaaaacaacttatatatataattttttttaaataatgcaacatttaacagtttgaaaacaagaaataataaaacaggtccttagaatgtgtaccatttaggaccggaggtcgtatacatgtaatcctcgtcggtgggcgctagctgcatgtgtttgtgcatgcagatcaccaaaccggaaacgtccatttatacctgctgctcatacaaatatactccctccgacctaatataatagattttggaatagataaaacgtattctagtattataaatctgaaaatatttcccatctagattcgcagccctatgatacgtcccatccaacaaaaatccatttatatttaggagcacataaacatgaatgaatgctgtctggacttctcctgtagggactgtagcttggatcctggttcaaaggctgcacgcagccacgcatagtacagtagagactcaatcatgcatctgcattatatgtgacccaacggcaccgcaaatcccacttatcgggctatatacagttcatatttcaattggaaagaaaaatatttcccatttggaacgagacataattaagataccaacaagggaaatgataggaaa

SEQ ID NO: 49175 - DNA, 635 bp, Oryza sativa
atatagtattgttttctactcaaggctatgtatttgggggctgtccagcttatacatatttttagatagaagaatctagcttatgcatatctgctcaacaaatgaagtaaatgtaatagcaaagctaaagaaatgcagtaaatatgtctaataaaaattcaatataaatatgaataaactaatgatattttcacatgcaaactaactagataaacaaaaaaaacatcattgttcaggcagcagagttcttgacagcccagaacatcgacccaatgcaatgaagtgtccaggcaaacagctgaaagaaagaacttaaaccaggtacctgtcgaaccattgctcgttcttcttctcaaaaaccgtggcaccgtgctagttatgcagatcgcccaacttcagtaatctgaaatggtagtctttgagaaataaatcctgcaacaagaaaaaggcagcacctgtcagctactcagttttctggaaccgtcgactacatacaactacaagaaaataagaaatgattagcaaacaagcctaatattttctttgtcaatttgtcaagagtgccaacatttcaaaagcagatggcaacatattcaagaaagaaaggaccaatccacaccgcaaacgacatcaca

SEQ ID NO: 49176 - DNA, 633 bp, Oryza sativa
gtgattttacccttgtatttttaaaattgtgattttaccctcactattttgaactgaagctcaggtatgcccctgttccgtcaggaggactttaatggtgttaactgacaggtaaaaggacatctatgcccttgcagatttggcttgtgaggactttgtgttttggctgtgtttcacgattacagtagaaaacggaggtatgaacttgccctgcatgcttaattattttaacaacgaaatccaactttgtaactacacaagaaatgcgattctccagcatatgtttaaaaaaaatcaagggatttattaattaagaaacactatggactgaggtatgaattcaatgcctcaatgcctgacgtatgaacttgccctgcatgtttaatcattttaacagtcaagggatttatgaatatgcaaacaagaaacactactctcatctctttctttcaacaacagaatagctttgttggtcctgtccagtttaggaaccaaccaatagtccaaggcagtaagaaaaataaaaactaaagggggagtgacaaagaagaaaaagtaaaagacaataaaacctcaaatgttcctctccttcctctccttgctgttcttctcctccttgacaccatcatgcct

SEQ ID NO: 49177 - DNA, 1344 bp, Oryza sativa
agtttattttacagccgctcgaaactcttccaagtttgaggcccatgcttgttgcttcagtgccaaaacaaaaatgtgttgacaatatgcggtatatcatcatgtcacttatcatttaatttacacttccaatgttatttaaatcatcatgtcagtcagtgcagctggactcaaggtttccgcttggccgctagcctgctaccttgcttgcttgcagaattggaagatgtaagaggctgcaggcaatttcttcagagagatatgcaactgtatgtgtttcaattggtgtctcagatagaacattcttttttcagcccaactcgatccaataggtgtcttagctccacttccagaatcaagatgtagtttttagcctagagagaaatgacaaatagatttccagccacacttccagctacccaataggtttctgcttggtcgctagcccaccttgtttgttgagaaagatgaaaaatcgaggaatgaaatattctagatgttagataagcatggacaattcataattatggcttgggtttattttgctgttataattagtcttgttttagactcatcgtaacaatctcagtttgtgatgatatgcaaaagttcaattcgatccgtcacatcattgataaaaaaaaaatctgcctacttggtttgtgagattgtcacctggtgacaattctgattaaccttttctgattgagcacttgcagagaaaatacaaaataaaatgttttattttaaacagccaaagtgtatgtacgcagtctctccaattgcctagctgtactaaatcctgtattatggtgtttggatggaattagtgtctttttcaacagcacttaaatgttggtttttcctgttaccttggctccttgcgatgtaagcctatgtgttttgaatgatcactacttgatgtaattgaggacagcaacgcatgatgattcagaattgatattttagtttcacctccctgggtcagtttcaggcgtcatcggtgcagatcaaacattctagccattatggtatgttctttcactaattttagtttctcctgatttttcttggagagaacctattatatgccactgagtttgtcacggatctacgatttgccactgactttatcaagtttacaatatgccatcgacttttacttaatttctacgatttactatcgccgtttagttagcctccgttagtactctataaatttgctcaaatgactaaaatacccctgggacaaaaaatttcaaaatttggataaacattatgaaatatcatattttaagtttttggccaaaatttgaatgtttataatcttgtgtttataatatg

SEQ ID NO: 49178 - DNA, 1514 bp, Oryza sativa
attgcacacaagaaaatgatatttgcagattgttttggagcatactgtatttttcaatatatcataactttcatttgcagatgtccaaacattccttgtgactggggggattacctaaagatcaaatgctatatctttatctattattactactatgatccatacattccttagatgttgatggattcaggaggattaaatatcacttcacattgcctgtaggtcacacaaagaaacatgtaaggatttaacacggaacaatcactatcttggtggataatttccatataagtaaaactagagaccaataattttgatcttaatgaatgtatgacatgattaagttagtaaataagtccaatatgcctacaaaaacaacagagaactcaaatttccgaactcccaaggttaacaaaagtacttacttttgcaatgaaagtattcaattcgtaggtacctacaatcttttttacatcttgaggaaacatttcgctacaatgttcaggcccagttgcaaggcataagatgattgataactcagatttttctgtcaaggaaaagataatcaaattataaaagtaaacagaaaagtgttcaacataattacccaggaactaacttaaaacatttgtaggctggtcagttttatgtccatattctagcaatggatcagcatgtactagcctactcttgcacttcttcttaagcagaatcaacggaaaacactatgagcttctagattttagttcccagttctgctgcttttttaggtaagactaagtttcttgaaaataaggttcagcatctcacatgacaatatcagcattaaagattgaagagtatcgttgaatgaggaatcaaattatatatttaacttgttgaagagaaagcctgctgataaattccaccaaggttataatcatttatagggttggaaatccacatttaagatagttttgttacacttacactcatatactataattctgggggcaataccacccccaaccccctggtattcacaatgacagaccaaattaagctcaatctgaaaaggtggagctttgcatgttgaattgatgatttggcttcatataaactgccgtgcacatgcatgcacaagtttttacaacagtagacccaaagctgctacaaaccatctattttgtttgggtgttggatgtgtggccagtattacagtgtatggatgaatggtgaagctggaccaacttataaagtagatggacatatcatggaatcgattgagaaaagaaaaaagaacatttaccaccatattcacagcaccgacgcacccgttttacatgccgaagattctccaatgggcatgcttgactcaattgcctgaaacccagtcacattgataacatcactgctctaaatatagcccacttgttaattatagtcaaaccgtaacaaaagaaaaataacagcacatgaaaagaagagacaaacatgtcaaataaataagtgaaatacatggccggtccttaaac

SEQ ID NO: 49179 - DNA, 746 bp, Oryza sativa
  unsure (1)..(746): unsure at all n locations
tcactgatcagaggtgtaccactgtacccacaagacacagaccccacatcatgtcaccatgtgcctgaataccaccacggtacctcggaaaggagttgtgacataccccttgcataacacaatccactacagccgcactctttcctggatcataatcacccccttaaaaacaaggcatggactccccagcgacccccgtgggcttatctccgccacttctcagtctggtgccccgcaatgaaccatgctatnacaaaaanaaagggcgcactaaagccgttgcccacgctggcttgtggttggcacggttaatgtttcacaaccgaaactcgtgaaccggtccttaattgtcatgagcacgactctcaaaaccatgtgatcacaacccaccattatcaagttttagttggcacattcatttaaaatttttttttcaccaatcacgattggccatcgtgaactatcattaagccatcattaaataatagtgagtcataagttatcccaatagtgtgctaatgtttctaagcatggctaagcaatcacatctaatatctaagcctgggaaaaaaacccccccccccccaaaaaaaaaaaaattttttttaggtaaagctcaactagtcaagttataataacccaaggtatcaaggaataaagtaatcaagaacaaaagggctataacaaacaataggttaattccacccaatgacattcggaaataaatgcaatatttgaatagaaac

SEQ ID NO: 49180 - DNA, 583 bp, Oryza sativa
ttcccggcgaataagcttttaagcttatcgtcacagttaatctcccttttgtttgctgggttctgcaaaacatcaagcacataatctcatttcaggaacaaactgcttgcagtgaaatctacggcacatgaagagttcagtttagtacagcaaatgattgtgacacaagtgtaatcaaattaatttatataccatggtaaactagaaaggcagctaaagtagcatatctaaaacacggctaacactgctgcaggtgcagagcagacattcaagaacatgagttcaatcatgcctataacaatgtacagtaagttaataacagatgatcaaagaataactataatgcacgtcacactatatataaccacacaacagtgatcagcatacattctggacgccgtgctccacatcgctctaacagtcaagttacaacttcagtacaataaaactaatccaaatctgccaaataaaatgcaccgctgtcaaagtagattactgctcagcaaccttagcacatgtaaaatgctagaaaagaactttattgggtgcaattttgtttttattcccttattgacaccccccc

SEQ ID NO: 49181 - DNA, 1306 bp, Oryza sativa
tgcaagaatcaaattatcgttacatggatccgctagttgttggtgtttgtcaccctgctcccagaagtagcatttgtcaccagccttcctcctctaataagtggttgttgaactgtcgataatgcaggtggaccttcattctggtgacgatttacttcggggtaggtcccttaatccctcctttttcacaacaaaatagtttgtctctgcactgaattcatgaatctaatgattcatgtcgatttatctttacatcgaacacatctgaagaaaagtttgttttgtggaattgttcagctcggcacggcgttgtccatctatggatgcagcaagcttgctgatgagaatgttgtcactgaaagaacagacatggagctcggctcgtacgtcgcccatggagctggtactaaacccaatttgaatggggaagatgacacaggagagattgctggattctggggttacctgctccagatcatctaccaggtaaagagggattccatgcagccaaagaacttagaataaccatccacttgagcgcctttttttttcttatttgttattgaagagagttatcttatctgcactgacatttgcgtccatggagagggggtctgatctcattaggcttttcatacgcaattattgcactaacaactaaagtacgtttgtggtgtgctctgatgaattggattccgtttctaaagatcagatgtgcccacatactagcatctttgtccggtcacatttcaagggctctcacgtagccgccctacatgagccatcttgacatcttgttggtcctatctaaatattcagataatctctgcaaatctcacatttccttgtacctcaagggctgaatcagctttaaaccgctttgcgaaatgtagggctgactctttttagtagtggcatcaagaataaagacaacatgtttcctttgtgttgatttgcaaggcctaactgtacccaaacggtgactgaatacctttctaggctgaaataggacagaatggaactattgttctgctttgtgaataagaattactagatagttctatggatggtagtttactagcgccatgtttagttccaaagttattcttcaaactttcaactttttcatcgcatcaaaactttcctacacacacaaacttccaacttttccgtcacatcatttcaatttcaaccaaacttccaattttggtgtgaactaaacacaacctagatctgtgttgggttactgtgtacactttgccaacaaaattttgtaatatatctcaccttttttagagaaaagaat

SEQ ID NO: 49182 - DNA, 619 bp, Oryza sativa
tgttgcagatatagattcccgttgttttttagcctcgcttacaaggccataactagaaactgcgaatgtctttgtccaacattttatatataaggaatgatgagctgtagacttgacagctttgctggtggaagtagaccagtgcttgctacctgctgctggtaaggtaaattccttcgtccgtatccgccatccctgagtattgtgaaactgtgactagtcacatactattatttagtatacatccatataagtgtacaattagtttcacatgtagatgagatgacgagtacattccccttttcataagaaccagattcacacccgtcgtacttgattattttctacttcgtggagattgagtcttcatgtactgcatgaatacaattatatattaaccttttttataactcatagttttttattaccttattttaatgttgcacaatgttgcaacgatttatttcatctaccatgcagtttcctgcacttcgagaatttgttggtacaggaaggcctgtctggggaacttgtgctggactcatcttcctagctaacaaggcagtaggtatgtgagccacagcaattggtttaatctttctttctttggaatcaattg

SEQ ID NO: 49183 - DNA, 587 bp, Oryza sativa
tcatcattaagaaaataccgaaagatatcatattttctaacataaaaacttggtacttcagagtatctcaagatatcaatttttttatgtagaatttaggtatttaggttgtgtttagtttcttggccaaatatttttttaagtatacggacacacatttaaagtattaaacgtagtctaataacaaaacaaattacagattccgcatataaaatacgagacaaatttattaagcctaattaatctgttattagcaaatgtttactgtagcatcacattgtcaaatcatggcgtaattaggttcaaaatattcgtgtcgtcatttatatgcaaactgtgcaattgatttattttcatccacatttaatactacatgtgtgtgtcaaaacattccatgtgatgtttttggtaaaaaagattgaatataaacacggccttgaggattgtaaaatttccctgattaaatacccataatatttgcattagtttgcgtgcttttgagtttacttcggcatacaaaatattcaaaacaatttggcaaaacggaatggtaaaattcacatgtgttacactgacaaatttactta

SEQ ID NO: 49184 - DNA, 695 bp, Oryza sativa
ataagaaaaagggaagaatgtaaatagaacacttttcgcatcataaaaaaactgtcagctaagaaagaatctacattatgtcataagaaacctcattttgtgttccctgctggggccatcatggtctaccattaaatcattgattaggcagtcttttcacccttattactaatacacccacaacttatttatttaatttcactaaaacaaaccaaccttgttttcgcaaatagagatgagagagtctgttcacaaccttataaggtcatgtaatggttggaataagtaaaaaaaaaaaagatgaagaaatctgcatgtttttgtgcatatacagattgaacagttgatggcactactattaatatttcaatgacacagtgtagttcttgaaaatgaaaagatcagtcaatgaaaattgtgtttccatctttatgttctttaaccaaccttggttaactcttgctttgcaagaacatggtaatgccgttctgtgatcctctgcccacatattatagctatgaagaatccatacagcaaaccaaccaaaacaatagccaatactgcaatttaagtaacatttaaaacgttaattattttgtcaacaagtttttaacgtagaagtagaggatatagttcttattcctgtacacagacaacattcacagggcaaaaatatgtacatcaagacctgtgca

SEQ ID NO: 49185 - DNA, 1239 bp, Oryza sativa
  unsure (1)..(1239): unsure at all n locations
cggcgcttctttctttctttnagtttcccttcttcctcctttctcacggcggttgtttcggtcgcttttccgcttttcngggnggtggggggtgccttcttcttttcngcngttaccgcaatgagctcgggccggattcggccgttcnacgacgccgaaggccgggttctcngccgcaccgacggggagacaagatccgtcgccgcgatcgcgccagggccactagtctctaaagtctaacttatatatttaaaaaacattacgaatatacttttatgaaagagagtttctcataaaaatataccaatataacttttcatattttaaatatttttacgtctattaaatttttaaggtttcaagatttgactgcacttataggagatactactatacaagaatcaacgagaagcgaatttttaagttgcgataaactggtagtagtaagattttgtgaacaaggataatgcatatctgcgtaaaaaaatatatagtgcaaatcacatgtacattgaaaatctagaaactattgtcacaagagtaaaatttttaccaaccaaacggccacaatgtcgcgcagggcttatccggggcactactgcccttgggctgaaagtgcggccacaagcccacaatatcttgcggggcttagccggggcaccacggcccatgggctctatctccctcaccagtaaagccctagcctccaagaccgcacccgtataaagccgcagacctctctctccttctcctcccccgccgccgccacttgcctccgaaaccctagccgccccctccccgcggccgtgaaaatggtacgcttctccctcctcctcctcctcctcctcctcccctccgccgcacgacgggaagatcgcacgcgtgcttgtcctcgtgccagtccacggctccgcgcgcgccgtctttctcatggtctttctcgatgggtaggatgcgttctttattcatgttgatctgccgtagatggggggatcttgagccggaggagtagctagtttctttgattatgcgttttggggtctagcggattttaacatgagatggtttctctttagcgacatttttttttgttcatgttgatgtccacggtgattgttctagttatgtcatttttatcttcaagacttaaatgctttgaatcgccggtatagaccaagataattgcgtgaagatcgacgttttttccgagctgaccctctagatgcttgaaattttgtg

SEQ ID NO: 49186 - DNA, 3460 bp, Oryza sativa
cacgcattcgattacagattcatagtaggccatcaatgatgattcttttgcatgtggacccccactcagccaccattcccatctctctcctgcttttcgggctcgcttcacccttttctaacattttttgatgacacccttattaccaacagatgacacgcaaacctggcaaggtatggtctccacacccctttctcttgcacgtaagcaatctatctacgtggatggataataccacacgtcatatgtatgtattgtgaatggcttaacgggacaatttaccctgctgaaacgtgcagctacgtgtttctgtaccaactacagatttactccctccgtcccaaaataagtgcagttttgcactattcatgttcaacgtttgaccgtccgtcttatttgaaaaatttttatgattagtatttttatcgctattagatgataaaacatgaataatactttatgtgtgactaaatgtttttaattttttcacaaatttttcaaataaaacggacggtcaaacgttaaacgtgaatagtgtaaaactgcacttattttgggacaggtagtacttatcagagcagatcagatcagatccacagcacatttgcatcgacaaccgtgaacccagtacaagattcacctgccggcacaaatttttttcatttctctctctctctctcttctgttccgttttgtctggacatgacagttgtacagtttggcttctgcatagagcatagtttaactggccaaacagatcgatcgatcggctctatcaggaaggatgcgtcttaattgctagcctgattagttttctgatctgagggtgtaatcatcgtgctaaactatactcaccttgtctggcagatagcatcgaacagattacagtgatgatcccaccgtcgctacgaggcaacagaagaagcaaccttttttatgtccattgtaagagactgagtaaatcctaaaactaatggtttcttcaggtaatcggtgacagttcactggaatatgcggaaaatatataccccaaatgctagctatagcatctttggatcaaaggaaacggcatgaaatcaaaatcaaatttaaaaagatttttttcttttttttagcggttaaaaagattttttttattacacagcaaatgtgcatatgcacaacactacactcatatacccacaaatgcgcctggccctaacacaagctaaagagaagcaaacaagcggtgcatcccttatctcactagattcctattgagatttctattgaaagcccacttaaatatgtgtaatattcataaatttaaatttaaaaggatttctaataaagagtgtgactaagctagtttgtaaggttaaatatgttagaattaaaaaggatgtttgtgtttgttctaaaatttatgtactatgtcgctaatagcggcatcctaatcctaaaattaaaatgtctcactcactgagaattgtaaagaacataatttgatcaaacttgtcaacaaatgtagcatgtaattaacaaataaaaatataaaaagaatcaatgcatttcctctaaaaattcatatactccaattaaagggttcatccacaccacagccagtaacatttgatcaagttttgtccataaatagaggatattctcagtaatatgcaagtttatttggtacagctgcatagtggttactcaagcaatctactccctccgtcccaaaataagtgcagttttgcactattcatgttcaacgtttgaccgtccgtcttatttgaaaaatttttatgattagtatttttattgctattagatgataaaacatgaataatactttatgtgtgactaaatgtttttaattttttcacaaatttttcaaataaaacggacggtcaaacgttgaacgtgaatagtgcaaaactgcacttattttgggacggaggtagtacaatgttgcaattttgtcggcttccttggcgcatcggacattaggtccaccccttgttaaacgagaagtacaatgtgttgatttcagaatcgaccgacccaatgccaggccacccctgacagccgcccggactcgtcggtgaatctgaatgtattttggccaagtacacattggtagagtaaaccggatgcttttatctaacgaaatcttcattagagcttgttcggttaatcacatgagaaaggaattgaaagagattaagaggattaattttacacctcaattttttttttagaaacacggtacaaacattgacactcatagcacacacacacactcacccctaaggcatttatggaagattgggccggcataaatccacacctcaatatgtatagaataaatcatatctaaaccttatagaacaaggcattttttgaaaagaaaagaaaaccgaggcatatgccttagcactaggcgtgcaattgaacagtgaatttagctcgtctgtgttatctgtatttttaactctaccctacctcttgcactgtccatttctttgtaaagaaaaccgcaccgtccatttcaaaatattaagattgtccatgcacatattaaattctgtgcatatagaatatatcgccgatagattcgatcatcctctggaccattcatccaggcttcgaatgatccatccgttgattcaattcgtatatatgcacagcccaaacataattaagtagccaagcagagtactccggcaatacaaaccgaaatttcaaacaatctcacgcgagctttgaattaatgccaaatttatggccacgtcccctcgaacgatccgttgatgtactgtaataactaatcgacctacaccacgcacgttgatgtactagcaccattattccatagatcgaggtcgacgagacgagacgatcgtcctgtttgtaaaaataaattaattattataaagtttaaaagttgatttaatctctaaaaagtgttgatgaaaaggtttttccttactgtttagaatcgtaaaatgtgtggccgcacgatataatccgtaatcggatagctaaaaagaacacgtcaaaccacatggtgtgggccatggctaatgggcgggtgaacgcccacagcgatcacccccccatccccatgtacgcttatctcccccttcctcctccatttcttctattcctactacaccataaaatttttttaaaaaataagaaaacaaagctagaaaaatttatgtatggaaatactgtatataaaaaaatatttgaattcaaattcaatttaaaacgggtatgtaaactttcaacttataaactttgattctataaactaatattcgaattcaaattcaaatttgaatcgggtatgtaaacttttgacttataaattttggatgtataaactataggtgtataaattttaaatgtatagaaatactatataaaaaatatttgatgaactacttgcaatcgaagccgtatcttaacggccgcg

SEQ ID NO: 49187 - DNA, 665 bp, Oryza sativa
  unsure (1)..(665): unsure at all n locations
atcccgcagtttgtgagagttttgtgtcaacacagtgccgctgtctgggtgcgggcaggacatgatgacctcaactcctcaagtagcacgggcggccctgcctgcctgccacgcacggcagctccgctcttccctgggataggcaggccagcggccgggccacgctctcgtggtaggccagtgtcgcactcgcacaagcaaatagtaaagcgaagcaaagcaaaccgagcaggcaaactccccaatcaattgccaaccgaatttcgagcaggttcggcttttgctcggcaccaatcgctgcatgtgtgcgtgccaaccccaaacgcagcagcagcagctcgcggacccccggagaccgtgatatcctcggccgccatcgcgcgcgcgacggaatttcgcaccgcgcgccaggatggatgaaccgncacaccacaccacacgggcaccgnctgccgggcgcgcggggcgcctgtccacgcccacgctacaggagtttgccgatcgcgcccaaatcccccgctggaccacgcgcgtttttacgtgcgccgtacgcgcgccccacgccgacacaaacacacacacaccccggntcgcgccaaaccaaccggggcgccacccccttnccccttgcggtgaaaaaacaccggggacgcggatgcggacac

SEQ ID NO: 49188 - DNA, 735 bp, Oryza sativa
  unsure (1)..(735): unsure at all n locations
caacggtttttaccacagcacaagcatatttaccggtgccgttgagctcatcaatgtgctaacgaggtctccgaacggtggcaagctcgtcgcagcaccattgatgttttttttttcctctctatagtttggaggagaagatgcctggaaacgtgacaacgataattcaaattttaggagttttcactggcacacaacatgtttagcgaatagtagtgatatttttctaatacagtaaatttatagttcctagaaaaaatatccgtgcgttgcaacggataaatgctattttaattttataattgttataaggtttagttaggtaaaattcacagtgagaattcgcttgaatatttttttaggaaatcgtgagctgcaattagtagtccgtatttcatctaaagttagcatgagtttttttttaaaaaaaatgatttgttatacgactccttttgtatttccaaaaacaaacgagcataaaatccaactcaaacacatacatgtattttcaaaagtgaacgaacttaaaaaccaactcaaatgcggatgacgtaccaaaatactggtaaaagcatctttaatttctataatagtatatatatgaatcaaatttatctttgatattaaatataaacgggaagtttctgtatgaaaaatagacttttagttttggtgttcacttaatcgataccataatgatgtgctgctccctacanngngagtctatcaccctgg

SEQ ID NO: 49189 - DNA, 745 bp, Oryza sativa
  unsure (1)..(745): unsure at all n locations
cgcgggtgaatcggctcgttgcncgtgttcattggtcaactttggtagttaaggaccgtaaacagcgatgatggttacgaaatattgtaataaaccccaagtcgtcgattctttgtcatttgaaaatccatagcagcggtgtcatgataaagattgggataatgatgattccgatttgaagtggtgtgtaattcagtcgagtcatatctcctaggtctgaagtcgtcgaagattttttgttcacgcgattcgccttttggacccatctcatcgaaaccttgaagcaccatatccccctacctggcacgccactttcgacgggctatagccgcctacggtatttgtagaatatggaaattgttagtgacatggtatacgcgagattgaggtaaaagaggcaggagatggggacttttatacaggttcggaccacgtaactaatgggtaatagccctactcctatcggctgaagccggtgttgccttttatatatcaatatcacacgagtacaatattggagaggacttaatctagtcccggtcaagctttaaggcccccacaaaccccccccaatgaactctacatgggcggcggtagtgtttctgcctctcgaattacacgcgagattgaaatgnatnnnngcttgctaaaccccnnnnnnnnnnttatccgtccggtagcnnnnnnnnnnncnnnnnnnnnnnntnnnnnnnnnngtctctttgtccaccttgatgaaaaccat

SEQ ID NO: 49190 - DNA, 6960 bp, Oryza sativa
  unsure (1)..(6960): unsure at all n locations
cgacgggccgaagaaatgagaaaaagacgtggtgggctaacccaggacgaagcgacttgatgggctgnaaatgcgagaggtttttgggctccgaacgccaattaatgggcctgttcgggactccatacaccaggccagattcggaaagctaacgcgcgcgtacgcgccgctagcgcgcgactccatttaactcgattagcgattccagaggacgtaactaactcaattagtttaggttaatgacggtaattaataaaatatttccttttctccggaattttttttactaaaaaaatctggaaatgctctttgccggtcgcccggtgcggagggagccggatcgggcactccccccgcgccccctcccccacgtgcctacttaggcccacctatttatgctcctcttttttccacaaaagatgtttcacataatgtatttacaatgtttcactatttatagatctaatgttgtagtaaattaaaatactcttttgcaaaaaaaaaaacccacatattttagaaactctctattaagggaattttgtttattttttgttccacccaaaatgtttcacctagtgtactcataatatttcactatgtatagatctaatgttacactgaacgaaacattccattgcaacaaaaaacccacatattttggaaacccctattaagagaatttggtttattttttgttccaccgaaaaatgtttcaccgagtgtactcaaaaatgtttcactatgtatagatctaatgttgcagtgaactgaaacattctttcgctatttgctgaaacattgtttttatataaggtgaaacaacacccaatttaaacgagtgaaacattttcgatctacttagtgaaacaattctgatatatctggtggaacatcttgcaacatttaaaaataattcaataataagataaaagaaaatttcgtcgaaatatatccatgcgtggtcttgttttgaagatttaattgcaatgaatttaatagtgcaatcggatcatcatttggataagtagtttaagagataaatcagtttaaagtaattttgcatgtaaatcggacgctgacgtcagcgcccgattttaccctctcctgatcggacgcccgaccaggagtcatccaaaaaaatctatacgtgaaaaaaaattctcacttaaaatttaaaacttttaactcaaaatttgaaaatctaaattcaattttttaatattttcaactagaaatttaaacttttaacttagatttgaaacctttcgacttaagatttgaactttgaagtcaaaatttaaaaaatttcaacttaaactttgaaaattttcaactcgaaatttaaatttgtaagacaaattttaaaaactttcaagtcagatttgaaaactttcaactcgagattgaaaactttcaagtccatatttaaaaactttcaactcaaatttaaaaactttcaaattttaaaaaaaagaatgaaaaaaatatatggaaaatacgctgaggggagggaggcaaaagggaaaaaatcacgaaaaaaaaggaaaaatcgtgctgaaaatcgctaaaaaaatcacacaaaaaaaagagaaaaatcgggaagtcgcaaaaaaaaaaaagccacgtggccggtggaggggcgcgcgccaattagctcccccgaccagattgggccttaaatagacaccgttgtgtgcccatataggtttattgaatggaaagaacattattttttatcctgcatctgcttttattttctctacgaagagagtggctagggtatttcaaagaattttatgagttaagctaattcatttgaacttccatttaaattttggtgttcgaaagaaatcagtacgatgagctcacatccttgatgaaaaatgggactagaaatataatcaagttgagcatgtgtacattagttgtgcctatatgtgcttttgtatactactcctgttctcaagcaatagttatcttttctagtgaagtaaaatctcctaggaatataaagtatttttatctcaactttaaactctcttaaataacatattatctcttatattcgtggcctgataaagcatattattacttacaagttagtacaactaatatactactagagggtactattctttcttattgttttctttttggaagatcactagcaaagtagtgctactcttgctcgctagaacgttctgtatgacaacagtacataccccaatcatgtggctgtaactagcaccacgagtaaacttggccggatctacctaccgccagcctcttgaaaccaaagtgcatgccaaacagtctcccgtcccatactgccatacatacacacacacacacaagagtacacagctgaatatatatacgtgatttccgtgtgactacatatactcaagctcacgcacgcaccgtgacctcacttctgatccgcgtatatatataatctgcacacacattttgctctcccttttccacgtggggcgagacgtacgtggcgcgtggccatgtacgtacgtacgactcgccgatggaaacagcaacacgcacggggaaaccgacgcgcatgcgcgcacgccttgatcgaaacgccgtggcgcgtcgaatgatcgcgtggtggtggtgaaaaacccgcacacggcgctcgcgcgcgccgcgcagagaaaaaaaaaatctccggccgcagcagaggcgcgcgcgctgcaggttgcagctgcggttgggcggggcggggcggatgcgaacaaagctcgcgaggtgacaggatagcacatgcgccgatggccgcggaaggaaaggctcggaagcagacggacggcgcggccgcccgatgctggtccgcgcggatgccgggttggtgtgggcagcgacagctgacaaaacgtacggcatgatgatgtgcgtgtgttgctcctcatcctagctagtagtacgtactgtactgtcctagtagcaagcaagcgaaacacggcacgtagctaggagtaagactaaagcgcagctaccaagctgtacataacatatatacgatcgacgatcactaaacctcccagcgctgatcgatcgatgggtagcagtcggcaatgtgtgtgtgtgggtagatcgatggcacgggttaaaccgatcttaaaagaaaaatgacagcacgaaattccaacggcacggagagtgagagatcgagtacgttacaaatacgtcagtacgatccggaatcgatcaatcgtacgtgcaagttgtatagcatagcatatgtgtctgtcttctcgattccctgaaaacgggagctttgcccatattcgtcgaatagtagtaacattacagtaccatttttcttggacgagcctttcctaattcatacagcacgatcacccattgctagttccgatcgatctggatatctgatcgagagcgccttctccactccaagccgcgaggcgatcgatcaccattcaccaatttcaccacttgctatactagcttagcagtagttgccattcaggggaagcagcagaatggaaatagcgcgcggacgcccacaaagcgacgacgcgagcgaccaaattgcacccctaaacgacagcgccttgtgctgcagcgtccgtccgtcgtcgtactgggctattggcatactctctccgccaaaaaaaaaaaacctgattttcgtgtccaacgttgtactgtttttcttatttaaaaaaattatgaaaaaaattaaaaatacaaatcacgcataaaatattaatcatgttttatcatctaacaacaataaaaatacgaattataaaaaaattttatataagacagacagtcaaagttggacacgaaaacttagggtttgattttttttttttacggagggagtatggtgcatccctctcgccccaccccgaaaaaaaaatcttcccgcacagtacgcgcccccacgcccacgtcccacgtgaccggggtccctcacggacggccgaggtgtgcagatcgcgcgccacgcggggccacggcctctctccgccgctaaaaccccccctcctatagctcctcctctcttggcgctagctagctaggtgacccgcacacgccgtcacgcagcgagcggacggccgcgaggagcccgggaggacaggacagggccccgcggcacaggacgtgtcgacgtgacgtgccagtgtgcccgcgtcgtccgtttggtttcgatcgtcgcgaggtacgcgaggagagaaacggacgacggatgcgcgacgaggtctcggtctcgggtcggcgtgaatcgcgtgaagcttccgccttccgcgctcgcgagggcgaaggtgaaacgcagctggtaggcggctacgctggtggtgaggttcgctgtaccggacggacggcgagaggctctctcgggtcggggcgtacgtgagaattagcggtcgacggtcgttgccggcacagggccgggatggctcttctgttgacggctcacctcctccgaggctccgactagtagtgtgccagtagtgttaggttttgtaccgttgtggtgggtacgtcgttttccggttttacttcgaaagaacaccgttggttgcaaataattatattcgacaccaacttagtagtatattttttaaattttaatcattttcacagttttgttacagtactagctccttataattaaacagatgatattcattttattattggttcatatgagcacctcgcgtgatggcgtaagcccttataattctgagcttaattagggagtagttagtatccatatatatcctcctatgaaaatgcatgttgacatcaatattgatgttgattttgcaaggtgggagattttgcaagtctttgagcatgtttagaatttcgaaagaactcatttggctgctatatatacgtacaagcagcggtcaaatgaaaagccctcgtattgtaccacccaacaaccaagaggcaagccaatgccaagtggccaagagtgtgaaaacacttccctgaaaatgctaggcaaattctcttcacaattttaaacgtgcgtaaaatatacgttattagtactacatgttcacaactgtaacgatacgtagcccatacgcaacatgaaaaatatgcatttctcgaaaaaatattaattaatatacaaaatcacttactaacaattaaaatgtagttgtcgatgtttttctattttgaatgtagaaataatcattgagctatttcaacatcatacacacaacgaacaaagaattgaggaatcaactgttatatgtaccaaaccatgaataaattggtatggtaaaaatagatatgtgcaaatgaatgtgttgatttagtattagaaaaattcctgtcattattttatcagaaaagagaaaatatttcataaatgaatacctgagatgtgctaagatttgatcattctgtttcatgcattctagcaaaaacggattctcaaacagtaaagatgaaacatatacagatgaacatttccatacattagatactactttgtgcagcaatttagttagggcttgttcggaacggagggattacacaggattttgtaggattggcaaatcctttggatttggccatgttcatgcattcggttcataggaagcacgtgtaggaattttgtaggaatactatagcaaccctgtgaaaatgcgggaattccataggattctgaacatccactcacacctcatttttttcattagctaccacagggtagatgctaatcacgttggagtgactagatgggaactaatattttattgcttaattatactataattatactataatatatgagatcaatattaattagaacatttctatggtttatatattcatgtattccgaacgcttcatatcatcaaattccattgtttttcaattatacgttttgcatatgcaatcctatattattcctgtgttttcctattcctatgtttttcctatcctgtgatccgaacaagcccttagcaggcacaaatcatggaagcactagccttttcttaacataatgcatagtatttatgtcctcccaatatggttatagctgaatttaatcgtgcatggtggatcgatagtgcattatatacaattaaccgagcattatgtataaaacatgaccataaattaatcgcaaataattgtaatatcgaaaaacgacacagcggacaaactgtatataaaaaagaaagaaatgcacattttaagaagaaaaaagaaaggcaataattcagaggcagcaaaaatcaaaaacctcactacggtgagaaagatgccatggctggcgacatacatgcacaaaaccggctcccttcttcttcgcgcgctccctataaataccttccttcccccaacaccttccccctacccatcgccgccatagacgtacggacggccggctacaacacaacacagtaactgtaactgaagaagccggcgccaccattcccgccggcaatatgctcgccggcgccggcttcgtaaagctcttcacggncgggaccggcacggcgcccaagatggcattattcaagccccttcaccttcctcccctatttgacgacgacgacggcgtcgacgggccacgtaccctcttcctgttggcgcgccccctgtaccgggagcaggacccgatatacctggcgtcgcgcgtagcgttaccggcgccgaccgcgacgtcacgcatcgtcgacagcgcccggccggaggaggctgcaccggcgggcgccggcgccggaagaggcagcgaggcgggccaagatcggtgtttactttgcaacgtggtgggtgctgaacgtgatcttaacatcttcaacaagaaggtgctcaacgccgttccttaaccgggtgctcacgttcaccgtctccctcgacgacggatttgccaatatgcttaccttctggggccaacagaatcgccgaggcgccctgcccccgccctaaacg

SEQ ID NO: 49191 - DNA, 721 bp, Oryza sativa
gctaaagcagtcagcagaatgcgttttagatgtcgcctgagcttaattatacagtcaccttggtgattcggttgtaaaaccactcggatggatatttcatgtgccttgactatatgtttagtttttattcaactaatcacatagtcgggggctacacctaattaggtgtatctagtcgaatgcacctgattttttattttcagcccttcatggtttttaatttcagtactcgggagaccaagcccggaaatatataaagcacttggattaatgtttttagagattacaagaaaagactatttcatcgactataaaggtctcaggaaatactgtgaagattatggataccccatacccacacagcatgtatatccgactgggtatgggggtaccatgtataaatagaatatctttaaagggtttcgggttaatttcataaacttgtatatcaagaaagcacccggattttaagtcggttacgattgtgtttaatctataactgcttattccgttagagaatatgggcttgtactttataatacggaactccttcctctatataagaaggggtctgggtgcctcttggggcacgatttttctcccagattatacgatcaataatacactcggcggatcaatccctagacagaagtagggtattacttcttattaagaaggcctaaacctgtataaaatttcttgtctctaaacccatccactt

SEQ ID NO: 49192 - DNA, 692 bp, Oryza sativa
acatatctacattcatgcccctggtttaatgggatcatacctattatcttaatacgtatatcaagaaagctttatatcacatcaagctccgatccaacactagaatcaatattactcctacttattaggaattggttacaatttgcaacgggcaatgcaacttgcatatttcactttgtgtaaggtttagcgaatacttttagtttatataagcatatatgttgacataagttttactttgcactatgttatgtctaataattaatatccaagtgaaattttataaaatatgagtaaaacttgtagaacttgttgaatcatgatgttttacagtctcattaagatattatgatatttcacgagattttcataggttgatgatatatcgttctgatgttaagtaacttatgtcaacaaaactttggcgcgtaaagcgaaattattaatttgctacactaccctttgtgcaaattaaagcaaaacacgttacattttacactatgcaaattaagtgtaaaatttactcagtagttaatacttgcttcacttcaaaatgtatgacgcacttttcgtacaacaaaatacccgtggttatttgatatgggctaaaatcatgtggtaatttcgtggaactcaaaccataaaacctggggttttctttttttttaaaaaaaaaagaggtagtagtgagg

SEQ ID NO: 49193 - DNA, 660 bp, Oryza sativa
aaaaaaaacaaaaacaaaaatgttgctacctgtggccatacaaggtcagggacgtgacaggactgcaaaacatgccgaaaggaggagtacctgtcctggaaacgtggcaagctgttggttgttttttcagcatacgtgctgtatttttatctagaaaatgagcatcaggacagcacagcttgtgtacctgtagggaagaagaagaagaagaattattcagcagcaaagcggatgctcctcctgctcctaccaggcaggcgcacaacctgccagcgctgctaatcaatctccatgtgccggcaaccagcaccaaccgggagtgccaatacacctaacaggtttgtttttactccacttttaggggccggcaaccagcaccaaccgggagtgccaatacacctaacaggtttgtttttactccacttttagggcccgtttagttccccaaaatttttttttccaaaaacaacacatcaaatctttagacacatacatgaagcattaaatatagataaaaagaaaaactaattgcacagttatagaggaaatcacgagacgaatcttgcctaaatagacagtgattagccataagtgctacagtaacccacatgtgctaatgacggcttaattagtctcaaaagattcgtctctgatgggcta

SEQ ID NO: 49194 - DNA, 572 bp, Oryza sativa
acaaatgggaccaactttgttgtgggctcatgaggaccctgcctaccaagttatacaacaaaattcttcgtcaccgtgtgatagcccaactattaatgacaaaatccacggcgtttgtgatgagcccgtttgtcgccgtgaacatatattatgaccaaggcctccagttattgctaggattggttgagggtgaagtttacgatgactgtttaacgaatttgtcatagatcaatgacgtacggattccctattcgtcacacggaatgcgtagaaagcctatatctattttattgaagccctgggaagcccccgccttccattccccccaacccctctctcaccccacccaaccttgggacttataattggtctgtgctgccatctttaggcattgccggagagaagagatgcttgctagaggaaataaaatagctgctcgtggagaagaagaggtgcatgaatttccatgttcatctaactattaaactatacattggaattttcgaggaatattttaggtgatagaaaattaatccccaaatactaaacccttagaatacattaattttcac

SEQ ID NO: 49195 - DNA, 650 bp, Oryza sativa
ccccgatctatcacggcttttatttcccttcctttaaaccttaaaaaaacatcttctagtttttagagtccattgtctcgtcatgttctgttattataatttttaggagtgttgtcaaccgtcaatattgtatttctctatgatccgcctgttgtctcccatatttattgttattgggattttaaaaattgaatataactatcgttggggttcattttttactttctagaaatccgcccaaccgccgccagctccgccatactatactcatgtatttttattatcattgagattttaaaaattgaacatgattgtcattggattttactttctagaagtcccatcaaccatcgtgatcgtgctacttaacggcttgtctatcgtccctcctcttaatcatcattgggattatatttgtggttttatttatagtttttagacgtcgcatcaactgccaccaacttactcctttacgggcctaatgtttctcccctttttattgttatctgtcatcgttgagttcgagatggactatttttttttctgaaaattccatatttttcattccgatattttcttatctgtaaagtgtattcctacttgaaatcttagaattatttttctattttcaaaatttattttatttttta

SEQ ID NO: 49196 - DNA, 759 bp, Oryza sativa
aaaattagacttggcatatgttgatcgtgttgaggtaggcaattccggattacaaacaaatgctgagggagagagattgtgaaagaaagaaagaaaaaaaaaaaggaggatgagatgaattgaggaaaggcggcaaggtgtagatagagacggagacaatcaacaaggatgaaggaacaagtctgagatggagggcgagaagattgaagtaagcaatgctgggttagaatttagaaatgctgacggagagattgtcagagagagaggatgaattgaggaaaggcagctaagcaaggtgatagtgttttgggaacaaattaaaaagtcgccgggcggccacggccagacgtgtttgttacccgtggcacgtacgagtacattaatcactacatgccagcttacatttctttagctactatatagtagctagctttgtcaacactggtactataaatgatgacgacgacgatgaattcgtatcggagagagaagaagattgcaggagtaattaatttgttgatcaggtctgtatgtgttgtcaaaaataaaagcaggtctgtatgtactgtcaacttaaatgtgagacataaacagtgcaaaattgcacctattttaggattgagggagtactaacacaaaatagaaatagtaatagacctcctcgtgtcgtgggacttggaattggactccctcttcttctttctttcctcttctacttttcttcttttacataatagtattagtattacaatataggag

SEQ ID NO: 49197 - DNA, 574 bp, Oryza sativa
tttccattagtgaaactatgctcgtagcgcttttgtcaactgtattaacaacacaacattttaaggcaatgaagatgacgaaccccagtgaattaccaattcacctcatgaaaaggactacagctttactaacatattgacctctgcatttctgattaccagataagatgcaacaatttgttaaaatattaaatttccaaaatactgctggattcatgattatattatttgttccatatggatagttagcagctttcaacagatctttcatttcaatcacatcaggttttctgttgaagggtctaaaataaagttgctttctcatgattgttggtgacaggacaaatcctacacaggaaccttagcataattctgaagtacaaaggcacagaaagcctacttacataaattgagaggactatggtaacagcaagaattgcataccctgcattatatgcaggaaacatgtgtatgagatgcctcgccacaaagtagcagaagacggcaaccgggattgcaattagagagaaagatagcagagtggccttggcatctggtcccaaagataaccctt

SEQ ID NO: 49198 - DNA, 726 bp, Oryza sativa
ccttcgctgctcctgtacatgtattttactgcattctttagttattcacttcagaatctttcagtttgcctgatagagtataataatcaactttgttttggtctctggtaaaacaaaaaaaaaggccagaagtaaagaaaattataacagcctctagctacattgacctttgacatgtctacaaatcaaaagatcagtcagtggtgtaagctgtctccttaatgctttgtagcagtgacttaacctcatcctttgttaaatcaaagccgccatggatcttctccagtccatcatcagccaagtgtgacattttgtatttttgtttgtcttccaattgtcttatggttgcagcagatgagtcggcaatttcatatagactcttcatcacctcttctgaacgtccatactaaaattgctttctgaacatcctcttcttcattttcctcttctccttagaattaccctccgccgcctgattactgttcaacttccactttgagctattcatatccttattactagagccttccattgaatcagtgaccctacagatcatacaaagaagagaataatcaaattaatgtcgctaatataatccgatgggcaacaatcttgaatcaagtgaaacgaaattaagatatactactattcagacaatatataccgtacctctctgatgtgttgtttgaagcagcagcaacatcagcagctttgcaagcaaattcc

SEQ ID NO: 49199 - DNA, 664 bp, Oryza sativa
ttccattgttatctgatgtgtgaaactatcggtaaaccttttgcttttgcgtggtcctttgtttgctcttgtgagttgtgaagcgtaggctccttgcatcacatttttttctggaatgggtcatgcctcctcttcactaaactctgcctttcttttaagaattgcttggtgttgaaatttttctttcagatttttgtataaccaatttgtgagttctgagtaacctaagttttgaaaatctgctgctttgtatgagatacctttttagataaatccaattcaaagtcaagatttgaaactagaaacaccaatcatatactactagataatgtggagtggataatgctgcacaaactgaaatagggcatcacttctccaacttactgttgagcgatgaaccacccatcattaagccatccatgtgagaggtgtaagttggacttcttaagttcccccatgcaggcatcactgcaacagtgttgcattatcaactttgaaagattttgggtcaatcagtgtccttggaatctaagatgcctttggaactttacctgttatgtgaaaatgattgtattgatgatttgatagtgacaaataaaaaccagttgtaggaaaaagttggataccattgttaccacctttgaattatctttgcgtgagatga

SEQ ID NO: 49200 - DNA, 711 bp, Oryza sativa
gacttgggttgttgttttgaacattctgtcttaatcgagtatgttttttgagcaggcaaacagcaggggagccagtcggcgttctagagctaagatacagaagaaatcacctcgatagagtatcataccaaaggttatcttgctctttggttttcattctttttggtaaaacaggctaacttgtagctgctttcttagcaactccacagaatgtgtaatttctttaggtctccttcaaatgaaggtatatatgcgtatatatatgtacttgccgatttgacggcagtaacagaatgactgcgaattcactgttggtgtcatctgtggactgattagaagatgaccattgtttgcttcccatcctcgatggcaaagccgaccttagaacacttgtacagctgtagttgttgcacctaagtactagtacttcgtattatagtggccttcgctgctcctgtacatgtattttactgcattctttagttattcacttcagaatctttcagtttgcctgatagagtataataatcaactttgttttggtctctggtaaaacaaaaaaaaaggccagaagtaaagaaaattataacagcctctagctacattgacctttgacatgtctacaaatcaaaagatcagtcagtggtgtaagctgtctccttaatgctttgtagcagtgacttaacctcatcctttgttaaatcaaagccg

SEQ ID NO: 49201 - DNA, 791 bp, Oryza sativa
ccaatctaatagctcattcatacaatagtcacatactacacaattaatatctggtcccatctgtcatacacacattacgtcttagagtccgtgctacagctggctacaaatctagagccccgctacccttacctctcctcatttatcttcttaaaatatatttacagctggcttatagcgtgctattgtacatgctctaaggactccttaatcaatcgtcgtcgtattgaagaaagagcaattaatggccccgtaaaaccaagccagcaatttgatcagcaattctacacaaagcaattcagcaaagaagctactactactacagatgagcttacacctgtaccagtaaattacagtgcataataatgttggatttcaggcggtagctgtgctctgtggagtagagtacctcgcagcatgatctggatgatgttattagggcaggagagagagttgtgccgactttagttcatcggatttgttttcttttatatggctcaacatctccaatgcagtcgcagagtccagaggaaaacggcggtatagaagaaaactggagtattctatttagcacacagattactgctctcttcccttgaaaggccacatgctgatttgtttctcatactccttccgttttgaaatgtttgacacaattaactttttagcacatgtttgaccgttcgtcttattcaaaaatttttgtgaaatatgtttgattgagaaaatcccttatatacccctgaaatttttcctaatcccttctatacccctgaattttgcttacttcc

SEQ ID NO: 49202 - DNA, 644 bp, Oryza sativa
gtcccataaaaaatcaacataggacaggatgtaacatttccttgtaaaatgaatctgctggacatactgggaaacttcatatctcatcctagtatgtgtttatcattagctgccaaaggcacatgaaatgtgaatatgtagtaacatttaatcaccagtacatattactctttctcttcttttaattacactatcaaataaatgtttgtatatagtagtgacaattctgcatatatatcatggatgatgcattccttgtactttacatgtttaatctgtctgcaaacaaatgctaccaagagcgaggggtatggaatatatatgaaattattaacttacctccagcaattaatggatatggaatatatatatagtactctagcataatgtgatcagatcgaactgatggtaagaagggtcaatcggtactagctattgtacatcaactctatccacactaaaccttggaacagaagccaaaaagaaactattaggaaaatataatactaatgaagctatatagctacggtgaatgggtgggtaatggtaaggggggcaggttggctactatgatctataaagaacacgataagtttgattaatatatatatgaccccacttagcttgatctctttaagttattg

SEQ ID NO: 49203 - DNA, 870 bp, Oryza sativa
tatctacgtactccctccgtttctaaatatttgactttgactttttaagaatatgtttgaccatttgtcttatttaaaaaatttaagtaattattaatttttttctatcatttgattcattgttaaatatatttttatgtaagcatataattttgagtaaattccctgtgtacccctgaaaactcactcaatccctttcatacccctaaaatttacccgatcccttctgtacccctgaaatttcaatttgatcccttccatgcccctaccgttacattttccatcattttactgttacgtttggttgcaaatgtcttttttgcccttgatgctttaggtttaaatataagcttcaaaaataattgaaaattttgtttgagtgcacatcgtgtgcattttataaaactaatgagactaaataattagtgcagaaaattttgacataaattttgaaaataaaataaatgtaaaaaaaataaaatttttatttgaaattttaataggacaatggatttttttatcaggagcattcataaaaaaaaatgttgtgaacattggtatacctatctttatatgaatgctcctcatttttatgaccttttttttaaaaaattaatacgtattttttttatttcattatctaaaaatattttttgggataaataatgcatcgcacaacaaactcataactataatagtctcatgcgagaagcttttatatttttaataatgtaattcatgaatttctttgttcatccaagggtaaaatggtcatttttatagaaaatacacggtcaactaacggtcaactgacgggaggggtatgcaagggatcaaaatcaaattttgggggtatataaggaagtaagc

SEQ ID NO: 49204 - DNA, 619 bp, Oryza sativa
cccaccggacctaagggaggcaaaatagacttttcgagaaggattgatattagggatttgaatttgacgatggattggggatttgagatttggaattggcacggagactgacaacaagcaaagaaacaattttcgcaattagggtttttagaatttaaattttcccgctaggcgccacgatggaacgggcgctacatcatggcttcgatcggccgctatcgatagctagttgagcttagcttgtataatcatcagcggataacagtgatcagccctcaagacacagtgatttacgtggaaaaatcccctcggtgtgaggagtaaaaaaccacgggaccaacggtccactccaagcttccactataatccagtacaaatggagtcttctctagaacatctagaggcacatcacaacaacagctacaacatcaagttacgcaattggcatcatccatcaaccatcaaaactaacaagaggcatatcagcaaacaagcaaagaaatgatagatcctgtcatcttcgtttctcagctgagatctcccaagccacatatgcaaattgcacgaaacatggctgaaatgatgatctatgagtcctttccaacctttccaaaaaaca

SEQ ID NO: 49205 - DNA, 562 bp, Oryza sativa
tagggttagggaattgcacgaatcttaaaacgatatattgggctatccaaagttttactaattttttcttgttttcaggcaactaaacaacacacagccccttaagatttgtatttttaaggctacaattttaagatgtaaatgacacacgatcatacatcactcttagataacacgccaaggccaccacctctttactacatctacctcctcctcgatctacttaactgagaacctctaggaatagtgggacgcatgaggacaagttacctacctgcctagcacaagtaacctgatgctagtcttaggttcgatgaggattgcacctttagagcagggttttaattgggatgaaaattttagtgatttgaggggggggtcatggatggaaagttaggaggacacctactgctggcaggtgggagatcatggttgctcatttcaccagagaagagaagaatagaggtagctctagattgaggttagaaaagagtccacacacacaacacgcgtgcgcatgctaaaatatagccaatattagccactagctactatctctctt

SEQ ID NO: 49206 - DNA, 1135 bp, Oryza sativa
tcctaaattacaggacgctatcttttaaggaaaattagattcgataacttttaactaataattttactgattatatatgttaagtattatgtatgttatatcattatatttatattttaaagtatttttattgatgttaattttatatcggttgagaacataacacgtacttaaaataacgatcaaagtatgttatttaagatcgtatgaaataaatatatattatacttttgactgatcaaccaaccatgaaagactactactctactaattagtactctaattattaagctagtacgtgttgtccgcaatatttggccattaattaattagctaattcatcgtctaataactgcaattatataaaacttaatttcaggaagcgggtggattgcttaaggcaatcaaggagaaggtcatagtatggcttgcagatcagatgctgagagccacggactgagaaaagttactaatattaacgatcaacctacgaattgataggttggtcgagctgcacattgtatcatcttcgtggagctagggctcgacagacagatcgagatcctcgtcaattaatttgcactgcgcctgtatatgtaataatcttccagagagacttgcaataacacggttgctggtaccgtagtatgtcagctagtatgcctgatgacaaaacaaattagtttgctatctgttaattgtaatactaatacttatttaattagtttgcaatcttgcagaatatatggtggcctatctgtagatagtccatgtttgatagagatccaacttctaaatttagcttcaggagttaggtctgaagtggagttgtggagctgcctaaacccagctccacctcaccagaatgtgacaatttaagagaaccactttaccaataaggagattggtaaagtaatgccatgaacccagaggacattaattgtcacatgggcacctcaccaataaggagaacctccaatgtgacaatttaagaaagttgcaaaatctagaatataatatcggcgtagctatttcggacatccgaaacaagttttcgcctggagaatccaccagagacatgggttagagagagagagagaatgttactaatattcgtaatgcccaaaataccaaa

SEQ ID NO: 49207 - DNA, 523 bp, Oryza sativa
ctaccccttaacttcattatcacctgaaagtctaggtccacaactcacccaccttgaggagacaaacaagtctttttaccccctctccttaatattcactgagaagagagatagtagctagtggctaaaattggctatattttagcatgcgcacgcgtgttgtgtgtgtggactcttttctaacctcaatctagagctacctctattcttctcttctctggtgaaatgagcaaccatgatctcccacctgccagcagtaggtgtcctcctaactttccatccatgacccccccctcaaatcactaaaattttcatcccaattaaaaccctgctctaaaggtgcaatcctcatcgaacctaagactagcatcaggttacttgtgctaggcaggtaggtaacttgtcctcatgcgtcccactattcctagaggttctcagttaagtagatcgaggaggaggtagatgtagtaaagaggtggtggccttggcgtgttatctaagagtgatgtatgatcgtgtgtca

SEQ ID NO: 49208 - DNA, 759 bp, Oryza sativa
taaaaagtagaaatattgacataaaaagtcctctaagaagatagagtaagcatagttcaaccggttatttttctttagaagaatctgtccactcagattcaagttctagatttaatatatgcgctcgtatttatggctattttcttatagtggtaggcgacgtacctatcaagaataagacatgtatgctcatcagtgttaggaaacgataggcaaataaacgacaaagaacaatagatcaatcacataagacacgagatttaatgtagaaaactcccaaaacaagagagaaaaaccatgggcgccagtcagcaaaatatcttcactatatcggggtaaggttacaacggcgaacgatggcttacaagaggtatatatgaaggtgaaaccttaaaaggataacgctccgacctaagcctccggcgacgggcctccgcttcgctctggcaaaagctggcctttattatgtgcaaatgaatttggatcacaactcagtaatatggtgattgtgcgcttgtttatatgagcattcatgtctgtatgtactatgttttgaaaatcagaagatatctcgtaagaaatactgatgaagaaagtattttggattaactcttactacagattagaagcttaattagaagcgtgtgcctatgatatataattcataatatgtaagccgaaaagaagaggacactatgatcggctcttgtgccggccggttgagccaaatcaaactcatatttctcctctctcgtacga

SEQ ID NO: 49209 - DNA, 706 bp, Oryza sativa
cgctctcatccccaaactcgcaaccaccgcccgctctcatcccttcacaagtgcggcgcatcggccaacactgccgccgcttcccctcctctcgcactgctgctcctcacgcctgtacgttccgctccttcacatcagccacccccgtcgcgcacaccaatccccttcggtgacctcgctggcgtcgtctgttcctcttctccagattgtctgatggactaccagcctaccactagctacccacgggatgattcctctttctgaaaccatcgccagcaacaagcagtcgggagtatcttcttaagccttttttaagtcctcaaaatataccatcgtcagcttctaagactcttaatccatcatccccgtgcgaccggccaacccaaccatatgcatcatcaccatgattaagataatggaaaaatgccaggtatgctttacttttgacagtacaatattgctgtttcttcacttccagttacatgacaatttgtaaaaatcgaatcagttcttaattatccatacaatatcgtatggaatctattaaggctaggagtcgacaaaatatataagacaagatttcttaattcttatatatgtatatgcaaaattgcagctacactaagccttatgtatttgggttgcctctgtttctactgcagaatttttgcccaccatttctatgaacgagattgatatcgactgg

SEQ ID NO: 49210 - DNA, 752 bp, Oryza sativa
atcatccagtgtgatatcaatacaaataaaaattaatcacaaactgtccaaataaaattaatggcactctctaatataatatatgataaagtattacttgagtgatcgtgcaaatttgttttttgttcgatcacacgggatataaatacgtgtacacacacatatgagtgtatcttctaattatattacataccatgagcccatcggatttttcatgtgaagtttatttaggaaatgtaataatttcacatgttattctttttaaggaatgtcactggaaataagggacaattgattgcgttgtgatactactataaaaaaaagttgcatgttcataaattgtgggagtacaggtaaccagggaccatttatgctggtgacatgttgtacaggaaagacaatggaccatcactgttgcagtggaatctggcatagcaaagcatcagatcccttgattataagagatcaatgtctcccttaattgtcactcacatgttcaaggcagatgaatgaatttattaaaacacccccattggaccatatttgtccaaagattagtcagtagttcccatatgcatttagacaattgtcgtgtgtccgtgtacaaagattatgctttagctaactgactaaccagttattccttatccctggaaaggatcaacgacatttttctagttactacttgggttacacacatacaccatgccgacaaagttgttcaaacagattgttatctgattagagaacgt

SEQ ID NO: 49211 - DNA, 692 bp, Oryza sativa
ttatatcttctgattttcaaaacatagtacatacagacatgaatgctcatataaacaagcgcacaatcaccatattactgagttgtgatccaaattcatttgcacataataaaggccagcttttgccagagcgaagcggaggcccgtcgccggaggcttaggtcggagcgttatccttttaaggtttcaccttcatatatacctcttgtaagccatcgttcgccgttgtaaccttaccccgatatagtgaagatattttgctgactggcgcccatggtttttctctcttgttttgggagttttctacattaaatctcgtgtcttatgtgattgatctattgttctttgtcgtttatttgcctatcgtttcctaacactgatgagcatacatgtcttattcttgataggtacgtcgcctaccactataagaaaatagccataaatacgagcgcatatattaaatctagaacttgaatctgagtggacagattcttctaaagaaaaataaccggttgaactatgcttactctatcttcttagaggactttttatgtcaatatttctactttttagttttaattcatcagtttatgtccttgaataattatcataaacttatttccatccttcatccacattaccatatcaaacacattaccataactctcacgcaagtaaggtgaaacaaggac

SEQ ID NO: 49212 - DNA, 746 bp, Oryza sativa
tattagggcaggagagagagttgtcccgactttagttcatcggatttgttttcttttatatggctcaacatctccaatgcagtcgcagagtccagaggaaaacggcggtatagaagaaaactggagtattctatttagcacacagattactgctctcttcccttgaaaggccacatgctgatttgtttctcatactccttccgttttgaaatgtttgacacaattaactttttagcacatgtttgaccgttcgtcttattcaaaaatttttgtgaaatatgtttgattgagaaaatcccttatatacccctgaaatttttcctaatcccttctatacccctgaattttgcttacttccttatatacccccaaaatttgattttgatcccttgcatacccctcccgtcagttgaccgttagttgaccgtgtattttctataaaaatgaccattttacccttggatgaacaaagaaattcatgaattacattattaaaaatataaaagcttctcgcatgagactattatagttatgagtttgttgtgcgatgcattatttatcccaaaaaatatttttagataatgaaataaaaaaaatacgtattaattttttaaaaaaaaggtcataaaaatgaggagcattcatataaagataggtataccaatgttcacaacatttttttttatgaatgctcctgataaaaaaatccattgtcctattaaaatttcaaataaaaattttatttt

SEQ ID NO: 49213 - DNA, 599 bp, Oryza sativa
ggctaaaatcatgtggtaatttcgtggaactcaaaccataaaacctggggttttctttttttttaaaaaaaaaagaggtagtagtgaggcatatacacaggcgcacgtacgtacctgacgatggaggaggaggaagaagaagggatagtgaggagaaagcgggcatggacgacggggcgattggcggggtcggcgcagtcggcgaggagctggaggtggatcagcacctcctccgccttgccgccgcacatgtccaccaaatacctcgccggcatccgcctaaagtggagacggagctggcgttggagctgatgatcatgctgctgcaggaggcctccactctccgccagccgttcgaatatcctctctgccgccgccgccgcctcctcctccgtcaccggcgccattaattgctatatatgctacctggtacgtgtgcttctcttctctcgcgtgggctctcctcccggccggaggccatcaattgtggctcattcttcatatttatttactctctttctactcctaagtactaagtaattaagaggagtcttaatggttaagtatatattaaccgcctccattgatcgatccatcga

SEQ ID NO: 49214 - DNA, 661 bp, Oryza sativa
agggcgaattcgagctcggtacccgttatcctacttttctatgcgttatttgtgctggcctctttaccgggcaaccgtgtgggataaatgtttcatgccattatcgatggcgatatgatgatgctgaccccccaccactatcatattatcgatggcgaagtggccatgtgcttgtgttttgaatggccaaagacattaattaagtaagaagccgatgctaattaagaaagttttaggaagcaccttaagcactctgtcagaatgctcaagtcatcttttggactatctgttgtctgctttgagtcaacaaggtgtgcattcccctgcttttacagatctttttgacttgctatccaactttaatttttatccgtcatatttatgcattaagccacaatcattccttgcaggaagcaaaaagagcttaagacctgctcaaggaccgcttcgacgacatcttcgccaggatcatccagaagaggaccgagtccgaccatgccgccgccgccggcgagacggcgtcggacttcctcgagtacatgctcaagctggagaaggaaggcggcgacgggaagaccgccttcaccatgaccaacgtcaaggccctgctcatggtaagtgctcactgctcagtcactgcactgccggcgtcggtgtcacc

SEQ ID NO: 49215 - DNA, 651 bp, Oryza sativa
atccgattataccgttgtgtttgtaataattaaatctttacaacaagatctcacatgattatattttaatgaaaaaccacaaattactttatgatatgtctaaattacttttatatttcactaaattacttctcagacatataaaagtaaattcagtaaagcctaaaagtaatttacatatatattatagaagtaacttataacaaaagaaagaaagaaagtaactttaattaatgccttatttcattgaacaaattatcatatatatatatatatatatatatatatatatatatatatatatatatatatatatatatataagttacttttatatttgattaaaatacttcctatacattcataatgctctgaggtgattacttttattattatttcagttaattccataatttgtgctggttaatttaatttctagatagagtcttgtttttatctctacaacggatttacttcaaatgacatgctaaagttaccttcgttttgttctaagttacttctataatatatgtaaattacttttaagttttactgaatttacttttatatatctaagaagtaacttagtaaaatctaaaagtaatttagacatatcataaaagtaatttgtgatttttcatcaaaatataa

SEQ ID NO: 49216 - DNA, 596 bp, Oryza sativa
attgtggcttaatgcataaatatgacggataaaaattaaagttggatagcaagtcaaaaagatctgtaaaagcaggggaatgcacaccttgttgactcaaagcagacaacagatagtccaaaagatgacttgagcattctgacagagtgcttaaggtgcttcctaaaactttcttaattagcatcggcttcttacttaattaatgtttttggccattcaaaacacaagcacatggccacttcgccatcgataatatgatagtggtggggggtcagcatcatcatatcgccatcgataatggcatgaaacatttatcccacacggttgcccggtaaagaggccagcacaaataacgcatagaaaagtaggataacgacttaacgagtcataaaaaatagagaaagaaatgagaaaaagcagggaaagaagctttgcattgcacaccatattgtcttaaactcaaaggacacagcatacatatatgaatattggggcatatgacacagcatatcggcacttataatctcttctctactattataaaaattaaagatgtttttgtcagtattttggtatgtcattcgtatttgagtcgg

SEQ ID NO: 49217 - DNA, 608 bp, Oryza sativa
ccatagcgtcggtccgagggtgccgagccactgtgcacctagcacaatgtcgtagccgttaagcggtagtgcatagaagtcgatgtcgaactcgtgcgagccgatggagacgcgctgtggcgggcacctgcccggtgacggcacgcgatctccattggccacggctactctgaggccggggcggctctgtagagggaccctagcctggcgcgcagggtttttgaataaaaattgtgttgaggccgagttaaagaaggcgaacaggttctgcgagccgagacgagcccaccttaattctatattaagggggaagaattgaagcgagagaaacgagcgagcgcttaatctagcgtcgggcggtagcgcagcctcccacgccgtatagcctgcatgcagcccgtgaaggcgattaaaaacgcgttatatgggccccacaaggaacccgcctgatcccatcctccagctctcatcgcatctcatccaactgcccaaatcggcgtagacgctcacgttcctcttcctcttccgcacctacgcgcgaaatcacctccagccttgggcgtgaaatcgccgccatacatggtgttcctctccctcttccaccccta

SEQ ID NO: 49218 - DNA, 518 bp, Oryza sativa
ttgtcactcatatgcttcttgaaaagaggaatcgatcgaaagggtagtcctcgctgcttgcgctgtggctggacctagacgagctccgcattgaggcgcggctttccactgttccagccaagatgacgcgggtagcctcatggtggtccacgtaggatttttttttaagctaaaggagagagaggagaagccggtgactaattagggcaagtgctatgatagatgtgactaccacatttaaatttatctatattattcactcactaactatgagacaaaccatacaatatatcacctctaatacacaaataccaatatttctaatactctcacattcttcttgaagtttgtgtggaggttgcctcttggtttaagggtgtctcatcatctctctcatcacttctctcctctacctcatcactcaatccaatgtggcacttttagggggcaacacatggagcattagagcaaggctaataatatagccagctgcttactgaatagatctttacaggcta

SEQ ID NO: 49219 - DNA, 517 bp, Oryza sativa
gcgaattcgagctcggtacccggtccatgacgtacatgtcaaggcagcaaaacataaaaactgacagcaactcatgttcactacagggcccacaaaatcatctcaaaccggatggattagcggcctcttgtgcgaactactactgccaatcgcacgtcttcacgatgtctgtctctactagggagtatactggtcttttcctggacagaaataactccctgtccatttcgctcctaatatcatacaatcgttttgacccttaatttgtagccgtcaaagacggctccaattcgcctaccacgacgatgacatggcaattatttacgggtaataattccatcatgctagcaaatccaaacttaaataagagtatagaataagcttgcgttctgtcgccacctagatccgatcatgaatcatgatctgattaacttgcatcacacgcgtatcctaattctatcaagaatcctcgcaaactgaaaaaaaggaaaaaaatctgacaagaaaagaagaagaa

SEQ ID NO: 49220 - DNA, 4009 bp, Oryza sativa
agcactaatcaatacattaactgtagcatatgttagctagaccccaaaaggagcattgatgctggctatagctagtctttaaaaaccctggagctgagcttgcagaaagcgcatgcaaacagtgtactgatactccatctcgtaggacggccggtactacagagaagagattagcgatactggaggtaattaaataaactctcatcgtcctgtacactgtacgtagtactgggggtgtacagtaagtaagcttaattaactgaagtgaacggacgatgcataggagtatttatgtggtgtttaagtagccatgtggagtgtgttattactgaattctgtcactgctgctagctccagtgtctccaggctccagctgctactactagcgcgagtagctaacataagccctctccttgagcagagataatatccagatgctgacactgagatcgatgcatatgcagctgggcagagatgaaaaactgaatctgatcgatctggatggatggcatgttgggggggtccttcatagcaattgggtccagcaggagatgatcagcaagctagccgatctaaaggcgaaagccagagctactactcatctgctactctctctgtcttagaggatagcagtaatttctactcactccgtcctataatatactatagagtaaaagattttagataatgcaacacatcttagcaataaatctgaacagacagtctgtccaaatttattgtactagaatgtaccacatccacccaaaataccttattatgggatgaagagagtagcattttaaaaaatatttattctaaaatatatcaaatttatcgtctacttttccatctcttttatatcaaccaactttcagttagcttattgatctattatgtcatttcaatgccaatcatgaccttgtttaggtccaaactttttttcatacttccaacttttccatcacatgaaaactttcttacatacataaacttacaactttttgatcacataggttcaattgcaaccaaacttgcacttttggcgttaactaaacacacgccatgtgaccatgcatgtgtcttatttgtatagtttcacatatctgcttgaaattaaaaagcttcgagtaccttatactattttgtaacggatgtaatacctagctacagatagctgcaatgctgcagccaggtgcagtggctttgaattaatagatgcaaatgcaattcttaaattctgcaattgcatgcatgtactatccagccgggtggcacgcccatgtgagtgcccggccgagtaggaatagcaaagcaaggacttatttggcacggctagggcttcagctccatctcttctggagcttcatctaaaatgagagcgcacggagctaggtagaactctctcacaaaataaactagagagatggagctgagtttagacagctccataacttcactccagacccaacttctagagctaaatttaggagtttggagctctaacaaacaggcatccaaataacttcatatatatgcaagcattgatgcgattaataatattgcaaaagtaacagtaatagctcggctctggatcaagaacgtacacgttgttgattgggaccagttcgtccggcagtgctctccccaccctatccatggctatggattccccatgaagaaccctacgtacgctgtctgcaataagctactcctactactacactactactgctacagctaggtctatggctgctgcatctgtctcattgctgctgcatgcatcgattgctccatgaatcgtccttggcaatggccggcatgtattggcatttctctcgatcgacccaatacaatgcaacaagctgccaattcaaagcatgcattgagtactctcgttaagagcaagtttaatttaatagtatagccaactatagctcgaattcatctatagccaatttaatagctcattcatacaatagttacatattacactattaataactggtcccacctgtcatatacacactgcgtcttagagtccgtgctacagctggctacaaatctgtagctcactgctcttctctctcatcatttatctccttaaaatatgtttgcagctgatttatagcatgctattctacctgctctaattcgttactacacttttatcagagatttcagaagaacaacggcgcggcaaactagctagccaagaaacagcagaggcatatacactgtagcggcggcggtaaagatggagaaggccggccatgcatgcatgcagcattgcgcagcagtacatacggtagctacagctgctgcactagtgcaaactgctaagctttatttagaagcaagtttaatagtatagccaaccactggctccaattcatctatagataatttaatagctcattcatataatagttatatactacactattaatacctggttccacctatcatacacgcactgcgtcttagagtccgtgctacagttggctataaatttgtagcctgctgttcttatctctactcatttatcttcttaaattatgtttgcagctgtcttataggctgctattgtacttgctgtaacctttctttctgctctccttctgcatgctacatcgtccatgcatgtacatgtctacacacacacgtactcctatacaattgtttctggctggagctagacagacagggccggaaaaagtcgatgcagtgagatacaaattttgtattgttcatttgtatgtcatgtgtaatttgttcttactaccaagttgttctctctttactactgtagctggctatagtagtacaactagatggagacgagggtaaaggagataatagaagacagtagtaccactgcacccgtcacatccatgcttccttccttatttctgccctttacaaagggctgcaaaaaactcaagggagggggaaagggaatgtgtgtactcactttcatttctttttttcttttttgcaagggaaaagaagtatattccaggacacaccctttactttgcatatatactactgctcccttggccattatcatttccaagtttgcccttatgtagctcctttgcaccctcctagctaccttagctggctcctatatatatgtggggtctgatcagtccccacaccttggttacactttctagggtagtcagattaactaagagtaattattatttatattttataatctaataataacaaaaatactaatcataaaaagtttcaaataagacagatggtaaaacgttaaaaaaacaaactcacaactacacttaaatggaatagagagagtagctaattagcgagtgagtttcaaatctcacgagaatttgcatgattggttgagctatggcttataaccataagtagaaaaataaacaaattaactataaaggattttagggtgtgacttaacatctgcttttagtggtttaaaagccaatactgaaaaattgaaaacaatgaaaagattaatttagattttaaattgtggttgcgcagctgataagctgacgagcagccaatgaaagtgactactgaaccgaacataccaaattaaaaatggaagtatacatatatatggtgctaaaaaagaaaagcaactcatattggagaagagttgcctagatttgataatggtgtcatccattattccacaaaaaaaaatcttagaattaaatggctagtagaatttttttgagagaagaaaaattaatccttgttcattttcaggttcctttttagcatactactagtactaatttgtactcccattgaactactagaaaggtacctatattttggaatggattcagtagtattatttatgctttctccttataccaatgtaggagtactactttttatttgacattttgtgcagtaattgacaacacaattaattttctgcagcattaatttggaaaaaaaagttttgtgcacattagctgaagcacctaaatatataatttat

SEQ ID NO: 49221 - DNA, 5524 bp, Oryza sativa
cgcgtagaacgggtgcgcggccggcggcggctgctgctgccatagctggaacccgccacgggacgcggtgctcgggtacaggaacgcggcggcggagtcggtgggttaacgggaggtcggtggtggtcgtcgcggccgtgcctccctccgccgcctcctaacgggaatcccgccatgcgcccagatccatagggtcgatcaatccgccggctcccccactctcgttccctccatgccgcttccgcctccgcctccgccgccgccgccgccccgcagcatcagcatgcagccgccgcgtggcgatcgaccgaccgatctgggatagaaaaacaaaatccacgagctcctaaagctgcctcctcttgctgctggtggtggtggtggtggtggtggtgggaaattttggcttgtgtgcggcgcggcgcggggggtgagagagagaggaggaggaggaggacgcggcggaggcagctttttgggcggcgagtgatgaggtgggggggtggagttaatactactgggatgggatgctagggagaggaggaagaggagacagagagagagagaggaggaggaggaaggagggtgagatttttactgtgttgcgttgcgttgggatctttgtttgcacgcaaaagcacaaaggcgcagccggcgccctgcctcccgctgcaacgccaactgaataaaaacaaggcactacctgcactgcactgcactgcactgcatgcagctagctgatgcaggggctgcatgccttccttcgccctcttgcttcgataaccaaaccaaaatactactagtgagttgtgatggaatcatattacaaaaagttttagaccctctcataaaaattttagtccctcctatagaagttgtgatggaatcattgtgcttttattagagggactaaaatttagtcattcattcccaaacacattaaccccccccacccccacccccaacacacccaagtatagctgtcgaccgaattaccttcctaaattaacaacaaaactagatatttgacatcctcaaatctctaaaccggacaaataacccccatcaatcctgtagaaggtggttttaatcctgcatggcatcaacgagcgtgataatgtattaatccattcaggaacatttcaataaaataaatattctaaaattagatggtcccacatgccatgctcatgccttttcctttcttccaccttccctctcttcgtcctctccagggtagacaaggaaagcagcgggggaagcggcgaaggcggcagcactgacatcgacgccttcaagacaagtcagaggaagaggaaaacggtaggaaagtggcggtggtagcggcaaggcgcccaccggatctgccctctccatcatcagcgtcaaatctgtgggagcatgccggtgccgagcggcagcaagcgcggtggggaaggggaaccacgcaggtactcgctgtgtagcgacaaattgcgtttgtccacgaacatgagggatctcgcgcgttgccgacatggcctcggcgcacgtctccaccacttgccacccctatcctctcttccacagaggtgatgcggacactggcgaggcaagtctcaccactgcaaacccagtcgcgctcgtcggcgcttgctgccaaccaaagcttcctctcgtagctcctgtcactacctggaactcactcccagccgcaccctctccccgccattcccactgccgcctggagcgccctcccatccgcgcccgcctcggactggttcccctcctatccacgccagccagccgccagctggagccacccaaccgcacctgcagccactcgcctccaacgctagcagcacaaagaaggaattaatatgacatgtcgctgccacgtgtctgccatgtaggacaaaaaccgctccgaattaagtcaggggggtaattcgtccagtttcaatagttcaaggtttaatatatgtctggttttgtggttcgtgtggggttaattcgtattgtcgtaatagttcaggggtaattcgcacttttcttaatcatatttagggctttgtttttgtgatggaatcgtagtatatactagtgtttgtttgagtttgctaacaccacatttgagctgacaggccaaagctttggtacacagtgataaaatttcgtgtatttatcatcacaacttttaaaatatgacgtgtactgggagaacattttaaaagtacgatgaaggcaggttttaaaaagttttcgagcaggtcgcagcaggagcagcgattcatccgagcgacgaggcgccgcgcgcaagggcacggtcttccgtatacgtattccatcccacatatcccaccgtgccgccgctccgcacttaattttaattgttttctccccgaggcttaaccaactttaattgttttcgatccatcagggctttcctgcctagcttttcagatatacgtatgtactgtactgtagtacatgcacctcttcagctgaaattctgaattgtacacacgtacgtacgtagagaggtgtataatacggacgtacatgcactacattaactctgatgcacttggacttcacacgtacgccaacagatcatatatctagccagccgcgttctagcgccgccacgtctctctctttctcatcacgtactactcctacatacttcctccgtttcgaaatgtttgacaccgttgaccttttaatatatatttgactgttcgtcttatttaaaaaatttaagtaattattaattctttttctatcatttgattcattgttaaatatattttttatgtaggcatataattttacatatttcataaaagttttttaataagacgaacggttaaatatgtgctaaaaagtcaacggtgtcaaacgtttcgaaacggatggagtaatccctaaggttttatggaccagttttcgtagaaagtcaaaatggttttataaagtggctagctaacgcgcttacccctattgtttctatagggaagtgacagccacataatcgaaatcctgaatattatgcaaagctagtcgattttttttggcatatctccttatcacacatagtcgttgcatacgggtcgtctatctactccctccgtccaaaaaaaaaagataaaccctaatttccgtgcccaacgtttgatcattcatcttatttgaaaaaattataaaaaaaattaaaaagataagttacgcataaaatattaatcatgttttatcatctaacaacaatgaaaatacgaattataaaaaaaatcatataagacggacagtcaaagttggacacggaaatatagggtttgccttttttttttttggacggagggagtatctctgttctctttcaacattaaatggaaaataatggatgtgcttgcttctcgagcttataaatgacacgtttttacaaaaataagaacaaattctatgtagtaatttgttatagaactattccacataattaatttactcctcgcttgcacactcacatcattttcatatatcatctagatattacccgtgctaatactttattggtttgtgtacgtacgtagctaaatatttgctgactgatgctctctgtcaatggaagaaggaagcaggaagtcatccaatccggtttgtaggccgagcaatatactagtactagtccatgttggaccagccgtggacagtggacttggcttcaattcttgcaaagagaaataagaactcaccatttgctatactgtgacaagtcacataaggtgtgatcaacagtttattggttataactatgataaactttagctagcaaataaaattacgatgcgtgaaccaatgcactaataaagtgtgacttgattcagcatgatattcaatcaaacactaacgtaaattttttttggcacgtttaaggcttggtgtggcaaactactgtcaccaaccaaacagaccctcgaactctcagtactggagtactagtagtagtacacgcatgatgcaatggttcacaatggatcgatcgatcgatcaagctggagatgatgttgccaaccaaggaaccaataatgcaccaacagcatcgcctacaccttgctgtagatgatgtacaaaattttcccgtgctgtactcgatcgctcgcggcctggctacgaacgtgcgacggtaatattaagcaaagataataaactcacaccgtcccataatataaatgattttgagtttttttttcactgtttgaccactcgtcttattaaaaaaaatagttttttgacttactttattattcaaaatactttaagcacaactttttatttttttatatttgcataaatttttttaataatatgagtgatcaaagaatataagcaaaaatttaaaattccttatattataggacggaaggagtaaatattaaggtgcccggggtccactattcggccgtgaccacgtcctctctccgttcctaaactgcatagaaattataggactagctagctacctcctccgtcccatagaaatcagcatagtattgatataacacatcttaatattatgaattgggacatacatctatctaaattcgttgtattagaatgtgtcacatctaattctagatttgttttttcttggggcggagggagtagtgatcactccctcgttttgctactagttacgacagattttaaaaaactagaacagtagatgattatttggaattatcgggaaaaataatctagcacgacatgcaatctggtttctgcttttgttttaacacagtacaaatgtagacgctcatataaacatatgcatactcattcatataaatgtacgcacgcacaatatactgctatgagttcatgagcaatttcgaatactgaaccgatacatctcaagatttatgagccctacataggtgtttcgctattgacgagctaattaatatcttgagatttataaagtctatgagttttgaacccggtgaaaagattccaccacactaagaacctaacaagtttctggttttgacccaacaacatactagtccctccgtattttaatgtatgacgccgttgacttttcgaccaacgtttgactattcgttttattcaaattttttgtgcaaacatgaaaatatttatgtcatgcttaaagaacattttatgatgaatcaaatcacaataaaataaataataattacatgaattttttgaataagatgaatgattaaacgttggataaaaaattaacggcgttatatattaagatatggaggtagtaataactaagtaaaagaataaaacagacttataagatttaattcatactctttttacttaatttgggctctagacaaaccggccccgtgcatgcatgtgttggttgttttacccctgcaactatcaactatgacaaggtgcgtgcatgcgtcctagctaccgtctaccgaacgtttcaacgacgacgtcgacgaccactcgatatatgggtgctaaaggggttttcctagctatggctactaagcta

SEQ ID NO: 49222 - DNA, 4331 bp, Oryza sativa
aatatactatggagcatagtacactaatatatatttgtgtagtacgcactgtacgtggtagggctcgatctccctgaacaaaattacttcgttaaatgtcgtgcacaaatataatcggcacatgctacacatgtatgcacatcgtttggtgtggagatgctagatgtatataaagcaggctaacattaatttgaaaagattttctataaaatggatagttgcctaggcatttcacagcttatatatgtttacatttatagttataaattaattcttttttagatgaaaatttaacaagagcttcaacctcttagaaattttcctttgagtccatctctcttatccgattcttgcatttttcctgcggtccaatcaaactatcatttttatgtttttttttattttacaattacattcatgtcagaatatcgtgtttttcctatttctccgtttttccatttctacgatccgaaggggccttgactccttgagaatcgtacatatagagctgttccatatacttccatgtcttgtagtaaaacagtaatatggatttatggtgttgtacgttggacgacagaacgtttattacttttccctacagtacacattattccatcctttgcaatttactcctacatcaagtacgtggtcgatctgagagacccggttgcctatagtcggtcagaaatctggtcccagctgctgctggtggctgggcactgtttgaattaatcagtgagagctatagctgatgctgatcgatgctggaaatctgcaatcattcagtatagctaaggagggcccatacccattacgtgaaaatgacaaagcgtttgttgtatatcgatctcgacacagtagttcatgtgtcatgtgcatataattaacaggacgtacgtacgtacggcccgatcgtacgtgggacatactgctgctagctacatgtacagccagcggcatacagtgaaaacaacaagccaaaaattgaaatgcatttgcatagtagtactcggcagtacgtttgccgggtaaattagttaactctcatcaactagtattgcattggttaatgaggatgcatgcatgtagagcattttgcatgcatgatctcctattcacacaagatgcttgcacgggttataataacgcaacgcactacaccagtagttatgacttaatgacagagaaaaggatgaattaacatgcatagttatgcaacacacagagagcatatgcaggagtactgatcgagaggaatataggagtctcttcagtctttacttacactgtgagcaactaatactccatccgtcccatattaatatagcaacctaaaatcggatgacacaacgtatcctatttctataaatctatacagagagcatattcagattcgtaaatcctatattactatatcctaggacgggggagtaatacagtaaccacacaagcatgcatgcatatctcatcatgcatgtgtccatataagccaaaagccagctgcaagattgcagagatatcaatcgatccggacaagaaacctgagtcagatccctgaaagaagatggtctctgtttacatcgacaatacatgcatactactgcactagacagtactccatgagcactaccatgcagctagcaatatacatatactgtactaaggtgagcaatacagtaacgacacatgcgtatattatagctgctgctggttccttggatccgtgtggctatatatacacctacctagctatatacacgtacgtacagtacacggggaatatcgagatgctgtatggaataattattggcttgcatattgcttctttttttttaaacgacccattggcttatactcctagtacgcaagtatattgcaatatatatgttgtgcaggaaaattactacaagtagtccctaattaactgtcaaaatgccatcatcgaataataagtcaatcggtcgatcggtagagattgctgatcctatgatatgcactagagctacatagactacagtgagactctgtatttgggcatgcatcttgttaattttactcttgagaggtcagctaagagagcttcgtgttttattagctgagcgagcatatacatgcaggctggcgagctagtagccgcggccagatcgagagctagctgcgttcttcttcaattaattgcttgcgcaaaacatgcacacccgcccgttctgatgagcgcatgtggcgcggtttaatgcaattttaattatccatctctcgtcgtttatcgatccatctgcgcattgcatatcaatatcaaaccagtgccgtcccctctgataaatcctagtactggtaataactacttcatctgaattgataatatttgtcgttttagataaagatattatctcaaaacacaattgtaaccattattttttattataatataaaaagaatatcaacaaatacaaggtttcattgaagtatttttaagactaatctatatatagctaggatcttcatatttctaagataaatattttagaaattatttatagttaaaaattcaaagtttcacatcactcatgtccaaaacgataataagtattatcaacctggaggaagtatgtgttttatttttaaaactaaactttggccaatgttttctcataaaattgcaaacacgtattttattagtatatctctaatagtcataaaaccaatattgtgtgaaagtacttggaagtacttcgcctgtttcaaattatgttattctagcaaatcacacataaactaattagaagtgccagattatattgttacctttaacaagtactccacccatctaaaaaatctagtaatagattagacacaacctatttcaacgaatatggagacggggtctattcatatttatagtactaggtcgtatcgtcacatccgatagtaagttgatatatttttgcgatggatagtctagtgagaatcataactgtattaataattgactacattaatgaagttagagagggaatgtcacctctaaaagtgatttggaacatgtgaacgacaagcttttgataaaaagaataaagtttaaaacgacatgtaacataaatctaagggagtataagcctaacaatgtcccttcattcgtttttatatagcgttgattagttcaaaaatgaattaaccaacatcatataaaaaaatacagagggagtaaaatttatagctaggctaattaaatgtatctatacattaatctatttatcaagatatatatgacttataaagtgcacggagaagtatgtatgtacaacaatcaagtgagaaaataattactcatgttaactccaaataaacctcaaatagttggtaagtactaaccatacaaaaacaaccgcggattcgtatcatgcatggggccatcaacaaatcgagaacaaatcaaaaagtccttgtctccgtaaaatttactactacgactgccactatagcagtggctgttaagatgcatgagactgtagcagtgcaagatggcagccggctccattgtagctgtatagtgcaagtcctacatggtcgatgaatgcatgatcaactacaggcaggcattgacaaaatggccgcgacgcatgcagcagtagtactccctccgttcccaaaatgatcatcatatagtttttttagattattcctaaataatcatcatatttatatttattcattaagtctattcgttatttgtgcatttgagtaaatagacattgatgcatgcattcatgcatacaagtatttataacccacatgcaatatcttgatttgttattggctaggaaatagtgggtatggtgcatgcatcgaatttgttgctagagtaaatatagtatgagagagttattagtttttcttgatcttgatgtactacctatgaaatatgtagatcaatttggaatggagagagtattaatcttgatccgatccgttagcattgacaaacgtgggagagatccgctgtgttcggattccatggatgggagctaatccctcgtgcacggaaaacggagcgattcattagcacgtgattaattaagtattagctatttttttaaaaaaaatggattaatttaattttttaaagcaactttcatatagaaactttttgcaaaaaaacacaccatttagtagtttgaaaaatatgcgcgtggtaaacgagggagaggggatgggaacatggggttacaaacacagcctacccactagctactcgatcgggtgtataaaacaaagcaaattaactcgaccgcagtaataggctctcgtctttgtttagatacgggata

SEQ ID NO: 49223 - DNA, 1301 bp, Oryza sativa
acatatactactgtaaaaataatatctagttacacttatcatacacatattatgttctatagtttatgttatagctggttataaaactatagcctgctattcttatctcttctcgtttatcttttgaatatgtactgctattgtacctgctccgagtcacaaggagaggtgagctgaggtgagctgcggcgacgtccaatcgcggcggcagcggcggagagcgagcggcagggggggtgggatttgtttgtcttttccaaatgcggcggagactggacagacggcgcaaatccccacgcctaacgaacacccacaccggcccacacccacggtaaaaataaaaaaaaaaagaagcaaaagctaggcagacgacgagacagtgattgtgtgatgaatatctcctgcttcgtttccttcggatagcgtgcctcgccttgcagctgcagctgagtaccgggtgattgaaaatgaccacaatctttttttttttacagtgccttccctccatctgagatcatcatctcctgtcctgtgtgcactactaaacctgtagtagtattttttttacagtgccttctaaacctgcttaggggggtagtaatttaattactagcacgggctcaactatgggattgctttattacgctgctttagatgaagtaaaccggggcgtccactgataggcgcctgtgggccaacgttcctcgatcgatcttctgctggcttaacatgacatgagtgcttcatcagctgaacccaccagaccagtcacctgtttcgtagcggaaaccatcacctgctgacataggaaaatgctaaaaggacgttctctctcgtttggacgggatgatacttctaagatatcatctaatatctacacaattttcattctaaaatataagtatttttagctattaatctggacaactccaaaagttattatattataagacggatgcagtaatatataggtatcggttgataccccgttcagatgagatgatacctctatacctaggtattaggtagtatcattttatttgaacggaatattatcctgtagcattgcccgttaacatatcctactatctatatcgatcaatccttgttgcattcgctggcttgaattcttcattcttcaaaggaggcttgcatatgcatcaccgtacgtgatcgggacggacgacacttgcggcaaaagttccaatgtggtcgtgggctcggaataggccggcctgctactctctacatagaatctggcccaatagatactctaggccgaacatgaccaattaatccag

SEQ ID NO: 49224 - DNA, 1327 bp, Oryza sativa
agagaaaattgtatttgaagtatatgtggatgatgcctcttatagatggagtggtagctggtttatacaaaccagataccactatctgtgtaattacgtccatatttgagggagtgacgtctcggttcgtttgactccattcataaaccacgccggtgcgcatgctatgctgaagtaatctcgtgttgggccaacgttgacaaggaagaaattttatcacaaacagcagctgctacctctgcaaatctctatgaaatcagcgttgacgctgacgtttttgtgacaaatggacgacttcgatcgtaattgggcactgtgtacagcgattcagaacgaatcaacgaggattgacttatcgccttccgttacatcattcctcaagcaatgcttcccattattattattattattattattattattattattattattattattattattattattattattattattattattattattattattattattattattattattattattattattattattattattattattattacacttctctccggttccttaattcctgacgtttttgataagattaaggtcagatttgtgtagctttggcaatcaataacttcaaaagtatttagtttaaaagaactaaaacggagttgctagaaatataatgcaatatgctacagtcgattttttttcagccacttacacagtagttacacctcatttacaccccacttacatatgtaattagtatgtaattttcgaatttacatatgtaattttagtacttacatatgtaattttgagacttacattgtaaatacactaaaattacatatgtaatttagggacttacaatgtaaatacatgccgactattttttgatgaaaaatatggcgccataaatatagctacacccaactaaaataacatacatatatattatctttcaaagttttataataaaagtaaacatgtatcttttatggtatatattataaagaaaaataagatcaaatatatattttgaagaacgtatcattgtctcaaacaataaaactatggaaccggagggagtacatcatttgcattatgcaaatcaacaagcaattaatcaagcaccgagttcacaaaaaaaaaaaaatcaagcaccgccacggcagctagctagctgcacgtaccaactgactcatccaccatcatcagtgcaatcaatgcagtgccggattattattgtccatacggtgatagtgacacacagacttttgcatgcgtacgtcatcatcaactgtggacgacgtcgccggcgccggacacgaacgcgcacacc

SEQ ID NO: 49225 - DNA, 878 bp, Oryza sativa
taaaacaaagcaaattaactcgaccgcagtaataaggctctcgtctttgttttagatacgggataaaaatatttatatgtgtattcttaatggttcaaaagttttaaaacttaaattctgttcgtgaccgataagacaataagtagataatgaaaactaattcctcatacacacagaaaaaacgaagttcaaactgaatgtaacatattttagtgctacgaatctagttaaatatatgtctaagttcatagtaacaggatatgttataatcggttttaggttagttttttatgggtctaaaggaagtaaattttaaacaagagagggagcatttgattgattttagagagagaggagggaataaactcgtactagtagagtaattttcttttggaaaaaaaggatgggaagaaagagatggaagtccgtggcgtgggccaataatggggcagccaatccaagggcatgcaatgcaacgcatggtatcggagtcggagtaggccacctcgagccgtgcgcgctgtacgacgcggttgactcatcttcccacctcctcttcttcgagaatccccaccccatcgattccccatacaatacacatccacaccacgctggccatagctgccactacttcaatttccccattgcatttgcattgcccaccgggtaaaaacaccattagagcaaggggatgtttactcgggtattatatgagatatagtattggatgttcgggcactaattaaaaaactgattacagaatatattaagcctaattaatctatcattagcaaatgtttactgtagcaccacattgttaaatcatgaagcaattagttttaaaagattcgtctcgtaaattagtcgcaatatgtgta

SEQ ID NO: 49226 - DNA, 580 bp, Oryza sativa
ccgtgtttagattcaaaatatttttttcaaacttccaactttaccgtcacatcaaatatttagacatatgcatagagcattaaatatggacgaaaaaaaaaattatatagtttgcatgtaaatcgtgagacaaatcttttgagcctaattacgccatgatttgacaatgtggtgttacagtaaacatttgctaataatggattaaatagtcttaatagtttcgtctcgcagtttaggcggaatatgtaatttattttgttattagtctacatttaatactttaaatgtgtgtccgtatacttaaaaaaatttggcacacgaactaaacactacctatgatttgcaggtatgattttttgagggggaagatagcggaagctccactacgccacaagtgcatccaacaagttttcaagtttgagtcagatttggtcccttttgaggagatagatgaaaggcccaattcagattttaaatgggtttgcaagccctgatgatgtcgacaaattcaattagctagttcatgcttacttttttttattctctcaaatccatccgtttagaaattaaagcattttta

SEQ ID NO: 49227 - DNA, 646 bp, Oryza sativa
atcattttttctcaatcaagatttcaagtataattatacgaagaagttacatgaaaaattaaaaatctagtaatctcattttgaaataacaaatccaaacagtttgatgcatattagtggtcaaagctttatgagtttgatccataaaagaaacagagggagtgatgtatcactatgcatcttgtaataattaataaatgcatgcatgcatacatcatgttttttgttcatatacatagtaaacatactacaagttaagtgctcatacgatctttagaaacacaaatgcactgcttctaaagcataccaagagattgatatgtaactacacactgctacatacacgatgcacacactaactgcatgcaatttggtttttgagaagcattgtggcaccactgctcattaccatgaagttttgctttacctatattccgtttttcctgatgcttctaaacttaatcaaaaggaattcactcatgggttcatgcccaggaatgcatgcagatagcattttctagcatagcaggaggcagatggatcaacatatgagatgccctatatgcaagcttataagcgtgctacaatatatcatatcatatcatgagatatccatgcaagtaggcgtacctgttacaagcttggc

SEQ ID NO: 49228 - DNA, 5291 bp, Oryza sativa
cctggcgtggaacatggattatgctattcttctcccagttctttaacatttccagatgtactagcataatagattatattgatcagtgtcactttcccggtcgttaaaagaaaacattctgatcgctctcaaacaatctaaaaacattccaaccctgacactccagatttcagaaaaaaccagcagatgagcaatcaaacatcaccacagaattctagtagtcaccttattttttttcttcagccatttttgcctgtgctgaatcgataaagtctcgtctttgttgaagtttcagatcatcttttttattgaattgtttggtgcaggatacctggtaaaatgtctactctataacaattttcttcagaggagataatgacagttcaatatccttcaaaatactcctaaagaaaaagataatgacagttgatgatgcgccagacaagcactgtagactgtactagtcgattttgcttaggccttaaacaataagattagcgaaccgcaaaagcttcagatctgcgtaaagctcaaaagcaatgcgtgataaccccttcaccatccaaggcaatgtattactgtttgatggcaaaatttatttaatcatgtcgttgataccatccaagaaaaaaaaatgtcatttagatctgaaagatacattgacacgatgccctggatggcagagaccagagatctaaactatttttattatttaaaaatatgattatatcttctaatcgttgaattaatggttaagaagatgtgatgaggattcatatgacgacgagttctgcctctctgcttgtgtcagaaaatctggcatgttccaaccgtttcctgacgcacacatttgatctagttcatgctgctaattaagctcaagagatctgttcagcaaaataggttacatggttagcagcttggttacaatgatttaggttgttttagtggagcttaagtccaaattaagtcatcctaataaagcatgcaattggtaggctgaccatgctgccatccatgcagaaaattagaaggccctaccgtttggtcagagcaattggtatacaatcaccaccagatctgcttaatgagtagcaagcaattaggcaatgagcactgtttgggcattgctacagatctagtacttgcaaacactgtccttcttgctatctatattccctctggctgttatgactctctaatggtacttgatctccaaccacatgacacagcaatgcctgaattgtgcagtagcccaatgcactcaaactcaactgatgattgcttcttggctcattgcctgtacatcattcatcagctctgcaaaccaaacagcaactgcactggcctgatcccatccataattcctctcccatgctgtctgaaattaacttcaggtcgagaccagcaactaagtaagctctagcaaggacaataatggctcacatttggtgctcaaaccatgtgcagctataccatgcatatgcatgcactatcccctaattatccgttgatgatagtagcagcacacattgcgtagggtagttaggagtactaatccacactaatgttcagaacagaaaaacagattggaacgtggtgctacagtatgcgtgtgtataatcattagagagagctagagcaaagattctgaagaaaaagaaaagttcaggaaaatctctctctgatcaagaaggtaggaaggaatgctatgcttgtggacagtggacgtggtgactccaccccaggttcgccaaaccgggtcagtggtttttcacgaaaactgtttgaaaaccgttactccggacaaaatccagtcagattgtgttgaaagatgaattttagtttgaaaaacatgattgtaaaatcgagcagtttgtgttgtcgagccagtccggaaagtcaggttttgcaaaaaaccggccggttttcgtcgattttggaaaaccctctgctccatccatccacaagccttctgtctgtcggcgaggctgtctgttttattagcaggttcttgaatggaacagatatggtggtcatcgcagtgacacgagaactgcccggcacgttggggaagacacctttcatgatttgttggctctgtctccttgaccactgctcattatgttttccttgttgttttctcgttaatttgcagctaattgcacattgatcactcacctgcacgacggtatgctcctgaattgaagctgaagctctgaatttaaccagatctggaagttaacttcagtatttgacagtataactctgaggaaaatggcaagtcagagcgtactggtagcacaaactgctagtccatattaggggcaattgtgttcttgtcaatcaggaaaatccaatgtaaaacacagatattttattggttcctgaattacctattacctcattgagctgcacctttcgctgattaatttcactcttgctgagtaaagaactctataggttgcgtaaagctgaacaaaatttgcttgaatgctgttgctttctgacagctagacttcgaaacagacagggtttcatggaattatccacccacgccatgcacgcctagaggattgtagtttagcgcttaattaggatgttagtatcttggacctagcttattccctctgttaatccaaaatacttctagaatgcgtgcaaatcagaattttcatgcattgaccattaatacatgtaactttatatggtttgatttcataaaaaagataatactatcctgcaatatacttccatataatgttgatccggtcagaattatgtattgtagatttagaaaaggtcaaaaacaacctacattttcgtagtgtaagtaactccattatttcccccccccctacacgtatgagatgacacagatagcgacggtgcttaattatgtctggtactaacaacattttaacataattgaacaacccaattagccatggaccattgcatctattgctacctgccagatgacactacgcacagtgcagcaggcaggccgcacggacctctcatccccttgaatttttgagccaatttttaattaccagaaagtgactgaacatgcccctgattttcccattctgtttgaacttcagtttcaagtgcttaattatcaacaccaccaaaccctgcacatgaagtactatgcagacggccggccagccgtttattgcaagcacggcttcatcgttagctcttcaatttatcagtcatgattaaaatttaaattctagacttgattttaataaatttctatcgtactttatttttttcattggtttttaagacgttaagaaaatacatatataagagttttattcaataattttttcactaataagtattccagcttataataagaccctgtttagttcccaaaacaaaaaatttcacgtcgtcacatcgaatgtttggatatatgcgtggagtattaaatgtagacgaaaaaaactaattgcacagattgcgcgtaaattgcgagatgaatctttcaagcctaattgcgccatgatttgataatatggtgccacagtaaacatctgctaataacgaattaattaggcttaattaatttatctcgtagttttctggcggaatctgtaattgttttgttattagattacgtttaatactttaaatgtgtcgaatatttgatgtgacaatcaaacttaaaatttttccccaacttaatcagacctaagctagctgtagataaaacgatgagaatggatagagcccagacggccggttggccgtcagggtcgtactaggattaatttcttttcgtgttttgtcaaacagagatattaatgccccgatcagtgaccgacaacacctgcgttgcagcgttgaagaaaggtgtggtttgtcccctttttttttgctgcgtgcacgtacatcatggaatgcagttgtcttaattaattagggactgtttagttcgtgaacgaaaatttttggcatgtcacatcagatatacgatcatatatttaaaatattaaatgtagactaataacaaaacaaattacatattccgcctgaaaactgcgagacaaatttattaagactaattaatccgtcattagcaaatgtttactatagcaccacattgtcaaatcatggtgtaattaggcttaaaagattcgtcttacaatttacacgcaatctgaatagttaaattttttttatctatatttaatactttatacatgtattcaaacattcaatattgacatagtgaaaattttttctttgagaacaaaacagcgccttaatttgtcttcaaaaacagttgttaaagttttaaaggccgcggcggccggccgcctgcctgccgggaacgcacggaaggcaggcgcgtgccggcgaatccggcggctgtgttaactccggcgaccgtaccgtgcggttggttgccggagacgtgccgtgccaccgccgccgacggctgcgtttttcttgtggagatgggcctcacaaagtggagagcccatcaggccaggcccattagtgttcagtattgggccgaattttatctgggatgaacgagcgtgtatggcccagcccatcccagcaggccagcacgcacaaaggatcgatcgatcggctatgaatttgtaactcgaatgatgatgatgatgatttgccttaaaaacgaacaaataataataataataataataataataataataataataataataataataataataataataataataataataataataataataatcgaatgatcggatgagcactgatgaaaagacagtattaaatgtcgtaaacctagattattgatgcatggcacagtactggcaacgtaaaaatatcgtagacctagatcactgataaataatgcacgctggtgttaattatatgcagtgcaggatagcagtgtacgtactagaaacataaaggagtaaataaactccaaggataatatccggtgtacaaaattaaagctgagattgtggttgggtcagtcaggaaattagcatatgcttctggctcgatctggttgtgcactgaatcttcagaactggactgcctgtaatttacgcaggaggggagagaggcgacaggaagacgatcgactacaatattcatgttctttttttaatatatatatatatatatatatatatatatatatatatatatatatatatatatatattcatgattgagtaaccgagagttgtactactatactcagtagcattagatttcatgcggcgctgaaaattatatccctcgcaataatt

SEQ ID NO: 49229 - DNA, 613 bp, Oryza sativa
tctgctttatatttctcatgaagttagctgtaatgtttacagaaatgtggtagtactaagaaaatgcactatttctcatgtagtgtaccacattatggacattttctgtctgatctaatgtatcaaattgaaaaacggataattgttcatatttttagatttccgcttacttttccattacaagaacttcaatggtattaacaattaagtgctaatcttctatatgatgcactattcaataaattggagattatgtttgctccatttccttttcatttcatggcagacattattatatatgtactagaaagagtggtgaacatttttttttaagatttgatctattattgatttcacacagacatgcatcagctatcaggaccaggtggaataattgaaatgctaattgagaactttgcatgccccacatagtacagcaactactccaagccaagtttatttactagtaaaccaatttccaacttatatccatccatttattaaaaatatgcatgtacattgtggtgttactgagtttttacttgtagaaggtcccatcttagaataattattttaataaaattccttaagttgatctctgcaaattaggtgg

SEQ ID NO: 49230 - DNA, 554 bp, Oryza sativa
gaattcgagctcggtacccactaatcacgaaaaacattgctcaactcgcccataaccgcgggcacggctattcgaatagttttactctggccagaggtgtaccactgtacccacaagacacagcctcaacatcatgtctaccatgcgtcgcgatactggaaagtacccgaatagaggctgtgacaataccctctgcataacacaactcaccacagtgcaccattcctggatcataatcacccccttataaaacaaggcatggactccccagtgacccccgtgggcttatctccgccacttctcagtctggtgctccgcaatgaatcatgttatacaaaaggtaaagccgttgcccacgctggcttgtggttggcacggttaatgtttcacaatagtagctcgcgaaccggtccttaattgtcatgagcacgactctcaaaaccatgtgctcacaacccaccattatcaagttttagttggcaagtaattaattaaccgatcacgattaaccatcgtgaaccatcattaaaccatcattaaataataatgaatca

SEQ ID NO: 49231 - DNA, 587 bp, Oryza sativa
tgactgtcgatcgaatcaaatatgacatcggctgaaagataaatgatacgtcatcggcgactggccgatcggctatcgtttatagatttaaccgcttttttcctgtctttatttcttgttgattgtaggatcaaatcaactggcacgctcacgaacctaaaggcaagattgttggacctgcactgaagttaagcagatcttccaggccagtatgtgtttttcgcatcaacacccgtgttacaaacatcaattagtcacatgcccttaaacacatagggctggtttggttttataccaacttattgtcctaccaaaagtttggtaacttcaatagtgaaaagtgattgtttggtttgctactaaattttacctacattagttcaaattcaatacaacctaatttagtagtgccaaaacttgttaatgttttggcactaccaagattttggcatggcaaaaattggttccaaaacaaacaagcccataacactattgaaatcataaccaccttttgaatcccttcgaacaaaggtcacacaacgaaatttctcttataaatacggatcagccaaaaaaaaaactgataa

SEQ ID NO: 49232 - DNA, 718 bp, Oryza sativa
caacccaacttgagccaccagaggagtatgcctacaaaagagatcaagcttgggatttaggaacccaaacttgtctaagtttgggtccattgatgttagtcaccaaagcctttggcacccacacacaagtgcggtactcatcattgtaattcccattaaaataagcaaccactttgccctctgaatttttggaattacatatgaatcatagtaaagaccctctggccggaactttctggcattataaccggaacttccggccagcccctttggcctatcagaagcccagaacttcctgacaaaatgtccggaacttcctgtcttacaggacaggaacttccggtcattttgcccggaagttccgggtgtctgaccagtgaggggacaagtcatctcacttgcttgtggagcatttccttctcttacaaacatcaagcattctttcccatttaccatcacacgcttagacacaggacttccactagaaaacccgagcccgtgtccatccttgttaggatgagcggtgatggtcttgtaaagggcatcttttgaatggtatgtcttcatgcatccatatttcaccaatgtgcccaacctttcattctctttcttaagagcttgcatagcatcaacattagtagcatgagagttcaaatcaatattgtaacacctagcacaaccattgctagtagatgggttggaagaattagaaaccaca

SEQ ID NO: 49233 - DNA, 643 bp, Oryza sativa
gaggaagctgatcacgaaccaccaggctatcatgcacctcgtgatgtcaaggaatgagtaatatatttaatacctattgaactaggttggaccaatggttcaaccggttgaaccagtgaaccatcgaaccaagagccttgtcggctcaattactagtccggtctcaataactataacccctgcccactcgagcgcgctcatattgccaaagatagattttattgttgttttggatgagcttctcgaagatgttgatgaagaaggagttcatggtgggcatagctttagacaagacaccggtatccgtcagtgtctgctttagcaccttgaagatgatcttgtaagtctcgacactcttcctaacaccttgaagatatagatcttgttgatcttgatactcttattgacacctggaagatgtagattcagtagatctcgacactccttttgaaaccttgaagaggcagacgttgtaggtctcggtggggtccaccatgccccgaccatccacgggaaggggaacttagcttttctaaattcttagaagctgactaccaacccacagcttctcaaaatcttaagcttcggaaacatacccataggttttgcaaggaagctaggggatggcatcactgtcattgcg

SEQ ID NO: 49234 - DNA, 681 bp, Oryza sativa
gcccaaagccaaaagaagacttttaaaccctttttcaatttaaagttattcatgaaatgcaattccattgattaaaaatacttccttagctcaaataaatcccagaaaaatctaggaattatagaattaagcaaagtatttaatgaaattttatctggccccattttatattgagatttaacaaattaaaattagatcttctcttttaggcttttaaaatcatttctaataattccttttaaacaacaatttataatttaaggattttaaacaagaaaagctcttaacaattataattagatcattattgatcaaataattactgaactgttctttgtatcatttaggaattgagagctgaaaaatccgagaaaatttcagagagttgacttaatcatggagaatttaataaaaattaaatccatccatgctttatattaaggaaattttatttcccacatttaacttcacttgtaaattaaagatcatttaatataaattctattaataatttattaaataatttataaatcctgaaacgaaatcaggatgtgacagatctacccccctacaaagaatctcgtcccgagattcggaacggctagaaagaaaaagggaataggtaaactgcagtctatcttattccataactccgataattattctaaggctttaaagaaa

SEQ ID NO: 49235 - DNA, 3839 bp, Oryza sativa
  unsure (1)..(3839): unsure at all n locations
cttgtccgcgttggctttttgtggcaatagccgcatcatatcgtcgtcctggtggcccaagctctcttctccgtaccacttgtaatatgagtctactttctcgatcctataaaaataaatattgtacaagatatgatatattctagtactataaatttaaataagctattcagattcatatagtactagtatatgccatatcacgtatatattatttttgtttttatagaacggggagagtatataggtagtttaattactgaacttcccaacctagtggtaggcatgagacgtcactagtcagatcatttaggccacaacagaagtttcatgtttcttcttgtcatgttttctggatatgctaaatagttccaagagcgtaaaaaagaaaagaaagagtaaaataattaaatagtgttgtctgatatcattgtagtggacacaacagttatggctttgctagtctcgcctaatttcagtaccctacggccctaccacaaccctcctaaactagcacgaaccactgtctcctacttcaaaacattctgaaccaaagtccagcttctagatttttcacttttgatctttttaaaattttattttacaaatagatccatcataacttattatgagaatggatcatttttatggcatcaacatcattagcgtcatggtccaatataacggcgcaatgacagtgatgccatcccctagcttccttgcaaaacctatgggtatgtttccgaagcttaagattttgagaagctgtgggttggtagtcagcttctaagaatttagaaaagctaagttccccttcccgtggatggtcggggcatggtggaccccaccgagacctacaacgtctgcctcttcaaggtttcaaaaggagtgtcgagatctactgaatctacatcttccaggtgtcaataagagtatcaagatcaacaagatctatatcttcaaggtgttaggaagagtgtcgagacttacaagatcatcttcaaggtgctaaagcagacactgacggataccggggtcttgtctaaagctatgcccaccatgaactccttctttatcaacatcttcgagaagctcatccaaaacacaataaaatctatctttggcaatatgagcgcgctcgagtgggcaagggttatagttattgagaccggactagtaattgagcngacaaggctcttggttcgatggttcactggttcaaccggttgaaccattggtccaacctagttcaataggtattaaatatattactcattccttgacatcacgaggtgcatgatagcctggtggttcgtgatcagcttcctctctcacatgtgatcttgtgttcgaatcccatcctagtctcgttttcccctacctgctcccctgcatgcatgtcttctcgcgcatagctgccacaaggctggttcaactacagttttccctggttttatagcagtttttcctcaaaacaggacgctccaatcggttcgattgcatatccagtcttttaactagaccggactggtataggctctggttttggtttttacaggtccaaccgtcggtatggttcggtcttaataactatggcgggggtgccctgaggattcgaggtgacccaagcacggtggctagtcgaacacaagttttcaatcccttggggacctgagcactgattaattagtgccctaaaggtttaaggagagcagatcggatccggtgattacttttaaccaccactttacgtttattatagggtggttcaaacttaatgtacaactcatccacaacttgtacgtggccgcacatgcagccccttgcatgcccacatcacgttggagaacacgagacgtgcgatgtggctcatcttcagcaacattccctaggggtcacctctattggatacagtggctaataggtaggctcggggacagttttaatgaagacttttacctcccatctctacttgtcattcggtatatgtggctatcacatctggccgactagcttggaggtacaacaataatactaaacatatcaaattcagaagagtagacctcactcctacatgcatgcaatggcattgtggactccccttcacgtataaggagaattcatgccaccgagaaaaggttcacactttcatctaagctaggttagctgaacattcagtgagcaagcaacctctccttctcacttagaactttttacatcactttgtagttcacctcaccatccatgcatagtccatcacacaggagtaaagtgctacgcatccgtgtgggccgaatttgtatatccgattgtgttcactctattcgcgtaattaaaacccgaacttagaattggtagcccggccgaactcacaaagagggagtacttagctttctcactagaggagttccgtactccgacaaacgccaatatcatttgcgccatcatgttggaccacaaaatcaatgatgttggcgccacgaaaagagaccattgctagaataagtttttaagtgtctatttgtaaattaagttttcaaaaagatctaaattaaaatataaaaaatccagagcccagcttagccctaaccatgcctggtctggcccagcctggctctcctagcgcagcccaaaccgatcagctgactcactaatccaattccaaataccacacgaatgtactccactccattgatcactcatcaatcatcaatcactgtaatgcactatccatccattaattttcctcccttgattcacgtcgaccgaccgagacggagtcatgtcacacggtcctaatttctttcgccgtgtggaaggcattggatggatctccccagccacggggcaagcgaggggaaaaagggctccgagcccacaaaggacgagccgtctatgccatgccatcatcatggcaagatcacaaacttcacgggggatatatgtaatgtaggactaataataatattgcaacaattgtgtttctgcctttttcgctgtgatcattacacgggtccagccttttagggataacaatagttacctataacacttggagggttgaaaatctagtgtgtccttatatactttatgtgtatacatcttggtaggatatttggattttttttcaagccttgttcagttagtctctccaagagagagggaattgagggaattaattctacatcttaataagtgcgaaataaattaccttaaccctcgaaaaaaatcaccttcagatcccctcaaccttagcgatcaattatcccagctgagcacatacaaagtggacattcttatggtgcgggtgtttgggttttccatgtaattaaaaagaaaggccacgtgtctgcttgatataaagatcgcacgatgggtacgtatgggctcgatggtgtgttcaagggttgatgccatgccaaaccaacaatattgttgaataatagaggattagatattgaacacattatattgatccttgggagcctgtgcatataggagtacaacacttagttctcaagtaagcatagagatatactcccttcgttttaaaatgtttgacaccgttgattttttagcacatgtttgaccgttcgtcttatttaaaattttttgtgaaatatgtaaaattatatgcctacataaaaatatatttaacaatgaatcaaatgataggaaaagaattaataactacttaaattttttgaataagacgaacggttaaacatgtgctaaaaagtcaacggcgtcaaacatttcgaaacggaggtagtagatatataggagatacaccacgacgtgtgaatctcatatgtatccatgttttatgcagtcataca

SEQ ID NO: 49236 - DNA, 1987 bp, Oryza sativa
cgggggactgttaatgcataacaactattttcctaaaattagcatatatttactgggcaatctagtaagtatcatagccaaattgcttcaattgcatgcatgttaagaatggcaggatcatatggtctacggtagtctacaatgtagtaaaaggagaaaagatatggactgcctcaggcagagtttctgcagcactactacagttaacagatacaatttacggaataaatttcaatacagataaactccagaagtaaattaatttatactgaactgataatctgatattcacaagttttaaccatattcaatatgttcataagacaatgtgatctctaaattatttcataagatgtcggtgccatagtacatctttcactgtacatatgcattccaaacagatgaacctaatatctattatccacatgtgataaatctgccacttggagaaaaaaagaagcagcatcaaactatcggccttaaatgtgcatccacatcaccattctcaaccacatatcagtggagtatggcaatgctacccaacaatacatggtcccaaacactttaatgaaagcactattgagaacataatcgttcaccacatgatttgactttttgtattttatacttttttctcatttgctcaagaaaaatgaggctaataaaaagatagtaatggctacctttacatattcacaaaaaaaatgtcatacagtctttctgttttatgtaattaatatatacttccatggctatacggagagtatgctttgttaagaaaaagggggttcttcatgaaagaaagataagtggtagctgattttttttttcatacactgacttaatcagaaatagattaaaaaccactcggtcctctttttttttgggcaaggaaatcaagacagttctctattatgctagaagtatccacttgatttatactattaacacattagctcttctgtaaaaaatttcaaccttgaattgaatggactgccaatcgtgcagaaataatctgataaaaacacaagttgcaagaccaaatagttaaaaaaaggaattgcggagaaaacagttttttttttttttgacgatgaaaacagcaggagagactgctactgcgatatattaaaactatataatagttacaaattacatatgtacaaattatcatgtaaaatctttcgaattagccgctttctgttaatctgaatcaacaatatcatcattaatcatacagtggcaatactagtttccattaagacaacagaaagcaactcgtacaaaattgaagcttcatgtcaattccactggaatatatccaattaatacacttgtttaactcagtgcttgaaagtctgttttagtcgcctatgtgtgcatgtgaatgcagaacttgacaatcaaagttgcttatagaagaagaaaaatggatgcttaagaaaaaactgttggtaataatcaaatactgaaactgagactaagtagctagttcagttcaaatgagtaacactattacacttcaagtggcaatgggtcctaatgacaagcattagtgtgcctcaagtgtcatgtgaatataagttatatagttgtatgtgcgcatgcatttgttgcgtctgcccatgcatgtgcatgagagcatgccgcatgggcatgcagatgcagaacgtgggcatgtgcttttttggggatagaagggccgtgcttttaagttcttgatgcataaaacttaaatatgaactgctttgtagttaactactgccctggttgttgttgtaaagtttattaaattacaaatcaaactgtcaaagcagacatgtcagtcttaaattagctagaagtagattctcttttggggtgacatgttcagtggcagtataaatctcattgatgagttgcttggtttagttcaatctacttctgataaccaccagagatctaataaatcagaacagggaaaaacaatgaagtatgcaccaaattt

SEQ ID NO: 49237 - DNA, 705 bp, Oryza sativa
gctgcgggacgtcgattaattccactcagagtgatactaacactactacgaaaaccatctttcatggcgggtattttgggttttcactggtggaatttggagctgctacaaagcaaaggctagtgaagatcaagatcttcactagcggttatccaccgccagcgaaaatgaattatcgctggcggttgataaccgctagtgaagatcttgatcttcactagcctttgctttgtagcagctccaaattccaccagtgaaaacccaaaataaccgccatgaaagatggttttcgtagtagtgttagtatcactctgagtggaattaatcgacgtcccgcagcacccattcagtggttcgtcatgcatatgtaccgccaccattgatgcccctttcgctagccacgaagagaaggaagaatctaacaaacggggctaaggacatttttgacatgttacatggtttctttctcatatctcattacactagaaaaaatgtccgtgcgttgcaactggtgaaggttattttagtattattattgttatacggtttagttaaggtaaaattcactgtgggaattcacttggatatatatttttctagccaataatgagctgcaattaggagtccaatcatctcaagttagtatgcgagttttttaaagacaatatcttatacgacttcttctgtattttcaaaagcgaacga

SEQ ID NO: 49238 - DNA, 527 bp, Oryza sativa
tgttgggccttcctagtagtcacacttttattttgtagttgatgacccctttcttcgtagctccactgtatattttcctcggtattcacactgccgaagtagactacctatataggttacgattgtgcgtactagcgtgtgggaaaacttggatactcattattactcatttatttcgaagacctgacgagatgtcagtgtggttacgaagtggagaagtgttttataaaaacttgatgatgcgggagtcagtacctggtcgtttggctacgtattatccataagtatcgtttcctttgagaaattcattcaaacataaaacaatacgaccaaaacatgctggacacctacgttttagctacctgcgatagtgaccgacatgacgctataccggatgtgccccttcgggggtcagaaggtatatttcgagcattctttttttccaaataaaactaatagttttattagtttgtcgcatttcatgctttttcaaatcatgaaatttgactaagttcggggcaaaaggt

SEQ ID NO: 49239 - DNA, 603 bp, Oryza sativa
ccaccaccggcttcctccctccacctctctacatcattgttccctctccttcatcatattcctcaccaacccacatcatctttctatgtttccggtggctcccacgagtagattaatcgtcacttatcaacatattcttgatttccgtgccacctccatcatgctcctccattctcatagcttcagcagtgccccattgcctcaacgccttcccgacaccatcgcgcactaccaggctatcacgccctagcctcaaaacccattactcctcctaatctgaccatgaaaaacctaacccagtgggatggtagccgtgtccttgttggagggttactggagttgttgggggtcgctgaaacttgaggagaaggaagccattgcatgaattttcaagttaatcagaagtcacaaaagtagtaagattgttcccctaaatttctgtcgaatggcagttagcaaaatccattgaatcaataatcactaataggttcttagatttcttttgtatatctccatggtgtctcctcctccccctttagtcttcttggtatttgaaccatttgttactcaatcgattgctatctttatctttgttgacgggga

SEQ ID NO: 49240 - DNA, 1318 bp, Oryza sativa
agcaataattttctacaagtgtcagtccagaagttatgactgagagatcagaagatgtggattacttgtctatgagcttttcaatctccgcattcttccaggcaaccaacttggcgtggacaaaattttccttatgttttaccgcagaaccctggggccatctccccattctttgcactgcaactgggctattttcgccatctgaatggttaaacgcaccgccattatgatcacttccctcataggcaccaccagcctcaaagttccaatcacgagctgcagatgaaagaattgtcataaaaaatatttttcagaactgacgagactcatgagatttagatcagtacctgaggatatacgagaagacagagtatcagcctgccaatccgtttgatccactgcttcatcctcttcttcactgactttgggcaatctccattcattgatagcatccattgcccccaaacgcctacggtaattatgtgaggagcgagctcggcgcatcaatctagctggcgtggccttgtggatgaatcttggtggcactggattagttctctcaactgcatgttttcaagcgcattcaataaatgatgcgatgcaagaaaaagtcaagttaatctatggagggaggcagcagaagtaatcacatctcctatccagaaggggaggttgtctgggcgtttgcagtctgatgtgtcgtggtgtggtagacggatttatgaaatctcctctgtttggcagcctttcttggtcttcttcctgcagatgattggcttcttaacatttccaaatcacgtatgggaaatgaaaaaatcaaaccggcagatagtacaactaaatggatacaaccaaaagctacttgtaataattctatatggacccagacagagaattatccaaatttagtttgatcgtgtggaaaacatgtaataacataacaaacaaaatgactgagctaagaattctctagtttttggctatttcaagattcagaaagcagaaatgtaacagcaaaccaagattgtcaatacccttactgctttgatatttgaatcgatcaaaggtcacaaatcaaatccaggaacattgataaatcttgcattgaggcactagaccaatggttaaactggaggcgtttgttcctgtaaaccatgcaagaaactgaacaacctcatccaagaaaccaccttcctccaaagaactaacgcaagaagtcggcgaagttttccacaattcaatagttacaagctacgcaagaatgggaaattaagaccaaaggcagcaaaaaaatcaagaaccttcaggactgcgcctc

SEQ ID NO: 49241 - DNA, 707 bp, Oryza sativa
gtctgcttgggctggtcgagtgggccacagtgacaaattgtcgtagacttgggttaagcttaagcctgatccggtaactttccgatcttcttgggccgctgaagaaatctcatgcaaatttgggccatggaagtccaacgagctaggcctattgattcttgcctacaagcccaagcccgtgtacaacgcatcccacaccgttcgttccgttgctgcaactgagctgccattgctggatgcgtctgtgacggaatccaaattacctgagctgacattacacaaaactggaagacaataaatacagaatagcaaagcaaggatcggatttccgattaatcacagttcatacatagataaggtgaagctggacggataacaatatttgagcaagaaacactaagcaaagaaggaacgtgcagcttgcacactgagggcaggcaggcagacagacaaacacaagagtggcactcatgtggaaaagattccgaattgcaggcgtgatttctcaatcatttctgcgcaaagcgataaggtaattaacaacaccattgcagcctcgcagcgtcattaaacgacagcaatgcacagaggaatgttgccgcttaataatgcagagagcaggacagcgcaactaatctctgaaaaattagtggctaggagccttggatcatagcaaaaaagtgctaacaactgcactataaaatgcg

SEQ ID NO: 49242 - DNA, 1025 bp, Oryza sativa
tgccacgtattccaaactgtttgttatttgtaaagtttttttttccaatcactctatttagtacggttttagatctcatatccatagtacatttgaagtttatatgctaaattatagtgcttaaaatttaaaatttatttgaaatgagcacaaaataatttatataaatgttatcaacaaactatattaaatccatagatttgttaatctagaaatatccagctccaaaaatcttggatccacagctatgccaaaaaggacctaacattgtaatcaagtagctctactagtagattcttgtagtgtaactagcccacttgggctaaaattctagacttggcacgagtactcgtatttatggtaaattatttttttagtggtaggcgtcgtaaccgttgataatgaggtgcttatgttgactttatcaatctctagatatatcggttcagtctttcgaagatactcggaataatgtgcgcgcacctgcgcatgttgtgaaagctttgtgtttgtacaatgtttcttaaaaaaaacattgtaatcgagttaataatttcaaatgtcaccaagtatgtttgttttattgttcaaactaaccctagcaaaaattggtgatgtcaaattttttatatgtgatgagatggatttggtttataccatcatcaattttttttgaggttttaagagtgaaaacttccgaaactacataaattttagtaggatagcaatgttggttattgtcataccaaaggttaaaagtgttagtacaaactaaacaagctgtgtatatatgcagggcactgtagatctgtgaagcttattgcaaccaagacttttaaaggcaagcaatcctacatggcatattggattctactggtaattaattactgaagccacacagtcagtcggactggagtgctcgatgtggtctccgccagtagaaccacccgaaccctccacgcacacagagcacacagaccttcgtcttccatggcgcgtgcagtgagctaggtggtcaaacgaag

SEQ ID NO: 49243 - DNA, 1159 bp, Oryza sativa
tcaaatgaatttctttagcaacagaatttgatttgtctggcacgggcaacttggttgataagcttggatgcatttgtataactcatgtcacgggcttaaatcagcgtattatggttatggctgatcacttgccagcagaattagcgatgattcgttgttccgggtggaccctgttctgtaatttctgactttgttacaattaaggtccatttcctgacgagagctcattgatggctttcttgtgcctttgtggagacaggttggtagaggttgctgagggcatcaaaacctttctccctgtttcctttttctcgtactggtacgcttggtgttatcgagtttatgtccatgatgccctacattgattgctggactgaaggagccctgatacgctctactgccacgcctcgccaagataagatggcacttttgtttgtaagcttcctctgttgtttctcccgtggtgcgtgtcgtggttgggtttcgacggccagtcggccagagaagggtcgtgtcacgaaaagccttgcccgcactttgaactgtcgcggtagcatcattcctgctttgacccctgatgaagtcatgcaatccatgcatcgcagctagaggcgttcactgtgttccgccttattcgagctcgtgctcttacttggtccttgaaaaagattcgtgattctttttttcagttgtacctgagatgctcccattttcagagcttccggaattttcagccccccccccccctaaaaaaaaactaactttgcacttggattgtgtttggttcctgaaaaaagttaaaagtttgataaaagttggtagtttggaaaaaaattaaaagtttatgtgtgtagaaaagttttagatgttatgtgatggaaaattgaaagttgagggtgatctaaacccggccttgatgggaaacagccaggagtagaatggtgcaaggtaggtaggtgtgcaggtaggtaggcgtgcccggcgtaatctgaccgcgaaattaccctcgcgcaggaaccgaaccaagctagttgtgctccgtattcgctgcaactgtgaaacacctggagcatttgactccatacgcacgaggagtaagtacgcaaggccggccggccggcctgccgcctgccgacgctgtcgcggcggcacagattga

SEQ ID NO: 49244 - DNA, 1749 bp, Oryza sativa
aattttatttctatatcgactctagtctcctcttctaatattccttattttttaattccgaatttcagctatttctatattgtatgtatatatggactctagtcttctcttctaatattccttattttttaatttccaatttctgctatttctaaattgtatttctatatggactctgctttttttttctctgattaatgtgagaatttttaggccatgagagcgaacgtgggagctcctttttctattcttttaataatataactagctgggtgaccgcgcaattgcgcggctagcttccatacaaaattatttttttaaaaaaaagttaaatagctatattattatcttaggaatttgatcaacctaaccttattatctccatgtttctagttttatatttttgaaaatcacacctatcgctacctcttacttatttgtcacccttttattttcttgctcgatctattagggtttctatttatcctccttggaacttttaaaattagacagtttattgtctcgttgggttttgttttttataatttttataagtctccgtcaaaagcggccactctactcgtctatagtccatccgccgcctccttttctttgttgccattgagattttaaaattgaacataattatcatcggtgtttatttttaacttttttttttttccggcaaaccgtgaacagcttcgccattgtactcctctatgacccacccgttgcattccctcttaattatcattgagattttaaaaaatcgaacgtgattatgattttggtttaccttttactgttgtaaaactcttgccaaccactgtgattgtgctgcttaacagcttgcccatcattccttctcttaatcattactgggattctatttgatttttgtgttaaatttaaccactataattttaacatgatatcatctaacaaatattttttagtaatattaaaattcaataatatgataaatagatactacttgaactctttcgaattcatattaaaaaccaatttggagttgtattttattttaaattttaatttttaaaaaatattttgttgtgttctagatggacactgcttctaatattctttatttttaattctaaatttcagtaatttctaaattgtattcctacctgaactttgtcgaattctacgaattcgtattgagatcaaattttgggattcatcatgacgtgtctatcactccgctcttttttttttctaatttcttctatactttttacgttatttgctaattaggattaccaattaatcttcgaaaaccctatatcttagtcgccaataatttataattttgagacttacatcacttgcatatataagtttgggatttacatatgtaataattttgagacttatagtctaaatacgttaaaattacatatataattttagggacttataacgtaaatacatgcttactattatttgatgaaaaatatgacgacaggtactcccttccaatttgccgtgctagtcatcaatctattgaaaaaaatgcatgacatttggtgtgctttctctccgggacgccatccatattttctccaggagtgctaggctagctatttaggcatgcatatatatatatggcagtgcatgtcctttttttttcttcgatggttaatcggatacgaattagtacaacaacacggatacgaaaaatcaatttgctgtatgattctttccatatattcattgatcaat

SEQ ID NO: 49245 - DNA, 749 bp, Oryza sativa
ttaggaattaaaaaaaaggaatactagaagtagggtatagagtccatatagaaatacaattaagaaataatagagattcggaattaaaaataaggaatattagaagtagagtatagagtccatatagaatttaaaaataactaaaatttagaataaacataataaaattaaaagtagagtttagaatccgtataaaaatgcaatttacaaataactaaaattcgaaattaaaaaaaacatgggaagaagagtctaaagtcaatatagaaatacaatttagaagtaactaaaattaaaaattaaaaattaaagaatattgaaagatgagtttagactttagagtccacatagaaatacaattagaaaaaaaaaataaaaattcaaaaataaaaataaataatattggaagaagatcctagagtctatatagaaatacaatatacagataacgaaaattcagaattataaaaaagaaatattaaaagacgagtctagagtccatataggaatataatttacaaataactaaaatttgatattaaaaataattaataactataattaataattaacacgtatataaaatacaatatgaatattacacattagtagttccgtaaagttagtacaaaatttgaaattatgttttcattttaatatatttaaataatacattgagaaaacatatatgttataatatgagagaatataatgatgctagccgcgcaatctgcgcgggccaccatgct

SEQ ID NO: 49246 - DNA, 641 bp, Oryza sativa
cgtcgttgcgccgtcgccctccaccaccaagctgtcagcaaccgccgccgccaactgccgcgaccacaccgccgccgctgtcgccaacaggcgtcgccagccgaccaccaccgaccgcacccagatccggccgagagccgccgtggacgttgcagatcgcgggcgccgtcggcagccaccgccgccggcagcaccaccttcagaagctcctgccgacggatgtcgccgccgctgccgccgcgacgggtgcccctgccacaagcttgccctgctgtcatcgccacgttgtcgcgagctccgctgcccccgccacgagctagctcgatccggccgccgggtggctagatctgccttcagcgtggccggatccagcgcctctgccgccgtcgccatccccgccgccgtcgacccagccgcgtctctgccgacaccatcgccttttggctgtcaaaccttacaattcgaatttaaaattccaccccctctctcgaactgagctattccgatgataaatcactaggacgacataagacagacacataacctacgtaccacaatttcttcccgccgccgtctccattcctgccgccagccgccaccccgccagatccggccgaggcggcgcggatctggcggtcacc

SEQ ID NO: 49247 - DNA, 706 bp, Oryza sativa
agtagtacttttgtccacagctactagtataataacacattttttttagataatggaatataacatcccagccagtataataacacatgaatagtactttataagtggcttatgttttttaatttttctaaaaaaattaaataagacggataattaaagttgaacacggaaactccagattacatttaaatagtacttctgtccacagctactagtataataacacatgaatagtactttataagtgacccatgtttttcaatttttttaaaaaattaaataagacaaatgattaaagttgaatacggagactcaagattacatttaaaatggcgcggagggaataactttgccgttaaaaatctaaaaagatagaccatgttatctgcatgtggagaggagtgacacggggtcacgggccaaccgcaactgtcgggttcaaaagatgcgttcgcaagaaagcaaacagattagagtggtggccccgcatgcagaggtaacaactgatcgaaaccacggcatcccgatcaagttgctggtttagctccacggacgcatgcctattctagtgctccactgccactatctttagtagcgccgtgtcgggctcccatatataacgtccctcgccgtctccatttggatttcagcgatcgatctctaccgcaccggccccgcatgcctgcccactgcccaaataaagcgt

SEQ ID NO: 49248 - DNA, 695 bp, Oryza sativa
tttcttggataaattgaacagtttagtttgtttaaaaccattgaaaaaaaatcaataattcctagtttcggtcactatgtgtttccaaatatcaaaagatagagatagccatttaggacgatgctagaaaaattgatagcctaagaacaaatcaatgtattttagttagacataattttctctctcacaaaatattcatataattttaaaggatttgaaggggatttttggagtcagcctaggactaagccctaatttccctagcttgtagctccacccttagagatcaccaaggaagatgtcgttgccttttcacatcctgcatttcagtgtcctcgctagtgttgaagtaaagaagacatggttttcatgttgctaagggctgatttagtttgaagacaaaacttgccataccaaaatattggcattttaaacgtaattttgttaatgtttagtttgctacgaatacttgtcaataccacacaaatgttgccaaaatattggcattggcaaaaaacttccacatgatttggcattgccaatagtttggtatggttgcaaactaaacaagccctaaatctctatcagtgtctaccgtattcttaaggtactcaatgaagacttacgaagtattttctatcaagttattcatgataattagcggtgatgaccgatcagtagtatttggtagttag

SEQ ID NO: 49249 - DNA, 1128 bp, Oryza sativa
tgtaaaaaatagataaatttcgataacatacgtgtgtcgtggatatggattttcataccttgatgggatctccacccgttacttgtatgtcacctaaatatttatcaaaaaattgaaaaacattgataacatatgttaatatgaaatatatcagtgcacaaacatacaataccaaatttgacttctacaagttaaagcaaaaaaaaaaaggtttaaccaaaaatagttatcatacattcgcagctatatttgttatttttcttacatcttacagaaattgaattgtaatatatttaatattaatctatcttgtcaatttattttaaatctgtaatgactatttaaatagcatttacggaactagaggatatcacctatcctcttgaagaataaatacactttcccgtgtgttgttggtatatttctgctcgcagaatgcaaaccacatccgatgctaacaaccaatcacggcctaacaaactagtagtgcggagtacgtgccaacattttgatatggcatagtctcagccagcaagcaaaaaatctgcgcttgtctcctttttctcgttttaatgcatcacatggcagaaagtgaccgtgcgtaaatcattcataactaggagtaggctatttcaagaccttcaattgctcacagtacaacgatctagcggcggtgatacgaaagagaccaccatctatggcacatagctctctttcccaagaagaagaacatgctgcagacctgacctgcaacctgcattcaggtgcggctcgcgcgagtggtcgatgtcaaaagacgctacctagtcactgtcaggatccatcgcgatcctccatggctgcgctccatgtgcccgccaagcgcacacgacaacgatctggatgaaaataataatcgctctcgaaacggcacagtgtacgagcggaaaaccgatcgagagctcccccatgctctgaccgctcgcatgttccgctcccccgttctgtctccctttccctcccccctgctaataatctcggcgtcgatggatcgatcgggtggtctgtgcgtttcacagtccgtgtagcccgcttcggccaccaccaccattaccaaccaaccaaccaaacaaccgagcgagcgatcgt

SEQ ID NO: 49250 - DNA, 1095 bp, Oryza sativa
aggaacgaaactccagagtttttgactctgcggtctcttcggtctcaggggttctagagtcatcctctcagaaggccatctatggtcgttagctggcgacctggcattgctacttttggggttttcttgggagggtagtgtgactctgccttcttcccgctatttggagttgtgtttagctgttgtagtagtctcttcctttttctcggtttttgtttttattttttctctcttttcttgacataagtcggtctgactgattatggtgtgtatcaaacactcttttcttttaaatatattgacgtgcaatctcttggtgtgttcggagaaaaaaaaactccatgcaaaatgcagccttgcatgcggttgctggctgtcttgctaaacccaaagtgccgagtgcccacttcacttgcacggtttgacctcattttgccccgtttttaggactaaccgtgaaggcaaagctgaatagcctgccaccattacgccaccacatactctcaccagttgctgataaaatgtctttaggactaatcgtgcatgtagtacactttccggctttccgctccctgccgcctatctcggattctcggtgtgcatgccactggtgagtatacggattactataaggaatgaacacccattagctgcggaattctgtgtcaagggaccgattgccactagctatattttgactgacaaaattctaggagtactgacaatgtcggttggaaagcaaagaggcaatggctagagatccgaccgacaagtccgcaactagtggagagggtcagatatagatagaggaggaacgtggctaagagtagcactgcatactattaggaccctgtcaccattgccatcaccgcgaccaggagatgtcatcgaccaagtcactgccttttgccgccgaacttgttgggtagagctgccctcaacatggctggatttgaggtgaagaaggatggcggcagccaggactagacaggggagtagcccgttgatctaaaccaccttcgatccaccttgcataggtcttggtgacgtcagttggaaaggggaaagtcgtggggcttgcttcgatccacaata

SEQ ID NO: 49251 - DNA, 1076 bp, Oryza sativa
tgcctgcaggtcgactctagaggatcccccgctcccccgttctgtctcccttcccctcccccctgctaataatctcggcgtcgatggatcgatcggttggtctgtgcgtttcacagtccgtgtagccgcctccggccaccaccaccatcaccaaccaaccaaccaaacaaccgagcgagcgatcgtgcaggcggcgtagcgtgaggtgaggtgagcagcgcgcgcgcgcgcgcgcgcgttccccaccgtgtcagtcgcgggcgcatgtggagagattctccggtgacgggagggtgaaagactgaaagcaacgggcgcacatggcggtggtgctgtgcatgcatgcgacgcgcgcgcgaccccgcccgcggccacggttcggctgattttgttgggtattcgcccctattcgaccgaggggtggtcaaaactcaaaaccccgcgaacatgttaattggcagcatcgaaatttctaatctgtcctgtccttccatacatctaccctggattcggatcaggccactttggcagtacccaatcatccagccatccagcacacgagagatggcccagatttaaccgtgtcatacatcattttagctatttgaacaagcatagaacagtttcagttcagattttgcctgcaatttctctccctttgatctgaattttcttgaactttaagacaacccaaatattgttaaagaaaagtagacacatacttcatttcattatattgaacttcataatatcttgcacgcataattgacaaaatgagctagagtttaagcccttgtttagtttccaaaatattttttccaaaaacgtcacatcgaatctttggaaacatgtatgacgtattaaatatagataaataaaaaaaagtaattgcacagtttacatagaaattgcgagacgaatcttttgagcttatctttgatcttatttttctattataatatataaaataaataaatgtatatttacttttattatggtgttttgaaagacaaatttatatatgttgtcctttaaactaaatatttttaaaattattgggggatcctctagagtcg

SEQ ID NO: 49252 - DNA, 539 bp, Oryza sativa
gtactggttacagcaacagttttttttttaacaaggctttccagtttccacatgcgtgtgtaacttctttgtaacatccagtgtgagtgccggcgcgtctttacatacatatacatacattatacatgcacatacgtacatatacgtgtcgtgaatgggcaggatctcttagggtgtgtttgaggagaagggaattgaggagattggggagttacgcaaaatgatgtgagccattagctcatgattaattgagtattaactattttaaattttaaaaatggattaatataataaagcaattttcatataaaattttttttataaaaatgcaccgtttagtagtttaaaaatcgtgcacgcggaaaacgagaatcaatctcccctatctcccgagacgaacagagccttaatttactcatgctgctgctgctgcgtgtgctgctggtgtacttggcccaacgccgacggttgcaactgtgcgtaggagtggtgggagagaaaacggggggtcgctacggtgacccgcgcggggtaccgag

SEQ ID NO: 49253 - DNA, 885 bp, Oryza sativa
ccctgagtatttttgagtcggtgaactgcagagatggatggtcatggtctggcatgcatataatactctctcttaatccctgaatacgatacgatctcatcagagacagtggagctcatgtgttgatttaccaaaattagttttctgtggtgcttgcagctgaaacaggtctcaagtgtcatggaagacatgcatcggaaacaattctcaaatgccatggaagagcaaaatttgctctttgcagcagtagttgttgtgttttcagaggctcagagatgcatcggtgcttaatttgtcaggccctgcttggtggaacggtggcgggaatgctctaggaactttttagcatttagctcaaattcaattagctcttactcctatttcagaacttgaactggtgctctttttcagaattttttttatagctttcatgcttgaaataatcaaatcaggtgatcaacagcagtctgactaagtgttgcaacatccattgcacgacttctgccgcttcatcctattcccagcaattttttgcaagacctgaatcctgaatttcagtatgagatctgcacctaccaagctagcaggatatatactctcctacaacaatagaaagtcaaacaagttctgaaaaacaccgtgtttattttggcttttgtcaaaacttcactccagtttactgatcacgctaaggttatagaagaaaatacattttggcaatagaaactagccttacattcgctggtattacatgtcgaacagatggatgcgcaataccagtaaataccgtttgagtcaaaattagttccttcaagagattggaaaactgtgcaatcaacacattttttaaccgaagaaggctgagaacaacatccgtccccaatc

SEQ ID NO: 49254 - DNA, 1111 bp, Oryza sativa
agcgaatcgacgacgactgagctgctggatttttttttcgccccactaatccggccctgataccgtgtagcacgacggccaccggggaggtcgccgccgatgagccccaccatgagccttctctcgtcgtcctcatcctcgttcttccgccgcaactgccgctcatctgctcgccagttccgtcagctggtacggactctcctgatctcgcgattagtttatctgtagcttttgttcgtcgttagctgtttttttatgtttgttactggacggttcgtggtgtcttcaggggcggtgctaaagcgtaaaggaggatgttgccacttgcttaatttattctattttagatcgagtttaagctcatatgggtgtctaagtttatattaagacgagtgcatacatgatgaaaatagatgatatatagcttaaaaaaattttttgaccggttcctgaacacctccctatatatactagctccgccctcccccgctttggtcgttggggttgggtgtaagagacagtagcgtcggtccctgtggccctgtgggcgcgtagattgagttagctgcgtggaatggtgtatggtaaacactactcctacctgtttggattttaggatttgcttaggaatttttgtttggattttctgaggttatcagtccttggactccttaccagcgtgcactacatcagtttcttcgaattgcgtccagctagctaggggtaggatgagcaatggtacgtactatgtacctgaaaaccaaggtgatacttgagtgaaatctatagtttttgtgtgaacattgtagcttgagatcgagcaacccattgtttcacttaattgtttgttagcaaataaagattatttataagtaaaacttttatatatgtgtttttaggcgacgagtaggtgtggatggttgcgaaagtgctgaggcgttgcctccaaggtagcccaacaagattgacacggaagactaagtgtgtcattctattcttttaatatattgacgtgtaatacttttacgtgttcgagaaaaaaaataagtatgtcacttcatttcgtcctcgtgacccgtaaaagaaaagcaaatgaagtaaaataaactat

SEQ ID NO: 49255 - DNA, 702 bp, Oryza sativa
ttggttcgacagaccgatctatctaatataatgatatacagtgcaagtgtgcccctcaaacatggtctgccaaaatgccaacaccactgttacatttgggcaagcacgggccgaccgttcgccctcggggtgatagggcgattaacgtgctgcaacgcaagccacacgcacaccaaccgtgttagtttatctcgtcgtacggagcagatcaatcgaatagctctgattgaccggagcacgtacactgtgctgtccgtctgccaaagctcgatcttacatatccatctgacggccacggcgagacggatatcgagtggatagatggattcacgcgcccacaaagatctgcgtgccatccgaggctaacccacaagtggggggaatataacatggtgtttgtcggccactttggagtcctttaatattttgcagcatactccgtacttgtacgagttgttgatttgattcctctgcatcggcacgccgccgaggagaagaaaaaaaaggcgagggtgccgagcatgcaacgcgatcgccttctagagtcttcttctggattagtacgtaccgatcaactaccgagtaccacgtacatatcgcaagtgccagaggaagggatggatgatggatcgtcgtctttcatgcatgaaactaataatcaagcagacgtgtaatagtgcttaattattggagtcttaatta

SEQ ID NO: 49256 - DNA, 943 bp, Oryza sativa
ttttgagcctattaaaccgtcgttagcacaggtgggttactgttacacttatggctaatcatggactaattaggctcaaaagattcgtctcgcgatttccatacaaactgtgcaattaatttgtttttatctatatttaatactttatatatatgtccaaatatttgatatgatgtttttgggaaaaaaaatttgagaactaaactgggcctaatgggctttccccgacgccctgacggaaagggcaaaaacgtcttcggaatacagatgagatattactgcacgtttgcatgtttcagtgattcacctacatctctactgatccttttacagattattcatgttacaagtatgcacattttattccttcagccccaacaccacgcccttgcgatagaacggacgggcagcgagagggattagtaaagaataacacagtcaagaaacaggagtcatcgaataacagccatgcaggttcggaactggattgatcgaccagaaaaggttcggaaacggattaatcgaccaaaaggttcggaaacggaaatggactaatcgaccaggaaaaatgcccccgtccatccggtgattatactgatatactaatttgatatactaattttcagcccaggcagcaattcagcattgcgctgcggtaggcaagttgaaaaaaatatttataacaaatgaaaatctataaaactaaatgagcagatcaaaatctttgaaacgtggattggttggggtgcgccgggcccaagcagtagtgcaacgctagggcgacacgcgagagccccgatagcaagctaccgtggtgggccttcccccacaaaaaataaatttaatatcaaagtgaacacatagcccacatatcagatattaaactgataagaacagatactacacttgatcttagccaaaaggccgagaaaggtatgagttg

SEQ ID NO: 49257 - DNA, 667 bp, Oryza sativa
ccctcaccaagctccgactccaactccgttgtgggaggccatgtagaggagggagagagaaagggaagggggagtgaggatgccaccacgtggaggtcgcttttatttttgccacgcaaatgcctagtcaatacgagtagattgggttaacttgtcacgttagcaaaatcaaccatctatactattgtcacgccccggactagtaccgaccggaactagcccgtgacgctccaaattaacctgttaatcgataccagtcccaggaaacagtgctggtatcacaggaagacagattatcacagcaacagaggtctctttattatagagtagaggtacagtcatgttgggctgtggacagatcccgagctcacaattgcattacaaaagggaaacggaagccaggacttggaccaaacaacacaggcgcgacttgggaactaagccgaaaccctaaaactcatcgtagccggcttgctcctggaagaactcctcatcagcaggatccgcttcatcttcttcagcaactggggggggattatttatataaagcaagggtgagtacgggagtactcaacagccatgggaaataagtgtttaatgcaggcttcaagaaaaggctgttgtttttgcaattgattttatttgaactcttttctaaaaacaacta

SEQ ID NO: 49258 - DNA, 517 bp, Oryza sativa
cattctagacgcacaaaaaatatatacaaaagaccatcgatattgcaaacagtaggaccaaactttatcctacaatgatgtcaaataattaaaaaaaggaaaaggctatacatactaactttttcttactaaattcctactaacactgatgtgtcatgctatgagtgcatctagattttttgtaactgccatctacttaaatcaaatggttgagatgattgttagtaaaaatttagtaagaaaaatttagtacgtgtagcattgctcttaaaaaaaatgttatgaaacagcgaaaactacaagatgcaatagaaatccatcgtaatactacaaatatgaatatacctttatctatttatagtattaacgtgatctaatttcatcctacattactgtattttgatggaggttcacaatgggatccgccaattagttcaggcaaaggcaacagcctgggtttgaacggatccgcccagacggcgttaattgtccttcgatccattattacagaaacact

SEQ ID NO: 49259 - DNA, 957 bp, Oryza sativa
ttttattgaacattcatttgcttcagtacatgacgaattgagcgttttacagctacgcatggaagctgttctctgcttcgtgccgaaagtaaactgatcaataaaagacaggctactagtatacaataaagttcctgtgaaattaatcgtcccactctctttcagcacgtataaacgagactgagagtagtactacaaataattgtgtgatttgtgaccaaacggggagaagtgccttccccagaacggcattagggcgacgagagcctacggctacgtacatgcgcaaagttattagcaaatgcacacggaccacacgtgcaatattcttgagagtgattggagctaatatctgctccattgctaatatgatctacgtgtccgtctacatgtccgtgtcagctacatggatgaaggggagaaaggggtaagtgaagcgagtttgtcacgatttgcacagtgtacctaccgcgtgtgacgttggccagcgaaagctcagtcgatcgatcgacggacgacgacccatgcgccaatgatagtacttgccgtagtaccaattcaccagggagacgagagtacgagacgcagtctgcatgcatacataatttcgacgacctgcagatcgattaaaggcggccaatgcaagcttggcgtttgtccgcgccggcactgtttgcgttagctgctatagctaggctccgcgtgcggccgtgcagagtatggggtggcatactgctacagtacatgctacgcgctgtgccgcggatcgcgacggcggcatgacgacgcgcgctgtatcaacctcgataaatcgtcgcgattggtaggagagggatcggagggagccaatgcaagcttgccggctgtgcgcgatgatggggtgaaaacagatacggaaattcccgatcgaccgaacgacgttttcgtaatatgggtaccgagctcgaattcgcccta

SEQ ID NO: 49260 - DNA, 1231 bp, Oryza sativa
aaacatgtgaagagagagaaataaatattgaacgataattggaaatcagtaacaaactaaaaatgaaagaaattgttgagagtaacaaaaaaaagtggaaatcaaacgggtggttttcatgattcctcacgaaaacatgtatttaaggccgtaccgatgtgtatgatgatgatggataaaatgtgtattcaaggctttacttcaaatcaggaaaatcgtacctaatcagccatgacaatgaaaatcacgaattaaagcacgcggtttagaagcttcattctcaaggagaaacaaacaacgggctcaccggagttaacccctgaaacaaggatcccaacttcccactaccggtaacacggatgaccacaagcaacccatcttgactcccatccctccggtccccccaaaagagtaggcacgcgcgcgcgtatagtacgtatcacatgaaaacgaggtccctttgaagaaaaataacgactcccatccctccgttcccccagaacagtagtagcagcatcaccgcatcacctccatgcccttgctcgtgcgcatgtatcaacacagtcacacagctacgcaccacgagtccaagcttctgtttgaaagagtttaaaattctaagaacacacaaatatatctaaaaattcttttaattttgggaaaaaaaactcgagctggtataaagctgaagcatccctaaaaacaagcccaagacgaaatgacgaatgcgttacgacatgggcggagacggagggagatcagggtcgcgagtacaggggcgttggcttcaccgatcgatcgattgggcgatgggatctcgctttatcccccccgcgcgcggcgtcgcccgtcgtctcactgtccgcgcggcccggccatatttatgcgcgcaaccaccccgctgtcctcggtgcgacgctgcatgcatgtccgtgtcccggccggtgcggggcgtggcgccacgcatgcccgtccgcgtcaacgtacgcctcagcgtactacacccccatctttcgtgcgtttctcgcacacgccgcagatcgaattatccgttgtgtttttgtttccgtgcggctgcagagagaaaggaagtgactggctctctctgtctgtgccggaacaaggttaattacaactgccgtgattgttcgcgctttgggatgggacgaagtggaggggcccggatcgatcgaaccttgccgtaatttcaaaggtgcgggcaaatgcatgc

SEQ ID NO: 49261 - DNA, 1393 bp, Oryza sativa
ctatagggcgaattcgagctcggtacccgtgtagggaaaaaggctaaacgaactgttgttgattttcgatcagtatccagtacctacaaaataaggcgagctgaatttcttgtaaggaagtggattggtgaagtacaattgggataacacaagttgagaaattcaatctcagagtatgtacctgctataagcgcacattgttcgaagatcaacttatcaggcactagtagcattgttgtattagttttcagtacactacagaacaaccaagagggatgctactgttagtattagattagctagtgtctacttgtaattggaacacagggaaaacttcacaactaacagtcaagtctgatcggtttcaaacacagtcaaatctgaaaccatgcatctcgcctagttcaattttatatataccattcataagtaaagaattgatctatgtacagtagtacgttgctcccgaagttggcatgatattgttttttggttaaatttcctgcgtttgccagggacttaagctatcccaaatctcaaggtatgcaggcaaatttccatttctaaaactttttttagaaaaaaaatgcatctaaaacttattttaaaagtggtcattttggctaattaagtgcccacgatggagtggcgagtaagtattagttccaagactcccatgttgattcaaatgacgagatgtaagagaaatatgcggagtcatctctcatgaaagagatacaagtcattacacaagctgcatgaaagataaccatttcttacatctataatataactaattaaaagatacataaagttttcggggtttttctgtccgtccagtttttttaggcttctgattttttttttctgattcgatccaccacacgcacacgcagcacaattacattaaatatatttattagccggttgtgcaagttgggcctgctggatcgaaaagagacagaccgagcgaagggtggtagtgtactaggttggggctagaaaggaaggaatgaatagtatttggcccaaaaccaaggaagaatttttcattaacttttcaattatgatgtatatagcgatcctaatgtttcaatttatcggagctcctaatagctattatatcattggtctttacccactggtataattctagttgtcaaatgtgaataaatgaataaaataaaattgttatagggtattagggatagtatcctaaagttgttgttttatgtacatatgttaatttctaattaaggaatgcgtacataatattaacaaaattatatgtaaggaggggatcctctagagtcgacaatgttttttcttacaaaaaccttacaaacaatgatgtgatctctatacatcgactaaaatctagatttaatttaac

SEQ ID NO: 49262 - DNA, 769 bp, Oryza sativa
gggcaggcaattggttgctagttgaattttgagatttatttttaatccatgcaaccagcggcacgtttcaaataagaaattgaatgctagtggaattaagtagatcaaatgacataaactaagtggtaaaataaaaatctgtatccatatgacggcgggtactgtacaatattaatctgcacactcgtgcagaaataggcagagttttttttagaaaaaaaaactttctgaatcgaaatccatggtcgtcgctcctggtatatataatcttcatttgtcagacccacatgacaaactagacgacttttctcagtttccagttcataatgccgaggacaagcgaagctccggtatgtagaggagcacaagtgtactccatgcattaataattccattgaaaaccagttcgtgtcttaaactactaataattgagtacaatcagtgtgtgtaacattcaagactctgcacttttgtctactttcgatgagaactgcatgtgtcttcgtcggcaggaacccagcataacaggagagcaaaatttatagcacaacttatactacagtagtactttgcaatgtgcgggcggataatgcagcattggagtttatgctgtttgggagtattaggtttcagcgaaaagaaaaaaaggaggacacagaaacagcgcgctgatgatttacaccaaaatgcacgtccagtattttctttgtacagcatctatcttgtgctactccagttcaaattactggttgattgttcagggattcga

SEQ ID NO: 49263 - DNA, 2260 bp, Oryza sativa
cccatttctctaagcccacagatcagtagcagtaccttttactccatcctggtttagtatctgcttaagggaccgagttggccgggtacatacctaacaagcagcagctagcgcgcggtgtggtacctagcttggacagcgaccaatggtactgtttggcgacccatgatgatcactggccgggccggcgcgcatgcatgatggtgcgccctgaacgcattcggtgtctcggactgcgatcgccgcggacgtatgcgcctggcgcgcgtaccgtgtaccgtaccgccgctggagagaccactcgtacgcttgcacgctgtgggcgtagtattgcaaccgggcggccgcgccagcgtacgttttgtccttccctaagaccatttccaacccataacactagatataatttccataagcttcacatcatcgagaaactagtactagacactactcttccaatgcaaacaccactatttcatgcttcaatttaatgttacttatctcacatgatgtcttggatgttgtgtagaaatcatgtctcgcatggtttccttctctttcctcatttattcacttgccacatcattttttatcctatgtagcagcttatttaatgttatggacaccatcctagtcattgggttgggaatggcctaatcatgtacccctcccatgattaccccaattaatatggagtatatacgcagtgagcgagcgtaccaccaaattgaatgaaggtccccggtccaggacgacgaacagcttaattaattcactgcgttaattaatttttgatgatctcgatcgatccgtttcgttggacacagcacagcggcgtgcctggtagaagaatgtactagtaattctttgattggtgttctaaaaaaaaaattctttgattggtctgatccgacgatggatgtgtgagattgtgagctgtgtgtggtgtgtgcgcgaatgcgaatcagcgtcagaaaaaaagaccgaagaaccttgaggggagaaagggaacatcatatcgacgtcgatctctccatcatcttctccatttccttatacgtactactagctttgatcacgtcgagacttttgcgccccgaaaacgaatcgacggcgccacggcggttgtattggtcgcgtggctagctaccctttgtttgtcgctgcccctgtggctttgcgctttggccgtacgacggcgacgacgtcccggccggacgacatgctgcgtgagtgattatttcattatttgtattttgggagtggtttggagatgaccatcaaagggtggcgaggtctatcgtactacatggaaaagctagcacggcgtacgtacgtggaattgtgggcgacaacggatttgttcaggtgatagcgagccccctgacgcggacataacaacaacagcaaggcaaattaatcaaggcttctattggaaatctacgttacggtaggaaacgtatccggcggggacatacgtatattaagaaggaaacgtgctgctccttctagtagtacatgttttctgttcaacttttcgatggcaaagcttagaaacaaaagttaaatccctttaactagtcctaggtagatacagacatactttgtacagtagtatatgtgctatgctccgtactgtcacagtagatggcagtcaatcgttgtagtactacacaggagggagtttatcacgccagattctcgcgccttggaggaggcgacaaaccaacagctggcacgcccagcagccggccggcgccaccgctacttgttgtggctccccgcagcgcgcggcagctctctcgatccatttccgatcgagccgagcgtgactacgccacgacagacggggatcaatcaggagaaaaatcaatcgattacccgtacatacgcgcaggcgcacgcaggcatcagcgcgcgggtcagcgtagcgaccccccgttttctctcccactactcgtgccgcgccgcgccgctcgccgctcccgcaacgcttggggccgcggggaggcaaggccgcgcccgcgcgctggcgcggcagcgttgcagctggccacccgcgcggccgcctgcgaaacactgtggacctctttcgtacggggcgcgcactgccacgcccccgtcgcgcgctgcccgcacgcggcatcacgttgcctttttctttcgcctcggcttcgggttcagtacggagttttctctgtattcaccgcaccgcaagcggacggctcggtggaccgtaccagtaccacaccggaccgca

SEQ ID NO: 49264 - DNA, 612 bp, Oryza sativa
cgagctcggtacccggcctaccgagggtcatttataaagggtgtgactctggtctttttttcctctcaaaatttaaatgtacaaataggccctcggtttgtagtatttataaatggccctaagataaaacttattaataagtaggcttttgtttataagttggacaagtaattttgctatgtaattcatgtgcatatatcaaactaaaatttgctatgtggtgtgcatatgaaactcggttgggtaaattaagatgtttttacacatacccctcccagagagacactaaacattatgcagaggtaaagaaaataaaaatcagatttgtgggttttttttttaccaaaatacatcaaatttccttaagatatttagaaatattttgaccttcgagaagttagtacaaaactaaactctctatcccaaataaattttacgataattgaactagcagttgactgtgccaaattattgtgttctaaacaaaccatagaaaatatatagtctatttttcatgagttcttaaaaacggataaaattgacagaaataaaaattataggataccttgaaaactaataaatatatgttctaaataagtcgtaactaagtcg

SEQ ID NO: 49265 - DNA, 1451 bp, Oryza sativa
catatatatatatatatatatatatatatatatatatatatatgaaggggctttcatgatatttcattatttaataaatcccttcaaaatattgtctaattcaaaaggggtttgaaagttttacacatattttacaatattttcccttcaattatatgatacaacccctagtgtgaggtacaatttatttcaatgtaaaaatatgtattaaatccggtgcaaagcaaaccaaggttcactctatccagtgcaatatgcaatttacttaaaaaaaacctaccaatgcgtttcatatatcgtgttaaaataaataaattgataaagctaccttaacaaagctttggataaaatattttaaatgcccataagaaatctatggtttgatttaaattctactcatgcaccctactaccattagtggtagaaggtactgaagagtgttggtcaatttgaaagataactgtaaaagtgccaaaatagcttacagtatctcgaaattgaaactccaacaatttgaattgcgttgaattatctacttacacaattagtctggtttgtagaatattttttcttcacctggttttgtagaatttctagtgttgtgtagtacttctacaagaaaacacgatgcttgttctacgtagctccacctaccatgtgggcctcatggggccggcgaacaatggtacgactcatatatgggctacaagtaacaaaggtctgcccaaacgtcttttttgtagagaccctctttttagaacaataattttttctagagactagaggtgttatttgcacccgttgcaccggggccaaacatatgcgtggtgtacaactggacatctctcctaggcctccgagaagcatagccggtggcttgaggtgctgagctgagtctgaatagaatcactttcatttctttcattcttttcacgagatcacgattaaatccttcagcagccagcctagtagggtatgggtagacagaccagccgtacctccgtttgctagctgcagccgaggggtgagagaccaaggaatggccaaaagtgctcgtcatataatgtgtggcagatcgtatcgcaccattttatgatgagacggagtaggtgaccttcaataagtagctgcgcaacattacattttttttatgttttcgttcttttaaaaaaaacttatttatattatgtcgtgacattaggtcacgaataagtttggagataaacaggaaagtttcttttctcgcctatccaaagaaatgagctcaaatacaaaatacagaactttgatggctaatgtttctctagtagtattaaattatgtcttgtcttgcaacatgcttttgatcggcttatataccccacaatcgtacatgtgagaatacaactttgcccccatgggcccttgtgagtttaaaattatactcttgccatgtcagcaaccctagatgt

SEQ ID NO: 49266 - DNA, 941 bp, Oryza sativa
agaaaaagaaaaggcagagtccatatagaaatccattttaaaatagcagaaattcggaataaaaaaaggaatattagaagaggaaactaaagtccatatagaaatccaagtagaaaataatagaaattcggaattaaaaataaggaatattagaagtagagtatagagtccatatagaaatacaagtagaaaataatagaaattcggaattaaaaaataaggaatattagaagtagagtatagagtccatatagaaatttcaaactaactaaaatttagaataaacataataaaattaaaagtagagttttgagttcgtataaaaatacaatttacaaataactaaaattcaaaattaaaaaaagcatgggaagaagagtttaaagtcaatataggaatacaatttagaagtaactgaaattcgaaattaaaaattaaagaatattgaaagaagagtttagagtccatatagaaatacaattagaaataataaaaattcagaaataaaaataaataatattggaagaagagcctagagtctatatagaaatcctagagtctatatagaaatacaatttacagaaaattcggaattaaaaaaagaaaatattgaaagacaagtctagtccatataggaatatatataatttacaaataactaaaatttgatattaaaaataattaataactaacacgtatataaaatacaatatgaatattatacatttttattttcgtaaagttattgcaaaatttaaaattatgatgtcattttaatatatttgaataatataatgagaaaacatatatgctattatatgagagaaaatataatgatgctagccgcgcaatctgcgtgggctaccatgctaattatttttttaaaaaaatacaaataggtcgtcaatgctgacccccttcacatggtgtcggtattagtg

SEQ ID NO: 49267 - DNA, 536 bp, Oryza sativa
cgagctcggtacccccgaatctacctgacctcagtttaggatgtaaacgcagccagcatgggcatggcaggtcggttccgtttgggtcccacaggtcagcctctttggtgaacttctcttacaaacggcccatcatcgtggaaataagcaaaacggcataattacaaatgaaaaataatttatgaataaaacttttatatacatgtttttggtgatctaataaaagtaaaggctgaaaaataaacttccataaaaaaaacctcaaaatcaggttcaaatcaaattcaagattaaaaattcaaattttgactgataagtataagtataaacgaaaagatgagatacgaagactccttttggtgaacttatgtaggttcattttggattattttaggagggtaacaaatcagcaattttgtttggagtctcatgaataactctgtttcgtttctaactctaccctaccaaaaacaatatgatttttttagcaactttcgtatataaacttttttaaaaaaagccctatttaactgttt

SEQ ID NO: 49268 - DNA, 760 bp, Oryza sativa
tgctaagcgatatattctgtgcaaaaattatctaaatataagttaatttaaaatatcgaatatatctatttatcaagtttataataattgaagtaaattaatcatgtgttaataactttctcattttacgtgcaaccacttaatcttcatcttcactcaatgtctcgctgaagtagaactgtagagaactagaaattcgtcatatttgtcccagttccaattgaactcagtagctcatttgctcccaggccacagggccatttcggagtagctggtctccctgagtatttttgagtcggtgaactgcagagatggatggtcatggtctggcatgcatataatactctctcttaatccctgaatacgatacgatctcatcagagacagtggagctcatgtgttgatttaccaaaattagttttctgtggtgcttgcagctgaaacaggtctcaagtgtcatggaagacatgcatcggaaacaattctcaaatgccatggaagagcaaaatttgctctttgcagcagtagttgttgtgttttcagaggctcagagatgcatcggtgcttaatttgtcaggccctgcttggtggaacggtggcgggaatgctctaggaactttttagcatttagctcaaattcaattagctcttactcctatttcagaacttgaactggtgctctttttcagaattttttttatagctttcatgcttgaaataatcaaatcagttgatcaacagcagtctgactaagtgttgc

SEQ ID NO: 49269 - DNA, 556 bp, Oryza sativa
tgcccaaactactaaacggtccattttttcaaaaaaattttataggaaagttgctttaaaaaatcatattaatctatttttgaaatctaaaatagttaatgctcatattaattccgttttacgaatcttcccaatcttttcaacccccttcttctcgagctcagttttctgctctgaaactaaaaacctcgtgaagctttttcagtattgtggcacataaatgtaacttggcaactttgaaaagagatttgtttgaattttttttaacttatatcgagctttcacaaatatttgaaactttgaaaaacttgttctttgcaaaattgaatgaaatttgtccactgtgaaagagtagcaacaaagttattcattgcaagcctgggaagttttgtttagctcggtcgaactaggtgatcagggcatcctccatcatcatactattcatgtacttatattactatattagtactatattggccggagagagtctggtatgtcatataaggcccctctccctctagacgatatagcccagcagaagggagacattatttac

SEQ ID NO: 49270 - DNA, 706 bp, Oryza sativa
ctggttaagtcgcctgggtatgaaatcacccccctactcgtcccctttttctccaaccactgataattctgtttcgcttgggggttccatgggaattagtggtcatgttccgccgatgagctgtcctcagttcaatggagatagtcctcagatgtggaagagcaattgtgaggagtattttgaaatttatggagttcatcctcgcaattgggttcgggtggctggattgaattttactgggaacgctgcattttggttacagtccataaggtccacgttggttgggcttagctggcaagcgttcacagatttggtatgtctccgttttactaaagctaggcaggaagtacttattcgtcagtggttccatctcattcaggattcctctgtgtctgactatgtggtgaagtttgatggtataatgcaccaactcttggcctataaaagtgccttaccattgaactattttgtcactaagtttgtggaaggtctgaaacctgttatccgctctagtgtgctgatgcaaaaacctcaggatttagactctgcttgttctctagccttattacaggaagagattttggaaggggatcaatctagtcagtataagaggcctgaactgtctgtcacctatcgacacactaatcgactgtctttccaggctgccacatctattcctgtcactacagttgctgcagctgatgat

SEQ ID NO: 49271 - DNA, 662 bp, Oryza sativa
tcaacacattttttaaccgaagaaggctgagaacaacatccgtcccctttcatattctccatttgcaaatattacttgaaacacatgacacagctcctgcatttcctcggtaaaaaaagttaatagagaccttaatcagaatttttaaagtttactatataaaactgacaatgatggtgaatattttcttctgaatctacatgtacaaacaatacacaaaagtaaatcatagttcatcataaataggaggagcaggagcaggagcagcaggtgctgggacaggcacattcttgacttttgctacaacgtcttcagctgatattgagcctgatctgatggcatcggccagcttcctttgcagtgtcaacaggccaatacgtctcgagacaacatatagcaccgccaaggagaaaatgagaaaaccaatggtaaggatgatcctggtaaagaaagccaattagcaattggtacaacccagaaaatagtattaatactaagtattgcaccggcagaaacttgtttggcagataagaaaattggaatcatcaagtaacgtaattggtaaatcaaatgcgcatttggttccacctttttttaaaagagaagagcatttctatctatactcctttaaaaaggaatagtggtggtggtgagtggtgaat

SEQ ID NO: 49272 - DNA, 668 bp, Oryza sativa
gagagacagatcatttgtacatccaatgacaaatcatcaacatcaagtgtgccctaaaaataaagccaaatgattcatcaagtcctaccaattctacaatggcaacaacatttaacattaaactaccaagttgttcacatgcacaaatcacaaccatagttgattcgatcacagggctggggctgggcgtgcgtgtggtggccaccggccggcaccctacgcctgtggcttgtgggttagaggtggggcatacccaggattttgaggttgggtattcgaaatgggaaggggtgattttttttttataacccaaagcctaatatgtttaatttcatgtagttctaaactactagttggataatatatagtggaggatctaaattcagtactagtcatttcatactttcttaaaaacatatgcactataattatacaaaagaacaattgtacaaagcttcacaaggttcaaaaatcaaagttcaattggtgaaacatatggttataatttctattgttccctagtgatgccctttcgatctacatttactacaactggattcactggcaatcaatcaatcaaccatccatggcttcaaatggaaaagatgttcccaataatcctaaatcacagcaccactgaagcaaacaacaattaccttagggtttct

SEQ ID NO: 49273 - DNA, 2036 bp, Oryza sativa
ggatttgatgcaacagtaaaaggtctgtaaatgaaaaagcaaatccaggacctaattaatcttttctggccatccagtactccactgcacacagtcaatcaccaactctctccaaggcgtaaaatgcggcgagcctagacaatccgaggccgagcagccatccacacgccaagagtttgtttggatcctttcattcaagtactagtaattcaataattgtcacccactcttcatatagagtgaccgagaatgggatctaaacctttagtctataaataactttataaattctaaagatttaggaataaataaaagggttgggttaaaatttatatacatgtttgagttagaatattagaaaagggttgagttgaaccgtgaaagaaccgtcagctgtatgcatggttgggagaactagatatttgaccctaaaagagataaaaggtcaacattacacatacacttaggccatacatagtgtgagtacctaacgagtgattcaggctcactacatcagagttatgatggcatatcagccatagatgtgtcctcgtgaggcttctcgtgcgtcgtcagggcacggttgcctcatcagggtgagtgcttgggctcaccatgtcagagccgtggtgatatatctaatgagatagttccttcacaaggcttcttgtgcctttgcagagggcacaattgtctcattaggatgggacacttgcaagtgtagctaaagcatgcaagccacgtcggtaaggccatcgccccacaatatgccccctccttccgcgtggttgcacagacctcaatgttgcgagtactgacaatgtcggttggaaagcaaagaggcaatggctagagatacgaccgacaagtccgcaactagtggagagggtcagatatagatagaggaggaacgtggctaagagtagcactgcatactattaggaccctgtcaccattgccatcaccgcgaccaggagatgtcatcgaccaagtcactgccttttgccgccgaacttgttgggtagagctgccctcaacatggctggatttgaggtgaagaaggatggcggcagccaggactagacagtggagtagcccgttgatctaaaccaccttcgatccaccttgcataggtcttggtgacgtcagttggagagggggaaagtcgtggggctgccttcgatccacaatagtgaagttgtggtggctggagtgggaggagctgtggtgcctagagtgggaagatgtgttgataggcaaaacgaatataattagtggttgacaagtaggccaatggttatgatgtaacttttgttgatgattctaaaggttgttctgcatatttatttaatgtaaaacatatattagctaagtttatgaactgaattatttcaggccctagtcaaagccaccatacattgtgagaagggtattataagatataacttcaatctacattccacattctttctccctaaggccattcttagaagtagcttccatcgtgaatgcccttatgcagttttcccgtccaatttctacactgaggtagtatatatagtaggggcaatttgcagggaaaatgatggaagacattgactagaaataaaacagattgttcttttttttttccatcaatagatgaatcacaaaagttggcatggtatgaaaaagtagagaaaaattaagcctctcattgtatgcttctcttatttgccgaatccaaaatttaaattttaaaacttaattttagagttatttataagtttctttgttcatactggcttttaaattgtgaattatttttgttagtttgttaattttttaaggacttatcaacccgtaactcagaccaatcaaaacttaataagtaatccgaaatctcttcaagtttactccttcgggagtccaataagaccggcatgcatcaacatgctactcatcggtcgcacctcgcagtagcgcaactgaaacggctgcctcctgtacgtgcatgcagatgcagccgcatgtcgtctttggccgtttttgcaggt

SEQ ID NO: 49274 - DNA, 696 bp, Oryza sativa
tatggaagtattccctccgtttttaaatatttgatgccgttgactttttaaaatatatttgaccatttcctatcatttaattcattgttatatatatatatatatagacacacacatacatatatatatacatatacatatatatatatatatatatacatatatatatatacacatatacatatatatatatatacatatatatatatatacatgtatatacatatatattacatattccacaaaagttcttgaataagacgaacgatcaaatatgtgctaaaaagtcaatggtgtcaaatatttagaaacggagggagttgaactagtttcaacagtcagacgaaaaacaaattgtgaaccattttcctgcacaagctaccttttcctttgaattgagaggaagagttttacgcaacttgtcaacagtggcttttcacggtggaacctaataaaattcaaaattttctaggcatgacgttatattttgtaaaaggaacaaaagcaccgggcagactttttgagtgtacactggcaagaaaaaagaacttcacttcgtttcgtcagaatcataagaaacaaaggcagcaccgcagcacatcaaacattttctgccattcaaatgcacaacatatgatccatattattactgctagctaacatccagagtcttagtattctcatagccacacatta

SEQ ID NO: 49275 - DNA, 1783 bp, Oryza sativa
aattcggaattaaaaataaacgttcgctgtgggggttagaaattcccacattaatcggagaaaaagaaaaaaaaagagtcaagtagaagtacaatttaaaaatagctgaaattcggaattataaaaataaacaatattgaaagaagtttccatataagaacccaatacgagattaatcaaaattcgaaataaaaataaaataaaaatccaaaattagaaaaggaaaggagagtccaagtagaaatacaatttaaaaataggtgaaattcggaattaaaaataaggaatattgaaataaatttccatataagaacccaatacaagattaataaaaaattgaaataaaaataaaataaaatccaaaattagaaaaggaaatgagagtgcaagtaggaatacaatttaaaaatagctgaaatttgaaattaaaaataaggaatattaaaagaagagtccatataagaacccaatacgagattaattaaaattcggaataaaaataaataaatccgaaattggcaaaagaaaataaaaaataagagttcaagtaggaatacaattctaaattagctgaaattcagaagtaaaaataagcaatattgaaagaagaatccatataagaacccaatacgagattaattaaaatttagaataaaaataaaataatatcaaaaactagaaaaaaaaaataaaagagagttcaggtagaaatacaattttgaaacaactgaaattgaaaataaaaaataaaaacattaaaagaacacaatacggtattaactatttttttaaaaaaataaattctgaaattagaaaaagaaaaataagatttcaattaggaatacaatttataaataactaaaatttgtgataaaaataaagactattgaaagaaaaaaccatctaaaacacatgacgagataaattaagtaacatgcctataaaggagtagagtggtggcggttgatacgacatataaaaattgttaataaaacatgaaatagaatcctaatgacgattaaaaggagggatgtcaggcaagccgtgaagcaaacaagtaagacggttgccgggacttttataagtaaaaaaattaaaccccattgataatcatttcaatttttaaaatctcaatgacaataaaaaggagaagcagcgtgtggggtgtataagagtatagttgcagagccatcgacggttgacgagacttctagaaaataaaaaatgaattccaatgatagttatgtttaatttttagaatcacaatgacaataaagagtaggtggcggatgggatgttgaggtgcgtagtggcatcgtttgataggacttataaaaattataaaaaataatgaaactacaagtccaatttttaaaggtttgtaacttctaaaaggtaaaaaaaatgataatcatgttcaatttaaaaatctcaatgacaataaagaagggaggcagcgggcgagccgtagaggagtacaatggcaaagccgttgacggtttggcgggacttctagaaagtaaaaaatgaacccaaacgataattatgttcaatttttaaaatctcaatgacaacaaagagaagagacagtggacgggccgtagaggagtataatggcaacgtttgacgggacatctagaaattataaaaatgaaatccaacgtgataataaactctaaaaactataaaatacaatttttaaaggttccaagaagaatgaatagaaatagtgatagattgagcaagcaaataaagaagaagatgacataaggggtagcaactg

SEQ ID NO: 49276 - DNA, 532 bp, Oryza sativa
cccaacaagattgacacggaagactaagtgtgtcattctattcttttaatatattgacgtgtaatacttttacgtgttcgagaaaaaaactaagtgtgtcacttcatttcgtcctcgtgacccgtaaaagaaaagcaaatgaagtaaaataaactatgattaagaaaacaaatggaaacttactccaagttgtaacatttaaattttaaattataagtataagtcaaataatgactgagacctcgaatgagtagtttatgttaatgaccatgctacaaaagttgactcttgctctgtttgcgtagctgagcttgtgaactgtctcagttcgatacacgattgataggcctagtctagtattgatgctttccactgcctgtaaatgaaaaggctcaataactgccgcttgtttagttggtgaaaagaaaatatttagttgtcacatcgagcgtttgaccatatgtcggaaggggttttcggacacgaatgaaaaatctaatttcataactcacccggaaaccgtgagacgaat

SEQ ID NO: 49277 - DNA, 628 bp, Oryza sativa
cactaatgatggacccccagctcttcactttatgcttactggtagtctgttgggtggaagtgtgagcggttaacactatcacacaggcaagagatcttcccacaaatatttcttagtaatattgagacactataatatgatcaatcgatactgcctgaacgctgtcgaattcatattaaaaaccaatttggggccgtattttattttaaatattaattctgaaaaaatattttgttgtgttctagatggacactgcttctaatattctttatttttaattctaaatttcagtaatttctaaataagattcctacctgaactttgtcgaattctacgaattcgtgttgagatcaaattttgggattcatcatgacgtgtctatcactccgctctttttttttaataatttcttctatacttttatacgggattcggtaattaggattaccaattcatcttcgaaaaccctatatcttagtcgccaataatttataattatgagacttacatcacttgcatatataaggtggggatttacatatgtaataattttgagacttatagatctaatacgttaaaattacatatattattttagggactcataacgtaaatacacgcttactat

SEQ ID NO: 49278 - DNA, 724 bp, Oryza sativa
ttgtaataattaaaactcaattaatcacacgttattactacctcgttttgcgtgaaacacttgtttaggagattcaaacaccatcataatctatcatagtggaaaaagtaaaaaaaaataatcaaagtttgtaacgactaaatacgaacaggagcaattgaaacgagctactgcaactgccgccttttctgtaagaataccgcaactgctgtcgtcttccgtttagcaacaaccgttttaattcaaatttacctttttccgagaacagctcgaaagcacatagcgtatcggcggttgcttgatactcacaaagtcacaagtacagccacatttcggctacagaatctgatccaaaggcagatacagagcgtatgcacgtatgcgtgcatgtggctgtggggtcgcctcaactactaagaaatcgaaaggtgtggatgattagagctctctccattattacaggattagctatttcatccactaattaattgctcttatttgacgcgcacacgtagaagttcagaaggtcagaatacaattagtttctgaacatctcttgttcttctgaagtctgaactgtactgctcatgcgtgcacataatgcagcttcttcccccaaacacctcaaaagctctgtttaactatgcagcacgatatatatgattatgctctttgccacgaaaaggggtgcgtcgcatcgaccgggggatcctctagagtcgac

SEQ ID NO: 49279 - DNA, 1352 bp, Oryza sativa
agtaatcacaaaccggttcacttccatccatctcgccgttgttccatcgcttccaacttcctccaactgaaaaattgtttctcggctcgtgccaggatatataccgtctcggcgaacgcgccgatcgaaccttcgcgagcacccatccatgcatcgatcagacgttgttgttctacgcacgtacgctaccttcctcgtcgagccgccgcaccctctcttctcgatcgtcgcacgctatccaattgcctcgggcatggctggctgcggtttcggcgccgcacgtcccgctccccgcgcgtacgcgtacgtgtcagctggtcgcgttacggtttcgatacaggcgcggtgcatggtggcgtgaagacagcagccacgcgcgctaggccgctagctggcgtcgttctgagttcgtcacaagcaagaaccaagtctcgtatcgatcccgtgcgtaaatttgattggttttgcgcatgtttttgtaatgataaatcgactgagaaggttaaattagcgtggtgctagtttgagatttgcgcacgctgtagctgattagttggtgctttctgctcgtcgtggagacgcggagagtatctgatccgtgaaagcaatggcacgtgggtggggcctgaaaaggtccgtcgtttaggttcgctgtgtgcctgtgtctgacaaatcctgttttatgagtagtactccgggtgcacgtagcagtcaggtgcagcaagcctgcaaagcgacgtggatgaattctaccctatgaccaggaagcatcaagcatggtgcaacgaagagccaagggcatggaaaatggttgctccacgtaagctgaatgcgtggaaccaaacaagaagattttaattaatttcgagtaggtgatttttttttctgtttcgtattttcaatgacgagcacaatacaagattttttttcctcaccccaaaaacgagtggacgaataaaatatgctactgggatatactttttttataaatatcatttgagtttaccttttaaacactatgtggaaaaatgctcttgaataaaggagaaaatattggggagggtttctctgtatgcgtgatgagagagagaagagcattatgtgcagttctttttcttattacgctcaccgcatctatgtatcatctttaatccagtttagttatgcgatttacaataaaaccattatagcagctacaacaaccaagtattgaaattcatttgttgacgtcggtaattgtagttgtcgattgcaactgcattgcggacatggtaaaacataaccgagcaaactctttatgagattactatttgatgagagtttcctcatcaacaaaaatttttgatcaatgg

SEQ ID NO: 49280 - DNA, 526 bp, Oryza sativa
actggtcgatcatgcatgcaactacggtcgccgtcagaagtcagaaaaatctggtcatatagcgctctgttcttcttgacttcctgtgaagttctgatgctgtgacagcgtacaagtgcactcgttgtttgtactttcggatctgtttaattatcacgttatccaaaacataaattaatgtttctgatctacctgcttcagatcatgctgtcatcgctaaacgctaattggcgatccagtaatgataaagtatgttgctaataaagcgttggtgccagtgtcctgaaacaaacagtgaaacctgatcaggttagtctcaataatttcgttgcatgtgtttcgttatcttgtggtggaagaagcctaagcaccttcctggtagtttggtaccatggttgctgcaggtccttgcatgcaggtgtgagactgtgagtgaagaaactgccttgatttaaacaatcatttctattttctatgcatccatgaaacatcgcactaacaaagcacaaacccgttctatataatt

SEQ ID NO: 49281 - DNA, 917 bp, Oryza sativa
tgttaattgcacacttcattgagtcacttggtaatgatcttaatagtcaaatttatgaatcaagcagcttcgtttgaaattatctttagagttctttcactactttagattgtgcattacagccttcgcgcattgcaagttctgtatagcaattctctgacaggccggtaggggacacacaaagcgtcttcgtccttgcaatgacagtacgtagctgtcgtagcacatgtttatcttctagaaggtctacgtgttgtccagatcccgtggatgcaaattaattgctaataacggccatggatcccagattgattcggtgctctggctgccacccaaaagaagcctcatcgtttaccaaataaataaattcagctacagttaaaacttaaaatttaaaattgattttatggtatttttaatataatatctcttttaacatttatttttaagtcgttaaaaacacatatatataaaatttttaaattatttttcaatcactaataaagctgtgtgccatataatcagctcttgattatattaaccgaataaccgatgaggctattggggacatgtgccattagaaggaacccaaggagctcgagagctgaaacatgaaagttaatcctgacattggaaaacataaacttaattaatgaacaaatttacagcattgaccacagttcaggttcaggaccgatggagccctgaggatccaatggtttgcatttgtctctgtactgtggtataaaactcaattcggaccttctcaatcacattacatcaagattagtgaattttcgtttgaactttacagccattttgtagagcacttcaatttctacgaaaatctgggcagtagatcgtataacaaacgagtcacaccctagatacacaagctcgaattcccgcagcaaatt

SEQ ID NO: 49282 - DNA, 643 bp, Oryza sativa
tccccctcaaatttaatgtacttctttttgaaaagatcacgacgaagttctttaatgttatttgtaccttgataaaaattattcaaagcaacccaaatctcatgagcagtttgaagatgagcaacacgatcataatccgaacgagaaatcccactcaaaagaatattgcgagctttgcaatttagttcaaaagcagttttttcagcagcagtattaatagcttcaggaatcacacaaggaagagaaacttttctccaaatatcataattctcagccataatgtaagattgcatcctactacaccaatgagaaaaatccgttccatcgaaaacatgaggcttagttaaaaacttattagaagcagccatggcaaaaactctagatcggttaaaatccaaagaagcaaacaaagctttgataccacttgtaggattgaatcacaagaactaagccaaccaaagggggggggggtgaatggttgagatacccaaaaaccaaaaacttttagcggaaataaaagttaccctcgaaatcgatggatcgcggtctgaccgaggtagtcgtccggtctgaccgtctgaaagccaccggtctgaccgagattgaaactccggtctaaccgcctgatcagctgtcgcttgct

SEQ ID NO: 49283 - DNA, 662 bp, Oryza sativa
caagcatccttctccccgttgggaatagtacaaggaaagaagccaccctagactacaccaaccatgcaggttgcacctactggatagatatatatcttgggatccatgtcaagtgatcatgcaacttagccattgttgagcatatattatatatacataaaaaataaaaagcctaggttcattgtactgtaggtgaaaacaagggacgagcatatcaggaagtgatgttaccgcttagcgatatgattatggtgaactttgaaggtatatcagaatggacattgacgaaattaaactgcatgcctagcttgctatactactaccactatatatgtaggttgctgatggtgattgacaaaataattgtccgtcgatcgaagtgcttttcaaaaggagctaatctcgatgtaacaggggaagtactccctgcactgcgtgtatggtacgtgtgtcgtgtgatgtttaattcgattaagctgcacaacctaaccttgaatgtacccataagatagtatggtatctagaagaatagagaacgaagtaccttatcaaaatatagggccaataacttctgacatgtcagctcctatatgaattttggtttaagttgtcatgattttatatgtatggagtacacctaatacatgctcgaagttatttgc

SEQ ID NO: 49284 - DNA, 574 bp, Oryza sativa
acttttatgcgctgaaacaccgaatgaaatctatctagcatcaattcttatgctttttgttactattctcatctgcgtgccttacaaatatactactacataggaccattagccctgaactatgcatgtagctgatcagcgtccacttgtcaccactgttaccagatgcaagatatcaagaggaacagtcacccacactgtggtcggaatcattgcaaccacacacataagagcaggtacaatagcagactattagccagctataaatatattttaatgagataaacgatgagagagaagagcagcgggctacagatttgtagccagctgcagcacggactccaagacatactgtgtgtatgacaggtgagaccatatattaatagtgtagtaagcaactattgtatgaattggctattaaatcggttatagatgaattatagctagtagtgggctatactattagacttgctctaaaggatctggccttgctacctctccctgacacacgcttcatcgatcatgcaagtatccaagcacaaaaggccggatactggataggggcatgaatgca

SEQ ID NO: 49285 - DNA, 673 bp, Oryza sativa
cataaatcaatcttcaccatagagcaaacttctaggtgcttctattttggatccatttcttgccctccacctccactttatccattctttaaaatcatctccaaataactaccaatgacaatttggttataaattttgttaccatgatctacgtgttttggtgaaaatttctacagtatgttattcgaaaacagagggagtactcaataattactactacctttatttgtaaatataaatatttctaggttattggacagatattaaggtagacaagaaaagatagaaatcccacaataaataaatgatggataggtagggtgtatgggtaggtgggagtgagagatgtgaagaaatttgaacgggaaataataatttataggacaagtagtttgtactccctagaatagtgtgctagatattcttatattttgaaaccagattcaaacgttgaaagtttctgtattttaaaactgatggagtttgtttaggagactctttaattaggtacctactgcacactacgagatcctgcatgtaactaacacaaatgtgatgagtagcatgttgtggtcttagcagttcattcgcttcgaccattcaattttcttaccttttctaacgaaagaaattactatctacgttttctaatatatgatgtcggtaacttttt

SEQ ID NO: 49286 - DNA, 2174 bp, Oryza sativa
tgtcgcatataggcaatgtgtttatccatataaggatagtcggcaacgtgtgaactgttgcgtttgccatatcacacgaatgatctggcgcctactagctactgctggaatggaagaaatagcccgccacgcgcatcactctctcctgaaaatcacggcgcatcttctaaaatgccaaaattagagcagccatttttttgccgtatgcgtcgtgctgatctgtctcgtcacgaatagcaggaaaaataagatcagtccaactttgcaatgaatctagacgcgcctgcattgcaaggaagaactaccgctcaaaagtgcaacagcgatggatgctgcctgcagggagagtccagccgtggtagtaacacacacacacaaaaacctgtggctacagtaaacgcaacaaagacacattcacacaacacgtccacgtataagaagcaaacatagcacagcaactcagcaagaagcatcggtcacggcagaaagttaccgcccagctcggcgataaacaattacagacaagccaggtcgtcgtcactcgtcacacacattggcggcttggcgcgaacaaatcggcaaatctgtcgtgcgcggccaagacgctaaaccaagatgataaaagccgcggacacccagccgctacggacgaggagtacacgtggccgtgcttccctccaaaaaaagaaaaatataccgttcacactaggtcaccactcaccacaagtgcaggttcagctcaatacaggttcactgaacacgactagcagcagtacatgttggcaggaagaaatgaacaatgcgatcaagcagaaagatatactactccctccgtcccataatataagtgattttaagtttttgtttataacgtttgaccactcgttttatttaatttttttttcaaaaataaaaaacgaaaagttgtgcttaaaacactgtagataataaagtaagtcacaaataaaataaataataatttaaattttttttgaataagacgagtggtcaaatgttgcaagaaaaaactcaaaatcacttatattatgggacggagggagtagtactttggtgtctgccctgggtattatactgctcaactggattcggttcgcatcagatgggtatatacaaaactcgcaactgcatcagtttttataatttttttatgtacggcgtgacagcggtggtactgtttgtgtgaaggccaagttgagaattttgtttgcagcataatgttccctcgagtcgtctccgtgcagtgtacacgtgaagaaagtagggaggcagcaggatgtacaagaatgccgtcatgcaagttgtggtgtcaactcgcgcctaagacggaaaagaaaattggttttgtctgcccataggcgtttgacggagcaaacaggggagaaccgattgatccatttggattagtgtcaatcaagtgtcaacgtctctgggaagcctagatgaccctgctttggtcaatgttgatagcgacggatgtggagagattacagtgttgagttgttgacgaggcgaaattacatttggaattcgcaaagagtacgactggctaaaggaagaagatgtgaaactcgtagctgggccaagtccgggtgagccacaggcccatagtcttagatgctgtggcccgcttaggactatgaagcccaaatgaaggcccacttaggaccatctgattagtcacaaacgaagattagtcaccgttgcgctgcattcacttcagatgaaaatttcctccttcaagaagtagatggcaatgcgacatgtgcgcttaaatgtccagttcttctttcgcaagctgggtcggctcaatttggcgttagctgttatgtagctatctccgtgtgtatcggaaaattgtacagcccaatcttctttgtcagcaaagacatacgagcacctttcagttatgctgtccatctacctagaatcctccttgcctccttcgctatgtatatttctcaatagcgactagaatccgcataattgtcacgtctacctagaaatcgctagattcagaccgaaggtacatttgacatgggcatcgattgtgacatgtttatgagactagtttttgttgatttttctgctgtttcaggtcatattgggtgatcactgttggaaatttggtcataattcggcatattttaatccaa

SEQ ID NO: 49287 - DNA, 614 bp, Oryza sativa
ctagcatacacaagaaaataccatatgtataaacaaagctctcttttatcaattttttcattgtcatatttttgcttgataaaaccatgaggtacaaactccccctcaaaacatgccaaaagaaagtcataaaaagcactaactccccctcaaaataacctccaattcttcccgaacaaaaatcaagaaaaaatcaaagattttgaaaaagacatccaattgccaacgatatcaccaaaattctcaagaattgacatacatccaatagtattaacaaaaactactacctcaaacattagcacatgaaaaagctaataaacaagagaatagaccaaaattatgtcaatccaaaagtaaagtgatgttaccttgctatacaatcgtcatctcaaagttaaatgcacatggggagtatgccgccaaaatacctacgaacgacaagatgtcgagacctccgtgttggggttagaaataagaaattttggaatccaacactgagtcacaccaccactagaaccagtaggtacatacacacttacaaaatcagaatcaaacttaccaaaaaactagcctttttgcttcacaaaagtctgagttgaatttcgcacaaaatt

SEQ ID NO: 49288 - DNA, 686 bp, Oryza sativa
catacgcatacaatacctccatcatatgccatatggaatctccatcaaccacgtgcatcaactctagccttagtatcccgcatgatatttgaccaccacggacatcgtcttaccaccaagccgactcccggtccatcaccgcaaatactctcccgaggcatcgagtcacctacacatgaaacaaacaaagaaaccatattccgagactaagctatctccaacttgactcattagtagcaaacaacagtattacatacgtataatatccatctagaagccataaccatgaaacaatcacggatatccaaagaaacaacccgaaaccgaaactgacacagcgtcgaccggtcagaccgcgggctgcgccggtctgactgcgcaatacacgccggtctgaccggcacacccagcccggtctgaccggtcccgacaaactagtaaatcctgttcattttctgaaaattgattatctccaaaaccacttcgacgataatctccaaatatcaaaaccaataatcacatatgccaattgttcatcacaaaataagaatcaaaacacacattgatcttacaaatgattcatcaagaagctacgccatatagcaatgcaacctaattttcattatgcttgtagcatgacatgatttgtaggtgggtggaagttcttttggcgccatttaggttgt

SEQ ID NO: 49289 - DNA, 701 bp, Oryza sativa
ctcctattctctcttcctcccatctctctcgcttgcaagttgcaactcgctcaaagagaaagatactcatactcgctcaaagagaaaaatactgatacctcctcaaaggggttgtttagaccatagccaaaatacatcttaccaaattttgacaatgataaaattacagtaagttgacaatattaccaagttttggtaggattccttatgtatttattaagttttggtaaaagaactaaatatataaatatatagacatatttaacaactttttatttaaaaaaatggtatggtttaaaataacatcaatctaaacaaccaaaataatttagagagtgtgggatatgaagaagctgttagaatgtatataaaatttgaaaagaaattattttgcttcattgccaaatgaacaaataaagagcaagatttgagatttgaagaaactcttggagatgcttagactagacgcacatttagattgctaaaaaaaaacctgtaaaggcaaagatcgacaaggacaagttttaggctgagtttgtttcttggggttgaactcatctctaacgcacgtaaaacagagagactcattaacatataattaatcaagtattaattattttttaaaaataaaaataaattaatataattttttaaatcaactttcgtataaacatttttttgcaaaacaaatcgttaagtag

SEQ ID NO: 49290 - DNA, 1340 bp, Oryza sativa
acagggtggcccatggacccatactggcagcggaagctccgaactgtctccagattggtggcaatcccttgccgcgtgtccacctgccctttcatcgacaccaacaaatttcccttgagccctctccgccgccaccatcaaccgcgtccctcgtgacctcgtctcgtcggttcgtcgctctctccgcgagaaaacgggggcacagtacactttaccggctagtttcgatcgatcacgcacgcggagcgcgggcgggatcaaaaccctaatacggcccgcccccgcctcgatctccgtacaatgcgctcgccgccgccgccgccatgagcctctcctccctctcccgcgccctcgcccggtccgcgcgctcctcccggcagcgccaggtgagtgcccgagccgcaccccctccccttcccctctccgattggtgtggcttcttcctgcgcgtcctcgccctaatggctcgggcggcgtgtgcggatgtcgttgccgtagggttctctgctcggggggcatggcgggctccgtgcttcgtcgccgccgctgccctacggcgagttgggttttctgcgcagctatgtgacgtcagttatcgggaatcgggcagcggtggcctccggggcagggaagggtggggactggaggttcctgcttgctagccggcagttccggcggctattctccgacaagtcgaagaaaagtaagctttctggctggttaggtggtttttgggggatatctggtgactctgttaatatttaacgttgccttttttattcagaccacgggaagcattcggaggaggagaataaaggtaaaggggatgagagtgacaagtccgactcaaagagtaagtgcttattttaacctgcattcctcgctcttgtgttggatatggtttattaaggtgttgagctttgcaaaatattttgaaagagagtagacttttacataccagtggcgacttaaccttccgagtgctgccctaaaatcatgctatatcataacttgtgatttctagttttagtatactgataatagaaaacaatgttaagaagatgatatgcagagcttttgtaagtggcaatacatgttaaacagagtggggctagttgatgttttattttattgcacaaatacccctaacagtatgtaagtatcatgtatagctgaaaatgctaatatttgagttttagtgcctcataaactgcccgctcacctttaagggagaggtactagcatgagtattgtggaatacgacaacatgagcctttagcccaaagcaagttggttgcgtacaatttgtaaagtttgatgcatccgtatatagcattata

SEQ ID NO: 49291 - DNA, 644 bp, Oryza sativa
caaaattcaaaataaaaataaaataaaatccaaaattagaaaaggaaatgagagtacaagtaggaatacaatttaaaaatagctgaaattcggtattaaaaataaggaatattaaaagaagagttcatataagaacccaatacaagattaattaaaatttagaataaaaataaataaatccgaaattagcaaaagaaaataaaataagagttcaagtaggaatacaatttaaaattagttcaaattcggaattaaaaataagcaatattgaacgaagaatccatgtaagaatccaatacgagattaattaaaatttagaaaaggaggcaccacgttcgctgtgggggctagaaattcccacattaatcagagaaaaagaaaaaaaaaagaaaaggagagtccaagtagaaatacaatataaaaatagatgaaattcaaaattaaaaataagcaatattgaaagaagtttccatataagaacccaatacgagattaatcaaaattcgaaataaaaataaaataaaatccaaaattagggaaaaaaaaagagagtccaagtagaaatacaatttaaaaataggtgaaattcagaattaaaaataagtaacgttgaaagaagtttccatgtaacaacccaatacgag

SEQ ID NO: 49292 - DNA, 673 bp, Oryza sativa
tgtgtgtctatacacacatacatgctatctagatacatcttcacgattgatttttttcttttttgcaagaggagtagtccctccatccaaaataataacatcgcttttttacccatttcacacataccaatataaattaaaaaatatctttcactttatcaaatcctaatataatttcactttattaaatcctaatataattggtcctcactttatctagttcgaatgtatttttctcacttttataaactctaatgtaatgattacttaaaagatacaaattattttcaggacaaataagatggtgaaagataggttagtttttatgagggagtaagtctagacttggggaagcaactttaaatggtctacgtggttacgagtgtatatacgattccaatttaaaatagaacctttccatgctgatgtttatgtatttaattaaattcagtgcgtgagaattttgtgagcttctcgcggatttacactgccagagagtgtggtgtcacgatgaaacgacacgcatgggtgtattagtacatatatgagtggtgcttgatgctacgtcgtgtaacgtacgtgtagtaggttgctaattgagcatgtccatgctgtcatttcgttattagtagttggaacaagctttcttcagccataatgcacctagcacacc

SEQ ID NO: 49293 - DNA, 631 bp, Oryza sativa
ctatagggcgaattcgagctcggtacccgccaattagcgattgctttctcctgaaggagattttagtgtgttagcccgttcttagctaacttttgtgacattattttgctcttttttcttttatttgtgtacaactatacaatgacactgttttgatgcttctttgaataaaaaaatgggcattaattgcatgaaactgttccagaacactccttgtacgttgtcctttttgcctatatttttctttcatgagtatccattttctttcccaattaaacaaatctgtggatttgtttcccacaacttgaattcaaactatctaaaatcaagagaaaatatattacttccatcatttcacctacagttaattatttataagcgtaacacttattaccaataaaaaatgatttggtcgtaaagtttttatatatgtattctcagagaagtcaataaaacaaataaactatgatggaaaaatcaactcaaaaattgagttgtaaaatttaaagtttggctacagctgataagttaaagagtaaacgatggttttaactcctaaagaaaggtgatgctgtatttacataagaataaaaggggcaattaaaaatactattacagacaggtacatgga

SEQ ID NO: 49294 - DNA, 647 bp, Oryza sativa
gttaggtgtgttcatctggccttgctgacaaagcagagactccagctaccacacagttttggaacagaggctgggaaagctgcacattagctagtccaaaattgcgatggcgctgcttgcaaaactggagaatctggcatccaacataacacgtcattttcgccttgaaggaggaggtaagctttatccttcacgcgaagtgaatagcttacactttgcgcaatgaccacactgtcagaggttggttgtgctcggcgctggcgaggaaggggacgaggtgcagagacgatcgatgtaagagcgatataatactcggaaactaaagggggtttttgaagaaaatacaccatccagtcctagtgagcgacgtggaccgtgcagtttagatctaacggtatccaaaaaaaatgtctgcttggccaccaatttttcatctaatggatttcaccaattcaccctatccagatttggatgttacacatgattacggagggaaaaatccagaaaattgctcctgtagttcttcgagttcacgaatcaagtctccagagaagacgccgtatgacgatgacggccgccgtgcttcgccgctcagctatctcttatacgcctgcgactgcgagacgcacatcgtaactaaacctttt

SEQ ID NO: 49295 - DNA, 671 bp, Oryza sativa
ctcctgatcaagtaatgttgcccttttgttgcttccagctatcctgtgtactatctgtataaactagagtaattgtacatgtgcatgatcttaacactgatagttaattgttttagattctataaattgagttgctctgaattcagattttagaggtgaatttatgagaatttagggtaattgatcgtttgttatgctttttatttacagtttatatatacaccctttggtattttcatcactaacattactactgtggtaaaatatccgcactcttaagaactcctaaactgctctagaaaatgtgcttgtaatttgttagtcattcaatttgatgcgaatctatggtgttagcttcactaagcatcttcatgtttgatatttatcatacttctggtttattatatattttgctgataattaatttaaagtcaaatcattttttttgttccaaaccttggaattgaaaagtcaagtcattgatttcttgagagggatcttcaacatgtttgacacagacaatgtaagttctatgcactgatgtgattgttattctcctgaatcgtattcaactctttgttgtactgagcattttttgtaataaaaactgtcattttacattgataatttgaaaatgccttttggtataatatccaggatggagctttgca

SEQ ID NO: 49296 - DNA, 1196 bp, Oryza sativa
actaaacacatacaaagatatcagcccctctggtataaattcgcatatgcgatcaacatcactccttccgcttcaaatatactccctctagttagccctaaataaatatgttttagattaaaaatttatccccaaataaatatagttttactgatcccctagactactttaatacttccttttgttttctttttactattttaccaattgtaatctcttctcttttttctcttcgcattaatgaagaacataacagttttttagtttctcgcttaatactccctctttattttaatgtatgacgctgttgactttttaaataacgtttgaccatttatcttattcaaaaaatttatataattatcatttattttattttgacttgatttatcatcaaatgttctttaagtataacataaatatttttatatttgcacaaaaattttgaataacacgaatgactaaacgttggttaaaaagtcaatggcgttatacaataaaatataaagagagtatgtttttaactagtcaaaattgtatgaagtatttaattaggaaccgagagagtatatatttatgtgtccatcgctgtgtgatggatgagccgatggcggagtttttattagcgaaagagaccatgtcctgccccggctgggtctaccccaattgcatgacaacttttttttttacgagaaattgcaggacgactttttcagtgcatagtggagtagtatttcctatactacctcgtgtcctcgaccatgctgctatcccagaattgaccgagatgacgtttggattgacacccttgtggcgaggggagcaatgtggttcaacttcaactgtagcagagtaaatgaggatgtgtttagttggggaaaagaaaatttttaggtgtcacaacgaacgtttgaccggatgtcggaagggattttcagacacgaatgaaaaaactaatttcagaactcgcttggaaaccgcgagatgaatcttttgagactaattaagccgtcattagcacatgtggattactgtagcacttatggctaatcacggactaattaggcttaaaagattcgtctcgcgatttttcccataactgtgcaattagtttttctttttatctatatttaatgcttcatgcatgtgtccaaagattcaatgtgatgtttttgaaaaaaaaatttgggaactaa

SEQ ID NO: 49297 - DNA, 715 bp, Oryza sativa
ctcaacataccgagtacatcaatataaacatataatctcagtattaaactatgctaaaatactattaaaatacatttagcacctcctatcttatcaatcaggacgaaaaaattgaaggggggactcaggggggtatccatgggtccgataggtgtaggggggatttgagtccgctctacacccacattggatccgcccctgagaaagcgatgagtggaaagggaattcatattctgttcgctcgatcgtcgtctcactttctgcaaggttggttgtttggtgagagatagcctggtttagtttccaaaatttttttcccaaaaacatcatatcgaatctttggacactcaaatggaacattaaatatagataaaaaaactaattgcacagttggcacgaaaatctcgagacgaatcttttgagcctaattagtccatgattagccataagtgctacaataacacagacgtgctaatgacgtattaattaggctcaaaagattcgtctcgtggtttccatgcgagttatgaaattagtttttttattcgtgtccaaaaaaattttccgacatccgatcaaacatatgatgtgacaccgaaaaattttcttttcatcgacgtttgaaaaaggatgtactctctgaaggagagagaaagagagggggggaggcaactatgctctatttttttcccaaaagaaactgtacgctgttttt

SEQ ID NO: 49298 - DNA, 588 bp, Oryza sativa
cggccttgatggcagtttctcattttaagttggggaagtacttcctttgtcttgttctagttttgcagactatttcgttgcagttccccaaagaacgaaaatgcaagataactttctggtacatttcaggaaaaaaaaaaagggacaggagaactagattgcaagatgttatcaaaacgttaacaagtactacaggtaaactctcagggagagggcgagaggctcaggctttccaagctatgagcacgggagactactactcatcatacgctagtgatgggttacaggaacagagaacaaatcgtcaagcagatttcagaaaaaccacgaacacctttatacaacttctcatgccctagtgctaggttacagccttacaggaacagagatcaaatcgtcaagtaaatttctgaaaattcatgaactgaaccactagttatcggcagattcaacagattgaacgcctgcgcgaagtggaaatcgcaatctagcaaaatagccataacttggcatatgaacacctttatacagcttctcatgcctcagaaatattaataatctgttcagcaaacatgcgatatacaccta

SEQ ID NO: 49299 - DNA, 1263 bp, Oryza sativa
ctgtgtgtttgcgtgtgtgtgtgagagagagagagagagagggttttgattactggtgatggcgctcagctcacaggggcgctcagatacggaggcgtcgttttgggagtaaataattcgatgcgtcagcacacttggggcctctcctcctcgggagtgtccacactccacagcttcattccgggtcagggggctcatcagaatgctactagtggtaacggctcccctcttttacctttcggaatttggcccccctcccttcagtcgcatgcagcgagatttaccgcgagttactgcctctacgcgatggtaaaaatcaccagcgtaaactgtcaaggattgtgctttactagttgcaacttgcatgatgccgagaacggatttaccggaaagtgacggtggttttagtggtagctttcttggtgtgttttttttttggggtaggagaacaagaaacgcaatggaatcctctgccagggtgaggaaaatggcaggtggcgagccgtccaaatctagattcagaggagtatctcttcgcactccgatgaaccaacacgcacgcgcgcacgttgagggagtcaaacacccgaaagcggagtagaaagaataaaagtagcgccacttgcccaacagaatcccaaaactacccacccattttgatcgagtacgtccgtctatatttagatgctcatgcgctcacatgacatcaaaaaattagaaataaaaatgcgcagtgcagcgaccacgcatgctgggctactggccggcttactgcaccactcattcgctctactcctcagagaggaaaaaaaaaaggaaaggaaaatgaggaaaagaaatggaaaaaagatactattctctttacacaaagttccttaagtcctagagagagagcttcatcgcatttgctcgccccctccatgaatcgatcgatcgatcgagtaccctctcattggtactcgtgccagcagacgagcatcgtgacgcagcggcgcatgatgtagaacctcgcgcgctgctccttgacgagccgcacgcaccggcaggtgaaggacggcctgctcttgccggcgccgccgtcgccgccgctgcgcacgcacatcgccaccttgccgccgccgccgctgctgctcctcttcttgtacagcctgcacggcttcaccacggcgtagagctccatgggcactgtggcgaggggtgaagaagggttacccagtcagtcgccgagacgatgggaaggagaagatagctaaagcagagggg

SEQ ID NO: 49300 - DNA, 577 bp, Oryza sativa
ggtaccttttatattttgaattggtattctcccaatgctcaatataaagatgcgcaaaacttttatgtatcataaaaaaaaggctaaagtacatgacaaaagaaattttacggtcattaaggaagtaagacattattatattgtacaagaaatatggttaacttctggtacctaatcaacacctggaaaatcactcatagaacaatatattagcagactattactatgtattgtaacaattaactgttccgaatggctacttccttattctccaagtgttttgtgtaaaaattttgtatgtaaaagttttttttaagaaatcaaataaagctatttttaaatttatactccctctgtttctaaatgtttgacaccgttgattttttagcacatatttgaccgttcgtcttattcaaaaacttttgtgaaatatgtaaaactatatgtatacatataagtatatttaacaatgaatcaaatgataggaaaaaaattaataattacttaaatttttttaataaaataaacagtcaaacatatttaaaaaagtcgacgacatgaaatgtttagaaacgga

SEQ ID NO: 49301 - DNA, 653 bp, Oryza sativa
aggagacgcgagccaagctgcaggttagcccccccggcgggctttcgccactgaccggttggtacagggttctaaaaatttatttcatataaatataaatataaatatagtatgatcgtagtgttatattataacgtatatataactataataaaatttaaatgtaacttttaaagtctcacaataacatactattttcatgaagttgactagtggaggtcgtaggatcaaatcccctcatctatatgtgtgttgtgatttattctcttcctcacaaatgtgaggtaagagaacttttaccgcacattgtactggtagtatatgctgccagtatttacaagggtacaataggaatttgccaaaaaaaaatgtaattggttatttaggtttaatccctagatgtttgtgatgtcatgtcgtgagtcactacctcgcgaacgacttggagagacgagccccgacagcggcgtgcgacttggagagacaagccccgacagcggcgcgcaacggcggtgtgactcgtcgccgctcggctgctctagtgcgggcctgtttggttggtgccacattttaccacacttgaggtatgttagtttgtccaaatgtagctaatgtttggtttgtttctataactttagcatgccacactttct

SEQ ID NO: 49302 - DNA, 614 bp, Oryza sativa
gacggactgcggaggcacgcgcatcagcggtcgggtttgcagcggcttgggcagtagcagcagcaggcgactgcaacttgggcctaggtaggcgctgaggcggtcaattatggaggtagctacaaataaaaacgacgatggcggaggcgggtgttgcggcggtcgaatatgcagtctattgcggctgagaagccgcaggcgcagcagctaactatggtgatagcagatgagcagcatggactacatcaacaacaacaacaacaacaacaacaacaacaacaacaacaacaacaacaacaacaacatgaggatggctgttaatcttgcaaagttgtggcagctgttactgtggcttttataattttcataaaaccaagatttctaatgatgtttgttcaatctgtcaatccgatggcagatagtctaggttcatactgtattttaatggcaatgcaatcacatttttcttaatggcagattcccaataacaattcaaaccaataacaaatatgcaattggcccataaaaaacgaacctagtaccgaatgtaacacatcatagtacttgtccatagtactaggatgtgtcacatccagtactattggttttttatg

SEQ ID NO: 49303 - DNA, 1651 bp, Oryza sativa
aaaagaagaaaggattttcctgggattaaaaattgcactttggtgatttttaattggtaaaaattatttccaaggctctgaaaattccactaaaaatcctgttagcattatttgacatgtagaatccaagaaaaattccacatgccgattccgattattatttgcatttattaattagggaattagctctaggttaattaagataatttcttcggacgatttatttagccaatttttaaagcaagcaaaggggggaaaacttcagggcgtgacagttcaatcaagaggaatcaacaacagaacaactaatcaaacgtattatgaagggggttaagatgctgatacatagcaagaatattacttcaaccccgatttgtaacggtatttttatttgattaatcaccggaggggagagattcctcacctgaatctttcattgccaaagaaagatagttctgagttacagagattgggctataccagcggcaagccattacagattaaacagaaaaaggggaggagatataaagaatacaaaagagaggccaccaccttcccaaagagacaacaattgatgttaggcacctgcaaaaaccccaaccaaaaaccagagcaacctaaagctatcacctaagctcatcaacaaacattttcttatgcagacttggaaacgccagtactcctcactgaagggcctttctgccacaaggtcagcttggtttaacagcgaccaaaagactgtggaagtcaaaaaccacccgcatcagccatcaagaattcaacttaaacttgttgctgcttggatcagtgcttgctgacgcaatttgtgggaaggaagccccagaagagggagggccactgaaggttgcggccataggccgcccgtatcgagtcttcttcaatccgactataacaattgcttgcaagttccatgacctccaaggtcctttcagggaaggaagcctcaaaggaggaagggccgctgaacaatgtggttgaggacatgccaaggtaaagagaggagacgaacagggagctagacaagagagaagtggcagatggggggaccctacggatggaattccaacaactgcgacagcagggaagtgcttaagatcagatgctaagccagccaaaagagagccatcagttctaacaacaaagacctaagccatcaagcaaggagcatgcctaaaagagatccagagagaggtgaggcacgagcaacacctagatgatggatgaaagcctagctggtcagggcaaggagcagcgcaaggatcggtgactagagagacatcacagttgtcggtgacatgggaccgggagtatcatgactagaggcttgaggcagacacaatcgcccacgtggcctggcaccctcggggggtgtcacgcccagaaatttagcccaaatttccagactattttgtgtattaaatccctgtccaggaccagccagggtacacaaaacgacaagtaataaacagttccaaacgtaaataaagcgtaaaatacttacagaagaggcacttagtcctcacaccgaaacaaaagcagcagcagcggaaaaaggcgatcctagcggggctttaacttcacttcacaggcaaaaactaactggggtctgagcctgggtctctaacttcgt

SEQ ID NO: 49304 - DNA, 559 bp, Oryza sativa
agcgcttagacggaaatacccaactttaaaatcctggctccgccactggctacacaaacgaatgttagccatgtctaaaaggattaccatgttaaattcatgttgaaatatttttttaaagataatggaaaataatcatggcctttaacaaacaagcgatggagccatttcaacgaaaaatatgtataaattagagcaacctttgataaacaaactatgaaaatatacatattggtttgctctcaccttccttttgttttggattatactcctctatcccaaaaataaatcaaactccagagatcaatctggacacatgtgtatccagatttttatttttattttttttgtgaggggggagggggggctacggagtgagtacacgaaagacgcgtgggcatgcagaccacactcccacatccatgaataccttccactcccaatgctcacacacccacaaatgtgcctctcactcgcaaaccagaagcacatccctggtcccactataatgttattgaaagtacatccgtgtgtgtggaatgtttattggaaccagaat

SEQ ID NO: 49305 - DNA, 680 bp, Oryza sativa
caatgcactgtagtacaggtgggttggttgggcctgttcaacgtggtgtagcgttgatcagtggagatctaatttactttaattactcaacagttttactgttttgctcaataaaatgttttacaaccgcctttatgcaaatagccacaaaccatccttggatccccttgcacgtctgcatcgttggtgtggcttgctgagtacggtggttgtactcaatcttgctattattccccctttttcagaagcgtagtgcttctgagctgaagacgaagttagaggaccaaggctcagaccccagttgagttttgcctgtggagtggagctgaagccccgctaggatcgcctttttccgctgctgctgcttttgtttcggtgtgaggactaagtgcctcttctgtaagtattttacgctttatttacgtttggaactgtttattacttgtcgttttgtgtaccctggctggtcctggacagggatttaatacacaaaatagtctggaaatttgggctaaatttctgggcgtgacaaagtggtatcagagccaacttgactgtaggttgagccaaacggtcaaaccctaaggacaagctttctgaaaaccctatttgaaaaatgtctcctctcgcccttcggcatttctttgtcaaacggtttttcaaaattctcctcccaatct

SEQ ID NO: 49306 - DNA, 750 bp, Oryza sativa
gttgatcatgagcagggttcatttggcgttgggcccccttgcagctttcaattaaaccattgatctgtggctttaattgatcttatctctgacactgaccatttgctgctaggacgaaagagaggtgaaagagaggggtcgctaaagataaggtactaaaccacttgcctactgatctgttgtgactacacttttattgttcaagttgcttaagcaaacaacctagtatggtcgcatccccaccaatgatgcaaaccatacccctacacacaagcaaacaacacacgatctagaaagctaacggaactactcttctgggaaagattgggtttaggtcaacttcgggaaaactccacttgatcttcgcagaacgacgactctgaactgatcttctcgctccttgcacgaagcttgaggctcgaattgacttgacttccgaacagacatgaagctgacagctggtcctctaggtttgacaactaaaagaattggagagattgggaggagaattttgaaaaaccgtttgacaaagaaatgccgaagggcgagaggagacatttttcaaatagggttttcagaaagcttgtccttagggtttgaccgtttggctcaacctacagtcaagttggctctgataccactttgtcacgcccagaaatttagcccaaatttccagactattttgtgtattaaatccctgtccaggaccagccagggtacacaaaacgacaagtaataaacagttccaaa

SEQ ID NO: 49307 - DNA, 513 bp, Oryza sativa
acttgcaccccctccacgacgaaaataatatgtcacaaattcttctcaacgtaatgataagaatgagatttgtttagatccaaattttctacggtacgaactaactttaatgcaaacacctctagagatctaaactgagactcttttaccaaatcaaagtaaacttcccattccaactgacctatcacatttaatatatacttatgcccttgaccaacatcgtatctcccataaaaacgaatctccacattatcctcggtccatccaagaacttctttcactcgtgaccttagttcatctagagttgggtgggtgggaaacaaaatagtcttcaatgacatatcctcaaactcaacatgtccaccaacataaggttccaccactctaccaccatagtaaacacgaacaagtctatccatctacaccaaaaaatcaaatgtaactttgcaacaaaaattaaatcttcatttttaaacgtagtccaaaccgacatattataaccaatgcataact

SEQ ID NO: 49308 - DNA, 694 bp, Oryza sativa
attatccccagacatcaacatgacaaaacagttgttggctgtgtacacccccaaggtgtaaaggccgggttaatataatcctttatcttaacaaaagaacatgacaaaacagaggattttaatcaggcggccactgttatacagtagcttgcgagttgttgtctatgaaaacgagacgtaggtacgtccaaacttaaaagaggccgagacagtgagacataagtaaaataggcgaagttggtaatgtcttctgtttgagcaatactctcacatcactgtatcacaaaataaattcattttttatctattctatacataccaatagaaaaaaagaactataatattctcactttatcaaattgtaatagaattattctatactctagctatctgtttccaatgtgtttataaatttattttagaataaataggaagagaaaaaaaataatctttttttttctgagatactatagtagacatgaacgtgagctcagcttcagtggtcacaactcacaacctgcaacgacgtaaaagccacggagaaagcaacaaatctacctctgaatcgtcgaaatacggaaccataaacacatgtttggcatatagagttaatgtaacctcgtacaactgcagcacaagtggccaggctccattacttcatcggggtattatacggtgggtaatttcttcacct

SEQ ID NO: 49309 - DNA, 656 bp, Oryza sativa
ttgtctattggtatagctttagattggtgccaccgcaatggtgttagttaattaaaatacactgaatggtgggctgtgggtgcatggttatgctggtcgcacccatggcagttaaggaccggttcacgggaaaccctgggagacttaccgtgcttaccacaagcgggagtgggtaactgcttgatctgaagtatagctcgaccctttcctaggcaccggtggcgagggtgggcgtgatggagttgggtcggccggggtgtccggttgtccagctgccggattcaccgcggcgcaagaggggaccgcccactgccttttgaggggtgggggtgaaaccttagcgtggtgtggatggttaggggagggttatgtggagggtcttgtcacgatttccccctttgcagtatcatggtgatacttcggggcatggcgacatgtgtggaatcgtgtcttgtgggtacagttgtacaccttggccagagtaaaactattcgaatagccgtgcccgcggttatgggcgatcaaccagattcaccgtgattagtctcacccctaggttagcttaatgaactggtgtagttcaagtggttggttgggcctgttgcaacgtggtgtaccgttggacaccgtttggttaatattgaataattactaca

SEQ ID NO: 49310 - DNA, 686 bp, Oryza sativa
acatatttcatccagccagattatgatttaggcattgggtcttgtaatgatcaggtcgtggactaaatcaaagagataaacgccttaagtctaaccatatagcgtccctaatcatatttattcagtagtcattatcgtttagagttgggttttgctaagttatttctgtcatcgtagtttcgtcgctagttcagtttgtgcaaccccaacttcgaatgcttaatcataatatgctaattcagttgttgtctaccttgttttttattgtgttcatcgattcgcatgcagggattaaccttcttggtgagattaaccgggcagcgcacggtttataacatgaggagacggttgcctggttgataacctgagtaaacgtggtgttgcgattgcaggattcagattgtgtcaatcggaaaccggatcatgtctctcaagtttccaccaaagcgagagctatcagtacctatcaaatcatatgacctagttgctctcatcagacggtccaaggatctgtttgatttggtgccaaatttttacctatgtgttaaaatctttacaagttttaacattatcaaatttaattcagtatagagactagtgtggataaaagtgggtaccagatcaaatatttactttatactataaaattcatcaccatttaatatgataaaaataaaaaataattt

SEQ ID NO: 49311 - DNA, 687 bp, Oryza sativa
ccataaataaatcataacattgcagatgtaaactagcataatcgcattatacgatctacacatataaattggacagtaaaccttgaacagatcgaatatgcgaaacataacgaatacgtattgagggttttcgaagctcagctgcacagcgggaaggactcgcggtaccgggcgttgacaacagcgtgcagcacccgagcgaagagaaagacgagctattgtggatgaacagcaagcagtcgcgcaaagcgcttcccaaaaaccttattgtcaccttctcccgatgcagtacgtcgaaggcgagggttccggagacctgctctcccaatcactggtgcacgctggcgagcaggatggaataaactatgtgcgacaacactgtatagaggaggaggcaaaccctaaattgatttcgcgtgtgtgttgactgaaaacacggcggcttaggagatttgcttcactccagtgcaggtccaaggcttgtctcaagtgtcaagagcatgtaggctgattttatcctgcaccagcaagaaagacaaaaacgtaattagatgaacgatagccaatcggccgatagggccgatgacttattgtcaggaccaaccgatacgggtaaacctaattggctgtggctttatgatagtcaattagagccaaaaccataaatatgccctattggttgtagga

SEQ ID NO: 49312 - DNA, 742 bp, Oryza sativa
attttttttctatatagccctttaaattaaaggaattgatcctataaaatcctatgaaattcctatggattatctttttccatacaagttttgcaagttttggaggaaatttgacatgagatagaacctcatggaaagaatcctttgagtctttatttctcctcaaattcctatgtttttcctgcggcccaatcaaacagtcatttctatgtctttcctgtgttttgcaatcctctataaaaccagttaccactagctttaccaccagtggccgcacctttcactctgcttgatctcttcgtcgatctcctccattgttcgttggtctccacgcgcgcgatctggaattacaaacttgtagtgccgatggttgcggcgccgtcgatgatcgctgccgtggccgtgggcgtcgggtcgaccgccttcttgtacttgctgtggccggcctcggcgccggcggcggcgatgatatgatgaaggcgccgggcgccgccggctacgtcatctcccgcgcggcgttcctggcgaacccgcaggtctacttccacctcctgcgcacggtgggcgctgtcacgcccggaaattcactagtaatttccgaacttatttgtgcataaaatcctcgtccaggaatcagccgaggtacacaaactgacaatttaatatacagattcatcaaattaactaaaacgataaatacttacttaagaggcactaagtcctcaccaagaagaaaactgca

SEQ ID NO: 49313 - DNA, 681 bp, Oryza sativa
cctatagggcgaattcgagctcggtaccctggggtaacgtagcgtgaacctgcgggcattgaccctttatttggctacaacctcttagtattttctttgatacccagtagctgggaatttgtcaaaacaaaatttagaagtagccgggaaccgttctgggggccactgccccccttaaacggaaacggcccccggcctgtggggcatggcccatcgatgacattcatatgtaccgcgaggacatttttagctcctatatttatcgggtgcatggccttgatcatttgttggatgctaccacaactatgaaatttattcagaacgctcgatcttggctcgaggatgcgatttgaggctacacattgtaaattctgcctacagtttcaagtgctcggaaattcagggtctcatggggaaagacattgtcgctgtcaattgaaaagacatttaaacacattttggcagtccacactgtacacaaactatgtatgcaaatgctcacctacacctggagacatgaacatgcttgaatacagcgttgtctggttcaaatgtgcgcccgctaatgcaactatagatcgacttggtctatgcactgacggatgacatacaggcaatttattttttgagaagcgaagggataattttttattctgaccaccgactagcgaccacgtgggt

SEQ ID NO: 49314 - DNA, 866 bp, Oryza sativa
agggggccgtatgaaagagtggtggctaagtgggtcagctgatgtctgatgggtcatgacggagtgggtcgggttggtagaaggcgttgcaaaaggccagttggactgtgtttggatcgaagaattgaggatttaggtgcactaatatgtgtacatgtgtatatactaaaagtatacttgttttttgataaaaaagttgggtattcccgggaatacccaggaatcatggtagctccgcccctgtgtgtagccaaaggtcatttacctatctgcaattttgcaatcaaccacggtagcatagcaatacaaagccacaaggtagttcatttttcttgggctgtggagaccagttaatctattactccctttggttctatattaattaatgttttagacaaggttaaggttaaacttttataactttgaccatcaataactttaaaaatatttagtttaaagaaactagaaaaacatatatagatttgtctttcaaaacactgtaataaaagtaaacatgtatttatttattgtatatattataatagaaaaataagatccaaggtatatcttgtagagcgtgtcattgtccaaagcgtcaattaaaatgaaaccggagggagtatcttaaaaaaaaaaagtctagcctttttctacggtcttgttgtccgctccttctattgttgcaacacgaactctcttaaaaaaaagtaaaaaaaaatctttcaacaccaacaaacaaacgctggtactcccagtacgtgtattgtactactaggtagtactcggtgccaaacagttgccggtatacggaggtgaagagtacaaacagaaatactcgtatcggatcggaatttctaaaaagaaaa

SEQ ID NO: 49315 - DNA, 1145 bp, Oryza sativa
gggggctggtggtgttggtgcgtgtacgattgctattatttcgtgctgattgatttctctcatgtgctctctgattgcacatacggttcatggctttgtacgtgttcgttcgtgcgattgctgcttagctcgggatggagttgctcgcgaagtctagctagttgtaggttgcttgtgtcccctggattacagctctctatgtgatgctggcatgctgctgctgctgctgccatgcatatcagaagctagtaatatacagtggtggtacatgcactgttgctgatttagctttatatgctgctcagttttgttcttggggactcatcaatcatcgtagcattggtgaacacgttcacttccatttttttttgtataaaaaggaatggaataataggtgaaaaaaaattcatgtgcttcatcagtacgggcggaaagaaagatatgtttaaattttaattagtgtgcttatctaggtttatcatatgcttatactcttgtgtactgtagcatatacaagtgatgcttattaccaaagcctagctaggccggtaaacttgtattatttgtctcgttatttctggaaatcattagagcagcacttcagttgaaatatgcacggacgccttgctaattaagcggctcctctaaccaggccagtaaggtcttaagttactgacaactcctggactggtataaatggcgcggccagctttacatgacatatggtttgatacttttgtttagttaatttcgaggtggaatataaggtgaccagcttacttaacttgttcatttgatgcattcggtttcatttccctttttttttttaagataatgggaagtaaattaatacccggccttgctttaactgaaactacaactttcttttgtccctttagtgtgtactgtcaccaagttagctatacatggtgcaagttgccattgcccattgctattaacttgctctcacaaattggggtgtttatttcttgaaatggattttttaggacaacaataaactgattgacatagctatactgttcaagtataaccatgtttatggttttcaattaagcaaactgcttatgtttatgctaatatcttttgtttaatgggaggaatttaaatatttcattattggtatt

SEQ ID NO: 49316 - DNA, 557 bp, Oryza sativa
gatttacaaatgccagattcaattttcatcctcttatagccagcgtggtgaattctcaggttaccaaaattgccaacctcaacagttcagtccaagataagtaagtttcaggagcatccgcagtcctagctgggtcagttcaagcagaaccagtcggtccagttttggcaaagcaaaggaacagaaaggtcgaatccagccagttcaatcgtgcaggtttgatcaaccagtcaatcaatcagttcgaagcaggatgtggcagttcaatgtgcagatcagtcagaccgccgaccagcaccagctttctttctagccatcccagaatctcgggacgagattcctgtaaggggggtagatttgtaacgccccgattttcgttcgggattaaaaatcattaaataatgcattttctagaaattaaataaaagttaaatcaatttatccaagtgaaataatgggagaattaaaattttcccttaaaaatcattggccgggaatattttgcaatattctttgtgccctaaaatactctccggaattttccgtgaattttcgga

SEQ ID NO: 49317 - DNA, 621 bp, Oryza sativa
tcacctcctcctcgccaccgcacgctgtcgagccgtcctcaccgctgcgtcaagccgccgcaccgccgcgcgccgtcgagccctcctcgccgctcgcctcctcctcgccaccgcaccgcagccgacgacgacctggagggcgccgcgccgagagaagggataagggagaagggatgagagagagagtgagggatatttaagtaaaggagatggtaccggttctaacacaaataggtgccggttctatcattaaattcggcacatttgactattggaacaattttttttcttaaaaaaattacgggcaaaaacatcattcaattttttttataataagtagagataagcgtgttatataaatgtaactttatacagtattaattataaattacaatttctttcttaaatttaagtttcactataaaataggcctattacttaatatgttcaaaaaagagtataaagggcaaaaaaaaagaaattaaatattagaccgcacaaaatatgttccaagtttttgctgatttaaatcaaatggttgccatacaaatccgtagaatgaagttagaaattaattcaaaccctaactactatcccttccgcatgatcggaccgtacata

SEQ ID NO: 49318 - DNA, 567 bp, Oryza sativa
tccaaatagcacgaaattcaacattcatatctatctttttcagcagctccggagagtattctcgtgtatgagcatactcccggttgctcagcatgtagtaggcttttctctcccgatcacagacaaggtcgaggtcggtgtcgttcaggagtcgtcgcggagcttcggcgtcttccaacgagacatcagctgatgaatgagtactagactcatcatgatgacttgatgaagagccggaccccttggacagatgagacaatcggctcctcattctgcacaatggagcaagaacagactaacccgacgggggttagaatagcaagagtttcacccaccggttagttccaccaaagcaacttgtatatatgcaactagtgtttgaatttgaggaaaactataaaagcttgaatgaacttgagaacaaactttggagagggaatgaaaatgtattgaaatgggggggaattccctctcaggcaactggtttttatagggtacccacaactgtcagaaaagacatgtgggacccaatagccgttggccagccaaaaatggtaggtaactgtt

SEQ ID NO: 49319 - DNA, 1191 bp, Oryza sativa
cagcaaaattggagaaaaagagcaacggggaggcgagatttggaaggaagaggcggcggcactgtgcacggcacggctggctcgggctctgcctgagttggaagatgaacagtagcgcagggagggaaagtagacttttccggctgagctgagaggagaggaggcggctcaggttgggccggcggaagagagaggaaggaaaggaaggaatgggccgaaaatggcccaagctgaggaggaggattttattactttcccaattaaaataatcacttaaatgatctttgaattattaaaaatacttccaatgctcaaataatttcaagaaaaatcctgaaaatacttggacactcaaagtacttaacaaaattacaattagaccatttaatgattaatttaatatgtggttaattactgaaatgctctttgtatgattaaaaattaggaattgagctccgaaaaatccgagaaaactccagagagtataattaaccatggagaatttaataaaaattaaatccatccatgctttatatttaggaaattttatttcccacatttaacttcactagtaaattaatgaacgtttaatataaattctattaataatttattaaataatttataaatcctgaaacgaaaatcaggatgtgacaaatctaccccccttacaaagaatctcatcccgagattcggaacggctagaaagaaaaaggcataggtaaactacagtctatcttttattccacaactccaataattattctaaggttttaaagaaagctactgctgctttggaactgatggctgagctgtatcccttgagacgcaaccggcactgcatttgctcctgtgaggacaatgttgttgacttggccttgtggctgttgacgcttcggcttcggacactcttttacgaagtgacctggctcataacaattgaaacacacccgatgctcccttccattactgttatcttcttgagactgatcctgctgaaatgacactgattgagtagcttgctcatcattgtcttcattgcttgcattagtctctgagttgatctcaccactgatgcccaactgttgtgactgttgttgtgactgttcttgacctgcagaaaaagattcaccaatttggagtggcttgatacgctgcctctggctactaccttgtgcctcctgggataca

SEQ ID NO: 49320 - DNA, 941 bp, Oryza sativa
cgaattcgagctcggtacccattaatcaatattaaccaatcactgtccaacgctacaccacgttgcaacaggcccaaccaaccacctgaactacaccagttcattaagctaaactaggggtgagactaatcacggtgaatctggttgatcgcccataaccgcgggcacggctattcgaatagttttactctggccagaggtgtacaactgtacccacaagacacgattccacacatgtcgccatgccccgaagtatcaccatgatactgcaaagggtgaaatcgtgacaagaccctccacataaccctcccctaaccatccacaccacgctaaggtttcacccccacccctcaaaaggcagtgggcggtcccctcttgcgccgcagtgaatccggcagctggacaaccggacaccccggccgacccaactccatcacgcccaccctcgccaccggtgcctaggaaagggtcgagctatacttcagatcaagcagttacccactcccgcttgtggtaagcacggtaagtctcccagggtttcccatgaaccggtccttaactgccatgggtgcgaccagcaaaaccatgcactcacagcccgccattcagaatattttaattaactgacacccttgcggtggcaccaatctaaagctatgccaatagacaaagtctatgtaataatgtgatccctttttgtgtactagttgagctaagcatggctaagcatttcctaaaccaacatctaatcattttgatacccaggttatcaatggcatatggtaaacaataaatggctgagtaataggacccatcccacatgacattgtaaaagaatgcaacatttaatagaaatgcagggtgtttgtaaattgggtacaatatgatcaaatgtaaagcatgacttgccttgctctcgaactgatgagacctcagcaacg

SEQ ID NO: 49321 - DNA, 1445 bp, Oryza sativa
tgttagtgatatgccctagaggcaatcatagagatgattgtatcacatactatgtttacatatttatttgacattgttccttgaaatagataactccttattggttaatgaatatgtgattctttcatgagactctttatgttgtttgttactatttctaaaggatccttgatcaaatatcatatgtggaacaaatatgtttatatgatcagcacatgtattaattgatgatcatgcctcatggatcatggtatagagataccaaattaataatgtggacacatgttggtgaacatgttgttggatagacccaacatgagacactacaagagccctatgtgttgtgtcatcagtgatctcatttagtgttggtgttgaatccttagacctgagattatcatggttctcaacatgtgtagtagcttacttagggactgctaaacgctactccgtaaatgggtagctataaaagtagttttcggatatgctatgaaacatgtagtgggatatgaataatcaagatgggatttgaccctcctatggagagatatgtctgggcccctcgatgttgtagattatggaagtgcatggccatggcaaaggtggaggagtcaatcacaagttacataatctatcaacaggttcgagtgaatgattgagctattagaggatggcatatatctagccttgagcttaatcgatatcgtgaggcaaaggggttcatacaagtatacactagaggttcagccgatatgatctttatgtatgcacggtgggtcaattcgttctactaggagccgctgttgacgcatggaccgaaaaggagttttcgggttgcagccgagtatacatgaacctacagggtcgcacgcttaatgggccggactaaggggattggatggagatccaatatgagcatacttcgtatagggatccaaataggagtcttacgggccttggaggcccgagtgatggatcctatatattcgtgaggggtgtgaccggtggaggcattgcatcacgtgagaaaccctagccgtcacttccctccccgagcaaaaccctagccgcgcgcgggtgctagcacatctgcgcgtggcgtttcgtccctgtatgtgtggataccggtagaggcgccgctggtttgcggtgctgatcagcgtaggagtacggcaaggagaacgcacgaggaggagaaggtcgagccggtgcgatcgactacttcctctacaacgacgcgtgctacttcgcgagagtttcttcgacttctcagtgtcttcttccgctgcgcagcgcgtcgagtggtaacgatatatgatctaatacttgcttggttcctggtttatgcgatagaaatgtttgatttatgctatcgtagcttacgcttatcccaacagtggtatcagagccgccttgtatagtttatgatctagatcattgcatat

SEQ ID NO: 49322 - DNA, 768 bp, Oryza sativa
gcgaattcgagctcggtaccccctttaatattctccctcccacactagccgttggtgggcccaacacaaaggtgccggttttttgtatgtgaagacaaaggtgccagtttttggtctagaactggcacctttgttccgatagtgcttttcatgcctcacacaaaggtgccgttgttggatcgagaaccggcacctttcttccaatagtgcttttcatgccccacacaaaggtgccggttaggaagacaaaggtgccggttttgggtctagaaccagcacctttgttccgacagttgtacttatactccatcccttgccactcgagctgattgagcaagaagagagcggtgcctctccttcttgcctgattagctagaggaggggaggagggtttgctccattttttttgtggcgtttgtgtcacgcccggaaattcactagtaatttccgaacttatttgtgcataaaatcctcgtccaggaatcagccgaggtacacaaactgacaatttaatatacaaatccatcataataataacgttacacacttacaaaagaaaagaaaacagcagcggaattaacggtctagcgatggcttcagctccactcccacaggcagctcaactggggtataagccaaacgtcttctccttctggatcctttttcttcaactgaggttgattgattattgcaagaatgagcatatgacatactcaacaagccacacagcaaatatgcaagtgcacaaggataccaaaggatggcata

SEQ ID NO: 49323 - DNA, 713 bp, Oryza sativa
ttgggagcagtaaaacatttgtaataattaatcaatattaaacatcccactgtccaacgctacaccatgttgcaacaggcccaaccatccacctatactattcaattccattagactagactagggtgaaactaatcacggtgaatctggttgaccgcccacaaccgcgggcacggctattcgaatagttttactctgatcagaggtatacaactgtacccacaagacacagccccacgacacgtttccgtgcgccgacatgccaccagacataccggaaagaggccgtgacaggacccttcgcataaccccctctaaccaagcacaccacacctcaggtttcacccccactccttgcaaggcagcgggcagtcccctctcgtgccttggtgaatccggaagccgtataggccatcgcagggcccatccaaactccatcacgcccacccttgcctggatgcgtcaactagaggaaagctatactacaagcccagccgttgcccacgctggcttgtggtaagtacgaggaattcttccagggtttcccgcgaaccggtccttaattgccatgggtgcgactagcaaaaccatgcacccatagcccaccatttaacaaattttaatgaagcgacaccaggacggtggctctaatccaacatcaacactaaaacctgaagtctatacattaaatataattttccccattctgtgct

SEQ ID NO: 49324 - DNA, 603 bp, Oryza sativa
atcccaccattctgatgcagattagaaaaggtagaaggagaggggttacactaaagacaagaccttaactaggttaacactgatctgatgtgtgtagaccattatattgttcaagttgattaagcaagcaacctagtatagttacacactcatcaatgaactactccaatgatgggaatgcaaccatacctacacacaaagcaaacaacaagcgttctaccctactaactattcttcaaagacactttggcggcataggttctaagataggttccaaacttcactctatttgaacacttaagattcgactatcatcttcttattcctcgatccacttgacttgcagaagttgacaacatcgacgtcttcgagtttctccatcaagataacgactactcaagttgaaagaggaagggggaagaacgacaaaacgatttgcaaagaattctagataagggagaaaggaaaattttcacaaattatgttttcggaagatttgtccttaagggttgaccatttggcttatcctacagtcaagatggctctgataccaacttgtcacgccccgaaaattactagtaatttccgaacttatttgtgcat

SEQ ID NO: 49325 - DNA, 538 bp, Oryza sativa
cagcaaatctctgccaaccaacagctttccaaatagcacgaaattcaacatccatatctatctttttcagcagctccggagagtattctcgtgtatgagcatactcccggttgctcagcatgtagtaggcttttctctcccgatcacagacaaggtcgaggtcggtgtcgttcaggagtcgtcgcggagcttcggcgtcttccaacgagacatcagctgatgaatgagtactagactcatcatgatgacttgatgaagagccggaccccttggacagatgagacaatcggctcctcattctgcacaatggagcaagaacagactaacccgacgggggttagaatagcaagagtttcacccaccggttagttccaccaaagcaacttgtatatatgcaactagtgtttgaatttgaggaaaactataaaagcttgaatgaacttgagaacaaactttggagagggaatgaaaatgtattgaaatggggtggaattccctctcggccggctggtttttatagggtacccacaactgtcag

SEQ ID NO: 49326 - DNA, 581 bp, Oryza sativa
atgcgcctagattgtattgaacgtgtgttgtgtcatattgtcggacttggctcaatcggctaatcccgtccgactcgaactctgccgatcttggtcgtagccgattcggaccttagccgatccttactctgtttctgggacaatctctatcttgaactccgtctcgattcctccttcacatccgatccttggattaccaaatttggtcgttaacacatgccccccaagtccggaatattggataatgtttcggatttgtcatacgtcgactccgagagaatatcgtgcttgccattttccgactgttattcagcgctttaaatactaaccgttgtccccgagaaatctcacaccgtttcctccattttcactgccgaagcaaactccgtcctctctctctccggcgaccccctcgatgcacaaagcgatttccaggcgatctcttctccgtccaaatttccgcctgcagcgatgtcgacctccgccagcccgtctgccgcgccatcagtcgaatatgctgatgtatgtgcccatctcatcttgttttcttctccactgtcccttttggattattagcatct

SEQ ID NO: 49327 - DNA, 1127 bp, Oryza sativa
cttcaaagcaacattactcaggttattgcactcggtgtggcacatccaatatgtgcagggcaaacaatacatggtgttccattgcctgtaggccactcaagggttgaagtggaagacgtgccaagccaatacagaggttatgtgctacagttttcttcggaggaaggggttgacactctgggcgctgctcttcacaacctgatcatatggcccaaacgctacatcgttatcacgttgaacgatggggcaggggatccaggcgacggtgcttccagcccttcaaacggacgaggtgcaaatctagctccttctccgcctcgacagaggaccttcagtccacctcgtgaaaacacacctaatgaaccacatcgtccggagaagtccacaagtccacccccactcagaaaaaagacccgaacaccaagtgcatcacagatgtctgttccatcaagcaaatagtgactcacacattccaattcatacttagtgtcaaagccaacaacatcgctgcctaagaagacaatcaatgccagcatcacttcactttttggtcctaagaagctcgaggaaccaaagattccaattcctccgaatgtcatcgagcatttcatcaagtgcgcaccaccgaagtcacctaagaagcctatatcggacttctggagaattcttggcaaaaaagatatgcaagctcagtagggagttgtaccttgaagagaaagcgtccaaggaagttgatttctgcaagtcagctggtttgaaaagcctagacaatctagatgaacttgaagaggccccgattgtactgcgattccaacttggtcaaccgatggtgcttgacacggaaattgaatccttaggaactcaagcgcattggctgcatgaatggtatttggaggaggccaaaaaagggggtcgggatgttcggtgcctactacactgatgtggattttcaccaccccagtaatacatgctttgtagaatttaaggaactcttccagttgtaccaaagaagggaattcgatatctgcctcctgcaattgtggtcattttgagtcctttgatatcttgtcgttcttaatccatagcattctacgtactcagtaattctcaactgtgttctccttttg

SEQ ID NO: 49328 - DNA, 880 bp, Oryza sativa
gtctcctatgaattctatcacccaaagaattcggccaggcaatttggaatttgccaactccccatcggcttgttctttgctgacaaaattcaatgccgcggagaaatttcatcaaccctgatgatggatcggctactcaacatccaaggtcctcccttgggcagcattgagaatatagaactagcaagattcaggagcagaaattttgatagatggtggggagaatggaagcagcatctattccatcagtcggcctctatgtatatgacagatctattccctgatgttgtccctcaggtacatccttactttgcttatttcatttgcataacttgttaaccaacttgaatcttaaaccaacttttccctttatcctacagacaacagaatcttcccatccacaccaaagcaacagtggcagagatatatagtataccccaggcttattgcccaatggtggtggactaacccctccagttatcggctatcatgcccctaagaccgtaagtctgctccaagggcagatgagagaaccagccgatgcaggcaggaaaaggaaaaccaaagtgccagcaattgatccatcggttctggctctcaagaagaaggccaaaaaacagaaacccaagccaaccgatgatctgcctgcccttgatccatccattgaacaagctttggatgaagaggaaatcggagaagatgttgatcaagccgcagccgaagtaagtgatacagataaaacaccatcggcttcacccaatcaaaccccttcaactccttctgccccagctcatttctcgagggtaagtaccattccctgattcccttttataaccattttatcttcagccgattacttattaatcttgtctttgcagaa

SEQ ID NO: 49329 - DNA, 682 bp, Oryza sativa
tttcccaattaaaataatcactttaaatgatctttaattattaaaaacctccaaatgctcaataatttcaaagaaaaatcctgaaaatacttggacactcaaagtacttaacaaaattacaattagaccatttaatgattattttaatatgtggttaattactgaaatgctctttgtatgattaaaatttaggaattgagctccgaaaaatccgagaaaactccagagagtataattaaccatggagaatttaataaaaattaaatccatccatgctttatatttaggaaattttatttcccacatttaacttcactagtaaattaatgaacgtttaatataaattctattaataatttattaaataatttataaatcctgaaacgaaaatcaggatgtgacaaatctaccccccttacaaagaatctcgtcccgagattcggaacggctagaaagaaaaaggcataggtaaactacagtctatcttttattccacaactccaataattattctaaggttttaaagaaagctactgctgctttggaactgatggctgagctgtatcccttgagacgcaaccggcactgcatttgctcctgtgaggacaatgttgttgacttggccttgtggctgttgacgcttcggcttcggacactcttttacgaagtgacctggctcata

SEQ ID NO: 49330 - DNA, 1111 bp, Oryza sativa
gtatccttgtgcacttgcatatttgctgtgtggcttgttgagtatgtcatatgctcattcttgcaataatcaatcaacctcagttgaagaaaaaggatccagaaggagaagacgtttggcttataccccagttgagctgcctgtgggagtggagctgaagccatcgctagaccgttaattccgctgctgttttcttttcttttgtaagtgtgtaacgttattattatgatggatttgtatattaaattgtcagtttgtgtacctcggctgattcctggacgaggattttatgcacaaataagttcggaaattactagtgaatttccgggcgtgacacaaacgccacaaaaaaaatggagcaaaccctcctcccctcctctagctaatcaggcaagaaggagaggcaccgctctcttcttgctcaatcagctcgagtggcaagggatggagtataagtacaactgtcggaacaaaggtgctggttctagacccaaaaccggcacctttgtcttcctaaccggcacctttgtgtggggcatgaaaagcactattggaagaaaggtgccggttctcgatccaacaacggcacctttgtgtgaggcatgaaaagcactatcggaacaaaggtgccagttctagaccaaaaactggcacctttgtcttcacatacaaaaaaccggcacctttgtgttgggcccaccaacggctagtgtgggagggagaatattaaaggtgccggatttgggctgagatccggcacctttgacttgtcataccaagaaccggcacctttgtgtaggacccaccgtcgggatgaaaagcattagtgaaacaatggtgccggttttgggttgagaattggcacattgtctaaaaaccggcataggttaggtgggagggagaagattaaaggtgccggtttagggtctagaaccggcacctttctctgacacaggttttaggtgccggttttaaaatgaaaccggcacctatttggatataaaggtgccggtttttgaatatgtggagcatgggggtgggcgtatgggtgggcaagacattataggtgccggttttaagtgtgccggcacctatagtggcgacacctatt

SEQ ID NO: 49331 - DNA, 2414 bp, Oryza sativa
aagcaaagtaaggatgtacctgagggacaacatcagggaatagatctgtcatatacatagaggccgactgatggaatagatgctgcttccattctccccaccatctatcaaaatttctgctcctgaatcttgctagttctatattctcaatgctgcccaagggaggaccttggatgttgagtagccgatccatcatcagggttgatgaaatttctccgcggcattgaattttgtcagcaaagaacaagccgatggggagttggcaaattccaaattgcctggccgaattctttgggtgatagaattcataggagacttgaatgtttctcccttgatgaataccgacaggaagaatgcatgggctgattgcagctgagaagacttctctagacttttggaatctctcatgattgatgtctttgaatctaaagtccaatgggagatccaaatgcactgagtcttcataaggaaaccaaactcgagcatctttctgaaaaccttcatagaagctgcagaaccaatccttgagcaattcggctcttaattttgctcctgcatcggctggtgtggatgcatattctccatatgacatgcatctgcgatgggtgcggtcttctttatcatcttctacaatcggctccagtcttgggaattcggcttctgtcacaaatggccgattgacgactgtcatgaccatcaggttgagccaagactgtagcagccaccatggtccacctgctccaaccactgagccgacgactatcttggccgatgcattgttcagcatttggtataagtagccgaggaggatcttgcctagaggaaattctctttttgattccagagcctcggctgcaaactggcagttggttgtacgaccacaactagatccacagaaaaggaacttttctagccacatgagcaaaaaggccacatgttctcgaggagtaacagatccttggcccatatatgccgccacataaccagaccaaccacctatgctcttggtcctaaagtcgtattgattattggtgttcagactcatagggttagccgatgaggtcacatctagaccaatgatcatggtgatatcaatcagagttggggtcatcggaccttggttgaacagaaaagcgttgatggtattggaccagaagtacgtggcggcagccattaagggttcatccttagccgaatttgctatggtgagggcgagtgcttggccgattccaatctcgtcctagtgagtttgcttgttagccgatacacgcttgtaccatgtggtccagcttttctcaggggaagttttttctagagatggccaagacttgaaggtgttcttccaatgacctagattagggttggccaatctgaaagggattctattggtttcgccaatgatgaaattagtgggtcgacatcgccgatcggaccaaggaaataatgtctctcgtgcgatagacttgggattgtgaccagattggaaagatgctaataatccaaaagggacagaggagaagaaaacaagatgagatgggcacatacatcagcatattcgactgatggcgcggcagacgggctggcggaggtcgacatcgctgcaggcggaaatttggacggagaagagatcgcctggaaatcgctttgtgcatcgagggggtcgccggagagagagaggacggagtttgcttcggcagtgaaaatggaggaaacggtgtgagatttctcggggacaacggttagtatttaaagcgctgaataacagtcggaaaatggcaagcacgatattctctcggagtcgacgtatgacaaatccgaaacattatccaatattccggacttggggggcatgtgttaacgaccaaatttggtaatccaaggatcggatgtgaaggaggaatcgagacggagttcaagatagagattgtcccagaaacagagtaaggatcggctaaggtccgaatcggctacgaccaagatcggcagagttcgagtcggacgggattagccgattgagccaagtccgacaatatgacacaacacacgttcaatacaatctcggcgcatcaccaccctttttattttcgttttgtttcgacgagttcttgctttcgggttgagctgcaacggttacgatcttcaagaagaggtaaaacttgttatggcggcttgcgttctcgagattagtgcttccatcttcatgacactctaatcttgtttatgtaattcgtcgagttatcatatatcttacataatctctggcaatatcgctatctaacctacaatcggctaacatctgtcagtagaaggcagccgattaggttaaatatcgatattgacttagattatataagatatccatcactctatgacacatccaacggcttgattgtctagatgttgtccttcttttc

SEQ ID NO: 49332 - DNA, 1576 bp, Oryza sativa
  unsure (1)..(1576): unsure at all n locations
acaactttagtgagtttatgattaaaatttagacaattctgatcaactaggcaaaattttaaatttgaaacaataggaaaataagtgtactctccatctccatcccaaaatatagtaacagattagacactgcctattactacattacaatagcgtgtcgattcagtaaataggcaactgcatcaaaaatcaccctgggaaaccatgctaggccatgcacagtgagaaacgactgtcctaaaatattaatatttagcataatcgacagatgtagtattgtatccaggtattagtatttagcataatcgacagtggaagtattgtatctagataatatccaggtgcacccccataatcgacagaggtagtacttagcatattcatgtctcagacccataatcgacagaggtagtacgtagcatattcatgtctcagatcacacacatgagcaaattttgctaaggggaggagggaagaagaagaggatggatggggggagaggggtgntcctctgcgtcgggccgtcgttgacgccttcaccttcgacttgccggtgaccctcttcacctcgccgtcgcaccgtgccgctgcaatcgaaatcagaatcaaaattcttgtcttcctcccctccctttccttgcatcccctccgacaacagcagcaagaatcctcctctctaagcaagaagggcgtgaagcgnaagttctagagtctttgtaagnagnagnagaatgggcttaacgcatccgccgctcacttcctcctggccaccgcacgctgtagagccgtcctcaccgctgcgtcaagcagccgcaccgccgcgcgcagtcgagccctcctcgccgctcgcctcctcctcgccaccgcaccgcagcagacgacgacctgtagggcgccgcgccgatataagggataaggaagaagggatgagagatagagtgaggcatatttaagtaaaggagatggtaccggttctaacacaaataggtgccggttctatcattaaattcggcacatttgactattggaacaattttttttcttaaaaaaattacgggcaaaaacatcattcaattttttttataataagtagagataagcgtgttatataaatgtaactttatacagtattaattataaattacaatttctttcttaaatttaagtttcactataaaataggcctattacttaatatgttcaaaaaagagtataaagggcaaaaaaaaagaaattaaatattagaccgcacaaaatatgttccaagtttttgctgatttaaatcaaatggttgccatacaaatccgtagaatgaagttagaaattaattcaaaccctaactactatcccttccgcatgatcggaccgtacatacaacgcttggtcattctcttcagcagttgcctcgttttccgtctcgatatcaattgtgggtagcggtggctcatcgggctgatcgtagtcatcttcgtcaatgatattctccattccgacaatacttcgcttgccttttaatacaacatgacatggcctcatgagtgatgggtccttaatatagaatatttacttaacggac

SEQ ID NO: 49333 - DNA, 1314 bp, Oryza sativa
  unsure (1)..(1314): unsure at all n locations
agagaatatgagagctcttgcttgacatgtgtgactgaagtgagaagagcaactccttttatagcctcccaatgacggttgtgacggttggaatggtcgnaaataccctccaaccgtcattgggggctaatccacaccgtccaggcaaagccctggatcggatggcgctgaggaggattcggccgaacctggggccggcccaatccagcccatttttggctggcggcctcctccgttgttcttctctgcagacttgtgaattttggcccggtttgtcgtgtcaattctgagttcttggcccactcatacataagtctaattctcgacatcgcctaattgatttattgtctgtgttgatgtcgattctcctccactttattgttattctctgcaaaaggttagtgaacctaatactagtggaatattattattctaacatgtatatgcattgcaagcattattagttctcctctattttggcaatattgatggtcgaaactgatcgataacgactgtcaacaaaaccccccaagcttgaacctttgcagctcatttacctcaggttcccagataattgtttgctatttatatttaacctttgagagagcacttacctatgaacctatatataagagatataaaacagagcaactcttcatcatttcaacaaagagaactagcttgtcttacctagcataactcaaacctatcctatctttttttttggtattttctattttgcaaatttttatgttgtcttcaagtttataagatgcaattggaaagcaaatatgtaattggaaagggaaatatgcaattggaaagggaaatatgcaatgtgatacaagttacctcagtggggggagagatatctccccccaagcttggctttccctcagggtccttgataaggattgaacccctgaaagcggaagtacgcttgaacatcatcgtgctgttgctgcatcatgttgttgatgttggcaaactgagcatcagcagattgttgccattcttacgtttgagctatgtgttccgtgaggttgtactggatctcccccgtctgcacatcaagggtatccattctcctagtgatttcacccaagtcccatcgagaagaactcgagcgccattcacttggagatggaggcataccacttgatctaagacgttggttgtccccccattggatatcatgaggcacacgccaccggtcctcactggcacttgcccagcttgagactctaatgctgggcgtggaacttgggtccatccgggtgcatccccagttggttcccaacctgcctcatacat

SEQ ID NO: 49334 - DNA, 915 bp, Oryza sativa
aagtaattactacagtctatgtactcaagagaaattccttgttgtctgcatagcatgggtctcaactctcactaaaagtttgtaggagttcactcaatttttgtatgccactttattctttttgtcgcttaatattaataaacagatcacaatgccatattatataagatgacacaaacaacagactacaaccagatggaatagtcaagtgaagcacaagctgattacttcagtatccaagtaggttgcatccatagtgctatcatcatacagcttagcaaaacaatttcttgattaaggttatcaaaacacagagttataattaacttactcagattacaaactacactgatataggttaagtaaaattttcaaatcattgacatatttgtgttgattgacattcttcagtaaaacgcccactggcgtcccacaacctgtctgtttcaccaagaaaccaaacccaccaacttgcctaaaattaaaatcaccttccctcctttccccaagtagcaaatccaatttcacatttcctgtttaagaatctactcgattgtgacagatcactggtcagagcaaggccctacagctcaaacaccaaactcatctgaaatttcagcagaaggaatgcgcaattaattctttctcctcgttcatccccaagtcaaccccgaccccaagatgaccaaatctttctaatcttgcgatggctacacaaccccaagtaatcttaagcaaacaagctacttctattcaatcatggcgtgcgtcgccaagaactcaaccaacgttcaaaacgaagaaaaaaaaagagaactaaacagaacaagaactagtacactttgaatggaccaggaaagatttggaaagaaactgaagattacctgcagactagagagctcagattagatgtat

SEQ ID NO: 49335 - DNA, 547 bp, Oryza sativa
catgtatgctaagtgtaactgtcgtatattagaaccctacacaatcttacatgctaagtataattacaaatataataatcttatactaaaactcaaatagtgatgatatatgctaagactaagtgacgtatattatagaacctagctagtcaataattatatactaagtctaattacaaatataataatcttatattaaaactcaaataatcttatatgcttagacaaaaatagccatctatgctaagtgtaactgtcgtatattagaaccctacacaatcttacatgctaagtctaattacaaatctaataatcttatactaaaactcaaatagtgatgatatatgctaagactaggtgacgtatattataggaccctagctagtcaataattatatactaagtctaattacaaatataataatcttatattaaaactcaaataatcttatatgctaagataaaaatagccatgtatgctaagtgtaactgtcgtatattagaaccctacacaatcttacatgctaagtctaattacaaatctaat

SEQ ID NO: 49336 - DNA, 872 bp, Oryza sativa
ttttaccctattacactggttgcttctaaaaaaaagtgtggaacatcagtttgtgttaaaactgttccaaaaacacttcatgaataggaagatgatcttgtgtgcataccttccttaaggcgtcaatgtttagttccatacataaaaaaattaaaaaaaatacacaaaacatccagatgaatggccttactaaagcatattttaaagacacgaaactgacaaactttggagtaatcgataatttcatatatatggacagctgtcagctagagaaatttttgtgtcttcttgaaattgatatgtttagaacttggtgcagaacgaattaataattaccatgtgttgtcttcaatgtcttttgtacagccattttctcgtgcccctatttctttacacatcctggctagctacctagcgtgtggtaaaattgtttggaatggaaataaccgaataacatttaaataaacttcgttcgtatcaaaacacgactacacataatttgatttgcttcagcgcacaactgttctttgaataccctcaccagggttcttcttcttccccattcagatagtcgatcacaactacgctggacagtgaaataattactacatttctaaagtttagggacgaattgtgatgggaatgggaggatccaggaaagacaacaacactggttcatcatccaatcctggtgaaccaaactgctaccatgagtcactggttatttaggtgatccatcaagcttcttggtgtcaccctatgaatttcttgttctgacccactggaaataagagccccaagagcagcagtagtacctaatggggagagaagaattgtgattcaaagatgcaatgctgactttgagtgtatac

SEQ ID NO: 49337 - DNA, 684 bp, Oryza sativa
agcccggtagttccaagagtctcagtagcatcttagattctgggttcgattatccatgagagtgaattttccaggattaatcggcgttgtgctttcagtgatttttctaggacttatcggcattgtgctttcagtggtagggggtgagtgcacgtgcgttgtgagtgtcagtgttgttataaatttataaaaaataacttgagaaaaaacaaaaaccgaaatagaaacacctaaatgcgttgtgagtgtctgcgttgttactatgtaatttaaaaaaaaagaaaaaaattgagaaaaaaaagccgaaatagaaacaccgaaaaaaatccgaaataaaaacagcgatgtaatttaaaaaaaagaaaaaacaaacacagaaaaaaatcggttcggtttttcccgaataaatccatcgccgttggctggtcgatctcatgggttgcagcgtggggcccatgcgggacatcagcggcgcatgcatgcgaagattccaggaacactgtgtggggtccacatttaagctagggaaaattggaatcatgccattataatttttcaaatttgagatatatcatcctaacccacatatcattgaatcatgtgggtcctacatgtcattaagataccaatggcatatcttaaactttacaaaattataatggcatggttccaaattacccagga

SEQ ID NO: 49338 - DNA, 1022 bp, Oryza sativa
tgttacactctgaaaaataagtttggatactcccaccggttttataataattctcgttgttttggacaataataacacggcatattcactacatgacaagtaaaaatcatgtgattggttgacggacatcgcaaaaatgtagtttattgaatgcgtggtactccctccttccctaaatgtttgacgccgttgatttttgtaaacatgtttgactattcgtcttatttaaaaacttttatgaaatatgtaaaactatatgtatacataaaagtatatttaacaatgaaacaaatggtaggaaaataattaataattgcttaaattttttgaataagacgaacggtcaaacatatttaaaaaagtcaacggtgtctaacatttagggatggagggagtatatgcttagagctaactattgtatgcgtggattattagattggctataaatgatacgccaattttgacagctagaaactggtattaaatcaacacataactatgacctaaattaatcaaattttgggaactactcctacatagagcgtagagctagacaaaataaaccaaacgctcctctagtcctgtccacacccaacgattccaccaccctctccctttttcactacaaccacacccatcctccttatcccgttcagtttcttcactacctaggtttcttcgctaccgtcctggtcaacaggtgatggtgggacatggggcggtgtgaccggccaaggaaaaacagtgtgacaagaagcgggccatgaggcggtggacaccagtgtcaggaggatgtagccctcccgggtggcaatgttgaagatgagagggaggacagtgtgctagttggcgttggcaaccggatcttgcacctctcaatcttgtatccactataaaccgagctctgcccgaactgctagcttgacgaggtggaaggcggcagccagatttggaggatgggatggccttgaagtgttgccctgctatcctcatctgcccgatgcgatagggaaccgaggcgg

SEQ ID NO: 49339 - DNA, 4361 bp, Oryza sativa
ggccattttcaggtgatttattcagcttgtgggtaggggtggaaacgagccgagccgagccaggctcggctcggctcgtggaagctcgcgaaatgccaggctcggcttggctcggctcggctctccaaccgagctgtacattaggctcggctcggctcgtggtctggctcgagccggctcgagctggctcgtaagcttgcaatagcagcagttgtattgccagcagcagttgtgttgcttgcaaatgacttggttattcagataataactctcaagtccctacaaagataattaagtatattgtatgcagccaacatataacaaattgatggctttttttggtttccggccgaaagtctttctattcaaaccgagcctactaagctcgtgatctgctcgcgagctggctcgggctcggctcggttcacaaacgagctaaaacccaggctcgggctcggctcgttcaggattcgagccgaaccgagccaggcgagcccgagccgagcttgagccgagttcacgagcccgagctatttgtccagccctacttgtgggtactccaatgagtgtactcgcgtctgattggtcggatgtgtgtttcttcacatgacaggtggtttttatacaaaattcctgcatacacatattgcaccaatacttgtggaaaatgattagtaataaccactaccactaagtttgatgtattatttcaattgttgttttccaggaattgacgatcatttaaggatggtcaacatgtagatgaaagttacatctatccaggagtcaattgacatgtccactttgacattagttgcgctttacgctaaacttaaaactcatgagatgaatattctttcttgcaaagttgattctaaatatagttctttggattattcttcatcttattttgatgatgcctcttcttcatcggctcttgttgcttgtactgcctttaatgccaagtccgattatcaactcgagctactcgaggttgaggattttgctttgcttattaacaagttgtctcgagctacatattgtttgagattaactattgaaattgcaaaaccaaaatatttgaatcttctcttattcttggagttgccttgcacccacacgcactgtagatgagttaggtcatgttgagtacatggaaaacattgtgaaatctgatgaagtgctttttttccctagatgttgcaaacaagaagatattaagatagattatgaacattgcgctaaattgacttggatgcttttttactaaaaaagttctttggaaaagttttggatggcaagaagaaacttaacatgaatttagatcaatctaaagtgactacttataataggggtataggctgtaaaatcaaggagtttattcaagattttgtgtgattaaacattggtggtttgctatatttcatctgtgataaattggtttcttgtgatgagatttcggagattgataaacggttggtttttgtgaattggatgtgtggttgacctgggcggtcagatcggccgagtgttggcggtcagaccataggtcttgcagtggttagaccggccggcccgacggtctgaccggcaaggttctgcttgatgtcagtttcgggttgttcgttatgaataatttcttcatggattagacttctagatggcttctatacatatggataccgttatgctaatatgatttctttgttgttgcgtgtgcaagtgttgcttaaggcctcgggagagtgttgccggtgatagatcagagtcgacttgggagaagtggatgtctagggatcaagagatcatgcggtatagtaaatgctagagaacaatgcacgtggtgatgaaggatccatatgacatacaagaggaattgtgtgcatatggaaagtggagtcaaatttggaagagtctgaattcaagaaaattgatagagataaggaaagagatgagttggatatttgcaaaagacggtttcccatgtggttgggagtcctaattgttgttagatttgtgggcattgcgtagccacatcgagggtataagtagtagatgtgttgaagcctctagataacgattttttagagagtcgagttgagagaaaagttagggttttgagtctagtcgagtttttggtgagtagtgttgttgatgcactttgtaaaaactagttgatgcaataaagtcgagatattccagtctacatctatgagttttcatctactggtgttttcttgatccctacagttacaccgacagcaaggtacggtctaatcgacgggagggcggcggtctaaccacaggtagcgtggtggtcacaccggcggtaggagggcagttcgaccggcggcttcaggacttcgtcgcctacttcgtttgaggtaaatcttttattccgtaaaatattttggggtttttggtttcccctaccattcacccccttctggtaggtttgtttggccttgttgcatgctacaaaggttttgatactcactatttttttactaaacatcaaactatctttttgagcataactaatcaagataaaattttgacaaaacctaaacctaacttttgcaccgttggccacatcaggcaccaaaaccaaaacctaaacctaacttttccaccaatcgagatgtcctagagaatgttaggcaccctggtccaattggaattgggagaagttgttttctatagaagtgactacggatcgggggtccgattttttagctaaaaatcaggtgcctagctcagatttcgctagcgcatgcaggtgcaccatgcacagtccatagcatgcatcaaaagccatgcatctgtaccagaaaacaatagttaggttggttggtttaagtttctttgaatacactttaaactattttttctcttaaattatttctccaattcatgattcagttgcaccactaaattctttacaattaaacctttaaaacaaaaccacacatggttataatccaatgaaataaatatttagttttattattgaactttttaaaatgttgcacctatttcatttaaatgtttcagctagaattcactatttaatttacaaatattttagcaagtattttataatgttccaataactataattatagtttagtgctcatatgtgatataaaaatatttcaacaataccagcttctgtaaatatactgtatctctgatatgatttttttttcactcattgggactcagtgttaaatataaatggttgttagtgttgcatcccgtatttgtaaatgctgcatttctctgaagcattttatatagtgaactgaaacaaacttctataagggatgaaacaacgttcaattttttatcaaaatataattatgtgatatcttgatgtagagatttaattataagaaatacaatggtgtaatcgtattgtagacccgataattattttagaagaaaaacatttaaagagggagaaaacgtacaaatgagtggaaattcataaatggacatgcaatgacatgtgcaggatacactgtgaatgagaaaagaaaagaagtattggaagaggagctagctgcagagaagtactccttccattccaaatttatcaatgttattttataggtacaccaagacgaagaaaatctaataactttctcgtactatatttactctaccaacaaactcgatgaatgcaccatccccactatttcctagccaatagcaaatcaagatattgtatgtgggttataaatacttgtgtgcatggatgcatgcatcaatgtccatttactctaatgcacaaataacaaatagacttaataaatgaacacaaatatgtagctcatttaggaataagctcaaaaaaaaaactatatgtagatcaatttagaatggagggagtgtatacttcatgcatgctgaaatgatgaaggtcgtccgcagtgtaggtggagcccacatgtcagtgagcggtactacacatgcaatactgctggggatctcaattgacactgaagatgtgaggaagcgccgattgtttgttcgtggattgggcgcccgactttaagtattatctgttttctatataatatttatatttgtgcaatcattgttggcgaacgttggtgcatggagaactagttgtgggatctgtctctctgagtgtaattttatagacagttatgggacgggccagcctacatatgtacaacatactgtttataatttttatgcttgcttcgtgtgatcaggtttcattagcttgaggtgttatggttaagagtcttgattttatctgatattctccacttatggtgttgagattcgtcaccgtgtactacctccgttttttaatagatgacgacgtt

SEQ ID NO: 49340 - DNA, 904 bp, Oryza sativa
cgttgtcatctattaaaaaacggatggagtatgttttttcataaaacgtttatgacgcacatgcactctcaccaaatacatacacactctagtacgttctctaatccaacaaaaaattcttgttgaaatcatactgctatgtaagagaaatctgacatgacatggtgccattgtcaacagtggatttcaccaaaatatcacttcgcagaagatattcgataaaataatgccactctcgatccatgtctacaagctacggagtataatgctaactaggaccaaattgccatgagcggtgactgccgtggccgagcttggatcgacggcaacagcggcggccgtgctcgaggaaggcatgtcctcatgtgggcgggcgcctgtgatcaccgcgccagccgccgacccctgctgcgaatatttgaggagacgaggaaagagcagtacgtacagttgctagccatgaacgacggcaaggaggagccgaagttggaatagaagatagggatagcacaagtcaaatgaaatttagtcatggatagtattatatagcgtgtagctaaggatcgagagtgacattttttgggtctcttctgtaaagtggaaatttttgacagaagcacaatatcagatttctcagtgtgtaaacaacatttatggatactgaaatttaaacctagtgggtggagtcccacatctatgactcattattacagtgccagtgctttcccaacatattagtgtatatgatagtgtcaacctatctacatgatcatacaaataatccaaccaacactggtggagaaaccctttgtagtcctggttcgtaacccccctttagtcccggtttctaaaccgggactatcaatccgggactaaagatcgctatctttagtcccgggtgaaa

SEQ ID NO: 49341 - DNA, 989 bp, Oryza sativa
atagaaaaccacccacacatgaacattcataataaatttcacgcacatgcccgcgcatatgcgcgggctaccttactagttgtataaattagctattaaattgactatggataatttgaagctatagctatactattaaactttctcttagtaacaataacatcaaagcataaaacaaataaattatgtaggctatcctcgttagtatctccggctcttacgttaacctccaacccttggatatgttggacctccacaggcggtggtatcagctttgagctacaacagccaaccaaaccggcttgcatgtcctatctaatcatttattaattgtctacatatagttcttgtgtgtcaataatatatctgtactgtaaccatttattgcagatcagtttagttactcgatcttttaatttttagatgcaacagtaacagacattgtatatatacacctgtagtgacctagcacaggcgacaaagaactaatgggagatttgctccgttctaacaaaaagtatctcgatgtaccggtaacttacggtatcagatccaacgatcggaaacgatttggtaccgtgatataccagtacctcaagatactttttattgaaccggagcaaatctcattcttgtgtctccaatgcttactacacataagttttatatttgaaggccgctctcatggatcctataagaggttaggatacatggtaataatgttggtagagaatgaaaatacgagtaaaacgttgaaacagatataaaggcagagcatatcttcctcaaaaccattttttgcttccaaagtttatatagaaatatgcattgggaatggggaggaattaggaactggtttagaacatgaaacccaatttctcctacgacgactcttgtcttcctggagttttcaactgaatagccactagatgaaacgaaaagcttggccatcgtggcctgaacaccgagtgaagacagcactagattta

SEQ ID NO: 49342 - DNA, 1422 bp, Oryza sativa
ttttatttaaatcggtggatctagatcgttagatatatcttaaaaacaaaaacctcccatgtccgcatatcgtgcaccacgcacgtactgatcaatttgtacgccccttctgttcctttctctttttacatacctatcacaattaaaattaaaattatctttatggaaaaaaatcacaaataggcattaaagtcctttcaacatcttataaatatttctaaactattgtgtgacactcttaaattagagaaacattcatccatttggttttcacttaaatcatttgacacattattttacatcgttatttgatctttttttaaaaaaaatcatcccaaaccatattcccttcctctcatccctatgggcattaaagtacatgaacgttttgctaatcggctacttgtctcacttaaattaaaaaaaaatccaatcatcggtttttttacttaaacattaacacattattttaggtcatcagaaagaaaacatccaaactctctctatttttccttaattttctttgtttttcctatctctatgataattaaaattaaaattatttttatgggcaaagaaaagaccacaaacaaatctccacctattaggtctagccaattattttttttaagttaaatcaataacttaatacccatattgactatatttaattgctaacaaaaaattacattatggacccacatgcatattgaggcctccacttaataaaggcaaaaatttctacaggacattaaaaaaacgtgtgattagctgggagacactacaagaatgtatatctgctacaagacactgcaaaaaatggtaataagctgcctgtatacccgcgatattattttgttatccaaagtaaaaggagatagaaacaattgcgaaagtatgattttgcccctttctgccatgtgcggctcgcatatagctctgacgctgtcgacgccacgacatgggcagcagagggtatggcagcacagcactccactgcgagaccgactgcaatagcatgtgctctgcggcgccctgctcaacatgaaccaggaggtggcccatgttgtgctcccctcaagtgcggtgtgtggcggagcatcggcgccggcatggcccacgcgctgcagaggcgacgagtgctggaacaatgcggaaccatgggcctaggcgcacgggccctcctcgataccccgcccccagagagccacctcaccggctgcgggtgcggtggcggcgttggaggtgaatgtgatgcagacttggtagggaggggaaaaaatcatacttttgtgattgttttttgtccaattccttttgaatattaaataaccccacaaatattgaacagctaattaccaattttttcgatgtccactcataaataaaaaatacatggtttaaagtaattttagttcacag

SEQ ID NO: 49343 - DNA, 1077 bp, Oryza sativa
agtagctctaagagttttaagacaacaataaataaaccagtgttgttactcgaacaagagcgctgtcagaccttgttcggttaatccctatgagggagggatcggaggggatttattccacacctattatggtgtggaattattcccccttaattcccttcaatcctcttcaatcccctctaaaccaaaccaggcttcaatgggataagttccaaagatagactagacatatagattaagcaaataatattggcacattattaaagatcacgtattcacatatcagtgccgttcttttttgccctaatagatcatgtaaaatgtatgcttagctccatctaaatgttctaacaaacgtaaactactgccatctaatccctccgttaaaaaacatgagggattctgatcacaaatatgttagcgagtaacatgactgaacatgaaaaatgttctcgatgttcctcttcaattatttgctgtgttttctcttgttgataggaaaaaaatgattcctaaaaagacgatgtggctgctttttcaggacaaatatagctccttgcaactctcaaactctactaatcacttctttcatgatgttgcttatcaattatcaccaaatgttctccacactatttctcttctcttgcatccaactattatctattcacacattcgaattgttatctataaacaattaatgaatcctcaaatgtgcattattaaccaaaaagtagagaaaacccaatggcacagtatctcaatggtgttattgttgtctattgtcacccagaccaagcacgcatcataatattgtgctctcgctctccttgggggaaatcccagcattgttctagcatctttacagtccaagattccaagtggatgacctctgacttaaggctgtgttcttcaccccatttttccaacccacctctctcgttttccgcacgcacgcttttcaaactactaaacggtatgatttatgcaaaaacgttctatatgaaagttgtttaaaaaaatcatattaatctattttcaaaaaatattagttaatacttaattaatcatgcaataaaa

SEQ ID NO: 49344 - DNA, 1216 bp, Oryza sativa
ttttgtaatttgtaagtgaaaaatatatcattttgaggaagatatgctctagtgggcatctcatctgtttaacaatggtttatcccttctttttctcagcatcattttttctactttaagtgtaaatatatcattatctaaaaaaagtgtaaatatatagttttgaggaagatatgctctggttgacatcaaagacttgaatacgcatagcaaaatgcttacagaatatagtgacatggttagattgatgagctagtcatgacttgcctccttagtggtgggaagaaaatacatagcctcccattggcagcgagagtgtgtgtgcaacagctaggagaagaacgagcaataagaaaaacacaagagaggaagaggagttcgtctagtacagtggttcttgccagattttcatcaagttagtgactggagactcaaacgtgatcagcttggcaccaaacttggtgagttcattcttaactcagagcacttcagtctgctaagtttgtgcgataattaattgagaagagcaccatatttcgggtctctgcagtttcagcatgtggagtatttggtagagtgttagtttgatgaatcaaacgatgtcccattgggcagattttgtcagcttggaagaaactcatatattattagttatgccaagtttcatgcaatttgcatatgtggtttgcgagatagtagctaataactgaaggggggcagaacctgcatttttttttgtttgttgttttgttgttatggttgatgttgatgatgccaagtatataacttgatgatttacctgctgctaagatctatttgtagatgttctaaagaagacttcagttatacgccttgttgattataatggaagcttgtactggaccggttagtcccataattttttactcctcacaacgaggaagttttcagacataaattagtgtgcatgtaatcatcgttgtttcactattgttttgctagttgaaactatccttaatgtttatcgaaagatgaggcgctgattgtatggattttgtttgttggatggtgaatcaacattttgcacgatgtgattgttggttcaatcccaacattgtgttacctatatccttatatgacaatgatcccgtgagaaattaagggagttaaaatatgtaaatttgcgttaactatgcccatcacctccaattgtgctagctaacatataagatacaca

SEQ ID NO: 49345 - DNA, 1592 bp, Oryza sativa
tacatgatggatcacatggggacctctattataatgtagcatttagggctgtaagaagagtggctactcgagctcggtttggctggcaatcaagccgagctcaatacctgcttcagagctcatgagattagacaagccaagttagagacttagagcactaattctcttactgagttttttcattgaggcatcatgttgtgatcattgtgagcattattcatcggttcaattttaattttcattttgtgtttttttttgacatgcttaatccctgatgttatcgttcgagttcgcttcgagcttgagcatatgtagaccagcttgctcgagctcaacttgttgacaaccccgatggtattacacagtacatgggcctatcatgcccataatcaaaagcctctttttggatgaacaagaaatgaaggacagaattaagtttcttacacacttgcacagttgcactgaaacatttctcttaaacaagagcaggatttcaactaaatcagaataaaaagaacacttagaagaactaaacttgtggagattgaagaacggagggaacttgcatctacaatactggaactagcctatatatatctctgaatattatgacaacaaaaatcatgcttatctgtgcggcacatcataggagacaaattatgcataaacatatttattcttaagtagacaaatctaagccttatattggtttctagcacattgtggccactaaataaaacaaagtaataaggtgtggtgcatccaagaattcagtcacaagattgaacatcatactaggtgcagctgatgacttggatggagctcaagttcttcctagagccacccattctcattatattgccaacttaaattttaaaaaagcgaattgataatatataatattgaagggctagagaacattgagattgcgtggaaaaaaaagtgcacgacaagttttatatacacatcttccatgaacaatcctaaatcgtatatattcttgtgaagtaaaagctttgtaccacaacaacatattttaaggaaaatgatgaacctcctgtgatccactagtatagggttctataagggcatggataataatgcgctataaaccaactataaatttgtgtataaaagagacagaaaagtgaggagcactgactatcattcaatagctagctctacatatgctccaagatatttacattaaattcatagagaaagaaagagaagagaaaaaatatagacaaccatatagttaacctattatatatattaactctaatacgtgctaatatccatagttagctatactattatacttgctctaaggtcatgtaaaggaatttagagaatcataatattagagcattgatattttctttcattgcggaaggcagcattgacagagcttgacctaaaatgtagcaggggccaactacaactctttcaaaacaagaaagaaagaaaataaatatactgtatcaattatgttagatgattgattgagcatgaaagtagtgttagagagcacaaaatcctggttttcttataaaaatgaccatagcggacacatatttccaagtacacaa

SEQ ID NO: 49346 - DNA, 3097 bp, Oryza sativa
tgttcagtcatgttactcgctaacatatttgtgatcagaatccctcatgttttttaacggagggattagatggcagtagtttacgtttgttagaacatttagatggagctaagcatacattttacatgatctattagggcaaaaaagaacggcactgatatgtgaatacgtgatctttaataatgtgccaatattatttgcttaatctatatgtctagtctatctttggaacttatcccattgaagcctggtttggtttagaggggattgaagaggattgaagggaattaagggggaataattccacaccataataggtgtggaataaatcccctccgatccctccctcatagggattaaccgaacaaggtctgacagcgctcttgttcgagtaacaacactggtttatttattgttgtcttaaaactcttagagctactgcggcctcttaaaatatagcccaagctagggctcttcttcccctctcaaattccttaggcaactggctggcagccggcccctctacaaattccaacttgaaaaattcagtctatatacaagtattgtgataagaatggaaggagttaggaagaaaatcaacacgacaagtgttggtcatcatctccaacgagcacacgacattacatgttcttcccgtcgattatctcccatgcccagatgttttactacttagaccctctgggtgaggtttagcactgtggtctgttggctcatcggaaagcagcggcaaccggctctggcccctgctatctggcaaagaacagaatgcagacatttgaagaacaggacgagcttgagcatgcaagaacggtaagctgtaccgtgcggaggcgacgtgatcggctcatgtagaagttaatttagaaccctagcaaccattatttgtttcatgagctatgggtttaaaacacgaccagccatttgatttttgcaacgactttgtatatgtagaacgtttacgaaaggcagaggacacaagtcctataaaattaagcatattgttatatatatatatatatatatatatatatatatataatttctgtacatatatagcataaatatatattctgaagatgcaaaatatgtgcaaattagacatcgatcaggtcgatgcaaacaaactagagtattgcatagtttcttcagttgccatatagtttgctgcaatttttgttccattaattatattttgaataccagagccggggaaattctttcacctgtttcatcagttttagacaccagggaaaatcaattttcgcaagcttgcatgggaaaacaaattaatgctagaaaaaatgcccatgtctgctggtgtcaagctaaagtgaactgcgagtgaaaacaatttttgaagacaagaaatttgaaaatcatgacgacgatggcaagctccaaccccggccatggcctactcgtcgagctgcgttatcacagcggttgctgtgtctatccttgttagcctcgccgtcgttgtgtccatcctccatgagtgcggattgatctacgccgaagggatggagggcagaggtcagctccccatcaactagagtcgccgccagagtcgacatcccttggagtcaccgccgaacagagttaccaccgccggatccgccgccacccgtggatgtcgctgccaaatagagtggctcaagctctaccttcgccagtggatgtcgcccgaactccaccgccaccagtggatgccgccgcctgtggggaatgaggaggagacgggcgcgcccgtggggaacggagttgcccaagctccgaacggcgccggtgggaacgaggcgagggagactggagggagatggaggaagaatgggtatgggaggagagaggggacttagcttgtggggtttgcccggtctcccctttaatatggcaatttttcccctaagggtcctcttcaacagctatttttcgcagcagtcactaattaagaggtccgcatgcaaaaataactctatttttgcaagcggacctcttaagtggctgtccggaaaaattgattttcgctagctgttcgtgaccagaatctcccaaatgtatttctataagcatatgttttcttaaccctctaataaaaataaaaggcgatgtcatgaaaaatgatttttaagtagtgcctatttagaggtaaacagaatagtaatataatgcttggacaataagccatattatatatatatatatatatatatatatatatatatatatatatatatatatatatatatatatatcccatatggtagtttcgcctcgatcctcccactgacactagtaataagattcaccatacacccctctccagaattattgagttctcagatgaaaatttagtttacataggaactgtggtaggaacgggaggatgaaggaagaaattctgcacagtaagaatccagtgcctaattctgccaaacctagttattcgtcttgatgaaaatcgtcgttagcaaggccggcaagttgtcacaacgcgattctggcccctattgatgagtgatgacaaggtactgctggccccagttcaagcattttgatgttcaaattagccgaaacagatcctggtatttcacgacagagatgttcatcaaaatgtcacttttgatccttgccaacaaaagaaataatgcttcatcttttgttatgggcgataagtgatcggattggatatgtgtggaaggtgggagggcgtggcttcggtggcttggaggaccggcgacctgtgatgggcacgccgatgaaacgagatgagaaacagagatgaggaaatagattaaatctgacttatcccttgaatgatctaaacgtgcctcttataggcttgcaaaccataactaacaatctgctaatcaaaaagaactaactctaacaactccctaaacatctcacgagataactggatactattccccgtccggcacggagaagatcacgacgctaatccttttgctgtgccatcactatcgccaagcgacgccttcttgcgtcttcgttggtgcacaatcccgaccatgacatctttgtgcatttcgactccccacaatggcaatctccttac

SEQ ID NO: 49347 - DNA, 1298 bp, Oryza sativa
ccggcgcttggagagagaaagcgagctcggggaggggcggctagggcacttcgaaggacgggacttgaggggataggtagaggacgactagggggtcctttatataggcacgggagcttgggatcaagcccacatcgacgggaaaaactcgggaaagtctagggttctcgccggaaaaaggaaaaattgaaccgtgaaattggaaaggatttccataaaaacttttggggatttcttggggaaaaggaagaggagattgataggattccattcccgtaactaatttggaaaaaggagcaacgaggaggccggattggtgggaggaggcggcggcagtagggcacggcacggctcggctctggctctgtctagaggttgaagaaggtactgtagtgatagggaggaaaactagactttggctgggctgagaggaagggagagagaaggggaggcaatgggctggattcggcccaagctgatgaggaggacttttatttacttttccaaataaattaaccaatgagatgatctttcaattgttaaaaatacttccaatgctcaaataattccaagaaaaatcttgaacatacttggacactcaaagtatttaatataataatatacagatcatttaatgattaatttattatttaaataattactgaaatgttctttgtattattaaaattaataattgagctctgaaaaattcaagaacattctagagagtataattaatcacggagaatttaataaaaattaaatccagccatgctttatatttaggaaattttatttcccacatttaacttcacttgaaaattaatgaacatttaatataaattctattaataatttattaaataatttataaatcctgaaacgaaaattcaagctgtgacagtaccactagcctgtaaaaccggtggtttgttttggtcatgaccagcaaaaacgaaaatccattaaagagcgtttccacatggtagaagctcctcaggaacataagattatcatgaggttgatcttaaactgtcatccacgcacaaacagtttttgtgtatgttctgccctatttgagtaacaacgctcctggtctattaattgttgtatgagaactattctattttttccaattttatattaactaggggtagcccgcacagatgcacgagcaccttatttattggtgtttgaaattttgtgacgattgtttatgtatagggtttttatttaaatttttttttactcttctaaatctatgtttattaataactctctacatatcctttgtttaa

SEQ ID NO: 49348 - DNA, 903 bp, Oryza sativa
cgattgtttatgtatagggtttttatttaaatttttttttactcttctaaatctatgtttattaataactctctacatatcctttgtttaatgagccttatttaatgatgggtatcttagtatttttttcattcccccttaattcttataaaatgttaataatgatggagatatatagtaataaaaaagagctttattcatatacgaatttatttgtaacattgtagattgatttagctttacatatttgaataggaaaatagacatcgtatactagttgagaaatataattaagttggtagaaagttgttagatgtccaatggtatgaagtaattagtccaccaattttattaaaaaattaaggtggatattttttcgtggtaattattaggatcttttttttattcagtggttaaattaattgttgtaaggaaaaaaaagaggcgagagccagtgggttcatctcgtcggtgaggaggcaactggatacatgtgttgtacatacgctctctgatggcttgatcgatcgataggtttgttttaagatatagatataacagttaataaggtccatatgtaggggtaaaatgattttttttctcagaatttcttatatttactttaatttattagagcgtcgtgtggtggcttaggaatgtttataggaagccacatggcagcttggtaatgtttgtaagacgtttaatggatttttagtatataataatagataattcatgtcatagtaattaatatatcaatctgtaattaaataatttccctagattttatgtgtttgccactgaaagggaatggtatatatcccagtgatgtcccgataattttttctgagtttgtcactgaaaattaaaggtatattcatccaagtaacgtataataat

SEQ ID NO: 49349 - DNA, 7428 bp, Oryza sativa
tttagcgtatttggaagaaaaagaagcaggggtttcaaaagatccaagaattttttttaaaaagaataatatcaacgtcatctttagtattgtgctatttgctttgatcgtatatcttcctatatcatttattaatcgtctattcacctccctttgctccacctcatactcacacgtagcattgttacctattttgcatataacattatgtttttcccttccaagtcttgagagataatgctaactttttttccaaatacaactcaaaatactgtttaagatgtgagttttgttatattatgcatgactatatagcatataattattaggtatcattacctgaactcattttcaaaactaagctggagtaaagtagagaggttatctaactgcaacgattcccatattgcggatgaaaataatattcatataatataacagtacacaacgatgctttgaaaaataaaagtattgtaaaaacatagcatgtatataaagctacattatcagttgcacctaaccaaatcctcgatttagtttgacgataaaactacaaaacccgtggtaagacgcggggtgccaactagcttatataaatgcagtactccctctacgtcagtttttgtaagatcgtgggatgtgctggtttgaacataactcctggattgttgattgttgtttcaaaaattcttttttcttctttaatgcaagagagtggtcttgttttctcttaagaaaaacagaatattattcatcgacaatactatactccctgcatcccagtttgattcacctaagatttttggggggtttttcaagatgatcatcctataacgaagtgtctcttcgtttatgttgcaaatatagtaaatgcgcatcatggaatgccttgcatgaagccaaccagaatgattttttattggttcaacccatgcaatgaggatcaataaagtgttccttgatcgatgaggatcaattttagaatgatgggtgttttggtatccttggtcttgatgccctttatctagagaatgaccaaactaggatgggggagtattacatatcctctcttgctataaagttagagccccctaaatcttaaagcttaacatacaaagatgtcacatcattatccactaacaattattacatttaaatataatgcaagcatgttatattatctattatttcataatttattaaattttatagtttttcaaatgcaagcatgttaaatcatcatctcacataattcacgtaatatttgaatatgtctcttcatttttttataacatcttatatccctatatatatagttcatcctaacttcaaacttagttagtgggttatctcttctctcattaagctgtatcacatcaattgttttgtccttagatgattatctatggtccaaattatctcccttcttttcttctctaattaagtcatatcaactccattatttttagcccatagatgattaatctttgatccgaactatcttcctcattttattctctcataaattcatatcaacttacttttatatttaaattattctatataccatttaaatttaaattatcataaaccacatcaacttacgtaagtttatattgtctagctagcttacaaattacttttacttagtgtatcatactaaaatcctacagcaacgcacggggtttcacctagtaaactgtgatagttcacctcttcgcccacatgccactcgaattctccacgcacccctctgcacaactgttgagttcatacatgaaaatttaatttacaaaggaattgtggtaggaatggaagaaacaatatggtggttactttagccaaaccatattgttaggacaaaattttgtaagcatctcttttccaaaatgcaggcacaactacttttttatgatgtgtcataatataaggtgtgtatgcatgcaacaccaccttctttcccctaaattccaccccacgcactattcccatccgacgtggcatcgcccagcggccgcctcaggagcgccttttatttatcgaattatcttttaaaaaacatcctccaccctcaagatttctaattctattgggtgcatggattatatttattgggtgattcaaataaggaggtgacaatagttgtttcattgtctttaggttaagggtggttgtgccttatattttagaatggtgggagtaataggcatctacatacaaagccgtgcaccctaatctggaactttttgaattttacaaacaaaaatatgcacaagtggaacatgaaggattcaaacccgagagtccacactctccatccataccattcttaccatcgcacctacacaatccttcttgtagaagtcatatgctattcttgtaactctttttgttcaaaacatgtattacatccaggacattcttgatgaattaaaatgagaaaaaacatcaacaacaaatttgtcgatcttgtggagcttcaaaattttcatattgagtttgtctccatcaagtcattggaaaatttaggcatgcaagcttctgacgcatatttgggtatgtaaatgaatttaactgaaatggttgttacataggatattgtagatctcgtcaagatctataatattgatatagagcttgtattcatcagaagtcatttgaaaattaaaagtatcggcgaatttataacatatattcggggtatgtaaacgatctaacgtggaaacattgtcaatggcatggttttagatctcattgagctctataattttgatataaagtttgttttcatgttactttgtataaacatattatttttttattaaactattatttgagtatcgctactggttcaacactcaatagatacgctagtccggaccatagtttgtgttaccgattcatggagaaactgtactgtaggttcatgtcatgaacctacaatgatacttccccctctcattgcagattcatggcttgaaccggcagtgatacatggctctgcccattcaagccatgaactgcctagtaatacactgccggttcagtatgatttagtagggaaattgaagtgaactggcgtagtgatgagctgacagccttttctgctagtgaaaactcaggctctacaattatattcaaagaaccaactttccatgggaaaatgttcaaaaacatcaaaagtatattactatatacattttccatgagaaatgtgcagaattgtaatttgtaaagagaaattttcctgtccttaaggagggaccaagagtattaaatcactccatacaaagcattctattttcaatgatctactcattgcccaacttaccaagtatcatttgcatgtaccataacttattactctctccgagttgttaatacttctcggacaaggctatggtcaaactttaaaaactttagctataaataatatctaaaatctttatcttagaagtatggtggagatttcttaaaaaatagttcaataaaatcatatttttattgatataattatatatattgtaataaaaagaatggtcaaagttactttatggataacatgtccttgtccaaaacgataactattatcaacccgaaaagagtatatcgtataactgattggggcatatgcacagttgcagaatattgcacagcaaaattatgctctctaatgaagaagatgctaatgaagtttgatatttagaaggctttttgtatttttaaggatttgaatagcaaatattgttatacctgattgaacataggcatcaagtcatctatctcgggccttctttttatgctaatgatacgatgttgttactagattgtttatgatgcctttgccattagaactttgtatcaagaaaaaaacggtttttcagtaatttggattctggaaatgcatctagcctgcatagaaacctacataaatatttgaatgcgccaaattatatgtatcttgcagaataatgcatgtgaaggtacagccatttgagtttgagttcttattttctaactgatgttttctttgtctaacagaaaatcaactttgccccccaatggatcatatgactggggttcagggttctaggcttgtttggctatggctggagcccgaccatgcagaccatggatattctggttacacttgaattgaaaaatgtattgtcaccaagtatttaggaagattgctattctgggaggacaacagtgctcaaaggtgacaagctcattcaagggcgcattatgcttgcaaggagcacaagtgacacaaatcttgcagaatatgatattttttacttcaatttgcagaaccaaaatgcgaaaagaagggccattgcaatccacccgtcaacataatacatatggcacaaagctatagttaagtattacagaaatagaggcgaatgatatcaggaagctataccgtacctaaggtatcacaaaggcatggcacatagacgtatatgttgcggatatgcatatcattgcttaacaagcaggtgcggtaaagattttaatgaatgcactacctaaatattcatgatatctttgataaatgtagtctctaacaataatcttgtggtacagagcttttactctataagtaagaatatatattcaggatctctcacagaagatgtatataaaacgagctatttatgcacttcttccttcacttcacacagtctcaacgttctctagcaactcatgccattatcaattcacttttcaaaatttaaacaaatataaagggaatgggtggctccaggaaatatctcagttcgacacgcttgaccttcttcacgtcatttagggagagctgtatctaatgtgtgaagggccagatgaaccacaccttatttactttgttttagggaccacctatatatttctcgacaatttttctcctaaaaatttgatagatgtaattatagtacaatcgtagtgtaattacactgtaatttgtatgtaactacagtgtaacttatatgtaagtttcacgtaattttgaatcattaaatctattataagatttgttttggtgaggaagaaaaaacaattacagcacacatatatgtgaaagaatttgttcccacaacctccattttaccgaaataacatgttacggagagatttttaaaagttacatacaagttacattatagttacagtgtaattacatgcaagttacagtgtaattacactacgattgtactgtaattacatctctcaaatttttaggggaaaatttgttgacaaatatatagcaaaattgttgttttatttagttccccaatctgctaaaagccaatatgggataattagatgcaccacagctcagcaaaaggtagaatctagtagtgagttctatataatcccatataattatggaccaatttcagaagttaactccttatatttttttatcgagggactagattgaattgagtaattagataatatgctactcgattcgtagtgctttcagcatcagccactcaattcgcagtgtcaatcgatttttgcagacgtgaccagttacgatccgtctataaactatgggggtacttgtatagaaaaatcgtttctatagtagtgcgatttgcttggaatcttcaactgaatagtcactacaagccacgattaggctgtccatcgtcaccagaatatcaaacgaagagtacgcagcagatgctagttgaaactagaaaaccaacactgacatattgtgtctttggtacctttatttcttggtttgtaataaatacagattttagaatttctggtttacaaattcataattcaatgtgttacaaacagactatcagacactgcatgattagctcatcaatctaactaggtcacattgtgcattttgttatgtgtattcatgagtctccaatgcttactgcatgacactgcattgattattttgttatgtcatgtattcatgttttctatttgaaggcactcatggatactgtaagtgggagattggattcgtagggaaaatgttggtagagaaaaaagaggagtaaaacattgaaagagagacatcaagcagatcatatcttgctcgaaactattttccacttgcaaattttatatagaaattttcattgggaatgggatgatttaggaacacggttagaacttgaaccaccaattcttcaactccgagtcaatttgcttggcgtcttgaaccaaatagtcacaacaaaccacgactaggctggccatcatgttcagaagaccgagcgaaagtgtattatgcttgttgaaactagaaaaccaacactgacatattgtgtctttggtttacctgtattttgtggttgataatccagttctgagaatttgcggtttgcaaaattcgtaattcaaatgtgtgagtgtgtgtgtatatatatattgcagttggatgcgaactaaataacaatgaataagggaagaaggattggatggagaacattggtgaaaagtaacatcacggaagaagtgattagcaggtttcttggtgtgtccactagcaaggaacaatatatgtatcattaacacagaagcccctgcatttccatctgaattcattgttttctatccacgttagatattgttcatcacgccagttgctagtattgaagcagtgattgtgtatacttgacaaaaataatttgagggaaaatgtacatgaatattttccttgttaacgatcagttatgtcattgaccaagtgaaattactggcatatatttgatttgcaaaatcagatgcccttatgcccttgttactcaattagcgcatgcttgttataatttttttcgccgggaaggccgaaggaggccaactgagtatattaagaaggagtaaaagttacaagaaaagacatcaaaatgcaccaaggtgcattgccacacaccacacactaccacccaagcacaaaccattgaggatgaagcctagcaccaaacgacccccgctaagcatggccggatgccgctaggcctacggcaacaccacagagaagaggctccaaaaacgatgccaccacggtggtcacgacatccaagaatgccgccatcgcccatctaaaaagatgtgcttttcacctagagaagctcatcaagcaagggagagggtaaccctcgacaacaccccaagaggttacgacacccaaaggcgtagccgctgccagcccggtgaaccaccgaactaggcttttgcctgagaccctacacccttgactgcagatcgccatccaccaactcagaaaccccacacatacatatggcagcacgcagcatccaccacaccacaccgacgcccgtccgtcggccgacttcatcgaaccaccacccctaagagctagcccaggacccctccgttccaccacccgcctgccgcctcgccagatttggccgaagg

SEQ ID NO: 49350 - DNA, 5788 bp, Oryza sativa
ccccgccgcgcgcccgggctggcggccgtccccgccgtctgcccgggccgactatcgtgccgacactgagccgccgccgacgccccccaggtgccgccggccaaatccgggcgcgggatcgccagatccggccttcgaggtgccggatccgcctgtcacacctctggccgcggtgagggactttgtcggcttcaccccgtcgatgtcgcgccggggtgggagacgccaagaatagggagagcctcacctttgccttccctgctcgccgccggctttgccgccggcaagctccggcgatagcgaggcagcggaagagggagtggaggtgcgggcggctagggtttttttgccccccgagccgcccgcgcgaaagcgacacggggagagagcctaatcattcgcttgttagaatttttatacggaggtaaagcaggtgtttcacaagatcccacgagcacagaaaagaataacatatatatatatatatatatatatatttgatcataacagatcatatatatatatatatatatatatatgatctgttatgatcaatatgtcagttttgctgtatcaacttttgcctgagaggcgtccacaaaccacactatccctgtgctgttcatcatcttcacattctccagagaaccatatttatcctggcctggtttgttcccatacatatcaacgctccatggtcatgtggctgtgagcacgactctagtgttatttatgacaaaatggagcagcattaagtccactggaactcaacaaaatatttacatgttgtctcacctataagcttgatgggcatctaatacatctgcaaaattagtacgtcatgcttctgtgatgtagtatgcggcagagcccagacactggctcaacatggttgtcgaactttagctccgccgttgtatctaccaaaaaattaagcatatctccgctgctgtgctctaccaaacaaaattgacaaaattattagtaacaaaacttatctaagatttagtactacaaaaattttggtatggtttcaaattcaaatagagcattgataatatatactttgtgcatgcttgcgcacaagttgtaatgtatcatggtggacgcacggcatagataattcagctactggttaaaacagttctccggtatattatagtgcgggtgcgtataattaaatgtataggaaaaatagcacgagtgatgatgtttttaggtcctgttgttcctatcatgtaaaatctacaacattaatattaatcggtaccaaaaacattatggtcaccataaacatctatctagtaaaagtccatgaaacttcctacaaacgctcataacccgccacttggcactcctacaaacgctcctaaaccgctacgtggcacttttaatctaaccgtcgattttcatttaaattggtggacctactattttagacctttagattagatctatttagagaagtcccagcttcatcgaaattatttaccagaaaaattaatgtacataccgaatataaacctctcctattgttctcttaaaaaaccaaacagacgtacgtacgtacaaagattaaaaaaaaaccaaaaaaccatatgtatgccgtaagaacaatacggtctttcgaatatagtgtagtacgtattgtgtatgcctttctctgttttttatttatcaacgaacagcaagtacatacttaagacttatctatctatccacggtctttaaaataggatttcctatattataaaataaaatttattactccacaaatatgcacggttaaactaaattaatataaagtaccaaatcaactgtctttaaatgttcatcttttaaattatttctcaaatatatatctaacttataatcctttgtcattctttaattaaataaaatactaatcacttataatagttatatggaactgctaaattcattacgaaacatggtgccgacatataatacgtaatgtgataattatttttcaaataatttagctaacatataataactaatgtcatttttaaaataatttcacatgaaaaaaatgatcaacttggtgtcaaattcacttggcaaatatataacactaattcaaatctacatgcagaaaaagtgaaacaacgttgtggtttacaatcagatttgattttattttaatgtatgtgatattaagattctctttttttttaaaaaaatagaactatttgatgggaatttccaggcaatgaccttgctatattacgaccccttaatccatcaggagaattacggtcatgtatggtttttctttgcgaaattggtttggtaacaaatgaaaaatcatttgcatcaaactattcatcatatattttttatagtttagaaattctaatatatcaaacataattgatgatgtatgtcatacaccccactgaagtaagtataaatgcactccaacaaattagttactttaaataattttggaaaatatattcttagaattagtaaagatgtcgcatgtaattatgaacaatacatgaatgaaaacaaaccgaagctaaactatatatcttagtcaaaatataaagaacaatatggtactcctagatgtcatggtcgtatgtctgtttagttatatttttttatcaaccttgctcatctgaaaagagaatattgtatctacgcaataaaaaaaaataagcattactgattaataccatgcacaattttgtctacacaaaactttaaaaaattcactagggaaatattttcatcacctacattccctctttttttcccataaagggcatcaagcatgttgtgctaccacaagtgtagcaagggtcatacattcggttgagttgaagccaccccgacaaaggctactattgacaatagtgcataactttgtacttactgatgcaattatctatgagggtgctgatagtgaactagacattaaaattacgcttcatgctggcattgtggggcacgactatgtcgactcaggacctatgtttaaaggcagtggagaaataaagtctcgatggatacggtcagcttcacccattaaaggggacattcatatttgattttaacggtcatcaaaattaaaaaaatcttataaattataagaaaaaaatatgatcatcggtttacttaaattatttagaaaaaaaatagaaaaataaagtacccaaaacctcgtcctccccggcacatgcacaaaacattgccggtccccttcaaccttggctcatgctctccgctctccattcctcccccttcctatgaataatactgaaaagaccatatttttaatatatatacataacatttctaatctaattgttactctgttaaataattaaaccaacaattattgatccgtaatgcctatatttttaatctaaaataagacttgtataaaataaagtagaaaagtagaaaaaaagtcaatagggattgaatcaaatcaattagagagaatatagtaataaatttctaaaaaatagaaaattggaacaaccattgtatgttccattgccataaccatccatctgtcgtggtattatgagtttctcatatattattgcatatataagacatactaaggtagccagacgtagtagtacttagttggttaaaaagttatatatgtgctactatcaactttaaatttaggactcatattgcctaggtattttttttaaaagaacaccataaatcacatatataaaagggaaaggacgcatacaatatatatatctcctatgtatttattgtctcattctttcaagaaaataaagaagatcattgataattgcttatagtaatgaattaaatattatatagttcaaaccttacaaatgtcttgtaaaacaatatctaagcaatagcgatgaagaaaatttataaagaaatactccctccgtcccaaattataccaactataatcaaactcggtagcttttaactaataagcatagtagctatatctaagtattatgcatgttacatcactagatttatattttgaagtactttcatgtgatgctaatttcatatttgttgggatagaatggaataaagtactggtcaaaatatgttattaaaacctgtgtaaaaaaaataggtcttataatttgagacagagggagtagtatttttcaagcatagcaggtatcatccgattgatattcccagtgtaacctactttacatgcccgggcgaatgcgcgggctaccttcctaattatgctaaaacgagtccttttttggtttctattgttttcaaggataggaagatgttgtttgctatgtattaatagacacagagtaaaaaagtacaaaatattggggggggggggcgaataaaaatatgatactctcccccagtcccaacattggaagatttctgggttctcacgctagctgtatataaatacacctaggacaatactcatattcctcgcttactaacaatgtcaaattctcaaacctcgagtctattacaaacacaaagggtacacttttagtagatatcggtagaaaaggaaatatattgtgaataggaggacacgggatgaagtctgtcagcaatgatgaaggcgctctagttccttggtcactagcacgaacaacaacgcaaaatcccattagggtattcccaaccctccacctcagatggttgtctatagaatctattaggctgccacataagcaaaattctgatgtggcaaggtaattaaagaagtgagggaagaaaaaagagagaaacggtgtctcatgcacaaaaccggatcggcgcaggcaccaagactcaggaaacgagagaaatcagcgttggggcaactcattgtttcttctgtccggatttttctcaagctcctgatcttctatgcctgttcggtactactactctgtagattgatgttgatctttgggtatatgtattgatgagtgccacaattgatccttctctattcatatgacatgcaaagagtcattaaattttcttgtctataaaaactgctatagacactatgcattggagaggtagtgtctacatacatttattattgtttctgttgtctagacactatctatagacaccatgggttaggattgcccttacagtcagcacgcaacatagaacatgccgccatccatcacatatgtactgcattttggggctgctcttgattatgtatgatatgcttagtgatgagctgccttggagatgttacgagctcctgtactcataccaatggcccccaagagatcaatgtccatgaaataacccaaggttgtagacagcgaccacaactcgaattctctatttatgccgcataattccatcagattgtttcatactggctaaattatttttttagcatttttacgttatttgattgcacaaccatttattgtacaagaccatgcaccgggaatcgctgcgggaggaagattggaagcgagcgtggcacctttgtagagcgaggactccggagaagggaattgggatttcggttttcctacttagggctactgttggatcttttttttacataaaacttaaaagaaaacttgattgggaacaaagacgggattctgttgtgcattctcttagatgcgagaggttataagtgtataaaaataagcacttggattgtctatgccacgtgattccgtcaggttttttcatacatgcattttgggttgcacttagttttttttcccatttttcagatattagattgcacttattgtcgcctggaaagaagttggctaatgatcta

SEQ ID NO: 49351 - DNA, 1545 bp, Oryza sativa
ttttttacataaaacttaaaagaaaacttgattgggaacaaagacgggattctgttgtgcattcttttagatgcgagaggttataagtgtataaaaataagcacttggattgtctatgccacgtgattccgtcaggttttttcatacatgcattttgggttgcacttagttttttttcccatttttcagatattagattgcacttattgtcgcctggaaagaagttggctaatgatctactacgctgcagagttagctgaacacgatgaaagatgattgaacttactactcatcaacatggtgccttgaacccttttgcccaagaacagctacagtggttacatgaaaagaaataaatctgcaaccttagtttcatgttacaactattgcaaaacatttattgaaatttacacatgaagaatggaaaaaatataatatgcgcatgcttaattacattccatgggcagtttcactcttgtgttctatatataaaagttgaaaaaaatactaataacatcctgacgaagggagggcccaagcatagttatatgaatatttgtgactaaacttgggtatttaaaggacaccgaaatgataaactttgcagtaatcattagtcatatgaacagacagattttcgtgtctcggtggaattgaaatgttgagaacttaatgcccacctaattaccatgtgtttggcttcaatgccttggcactgccacttttattactcatccttgctacagttaagtatactagctagctaggagactagagtgatgatatatagttatagaggggaaaatttgtaaagagtggaaataaaccaacaaccaatttactcgggaaaacacttctggtccaaaaatggttcaattttagttggtatagatatgatataaaagaaaatacgttgtgaatggtaggacacgggaagaagtatgttgttagggatgaaggggcactaatcgattggccattatcaccagtagcaaagcaacttgaagttacagtcagcacacaacaaacaatcagtcacgtatgtaccgcatgttggatctgtctggattatctgtgctgccttggtccttggagatgctacgaaatcatcgtcacatccgattggcagaacagaagatgaaggcccaacccaacaccacatctcaaaagctcagcaggataaacattggaatatcgaaatgttttaccctattacactggttgcttctaaaaaaaagtgtggaacatcagtttgtgttaaaactgttccaaaaacacttcatgaataggaagatgatcttgtgtgcataccttccttaaggcgtcaatgtttagttccatacataaaaaaattaaaaaaaatacacaaaacatccagatgaatggccttactaaagcatattttaaagacacgaaactgacaaactttggagtaatcgataatttcatatatatggacagctgtcagctagagaaatttttgtgtcttcttgaaattgatatgtttagaacttggtgcagaacgaattaataattaccatgtgt

SEQ ID NO: 49352 - DNA, 779 bp, Oryza sativa
accatacttctaagataaagattttagatattatttatagctaaagtttttaaagtttgaccatagccttgtccgagaagtattaacaactcggagagagtaataagttatggtacatgcaaatgatacttggtaagttgggcaatgagtagatcattgaaaatagaatgctttgtatggagtgatttaatactcttggtccctccttaaggacaggaaaatttctctttacaaattacaattctgcacatttctcatggaaaatgtatatagtaatatacttttgatgtttttgaacattttcccatggaaagttggttctttgaatataattgtagagcctgagttttcactagcagaaaaggctgtcagctcatcactacgccagttcacttcaatttccctactaaatcatactgaaccggcagtgtattactaggcagttcatggcttgaatgggcagagccatgtatcactgccggttcaagccatgaatctgcaatgagagggggaagtatcattgtaggttcatgacatgaacctacagtacagtttctccatgaatcggtaacacaaactatggtccggactagcgtatctattgagtgttgaaccagtagcgatactcaaataatagtttaataaaaaaataatatgtttatacaaagtaacatgaaaacaaactttatatcaaaattatagagctcaatgagatctaaaaccatgccattgacaatgtttcacgttagatcgttacataccccgatatatggtataaa

SEQ ID NO: 49353 - DNA, 518 bp, Oryza sativa
ttcccattgtgattcccctacgtttgtttttttctcctctatagtgatcattgctggtcggcgcccgtgtttttttcccgcaaggattttccatgtaaaattcatgtcttcgttgtgtatctattttcataacaagtggtaccagagcattggagatcaatctactaatcacgtagccaccggtgtgattttttcggatcaaagaaatcgatcttggcgacccctatcgtctcgtcgatcacgcgagaatcagcagcccgcgctcgtcgagagaaatcgcaggagcagcaggacgtacaggcgtcttctaccagcgcacgcgccgaggaaaagcagcagcgtccaatccatccatccggcagcacacgtcccgaggagaaagaaaattagtgcaagtgctatggtagatgtgactaccacatccaaatttatccatatcattcatttataaactaagaggcaactcatacaatatatcacatctagtacacaaatacaaatgtctctaatactctcac

SEQ ID NO: 49354 - DNA, 620 bp, Oryza sativa
cattgtgaaacggagggagtagaatataatggttactccattccagctaaggttatttctttcggtttaatagtttttgctaacactatgcttagaattcattccaatcgaaataatagtggttctattccaactgacactgttttctttaattttatactccctccgtccctaaatataagagattttggttggatgtgatgtatttttagtacaacgaatctggatatcaaacctaggatgtatcacatccaaccaaaatcccttatatttagggacgaaggtagtagcttgtgatgaattttatgaaagtatttttcttttattcttgcaccgatatgttttgaaatattttgtcatagctatttgtgtcttctgctccaatttgttttaaatattgtgtacttggaaatatgtgtccgctatggtcatttttataagaaaaccaggattttgtgctctctaacactactttcatgctcaatcaatcatctaacataattgatacagtatatttattttctttctttcttgttttgaaagagttgtagttggcccctgctacattttaggtcaagctctgtcaatgctgccttccgcaatgaaagaaaatatcaatg

SEQ ID NO: 49355 - DNA, 656 bp, Oryza sativa
tttgaaccggagcaaatctcattcttgtgtctccaatgcttactacacataagttttatatttgaaggccgctctcatggatcctataagaggttaggatacatggtaataatgttggtagagaatgaaaatacgagtaaaacgttgaaacagatataaaggcagagcatatcttcctcaaaaccattttttgcttccaaagtttatatagaaatatgcattgggaatgggaggaattaggaactggtttagaacatgaaacccaatttctcctacgacgactcttgtcttcctggagttttcaactgaatagccactagatgaaacgaaaagcttggccatcgtggcctgaacaccgagtgaagacagcactagatttaggggtgtaagtgggtcaaccgcgaatccacttataggtcaaaataagcgggctcgcggcttattttagtttataagtgggtttcgcgggttagtcacttacacccctaactagattccatgatgaaagaagtgattagcagattccatggtgtgttcagttgtaaggaacaatatatttatatcgttaacatataataagcccctgaattgcattgccatctaataacatatatacgaattcagtgttttccatcgacgttagagattgttcatca

SEQ ID NO: 49356 - DNA, 2794 bp, Oryza sativa
tgttgtgttcagatggaaagaacaatatatcgatctctttaacatataataagcccctgaattgcattgccatctaataacatatatacgaattcagtgttttccatcgacgttagagattgttcatcacgctagctgctagctagtagtgactaaatgattgtattcatgacaaaaataactggtgtgggaacactaacatgaataatttctttattgagtttagttatggcacacacacctaatgaaatcactgacgtgcactagtttgcaaaattgatatcctcacgcctcgttactctcataattaagatggcgtatgcttgatagaacttttagaaggagctaaagcaggtgtttcacacaagatcaaagaggacaaataagaacgacacacatcaacgtgatatttattaatactgtgatatttgctttgtactttctgtacttctatgtcagttttgcaatgggcctaaggggtgtgttgcatgtacagtttgtttgagcagtactcctgctttattcttgttgttttaaaactcttgatttcttctttagtgtaacaccaagactccgaattggtcctgggttaaaatttttctcttaaggacaataaaactttctcatcataaacttaaataggttaataaaataattttacaattcgactggataaaaaatggtagggaggcatgcttgttcacacatgaatgctacttattgatgaatctctgaatcactcctcatcactagcagtcagcaacaattcacactggaacattattaattccattggatcgcaacgaaagaattagatgctgacacctattagcttgataaggaatctaattacctagtggttccagatattgtgattcaagaggattggagctaaaaatctgtgctgttctccttcctgtatactcccattcctatcgcaaatcatgcatggttgtacactacagtgtgtgcatgaagaatttgagacagtgacccggtacacctgaagaccttttacggtacttgggagctatgaccgatacctcccaacattctttacatccaccgttcattttttaggggtaacttagaaaaaaataatgtaaacaaggtcagttcagtaattgtttaagccaagccatccctaactaatttctcaactcgatcctattttacagctaccctacatctaactcctctgctagccatgatctgctgctcgtaattctcatctctagctcattgtttggacaccttatttatgaattttgccatctacatacgtatacgcatggactactgccactaatctaaaactaatattctcatctaatcttaaatttgattccgtgtaatgattcccctcttgtaatccatacgtacgtgagcgagaggtagagaatttttaattcatctaccttccgcatcatggtaactacctcctccgtttcacaatataagtcattctaacatttcccacattcatattgatgctaattaataaatctaaatagatatatatgtctagattcattagcatcaatatgaatgtgagaaatgctagaatgacttacattgtggaacagagggagtatgatggaagtaaatcactcagttttaggtcctaacccagctcgtcttttttcttccacctccgatcgaaatgattttaaataccctagtaaaatcatgcgctactataaggtgatcataacaacgcagaaataattaacaaaccctggatatgtactggaataattctcaatcgaactaaagtcaaactttctacgatgattaaaagtgatgataaaacacaattaccattatagcctcctagcttttatatctggcccacactcttaagtaccctatgcaccagtatcttctatcttagttcgttagattaagagcaatcaacggctctaatatattgcaagcatcgtagaaagtctcatatctgaaaggacaagaagtgctctggtcaaggtatatatagagcagttgtacgttgaggctactgaaattagtgttcaccgtaatgatgattaacttaaaatggttgtcagtttgtttcctcttcgaacaattttcccactatatgtcatcactcctagcagtggtctatctataaattttcttgagcctgggcaaagctaataacggataacaaatacaaaagaatctatacgcaaaacattatagaccatctgccattgacccaacaaattaaaattttggtaccgcttcgcgcgaggtagtaacagaaaacgtggttagtggcagcgttcctcaacccaggaatgtcatccctattcggaagtgcgggatgatcattttcgtccccgccatgtaaaaactacgacaagtagcgtatcatattcctcaaccaattttctctcgttcccatgatcaaccctgggaactttacgattatgcttcaatccaaaatggcccatttataatactccctccgtttctaaatgtttgacaccattgagtttttagcacatgtttaaccattcgtcttattcaaaaacttttgtgaaatatgtaaaactatatgtatacatataagtatatttaacaatgaatcaaatgatagaaaaataattaataattaattaatttttttgaataagataaacggtcaaacatatttaaaaaattcaacggcgtcaaatatttaaaaacatagggagtatatgtaggatcgtaaagggcctttcccaccccaaaagctagccattgaggtgacaggcttccccagttatatcttagctcatttgccctttca

SEQ ID NO: 49357 - DNA, 912 bp, Oryza sativa
aactacgacaagtagcgtatcatattcctcaacaattttctctcgttcccatgatcaaccctgggaactttacgattatgcttcaatccaaaatggcccatttataatactccctccgtttctaaatgtttgacaccattgagtttttagcacatgtttaaccattcgtcttattcaaaaacttttgtgaaatatgtaaaactatatgtatacatataagtatatttaccaatgaatcaaatgatagaaaaataattaataattaattaatttttttgaataagataaacggtcaaacatatttaaaaaattcaacggcgtcaaatatttaaaaacatagggagtatatgtaggatcgtaaagggcctttcccaccccaaaagctagccattgaggtgacaggcttccccagttatatcttagctcatttgccctttcacaaccaaaagctattcaacaatctcccccttcacacattggtgtccctcggcccttcaccaccccttcaccgtgtatagaccccacagaacaggcccacggtccatcaggtatacgagccccgcagacacccacggtccatcagaccttcacactctgtgtccatcgggctagagatgttaacctagccaggctctgaaccacttgtaggatcgaacacaagcaaccaagcctaccagaggggggttgaatagtaggaaaaactaaaaaccaaaaaacttttagcggaaataaaagttaccctcaaatcaacgaaaatctcgacagtcctgtcgtcgccggtcggaccgtttgcacgccaccgatctaaccgccgccttgtcgccggttgaaccgcctccctgccgcgagtgtgaccgctatactcgatgaaacacaaatcgaaaaactctcaaagtagatgacaactttatt

SEQ ID NO: 49358 - DNA, 561 bp, Oryza sativa
cctatatatttctcgagaatttttctcctaaaaatttgatagatgtaattatagtacaatcgtagtgtaattacactgtaatttgtatgtaactacagtgtaacttatatgtaagtttcacgtaatttgaatcattaaatctattataagatttgttttggtgaggaagaaaaaacaattacagcacacatatatgtgaaagaatttgttcccacaacctccattttaccgaaataacatgttacggagagatttttaaaagttacatacaagttacattatagttacagtgtaattacatgcaagttacagtgtaattacactacgattgtactgtaattacatttctcaaatttttaggggaaaatttgttgacaaatatatagcaaaattgtggattatttagttccccatctgctataagcaatatggataattagatgcccacagttcaacaagggagaatttagtagtgagtctatataatcccatttaatattggccaatttagaaagtaacttcttatattttttattggagggactgattgaattgattaat

SEQ ID NO: 49359 - DNA, 732 bp, Oryza sativa
ccagaatatatatttatgctatatatgtacagaaattatatatatatatatatatatatatatatatatataacaatatgcttaattttataggacttgtgtcctctgcctttcgtaaacgttctacatatacaaagtcgttgcaaaaatcaaatggctggtcgtgttttaaacccatagctcatgaaacaaataatggttgctagggttctaaattaacttctacatgagccgatcacgtcgcctccgcacggtacagcttaccgttcttgcatgctcaagctcgtcctgttcttcaaatgtctgcattctgttctttgccagatagcaggggccagagccggttgccgctgctttccgatgagccaacagaccacagtgctaaacctcacccagagggtctaagtagtaaaacatctgggcatgggagataatcgacgggaagaacatgtaatgtcgtgtgctcgttggagatgatgaccaacacttgtcgtgttgattttcttcctaactccttccattcttatcacaatacttgtatatagactgaatttttcaagttggaatttgtagaggggccggctgccagccagttgcctaaggaatttgaaaggggaagaagagccctaccttgggctatattttaagaggccgcagtacctctaagaagtttaaacaacaataaataaacaagtgttgtaactcgaacaagagcgctgcagaccttgtcgg

SEQ ID NO: 49360 - DNA, 1122 bp, Oryza sativa
tgatttacctgctgctaagatctatttgtagatgttctaaagaagacttcagttatacgccttgttgattataatggaagcttgtactggaccggttagtcccataattttttactcctcacaacgaggaagttttcagacataaattagtgtgcatgtaatcatcgttgtttcactattgttttgctagttgaaactatccttaatgtttatcgaaagatgaggcgctgattgtatggattttgtttgttggatggtgaatcaacattttgcacgatgtgattgttggttcaatcccaacattgtgttacctatatccttatatgacaatgatcccgtgagaaattaagggagttaaaatatgtaaatttgcgttaactatgcccatcacctccaattgtgctagctaacatataagatacacacctaccaagaaaaaataaatgcatacttatgtagccattaatatagaaaatagttcacacttatatagtgactccctatggtccacgtaaactagtgtccacacaaattatttgatatgccacgtaggatctaatattgcgacacgcttaattaacaaggacagatgaaaaagcattgtcttgcaggagacattgttgtggtataaaaccaacaagttaaacattcataaaacatgcattatggagaagaataatctttaagataatttccaacaagaaaatgcaattatgagagcaagacgaagtcataggacataggggggctgtttgggggagcttctagctgttgttgcttctcccagaattagaagctcgcccaaacaatccagcttttggtctagattctgagaagctgtacttatagaatctagaaaataaactagaagttagaagccgggaaatccagtttttccaaattatcaagctaccaaccagctgcttttatttactattggacacactaatagacactatgtactgtaaatattgcttttattattatgtctatatataaataggagacactatgcagtgtaaatattgcttttattgcttttattattatgtctatatgtcattagttaagagggataggcgttgctatggacagggtgcagtagggtgttattacaagtta

SEQ ID NO: 49361 - DNA, 1684 bp, Oryza sativa
agtcagctagacatgcttggttggacgtcttgttttggcgactttgctaccaaaccaagtacactcacctttttatctcaaaaacaaacaagtacactcattttgatgagtcttggcgtacgattcctagatagccctccctttccctttattttctctaaatggttttccttctttttgtgagttctcgtgttctttatcgagaatatttttcttcttttattcagatctttttatatcctttctttttgtgagggtttgtactttctttcctgaatatttgttccgttttctttttcttatttttgtggggacttgtgtggactttcttttaattatttcataatttttacgaggacttgtttggtctttccacctagttctgtcagcgttactttgatcattttttttcttgattttatttgtctggatctaaattttctcccgccacctcataccaccatatcttgctctaattgtttgacttaaggctaataagacgtgacaaaatataaataaaagaataaaaaatattttatgaatggaaattttatactttgttttttaaaatatggcgttccttaacttttcggtatatgtttgaagataaaaattgtaagtcatgctcactttaatgaaaatcaattcacaactgtcggatcgcacaaaaagaactaagctaaccagagggagcttgaatggttggagtagcaaaaattgtaacttttaacggaattaaaagtaacctttgttttgatggagatcggtttgaccggaatagatacgccggtctgaccgatgtagtagcttcgatctaaccgtccgatattgctatcgtcgcctgtcgccgcaaccgttctgaccgccgtggagtcgtcggtttgactgccgatgttccgcgggttagaaaactgcacctaggaaaataaaaatccaggatctctctttattacttttattcatgtttacaaaacacaacaacataaacacctgaaaccttaacttttctctaaactcaactcttacaaaattgatattggaaggtttcaactcctctaattatacccaaggtagatagcctaaagccacgaaccagcggcggattcatcgttggggctccacccccagttccagccggccatatatagcccatatgtaacaagtatctatccgcatccatccagtacgtgctctagtgagtcatcacgtagctggttagctagggaagcactactgcctgcctttggtcatatatatttatctaactggttgctttattgaaagtgcaaccaaataaaaaatgaaaaaaaagaacatggaaccatttttcatatatatatttacagccaactatagctatcatacctagtatatttttattctttattttgagttctttctcgtacaaatcagaaatttgattcacaatagattggttgtgcccctccgtcccataaaaaaccaattctaagtacgaatctgaatacacgcgtgtccagatttgttgtcaggattggtctttttagatggagtagtatagtttactagctttaggccctattgtttgagatttagagttttattttggtattttttgtgggcgtgcttgtcaaaccgctaaactttctgatttttcaaaacagatcttataaagaagtttcatcaaaaatcaaattttaaagtt

SEQ ID NO: 49362 - DNA, 1550 bp, Oryza sativa
acaaatcagaaatttgattcccaatagatttggttgtgcccctccgtcccataaaaaaccaattctaagtacgaatctgaatacacgcgtgtccagatttgttgtcaggattggtctttttagatggagtagtatagtttactagctttaggccctattgtttgagatttagagttttattttggtattttttgtgggcgtgcttgtcaaaccgctaaactttctgatttttcaaaacagatcttataaagaagtttcatcaaaaatcaaattttaaagtttataatagtcagcgcttaagtaatcatacgttaatagcttgtctgataagctagacgactgctctcccgaaactctcatttgaacaaagcaccccctctattttcatcctagattcgccactgccacgaacccaactttccgtacagtaaacaaattttacaaactccaatcacaccaaatttggacttaccaaatttgactccgcatccatacgcacacaatatctccatcgtatgccgtatggaatcttcaccaaccacgaggattgatttgtagtctaagcatcctgcaagatatcctaatcgtcagaatgttatcttctcccaagttgactcacgatccatcacaagcaacggtcccccgaaacatcaagacacacctacacatgaatgatacaagaaaccatattcgagcataaattgtctccaacttgactcagcattatcacaacaatattacatacgtataaaaatcatctagaagtcatagacatgaattaattacgagtatccaaataaacaacttaaacagaaaccaacatagagccgcccgaacaaactgttgggtcggttggtctaatggagtctgacgagcctagcctatccggtttgaccggtcacatatatagtcaacaacccacttcactaattgtctccaaatatcaaaacccaaatatgtcaaatgccaatcgttaatcacaaagtaataatcaatcacactttattttacaacaacaaaaaaaattcatttaaggatctttgagcatgacttataatcttttatgtttgcagaaaaattttgaataacacgtataatcaaacatattttaaaaagtcaatggcatcatatattgaaaaggaggtagtatatgtttaagtatcaatgctacaaaataaattatgatgcaaaaaaaaatcctaaaactaggtttcagtatttaaattttaaacattaagagggaaggaacagtggtatggtggtagagtcaatgacatcatatattgaaaaggaggtagtatatgtttaagtatcaatgctacaaaataaattatgatgcaaaaataatcctaaaactaggtttcagtatttaaattttaagcattaagagggaaggaacagtggtatggtggtagagttctatgtacatgattccacccaccttagtttatattcttgtgtccataaatattatgtatatgtagatgaggaattttactgtcattgagagttatatttcaagcacaacaaaagttttgagtgcaaatttt

SEQ ID NO: 49363 - DNA, 2788 bp, Oryza sativa
aaaaaatgatttacctcagaagttaaggatatgccagtattttcggtctgtttaaacatgtgttagagacacgttcgtaatgacgtgagcgtgatgttaggtgcatgtacaatgctgtttgtgcacacctgccatatttaatcgaaaataacttatgatgacgatgagaggcacacgacctcatgccgctggtgctcctcccaatccccatcgtctccaacgccaccatatcccactcaacacgatcgccccgcctgcaacccaatcacacccacctccgtcttcctcttcccgccatttccaattcgagctcgcttcctcttccagccatttccagttctggggcggccactgcggccaccgttggtggcgcatcgagccgacgtacgcaaaagtccgcgcgcaatggccccgcgctgggcgcctgatgagttcacgacgcgacggcgacggcgacggcgagccccgaacaggagctgtccgcgtttgttgcctgcgatctcttgcgatcttgggaagatgataacgtcgtcttcttcgccataatgcggacaatctaaaagagaggcgagtttggcagatgggacgacacgagagaattgaagagaagggggaaaaattacacagaaggacccgtcgaatcagataaggtgatcgccactgacctgtggccaatagggtgtcgccacacactactacgagctatcaatgtcagataattgatagatactactccgtcccaatatgctttaatgcatcaccaatagcatcttcaaatttcacactctaaatatctatttcacaaacttgctagagaaactagagagcctaatttatctttaatttgcttacaccacacagatggattttcaaccccttgagggtgcgttctgttgtttcgtgcatgctacttgaataatcatatttttttaaaaaaacaaaaataaataatataagatatatcacttcataaatatgcactgttaaattcgacttctatgagtaataacaaaaataatcaattaaaccgaaactagctagttaacatatctccatacactaccactgaaaaggtcattggtgccggttgggaacgctacaaagatgacgatttttcaaaccgacgccaccaaggcggcactgattagaatactaatagatatacgaattgaaaaaaaaaatccaggtcgggtcaatttgagccgagcggatgcatcaaaggaaccaaaaaacatccaaaaatctacaacaatcaacaatcaacaacaacaacacatcagcagcacacaatcaacaatatgtccgcccaatctggcggaggggaacccgatgctgtcgcccatgggagcccgccgccgccgcccgctgctgcccccgcttgagagagagagagagagacgcgtcagaggaggagagggggggggggcgagtggataaagacgccacctcacctcccactcagcgttttatccccgtccaaaaaaaagaaaaaaaaagcccgtttcttggctcggctcgtttgataggttgtcggtttttctaaaaaaactggtacctttaatacactatagatgtcagtttttaattaaataacagctataatatataagatatcggcacctatagtgtaggtggcggttcttctgtaaaaccgacatctatagtgtattaaaggtaccggttttactttttttttcatcttttgaagggggaaaagcactatggatgtcagttttatctgttctggcacctatagcaccgacttatatgtggtagttatatttgttacaacgagtgaaaatcaaatttaatctaaacttgcgaagcagtttgctcgctgcaccgaagatcgctacgaagtttgctttctggtggagtttcatgcttctcagtggaatatttgctgcagtagaaaaggccttgaggtcatctcattgtatgtctaaaaaaacaaattcacactcctaattttcatgtagaaatagcgattgaagccagaggcttcaggaagaaaaaccacactggatcaaacactgggtcaagtatatctattggtggaagaaaatcctgttgaacgacaacacctacacgcactggatgaatagggtactgcaatacgtaccacacccagttgtacaactagagatatgcaatcatagatcaattaaagaaaagaatattcatatgaactatagtcgtttataaccgttgatcaaatttccgtacatgagtcgaacagttggattgtatgcatggtgatttccggatgaataatatctctagtagctcagatgggaacattagcccttgtttcaaacaataggaaggaatgaatatatcgttacttgttctatgaaactagttgacatgcaactgctattagctagttggcctccatttaaatttgacaatccaccgcgctctctcaggaaaatgctcatgcatgttttgtctattgtccaagcttgaaaatgtgtataatttcattttgaaaaactagtagacatccgcattataggcccatttcctgggccatttaggttttggcctatgtggcccatgagagttttgtgtgtatggttaataccacatttctaatttatattggcaaggttgtaaccaatttataagagctaatactttcatacgaagcgaggacaaaagtataagtgtagtgatatgtgtaaatgggtctgtccatcggatgggctgggctgcacagttttggaaggcattttttacataaaatggacaattttcgatacacgccaacctcatcaacctaaac

SEQ ID NO: 49364 - DNA, 650 bp, Oryza sativa
ggggaatgaaaaaaatactaagatacccatcattaaataaggctcattaaacaaaggatatgtagagagttattaataaacatagatttagaagagtaaaaaaaaatttaaataaaaacctatacataaacaatcgtcacaaaatttcaaacaccaataaataaggtgctcgtgcatctgtgcgggctacccctagttaatataaaattggaaaaaatagaatagttctcatacaacaattaatagaccaggagcgttgttactcaaatagggcagaacatacacaaaaactgtttgtgcgtggatgacagtttaagatcaacctcatgataatcttatgttcctgaggagcttctaccatgtggaaacgctctttaatggattttcgtttttgctggtcatgaccaaaacaaaccaccggttttacaggctagtggtactgtcacagcttgaattttcgtttcaggatttataaattatttaataaattattaatagaatttatattaaatgttcattaattttcaagtgaagttaaatgtgggaaataaaatttcctaaatataaagcatggctggatttaatttttattaaattctccgtgattaattatactctctagaatgttcttgaatttttcagagctcaat

SEQ ID NO: 49365 - DNA, 558 bp, Oryza sativa
aagaatatagaaatatcttttcctatacttctatcatacaaacatattatacataaatgctagttatatcattacttagctaataccttctttccgatgccctcctggtgctttgagaagccacccctattgtcgagttctttacgacaatccgtcatgaccatccaaccggggctaaatacggaggagtaccctccccaggaaattaacttaggcctatatacacgcgcggaggaatacccatactgagctgtcaccatcagtggcccacctcgcttccgcagcatataactccaaataatgatatccagtaatctaaacaccacacttaaattaccaaatacaactctaatatcatcatgacatagtcatcgtaaatacgatcattatgcccacatcattgcatctcccagataagctagcatcataataaatataacttggacatataataaaattagtattcatatactcggaaagtagtacaataccaaagtagtataaagaagaatattctacataaagtacaagtcttacaaaagaaggaaaagctactag

SEQ ID NO: 49366 - DNA, 595 bp, Oryza sativa
ttgaggggataggtaggggacgactagggggtcctttatataggcacgggagcttgggatcaagcccacatcgacgggaaaaactcgggaaagtctagggttctcgccggaaaaaggaaaaattgaaccggaaattggaaaggatttccataaaaacttttggggatttcttggggaaaaggaagaggagattgataggattccattcccgtaactaatttggaaaaaggagcaacgaggaggccggattggtgggaggaggcggcggcagtagggcacggcacggctcggctctggctctgtctagaggttgaagaaggtactgtagtgatagggaggaaaactagactttggctgggctgagaggaagggagagagaaggggaggcaatgggctggattcggcccaagctgatgaggaggacttttatttacttttccaaataaattaaccaatgagatgatctttcaattgttaaaaatacttccaatgctcaaataattccaagaaaaatcttgaacatacttggacactcaaagtatttaatataataatatacagatcatttaatgattaatttattatttaaataatt

SEQ ID NO: 49367 - DNA, 743 bp, Oryza sativa
  unsure (1)..(743): unsure at all n locations
agcgggtatgattccctgtgtttagcgccctatgaatgngtaagattgcctccctgcaggtcgactctagaggatcccctccttgttgaaagcaaccatcaaactgttcagactgccgtctgaagtatccgattccatcgatcaaattccgttgatcgccaccatgttccacctagcgtccatgtccgtttcttgacaccctgtgtagttgtcgcagcatggagcacctcactcgtacctctaccatggatctcccgcatgctttgataccacttgttataaaaccaaccccgaaattgacatcagtagctaaacgcagaagaaatgccataggagatccaaacacaatgacgacaccaagacacgatatttggcacggagttcagctgaggcctacatcttcggggcactgattacgggcgctcctccctgattagcatatataacatatcagagttacaacgactcacggncagacgccgccggcagccgctccctctcgctatgttaaagtcgcatgcggttataacaggcacacctctgtatttaagagagagatcctaggatagagtccgactcatactttagtcctaatacctattacaactncaagttctaaattgtaaccgactttatacatataaccgacacaaactcttacagaaaggatagattgcgtggtgatagattaagcatctcttcaaattactatggagggntatatctcatactaagctaagttg

SEQ ID NO: 49368 - DNA, 730 bp, Oryza sativa
  unsure (1)..(730): unsure at all n locations
tgggggnnatgaacccgttgttagtgccactttatgtttgtgaacgcatccccgcaggncgactctagaggatcccccgcgttggtttatgtatgatgtttttgtctttttacataaaatttgaccgggagtttttaaaaatagatgacgacccgtcatagcataaattaaagattatagtttcttttatgataaaacaaatcacaataaaataaattatatatattttttagtaagacaaatgctcaaacatcacgtcaaaagttaataatttatttatttatttattttattttcaaaactagcaaaaatgcccgtacgttgcaacgggtgaaaaaattgtaatgataatatactttttttcatgaataatcatgccaatcacaatgtttgtattttaatgagcagcttgttttttatataaacggtcttttttttcttgcgaaattttctcaaaccattcagaaatggcgcatttctttctaaagtttctttctagaatgtttttttttgcttttttatttacaacgaaaaccatatttttctccctttttttcttttcttttttcgtgtgtttttttgcctttttttacaattattttctcgcgcgtttttttgcttgttttttttcaaatgttctttttttttgctttttatcaatagaggagaatatatgatgaaataaaagccgtgtagtaggtggcaaaaaatcaatggaccccattctacc

SEQ ID NO: 49369 - DNA, 2161 bp, Oryza sativa
  unsure (1)..(2161): unsure at all n locations
tttcaccaaatgttgtaaatatcccggtatagaatgaaagagtggtggcgggtatatcgaactcaaaaggagtggcgtcttttatttttcgtttttaagggggaatcggtatctatatcgaacttttttttccgtttttgagagggaatcggataggagtcgaacttttttttattatttttttcgctttttttttctttcatccgtttttttgatcggacaattatttttgggaatcagacaaattcattttttccccgatttttcttttaccgcgtcatatttggtttttcttttcttttttcgcacgttttcttccgcccggtttttttggatcggacaattttagtttttttcgccggtcttttctcgcccctttttctggataggacagatttgcagatttagtttttctttttttcgcacgttttcttttgcccggtttttttatcggacaattttggttttttttcgccggtttttttgcctcttttttctggacgttttctttcgctcagttttttagatcggataaatttggtttttttcgcccgatttttttgacggacaatggaagcacctcttatgttttaagtagtagagatagagatatgttaattttgattaatccagatcgaattaattaacatatttaaatatatgtaatgcatgccacgtactgcagattatnggacggtttggattatcatcagcacaaaaaaatgcctactgcagctctacttctccacaacaacgaaagcatgcgaatacactactgcgtcgatttagggacaaaattatccaaacctggaggtaacaagttttttttttcactattcaaattaagatgaaaattgagggtgacacttaatttgcacgtttacttcaagcaaatgtttatatatatgtaactaccccatctacacattatatatagttacttataatatgtgtttacgtcacttataaacattgttacatttacttttaaagaattatatatatatatatatatatatatatatatatatatatatatatatatatatatatatatataagatgaatacaatgaaaaaagacaatactagtaactattcaaatggagttgaaaaaaacaatgcaagcatcatctacacctgatcatcgacatgaaaggaacggccgtgaaacaggaaactaacatgactatagaattaacatactttagagcaacttgcatgttttgtgttctgaggaagaattaagtagtcactcgaattgttaattaatttttctagtaataaatagaaattaatccggtatgtagacaactaaagtttaaggaaaaaaatttaaattccagtcctcacaactgagaaaaattacagataatttatttagagtgtatatgcacttgtactagtaattaatttgcgtctgtcttttttttttttgaattgaaggcatgaagaaacacgtgagatgatactgaatgtctctgcaatgctgggtttggttgctgtcgtcgccgtcgtcggatgcattatgaagccccactttgaggcccagctagagaagcttgcccaagcttttgttttgttgtttctactggctctacttcaagcaatggtagaaatgcaaaaggaacgacggcaaaagagcctagaagatgatcatgctgatgattctgaagagagcaagaagaagctgaagccaacaaaaacttagaaacttttagtagaacaagttttacattgtgcaaccatgcatgcacataggatcaaaataattatgtatacaggccggggagtagtggattattccagcaatctacatttttgttttgagaaacacagtataaatataggcgctcacaacatgtataagttcacatctataaacatacacatatatacacaccataccccgttacaagatatacaactttttaccaacagtgattaagtaataaacccacggtttcaaaaacattgtaggtgattgtcaagttgatgataatgtagttggttattttatagtctcctatagtctttttctgatctccaataatataggttgttccgttacttgttgaaaacggaatacctaagtgcaacggattagttgacagacaaattttgattagctcgtattatatcatacactttccgttatcggt

SEQ ID NO: 49370 - DNA, 569 bp, Oryza sativa
ctatgaaaacacattcttcacggaatatagcaatatgtagaccaaatcgatcggtttattttaatgttgctcttgatccattacagatactcggtgtcaccactcaccaccagcgcgcaatgtagaacaagacttgctcgtattgatggttgtctttgacaattgacatgctaggtcaaggcatctaaaagagaatcagtttgcacctacaacaatttctttaggcaaaacctggcttagtaccattaattgcactcgagtattgttagtactgatgtactataacacaaagtagaaaaattaaggctgtgtttagattcagggtgcaaaattttggcgtgtcacatcggatacacggacacacatttgaagtattaaatgtagactaataacaaaacaaattacaaattccgcctgtaaactgggagacgaatttattaagcctaattaatccgtaattagcaaatgtttactgtagcaccgcatggtcaaatcatgtagcaattaggcttaaaagattcgtctcgtaaatttacacgcaatttaaataattaattttttttctatat

SEQ ID NO: 49371 - DNA, 825 bp, Oryza sativa
  unsure (1)..(825): unsure at all n locations
catctagggtttctaggggagccatctatttctttttctctatttctctcactctattagggatccaacgtgtttggaactggtgagtttatatatgtccttggctaaaaattttccccgcactctgatctgtagtgcatacctcatgacaccacaacaacgacacggggtcgcttttacccttaaggcggacgccataggctcgagactgaggcggcgggacaccctaaaagtcgctgaccgccacattgttttcgcgacgccacggttaataaccatggtgcaacatcctccaatgtaataacaagattaacactgaattgactccacaatgctactatttgttttaaccattcaaaactgaaaaaaaaaacgttgtgccagaggcagtaaatatttacctcctcaatccaagttccaaactcggatcatgcctgatctttgaatactgtgcagaataggcagaagagctacaattccttttatgtgttagtccaaaccgttgaagaacatccctcacatataatcccctctttgcgaccggattgtagccttctccaatctgtcatttaaaacatcatgcacgtatatacgatcaaagggagtgtaatttgggcttattattaatttgatttgggatcgtatataccaatatatgtagttaaaattagggtataatttgttagcagtaatcttgtgtgccacggttagttagttgattagttatctgcatgtttccgttttttttctgaataaacgcatggggtaccgagctagaattcgccctatagtgaatcgantagttcatcaaanggggggcccacg

SEQ ID NO: 49372 - DNA, 1629 bp, Oryza sativa
ccgagaactcctgaaatttatcattactatttcttaaaactccattgtaaaaacgcaaggacactttactattatctataaatgtcatcattgtaagggggtccatcgagctaggtcaaagctaggcggcgtacatacacggactgtgcagctacatgcatccgatgaacaggggttggggaatatggaatattctcttgcatgccatcgatccaaacattcgtctgaatctagacgtgtttgtacactcgtaacctgtccaagcacggcaaagacctgacctgactgcctgcttttaatttttgtttcagagaaaaaaaaaagaagagcaagtcaagaactgcagctgcaaaatctcgatcagcaattaattagtcatcttaattagctgctacttctagtcttctaaaacaaatattattcatcttaattattcatacacgatctatatatgcagctacctccagtccatgtatatataaaagctaacatgatggtgtgatcgacgatcatcaaagatccccaaaataatatctcttactaatatatatgtgcaattatttgttgattagttatgcataacttatccggttatccttgcaaggtaatttattctaacatatgcacatattaataaatggagactttcaaagagtacgtacgtgtacttcgtatattaataatatgtcatgtatatgaggatatcgagattatctctcgggtggatttaattattatggatccaggagcatttttagaccaagcatgattaaaaagtcgtccatgagccccaaattaattagttttgaggaaaacaaaaggagccccaaattatgcgtatggatgcaagttggccaactatttgattgacatttttacatgttactaattctcctgtttggaaaaaaatgcgtatatataagtgaattagtgagctaattaattgtactatatatgcattgcaacttctgcatatatgtggattgaccatctatatctaccattcaatgttaaaattgcagagtcatttcttgcgaggattaaaatatttttaattatatatgtataatatgtcatatcgatcgatctgtatatatattttttgagggaaagatctgtatatatatgtacaaggtagttaactgtctacggctatatgtaatgtgttatatcgatctgtcatgtgtatatatgtacctgcttgtacgcattaacgatattaatcagccattgttgtccaaaaattattgaaaccataagtttttgagctagatgtaactgatcattattaacaggaccgaaccctagcttaattgatcgatctattcgatcattccctcactacctaattaatctaattctgcctgctaataaatataattaattgtccactcccctgatcaaaatgatctttttccgattaattttcctcaggtcgaccaaaacggataatagtttttattttatgatacccaattgtgcctatatatagatataggtatagtcattatatatacttacccggccgtacacgcgactgtgtactagcaggcactacgttcctgagcaaaatgaagcgtgcatgcatgtgtaagcaaagattttgtgccaattattgagtcttcttat

SEQ ID NO: 49373 - DNA, 812 bp, Oryza sativa
  unsure (1)..(812): unsure at all n locations
tcttattcaaaaacttttgtgaaatatgtaaaactatacgtatacatataagtatatttaacaataaatcaaatgatagaaaaaaaataatagttacttaaatttttgaataagacgaacagtcaaacatatttaaaacaatcaaaatggcgttaaatatttagaaatggagggagtatatattatctccagaaccaacattttttaattgtggataaaaacccagcctctatatccactgccaatttccagaatcatctggttattactagctctcatacatatgcatgcaagcactaatcctttgagatctactggctagaaagttgagatgacctattgtctccataagagagcacaaatcctcatttatctcactgtccaactgcttttgctgtttggttagtgcatgtaaaacaaaaaaaattgcatgacaaatgagatgagaagattgagtttgagatcagaaataattagacataattaaagttaattaactttgtgcttggtggaagccacatcttcatcaacacaagtggtcctagcaagatatcattgtacttatgtttatgcatgtcgagctttgattttataaaaaattggcgccgcgngcctgttgtttggttggggttcctttagagtcgncctgcgggcntgcgngcttgagtttnntntggtgtcgctgtatagatgtagtgcaacaacatggccagcggggggggggggggggggganttattgaataaattaaaagaattacgaaaaagttgaatagtggaaatacgatatttcctaaattcatcaacagtgtg

SEQ ID NO: 49374 - DNA, 692 bp, Oryza sativa
  unsure (1)..(692): unsure at all n locations
tcagtttagtatcgattcaagttgttagtttggaaatcaccaaagaagaaatgaaagaggagaacagcatgcaaaattccacgaaatataacaagataataaacaagagctgcaaaaagagatgaagtgcaaattttgggacgagtcagaattggaatgatattcagcagtgacacagtgtatctatcttcatcctcctccctcaaattaaccaatgttatttcatacaaaaactatctgacagaacaaaaatcacatcatcgagaaaaaagaattgcataacaactactgacaccaagaaaaaagagcagaccaaggagtagagaaagaaagtctaagggtaatacggaactttttctaatataaaagtaatggtaaaattaagctccaaaaatttgaacaagtcttatcgtaaacatcaaatatatatctacaattgaagcgaggtgtgataaatattgtcaaaccctgtattttattttatttcgatcgggagggttactggaatttgcgtcatctttatgcaggttagaaattccgatttaggttgtgagatccatgtttgaaaacatggcggtcgaacgagggagaaaaatgaatgtacttgttctaagtacacatggcatttctttttaatttccatgcatatatatatagtctactctctctcggnttcaaaataaatcaaccta

SEQ ID NO: 49375 - DNA, 1174 bp, Oryza sativa
  unsure (1)..(1174): unsure at all n locations
cctcggcccatcagggcccgatagtgaacgcgatatataataacaccttctcccacgcggctcactcctcacccttctcgcgaaaaccctaaccccgccgccgccgccgctcttggccacaaggtaggcggcgccgccgttgctcttcttgttcctccgcgtcagtgcgccggcggtcgctaatcgtgctgagaacgcttgttttccttgttgcagatcgtttcgtcgcagtcggtgttccggtcttttgagcgcggagatggcgtaagttcttgcaaccaacttcttcttggcctctgctagttccatgttttttctctctctatcctcgtagcattttggatctagcctgttcttgctgttgctgctgttggtagaacactgttattactgtgtaattgttgctgagccttggctgcgctactgctcgctcaagaatcgtttggtcttatcatgtttgagttgtccttgattggggaaattgtcatttggtttccatttcgatgggatcattgagtgaaaggatgtgggagtcatgagtgcgattgctcggatttctgctgtactggtatggggtcttggtgatttagaatttggcagctggtagtatagttggtggattcgttgtatgtgagccgtctagtttagcaaatacaatcatgattcatatcagatgatatgtgcctgttctgtactagcaccaaggagtgtagacggtaaattcacagccagattgaaaaaaaaagctcaattgcttatcaaactatgtttatatggaattgaattatccaacttaattgtcttgtttgcatccaagaagtactgaatttgtacagtgtcaccagtagtgagaaacaatgcattttttatattatgggtgctcaattcttgtataaatgtaacaccacgtacatgccaaagtatttggacctccattattgaaagagcagtcaaattagaagagaactaaaaataccttgtaaagtgtattactagtaattgttaatagatgggtatcctgcntctcggtctaaaaaacatctcacgtatttgtagcgagcctattcataaaaaaaagaggtctnncctcttttacagaaggtccctctnnngtcgncctgcgnccggtctttctcnncattnttggtgtgctaacaaaggggggtactttacc

SEQ ID NO: 49376 - DNA, 1553 bp, Oryza sativa
caacaatgccttttcagtattagtaaaaggtgctttattttccttaatcttcacagcaatatgaggtccataagaaaaaatatcgggaacccaatcttcaggatctaaacagaatgagccatagggcggcctatgccaaaatatacacctaaatctgtagtggacagtatttttctcatcgcgtattccctcctccctagacaaaaaaaaaaaaagtgaggcaaagacatgaaacttactcccgtatgttctttctcaaatagatgtgtgcagtcaaattataatttgactagatgtgtaatttagatacatgaataataatgggataagtcaaattttcgataagaaaaaaatatgtaaggtttatttggtactctcggtgtcgatcttatcctaaagtttgtgcctataaataaataacagtaatcttttcttctatcaaataaatacgcaaagcttctaagtactattctattaaaaaataaatacgccaagcttctaagtgatgcatgattgtgctgtttgatggtcatatacacatgcatgcatacatggtaacatgatcaaaataactatatatggtgtgcttgctagtacttggtgataaatcccatatactttctagagagaaaaaatctaacaattatcgattaaaatagcattcacccgttgcaatgcatgggtgtttttctagtaatatcttatttggaagaattattggtttatttgatgtagtatttaatagagaaaatttaacaaaataacaaaaggttttatggttaaattaataaaagttgtagaaaaccttggttattatggcattggcgtttgcttcttccattttttaattgatgatgtcgttgagttttagacgttgcgtctaaccatttgtcttatttagtgtaaatagaaaataaatttgttatacttaaactaccttttgataataaaaaatcacaataaaaacaaatgatatttagacattttaataaaactagtgaacaaacatgatgtcgaaaaatcaatatcaccatctattaaaacatgtagggtgtatataacaacaattatgtggccctaatgctttataaaactgcaactattggcacatatttaatttccaaacaatacaatatattggcacatatttacttaattaatgctcatgtaataaagtgtccacaattaatatttgaaatattgatttcttcatgaaaatgatttggtgatcacctgagctagagaaggtgtagaaggccgaaggcttctctggtgaagtggtgagtgatgagcgattcgcataatttatagggaaaaaatctttctaattttctacatttaaaaagtgaaaaggaaacttcgtggcataagaggcaagcaaaatatttacctaccttttcttccaaagataaatgtcatttcttcattgattccgacacatgccaataaaccaaaaagattaaaatatcccaaggttatcaaatttcaatgcaactattttctactttatctactttcaacataattattctcttcttttataaacttcgaca

SEQ ID NO: 49377 - DNA, 1064 bp, Oryza sativa
aggggttgattagggtgtgaccaccccccaaaagggggaaaattgtggcacgacaaactcccaatttttccatcccagtgttccattttcaatcaaacttccaattgaagcgtaacttaacacaccggtacccaaagcataccacagattaattcctaaagattggacagacacgagcaactcagtcatacgcaaaccacaccaaatggcaaacagatcctcagcttcggatgatgatttgtattaaaagcagacgattttcagcacggtaaacataaatccagaggttcaattttgctcatatctcaatggctcgcacttaaaagaattcttatctcctagcaagacctagtctcaagcataaattaaagcaaaaggtacagaatgtcgagcacacgttctgggataaacaaaataagcccttgtttagttctagctttttcgtcacatcaaacgtttctacacacacaaacttataacttttccggcacatcattccaatttttttgaactttcaattttagcgtggaactaaacatagcctaactatttatgtgaataaaacagaaagaaacgcaagaatttataggcctggtttagttcttactcctgctgaatgaagaggactttcattgccttatgatatcgttgtctgcgtacacacccaggtctccagctccatccttcacagccttgctggccttcacagtgagcacgcgagggcgaagaagaagatgaaggcgcctccacgacggacatgtcggcgggggtggccacccgcggcatggtggaaccatcgccccggtagatccttgccaggcgagccaaagcgatgtgggccctttgggatcccaccatgacgcgtcgaagcgccacggccaccccgacgatcttggcgcgcacggcggcgaggacggtcgacttgccggtggcggtggcgaggcccctgctgcaaacggcagcgagggcggtccactttgcggcggtggcggaggcggcggttgcgaggcccctgctgcagacggcggcgagggcggtcgactttgggccggttgcggcggcgg

SEQ ID NO: 49378 - DNA, 1301 bp, Oryza sativa
  unsure (1)..(1301): unsure at all n locations
attctaaaatttttctttcggtcactactgcaataacaactttttctcacagccaaaacaggtttttttgggcagtcagcggcgccgccaacgacctaagattagtgaaaataataaacttttgctgatgagcagccggccgccagcgaaaatcaactttgacaagtggctaagggaaaaaggtcgcatatgaaaaagtgattttcgctgatggtagctagagagacccaccatcgagaatgtttttaggagaaaaaatattaaaaatcaggatccactatcactgtctcaaattcccaatccccaaatccacacgtcttggtcgatgaaaaagtcgacgtcgtcgatggcggtgtcgccaaatgggtggaagacgccctttcgggagccgccgagatcaccgctgccggttcaaagaaaggaggtcaggccagctcagatctggtcgggaaagatgaggaaggaggtcttggtcgatttctctaagccatttgtcttattatcgctaacctgtagccaccagcagattcagagatcccaaagaccagcaccactggaactagagctctcgatgcctaccaccactggatccacaagctagggactcccttgctctactactaccgccctcccctttcgccgtgtggttgagctcttctcgagtagggattgatggtggaggcagcactccccttcaaccgccatagacgaacttgtcatcaccggatcaggtgtcntgctcctccaccatcactactttctccttgccaccgctgagcccgccacggttcccctttccactgcgaagcctggccgttgttggtccttcctccaccatgaagtctcctccctatgctgccaccaccgagcccagccatggcttttcttgccgccgtcgccgccatcaagccatcgaagcaagagagggagaggagaggaaatggatgagggaggggatatctaggaagtggttgaggaagtggctgatggaaaagaaaaagagatagttgagggatgggataaggacgacttgatccacacgcccttctcctatgatctttttgttggtggtaacccttagactccgctagtaaaaatggattttcatatgtggggttatttttttcaagtagtgctcttaagactctgcttgtggaaatccatttttattggtgggaccaagttttcaggtctgtttttattttacaagcgaggttttttatggccgctagtgaaaataaatcttaagggtcatgaaagatccttattttttttaagtagtagtggctgcacacgtgcat

SEQ ID NO: 49379 - DNA, 509 bp, Oryza sativa
tgcacatatgtacaaaggaataaggatgtgcttgtactgtgtaaattgatctagcaaatttgtgcatgatgtcatatatactgtgaataaatgaaatgtttatgtatctggactctgggattcttccatttcttaaaagagcatttcgagatcctctgttcgtttgaaagacaattgttcattatacgcactttttcttatgcagagacgagcgttgacttaatcgttcgctatcagcctctattgttccatatatagtgatgtggtgacatttagatacgctgttaggtaattcatatagcttagtttatcattaaaagcgctttatgctctcagtttttcatgcttgtactggtttttgcagtgagacaagtggtctcacatcgtggtcccagtatatcatatattttaataatggacggagcacaccccgtgcagggaccaacaaccctcgtcgaatttttcatttaagacgaaactatcgtagtttgtcaatcgccacatccttt

SEQ ID NO: 49380 - DNA, 1586 bp, Oryza sativa
  unsure (1)..(1586): unsure at all n locations
cccttggcttgctctctctctaacacttttgagccttgctttcttgtttcccctctcacccgtgttcgattcggatttggtgtgtgtgtgagagttgtggattcgagtttgggtgagtgcttgtttgttgacttcgtgaagatttgtgagcacttgcatcatctccgggagttctttgcttcatttgttactcttggaggttgaggactccaaagtggctaggtgtcgcccccgagccaccgatctacttgtggttggccgggaaaagtttgtgaaagtcggatctcacctncgaaagggaagagatacccttagtggaaggaagagtgcttagtgcaacctctagaggaaaagggttagctaagacccggctcttagtgagctcctcaacggagtgtagaatcccctcaaggattcaaactntgggaacatcttcgtgagcttcatctttggtgactttacttcctncctctccactagcttagcttgcttaagccgctataggtatagttgctgtttgtgctagcatattcttgtggtaggcaactagatctatgatttactttgctacttgggctgactccgaaaatttttggatatatccgaaaatttcggaaatatctgaaaaatactgcttccgcttttaattgaatttttgaattagcttattcaccccccctctaggcctaattgacactttcaatgtgtattgaactctagccttagtatccggcatgatctctgaacaccctgnacgttgtcttatctccaagcgnactcccggtccatcacggcaaatactctcccggtatcaattcacctacacatgaaacaaacaaagaaccatattctgagaccaagctatccccaacttgactcattgttagcaaacaacagtattacatacggatagtatccatctagaagtcatattcatgagataaactcagatatccaaacaaacaatccgaaaacgaaaccgacatagtgtcggccggtcagaccgcgggctggccggtctgaccacgcgtataccaccggtctgaccggcaaccactacccggtctgaccggtcacataaaataacaacacctgtaatttacctgcaaatgcaatcatctacaaaaccacttcgagaataatattccaaatatcaaaaccaataatctccaatgccaattgttcatcacaaaataataatcaaaaacacctttgattttacaagttcgtggcgccgctgccacccaccccagcacccgacgtcgctgctctccccaagcgccgacgcagcgtngncaccacccacccccagtggccgacgtcggtggtcttccccagcggtcgaccacaacggttgacgccaccggccggcaacaaccccaagccggcaactaacgaaccacctatggcgccggccagcaatgagcatgaactccttcccatggtgctggtgagctcaagcttcgtttcttcggccggaagcttcttcttcgggttgcaggactggcgtgggcgagcttggtccattcaccggcgagctccttcgggtcttccccgtgttacacggggagctcaatccccatggg

SEQ ID NO: 49381 - DNA, 817 bp, Oryza sativa
  unsure (1)..(817): unsure at all n locations
cgcatgtgnnnaaggatagaatatcaatcctttgaggccgccactatagnaatacctgaagcgttggctgcgctgcaggatcgacttctaggatggactccccttagcttcagcgccaatacgggcccatttgtgtgcatggcttttctagtttggggccacatttttcatcttctgtgtcacatattggaacctttcgttttgatatcgctccttaagaaaatactccagagtttttgcagaggtcccatttgaatcacacaatcacgactttctaattagaaattttacagtacttaagaaaatacatgagatacctaaattttacactaaaagatttggtacctcgagatacctagcacgtaaaggtatgaaattttatactttaaaatatggtatttccctgcactttttaaaggatgataaaattacccttctaatcaacttagctcgatcattttctgttaaaaacgtagctgtatcattaattatttagctcaacacaacctattgctctccatataaagtatattctctgcgtcaaaaataattaaatgacgttagttttcttttactatttctaggtgcaaatttaatcatgacttttttggaataaactcataaaatctaattatcttatgagattacgaaaatacctggnagtctatattttttatgttttcaaactaaagggatttaaaagatttgttgatcgtcaaactctggaaagtttggcttaaataaaaaattaaaaagagttatttttacctggaggaagatactcctgcctttttaaaaatttgagattctttgaact

SEQ ID NO: 49382 - DNA, 1415 bp, Oryza sativa
cgcaccacattgtcttccagcttgtatgtgacactatagaaatttgtgtttgcatccctcgcggtcgactctagaggatccccacatatgggcccacttggcattttgtatttttttatcgtccacctgcttaaacctaaggatcggttgtcatttcaaataataaccgatcggagggaattaaaaaatactaatagctttttaagctgtgcttctaagcttccctagttttattgtagttgaactgctatgagcagtgattttttttcgaacgcgcaaaagtcttgcatgtcaataaggaatagcatacatcggaaatacgccgaggaggttaccagggtaggggtactacagtatgaaaggcatcatgaaattttctagaagtccccacaaaaaattttctagaagtccccacaattaaaaacacatgcatataagagcaaatataataaaagaagtagtttttagtttctacctgattatctctaattttacccatatcaactagtgctcatcaacgcagaggatagtatgtacaacacactctatactgctagtacactggtctggccccagcaataatctgctgtagttttttttgttttattttgctaccttaatatacccttcatttctgtcactttgatcttgaagctcaagtacagatatattacatcttacacgaggggtgccggccctacgtggtgttttatggctagcgtaaggtttttattatacttgttctaattaagtactccctccattccaaattgatctacatatagttttttttgaggttattcctaaatgatctacatatttatgtttatttattaggtttattcgttatttgtgcattggagtaaatggacattgatgcatgcatccatacacacatgtatttataacccacatgcaatatcttgatttgctattggctaggaaatagtggggatgatgcatacattgagtttgttgctagagtaaatatagtatgagagagttattagcttttcttgatcttggtgtacctatgaaatatgtagatcaatttggaatggagggagtagttaccatgagacgtttataccgtaataattcacaccttctgtaatattcttaattattatgacatatcgacaggtatacctcaattactataaaaaacataattaatttattggaatgtaaacgagaccaaaccatatatgtattttacatattaactcgattattctgcgtcttctggtaatccctacctatcgccggtttagatgcctgtaaaaaattggctaattttcttttatgtacacagacacatattttaagtattaaacgtagactaataccaaaacacattactgattttgactgttaactgggagatgaattttttgagcgtaattgattccgcc

SEQ ID NO: 49383 - DNA, 1510 bp, Oryza sativa
  unsure (1)..(1510): unsure at all n locations
ctaaatgatcnacaatttgtgtcatttaataagtcaatcggtatgtgggcaagggagtaaatgacattgatgcatgcatccatgccccaagtatctataaccacaatgcaatatttgattggttattggatagcaaatagtgggaatggtgcatgcatgaggtttgttgctagagtaaatgtagtatgagagagttattagcttttcttggtcttagtgtacctatgaaatatgtagatcaatttggaatggagggagtatttttctactacactttaatgcatatgtcttatactaatatgatattacctttccaattaaagttttagtgggatagattttaaacgatagaaatgaaacgaattcttcgtggaatggagataatattgatcagtctagcaccgcgttaggggtggacccaggaggatgggacttgtggggcccagctgccagtgagagagagagaggggttggaacttggaagctagcagccggcgattctttcttcggttaatttcttccccaccttgtgttgactgtttgacgttgttttcgcgacatcgagatggagatacgtgtgtaacttagctgattcgtctgaaatttgagctcgtggggctttttgctagggttgatgtgctctgctttgacttcgttttgaaaatgagatgatcgatgctgtagctaggtgtcatgagcttatgtcgctccctgtatgtggacagttctcggttgatttttgttttttttttgtcacttgaaaagtactacctctatttaaaacataaggattcctaatttatttagcatagactaattaatgttgagaagaaaagatttattggccttggtaaataagggacaagtggaggtggaaggataggtgggggtaagaaggaagaaaatttgaatgaaaagggacatgtaatactgtcgctagaaatctttgtattttagaataagatttaaacgctagaaattttatattttgaataaatagatcactctcattggatcgaccgtaacgcacaataatgtgtatttagtcttatccgcttgcgtggattgtctttcacatgatggatgacgttatttcattactattttcacttttctaaaagatatgattgattgtaggataatatataattgtcattagcactcctctaataatttatttcaaatcaatcacattactttattacttggcagtttatccaaaaatgatgcatcattgtttggaatggagcccagtgtcaaccttttggattctatctagagccagacctnctttntttttcatgaacatcaggatatgtaccagcgtaggtgatatattgatcccagcaattttgtcttgaggttcttggtatatattactctcccccttcttatatatatatatatatatatatatatatatatatatatatatatatatatatgacactggctagttaaaaattgaactaggccaatatatataaaaaagacatagggagtacttttt

SEQ ID NO: 49384 - DNA, 641 bp, Oryza sativa
ctcttcgactactcaagtgatgaggatgctcccatttgcctcatggcaaaggagcctaagttaccttctcctctcaagtcatttaatgttgatcttgttagtgatgaggaggatgaggttgaggatgaagttatggatgacgaattgttcaagtccataactaaagaatccctaccacacttgagtgagttgcttgggagaattgaggaccaatatgcaactcttgagaggcaaaaggctttgctcattcgtgagaaagagcggtctcatgaactcaagagtgagcttgctaaggagagagaaaaaaatgaggctttggtacggctttacaagtaaaccaaagagtctcatgctaatcttgaggtggcgaacgctcaacttcaagatagagtggatggcttggacaaagcctacctctctcttgaagagaagttcgaaaccttaaaaaatagtgtctcttttcctagtgagccatcttgttccaaaattgtcccaagtaatgaaccatgtgtgagatgcaaagatattgatattgaagcttatgctactaactctatctctttgagtgccttgcaaaagcaaaatgagaagcttatgggactccttcacaatggcctacttaagtgccatatgggtagtaa

SEQ ID NO: 49385 - DNA, 929 bp, Oryza sativa
  unsure (1)..(929): unsure at all n locations
tgttttgtttgttcacgtttagctgaggagggttcatgtgtatgtggaaaaggttgggttggttgaaaattcgcatgtgagcaatgccctgattgatctgtatgccataataattaaatccacccgagagataatctcgatatcctcatatacatgacatattattaatatacgaagtacacgtacgtactctttgaaagtctccatttattaatatgtgcatatgttagaataaattaccttgcaaggatacccggataagttatgcataactaatcaacaaataattgcacatatatattagtaagagatattattttggggatctttgatgatcgtcgatcacaccatcatgttagcttttatatatacatggactggaggtagctgcatatatagatcgtgtatgaataattaagatgaataatatttgttttagaagactagaagtagcagctaattaagatgactaattaattgctgatcgagattttgcagctgcagttcttgacttgctcttcttttttttttctctgaaacaaaaattaaaagcaggcagtcaggtcaggtctttgccgtgcttggacaggttacgagtgtacaaacacgtctagattcagacgaatgtttggatctcctatatccgcaggttgtttccgtataggacatggtatgtggtggatcctgccgagatttagtcaactactattaggtacagggtatctataaccctgacaattagggtttttatccatgagtaaacgggcaaacaagttaaattgccatccctagttccgacacatgcataaagtattaaatatagaaataacaataattacacagattacgtgtaaaattacaaatcttttaaggggtaccgagctcgaattcgcgcttagatgagagatgctcatccnngggggcccatc

SEQ ID NO: 49386 - DNA, 764 bp, Oryza sativa
ccggcatgattgcactcgattgacacaacaaactaagctttttgcctgcaggtcgactctagaggatccccttttgcgtgggaactacacacaggggtgtgcctacgttatactaccggtgtcacaggacaccgggtagattattcaaatcctatataaattacactatattaattaatatattagtcaataattagatagttagtatgtattggacccccggtaatttttgttctgggttcgccactgactacacaggcctaagttttctcgtgaagcaacaaatcctgaattcctgtattacttaatccaagagatctccacgtaaatatgtctatcttttttaactcaccatgttgatcagccgccattcttgatctatcaagaaccttgtcatcaggatgtcctacttggagctcttgacgattgtttgccataccaccttagtacagtacaggtccttgaggtgtctttgtactgaacattacccagtacagatgcatgatcttcctagctacacggaccctgcagcctgtatcccggtcatgtcgtcgatcttgtatttgctttcaaaaaactgtatatacatacatgcatgcacagacttacattgtgaatatactgtgcatgatcttgtatctttgtattggagaagactgccataccatgcacaggattgattgattagcttggttttttttttcctagcttaattgccattgaattaatttcaccatattattgcaataaatccgatcttctga

SEQ ID NO: 49387 - DNA, 659 bp, Oryza sativa
catggcctgccagatttgagtgcaatcaactttcagacatcttccaacatcttcacgctttggccagttcaacaaggtatggttcaagttcaatcagataaagcacccaagacacaaaatacacttcaagattaactaactattcactaagtagaaaatccatcgttgatgtcgcagtcatgcgatggctgctgctgcacccacagcttcacagcatctcccacggccagaagtgaggtcttgaagaacacctccagataactcagattcttgtagatggcttcagctggcgttgccccttcgaacctcacagccacaaaggtgcatacaagcacctgcatgcctgcaaagccaagtgatatagtcgactgtcgacgcctagtcttttcgaggtaacttgcgagcattttcccaataaggattctgtgattaaaaaaggaggagagttaggcctggtttacggtgtgtttagttcacatcaaaattggaaatttgattgaaattagaacgatgtgacagaaaagttgaaagtttgtgtatgtaggaaagttttgatgtgatggagaagatgaaagtttgaagaaaaatttgaaaactaaggcttggtttagttcccaagtttttcttcaaacttcaaacttttccatcacatcaaaact

SEQ ID NO: 49388 - DNA, 699 bp, Oryza sativa
aaaataattaataatcacttaaatttttctgtataagatgaacggtcaaacatgtttaattataaaagtcaacggcgtcaaatatttagggacggagggagtatataagaagacaaaataaaatctgtccttcttcgatcacttttggtgcaaattgggcccctgtcgaaatcaaatcaacctatatggagaaccaaataaatttgtctacaaggcatcgcatatcttcgctgtctagccatttgcagctataaaacagctcgatatcagctgaacagatatctgcattcattcactgaatttcgtagggtttcagtattctcatgtgcaaaaacgcatagtacagatatcatcgtatcgaatgtaccaaacaaaacgtgtcgccacatttttggaagacgacgatgcagcgtagttcgtcacgcaaaggtttgcagattaaggtggtgattgaatatcctgaagatgaacattaagcatttcacgtaaaacgtggagttaataacgtgtgattaattaagttttaattattacaaacttgaaaaatggattaatatgatattttagaacaactttcatatagaaagttttcgcacggaacacacttgttagcagtttgaaaagcgtgccattttatttcaaaggtaatcacctactttcatcacatatctgtgcagacaccttgtcaccatgtgcaga

SEQ ID NO: 49389 - DNA, 1049 bp, Oryza sativa
ctaaaaaataactaattacataaattgcgactaatttacgagacgaatcttttaagcctaattgtttcatgatttgataatatggtgctacagtaaacatttgctaataacgaattaattaggcttaatatattcatctcacaatttacagacagattatgtaatttgttttattattagactacgtttaatactttaaatatgtgcccgtatatctgatgtgatactccaaaactttccacccctaatctaaacacccctctattactccagtcaccatgcagggcatggggcagctgctcaaggtatgcatgtctgactagattactgtgcgtgtgatgagtataaacttgacatgaacattcatgcaatattttattgctactgtgagcatttgaaatgaaagatttggcaaaggtcctgatttcaacttttttttcttcaaacttttatttttttcatcacatcgaactttctacgcacacaaacttctaacttttccgtcacatcatttcaatttctttaaactttcaattttgatgtgtaactaaacacagccaaaggattttgagtagatttaaattttctggtcttttttctagatacacctaagattcatagaaaacatgcatgacagaaaattttttattggatcgtgttcctactcaaattcatagaaaaataagcaagagattaaacccttatgaaaactttcttctaattcaatttgtcagtgatgcaaccaaggcacctcttctcgttttttctgtgtttttaattaatattgtagagttgatgaaacacactcatgctagtacttcaactctgtgtgttttcggtgttttgatatggataaaagaaaatttacgataatagtgtgggttacacatctttttcctattgggaatgattacttcaattcgattttatatgtcccatgtccttgtgggctcttaggtgctgattcttgccattggtgtccttgcgggcacatgtttaggacgaaggttataccatttccatcacctatagtgccgacttaattatat

SEQ ID NO: 49390 - DNA, 1092 bp, Oryza sativa
tgcgttatttccgagacaaataagcttctcgtcgacttgttaattaattagatctcgatcttgatttggagtggatcgatcatatcatggcgctactacgctgcatgctcacgaggacgaggtttattatccccaaatcgtcagccaccctccgaccagcgccgccgccgccggccgggctcctcgccgccctcggctgctctccggcggcggccggtcctctccgcggtctcgccactctctcgggtcatcagctgtacgtacgtacgtagaacgtagttcgatcatcaccggcctaaaattactatcgcttaaaaaaacgtgaatattaaagaataacctaatatcaaataatttaaaatgggtgaggcttcaaactcaggtcatctagcccaccaccttatggagctagctgaaagatccatgggtctcaattctaccgcttgatctgcagtttacatgcaattatattcatgcaagctagcttgattgattattactccacgcgttataagtgtctgcgcgtttgtactgtgtttctgaaaacataacaatgtaagacgcaactattattcttcatgtttggtaatacaagacgtgcatttatacatcaaaataattatcatatcttcttctaaatttggtttttttaatccttcaccctcaagataattttattggatacatacatcgtatttagtaattatttcttggtttttacgttagaggtagttacaccttatatttaggattgagtgagtacatacttccttcatttcatattataagactttctagcattgtccatattcatatatatatatatatatatatatatatatatatatatatatatatatatatatatatatatatatatatatgttaatgaatctagacatatatgtgtccctagattcattaatatctatagaaatatgggcaatgctagaaagtcttataacctgaaatggaggcagtacaagccatcgatcgacgattttatcatatcttttggtatatggtatatgaatatagtatatctcattttataatgggttatttagattcatgccactattaattttacag

SEQ ID NO: 49391 - DNA, 2735 bp, Oryza sativa
  unsure (1)..(2735): unsure at all n locations
cgagggcgcccctggcaaccagactggggccctttgattcgcaggatagaaaaaacacagggaataaaaaaaacacagaattaaagtagtaggtttctcaaatcctataggaattagcgaacacaagaaaaacaataggagtctttgatagtgctataggaaaaataaagaaaagttcacaaagaggcacatctcttgctatttttcctatgaaatggaaagcataggattggagtttcctttcttttctataaatcaaagggacatgtagaaaaaagatccatagaaatttgaatcctatgaaaatccttttccaattctatgaatcaaagggagtttgatcatcaagtaatttgacgaacgaactagactttcatctgatctcatcttatctagtcatctctgattctctaatcaagtgtgtatactgtatgtatgtatgtatgtatgtatgtatgtatacgacatatgtctttttctttattttgtttataaaacaggaactcaggaaggcttttatttcctcaattgctttaattcctcatcacttcatcacttctagaaacagaaagtatgattcaggtgctgaaaaacgtaggaagagacaggctagatgcagcagctcaatctcgatattaattatgaagatataatttaagatttcattccaagaaacactagaaggatgatgcttttcacttttcagtacaacatgagatcagtagtactaccttttctcttttagcattaatatttgtataaaataacacatattaaagttatatagttgattgaaagtatgctttgtttatattagttatataaaattttcaaaatttaggatccaattagcatttcgttcggtggccccaaatatctggagacggccttgccgccgatcgatatatcgtcgcggatggcactatggcagagacgtcggtcagctcggcaaggggcgattcaattcaacaaaataaccgncggcaccccgtacgcgtgcacggtgcacatgcacgagatcatctactactagctgtttgcaccgggtccgactttgatcgacgtcccctgacatactccatccgtcctataatataagaaattttaattttttttcttgcactgtttgaccaaattatgcaaatataaaaaataaaaagttgtgcttaaaatactttggataataaataagtcccaaataaaataaacaataattctaaattttttttaataagacgaatggtcaaacagtataaacaaaaagtcaaaataccttacattatgagacgaagggagaatatatgagcggcttgcacagccgcaccagccggcatctcagcgaattgcatcgcattggttcacctccatcggcacacatccacacgaccaaaaaatagcacatcatccgccgcccacgacccgagctctgctaccgccaactgtgggagaaactctgcccacgggctccccttgccgcggccgctacccctcccgtcgaattgaaagaggaagaagatgttgagggagaggggagaactggatctaggaggaggggagagctaggacatgagataagaaagaaaaagagagaggtattcctctattcctctcacgctagttcggctccatgtgtgacctcgctcccgcctcgctgtctctgctggagaagtcccaggggcagaccgcagaccgcgacgagaagcaatggcagggcggcgagaacgtggcgagccacccgacgtagcggcagttgcaggactcgcctgaggcgtgtgcgcccgccgtgccggcggccgtcgaaagaaccgttccttgggccccgtcgtggtcgcacaccttcaccaccatcaccgccgccgctgccgccgccgtctccgtcggagcagcatcatcacgaactgggggaaaaagcgggggattgggagatgaagtgggtggggaggcgatgcgtcgaggagaacaaaggggtagttggggaacatattccttggcctgggatatcaatgctaactcttggtaacttgcattgtgccaaaacagataacgcccactgtgtataagctgtgtttagattccaactttttcatcacatcaaatgtttggacacatgtatggagcatcaaatgtgaacaaaaagaaaaattaattgcacagtccaactataaatcgtgagacgaatcttttaagtctaattacatcgtgattaaccataagtgctacagtaacatacatgtgctaatgacggatcaattacgctcaaaagattcatctcacagtttacagtcgaaatcagtaatttgttttgttattagtctacgtttaatacttaaaatatgtgtctgtgtacataaaagaaaattagccaaatttttacagcatctaaacacggcgatagtagggaataacagaagacacagaaggatggctttgcattgctactgccctaagcggagtaggcggagagcgaaagaggaaagggtgggtggagacggagcaagcactggtggagaaaccatctttggtcggtcggccgaaatccacaataatcccggatccatttaaaaccggatctttagtcctgattggtgctacaacggtcatatgtgatctttaatcccaggtggtataaatcatccttaggtccaggtgtagagatgtcagacgttgcaagggcccccggaatttaaatnnngnnnnnnnnnaaangnagaaagagtgagcgttcgagggttttt

SEQ ID NO: 49392 - DNA, 1255 bp, Oryza sativa
tacactaaaatcctacattaatattttttaaaaaaatttttagtgaaaacattaaaatcctacactaaaaaaatatagcatcagcatgagctatgtgctcaattaattacaattataaaagtcctactatttcttcttcgcacatcataaaccaccacacaatgttattttcatgtgtggttgtatattattcgttgaaaaatgtttcatgcacctaatatagccaataatagtgccttcatttttctacattgtccttacatatttctaatcaataacgatgcttaatccttgacttttcattgaaatatgaaagatcataatagctatatgccaacgttatacgactgctataaaagtcacattggcaacagatacactgagctatcttaagatcagatttgagatgttagtatccatagcattttcatatgaggtggtcatgcattcagacttgagatctcagagtgtctaatcggctgccacgtgcaccttctagatgctaaactttttttttttgcaccactactcctaccgacacctcatgtacgtatgtgtacaaattaagtactcccttcgtatttagggtaggacgcaattgactttttaaccaacgtttaaccattcatcttatttaaaatttttgtgtaaatataaaaatatttatgttatgcttaaagaacattggataataaatcaagtcacaataaataaatgataataatatatttttttaataagacgaataacagcgttatattaaaacacggatgaagtataaaatactagtattccgtactatgcacagtagctaaatacagtattgttttgtccagcagtctagcttgtgttttaatttcttccatgtgcataacttaattggtataatgccattaattatattactttggtttatgttcattacttaattgatataacggcatcaattatattactcttgtttgttaagcatattggtgactacgacttgcataatatatagttgcaaacgcatatatgcatgggttaatcagattattaatttagagcaaagcatctaccttggcaatttgctttggtgttgttattatcagtaaccgcgatggatcgatctcgagcatctgatctgattttgtttcgattgggggtagttagagcgatagtagccagcccatcttgatcgaatttattccatatgcatcgatctaaaatatatattcatatcattatgtgaaatgtggggtctttaagatag

SEQ ID NO: 49393 - DNA, 1320 bp, Oryza sativa
  unsure (1)..(1320): unsure at all n locations
aaaacngtttcactcttcatctccagcaaccgatcttcgttcccccaccaaattggtgaccgacctgttggttgattttatcggctaaataccaattagctaaggaaagaataaattccacttgtccgattcctaaagagatagagttagtttttgtgattggtaaaaactaatttctaacaaaatttcgagataacccccgagcccccaccaatgcgcctatataaagagatgaagggcagaggagggacgccgagctctctacctaaaccctaaatcgcctgatcagcttagcgttggaaggggttcgtgaggtgatgacggtgaaagaattggcgtatcaagaagaaaaggagaaaaaaaatcgaagaagaagaaagaggaaaaacactgatggcatctcaagtagtagattaagtttccgcattgaagcagaggtgattaactgattatgtataggctaaatcattgagatgtaatttagatctccaacacaaccatgaggaagagcatgtccgaatctgcgaggcaaggcttcgattcacttgttatctcttgttgcctggaacctcttaaagaagcggaaatgcccacgtattcgacggtattttcgtgtcatttcaagcccactcgatcagcactatccttcaagagaggctctcatctttttggatcgaagctagggctcgacacctcggcgtcctcttggccctagctcctggtggaccctacttggcctctttctgctttggagttcattttcactaagtatccctccttgcttttgtgtttagcttggtttatatttttcgtttttgtctttgctgctagtaagaggccagatgcatgtaaactatattgtttccttcgtctaatatatcgacgcgcaagtgtttaggaaaaaaaagttaggattagaaggttttatgtgtaaaatgaaaaggtttctaaatgtcgttacctttcggattatacaatgttcgggttatattaacatttcaatggatgagttcttattggatattagtcaatatttttcttcccatcatgacattttttaagatccggtatatcagttagatgacatgagatgattgctctttagtctttaatttgttcccaatgcaaatgtgacaagtctacggacaacgatggcgtgtccgctgagttctttatacaaaagaagcagagctctattattattagagttattttatatctcaagtgccgtgataattggtattaacataacctacgtaccaatcgaatggtggagatattacagttaaaaaattaaaattaacattagaagacgcctgg

SEQ ID NO: 49394 - DNA, 721 bp, Oryza sativa
atgaaagtgcgatgcgattgactatagggcgaattcgagctcggtacccaattgatttttggattcatttacatgtttgctttgtcacttttattgcatagatatctttttatgattgctaacaagataatatttttttaaaaaaaatctaccaaaaattattttttaaaactttttaactttaaaattactctgttttataaatcggttgaaggagaacaagcagggcctaattaatacattttttacggatggttatttttggagaaacacatcaaatggtatgcaaataaattgagattaatgcttgctccaaaaggttaattatttcaaccatttcatcctagaccaaaattcgattttcttaaacgatttctatggtcaaaagacttaaaaattttgtctgagtgacataacaaaatagtggatataatttcgtggtatttgaatcttctgaagataaagattaagtgttttacacaaaacgatgtggtaataacttgtgattaattgagttctaattattacaaacttgaaaaatggattaatctgatattttagaacaactttcatatagaaaattttcacacaaaacacatcgtttagcagttttgaaaacgtgctatttttatctaaaaagttattcaacttttgttagagaaaaaataggatctaaagtctgttctttttaataaaaaaaggaatcaaggttttgttccaa

SEQ ID NO: 49395 - DNA, 774 bp, Oryza sativa
attcttagtattaaaaagttgaagaggtgagttgtaaaatttgcaatgaaattaggtggaatggcagattcgctcccaccacaaattactgattttaaaggagtatagatcatgcattttaactaggccttaattaatgtgtgctaaaccaaattactatagcaaataagagtaggtgctatgtcagtactttctccatctaaaagtcttaagcattttttttctatttgtttcaaatgagatagttatatttatagtctccatgcacccaatacttaggcccctgttagtttctaactaagatatatattttaccatagttttcattagcatgttattcaaactaccatgcgagaaagagcaggtgatgagtttgtgagcaggagagagagaggagctgaggatataagtatgggtgacttattaacttttaaaaatattgagagggaagagaggacgagaggttgaccttgcagctaggcgggcctcttaataggttcacctgagaaaaagaattttcataattggtctttatattactgggaaccaaaaaaaaatttttagccccgcctggcacctacgaaaaaaaaggttgtccatgataatctcttttactagtgaaaaacagagaccagatcctccggtcagtataagtaattatatgcaggcatctctctcattaatattgtatgtcgttgcatcagacgtaaagaaattattcgttcgagaggacaacgaattaattcctgaacgacgccgagcgacagtataata

SEQ ID NO: 49396 - DNA, 1296 bp, Oryza sativa
  unsure (1)..(1296): unsure at all n locations
catatgccgcgctaacaaagagccatacttggcatgaaaaagaaaaaggaaaaaagagtagtcataacagaaagagatttgaaggaaaaacctaggatccaacgggcaacgggcaacggcaacggtgctgtatctgtgggtgcaccggcccacgtgcagttgcagcggggcgctaaatggcacagcaggggggcaatttggtcacgagaataataataaaattgtaaaaggaattaaagaaagcccagtggatatgaaaggacctggcttgttgtggggcccattcgtgtggttctactagtacttctcctgggcctttcgctttgcgagagagaaagccacgtggcgggggaagcctgggctgccgacaccccgcccacatgtcgtncaaccgcccgctcacacgcgccgcgcatgtgcctgcctacgctacgtgacggcgacgtcgacgacggcgaggcggaagggaaaacgcttgggacgcgctgcgcacacgcagtcacgcacaaaattcaggccttgttcttggtacgttgtcacattggatatacatatacacatttaaaatattaaatgtattctactaacaaaataaattagatttctaaaagaaccagattaagctaattaattcgtcattctcaaatgtttactgtagcaccacattgtcaaatcatggtgcaattaggcttaaaagattcgtatcgcaatttacacttaatctatgtaatttgtttttttctatatttaatactccatatatgtgtctaaacattcaatctgacagcgtgaaattttttattttgagaactaaacacggcctcaatcgtgcactcgtatatatccgtccttaaaaataactcaaccataggtgcttgtccggacttcttttttcttttttctttgaaacacacatgcacgcctacaatacgcacacacttgtttttatgaacgtacacacatgtacgtcctatttttagaatattttctaaaggctgaattggtatatattgagatttgacaaaatcatcgtggacatctcattattaatggatatgtcttatatcactgaaagaataattattgccatgaatatgtcatagtctagactcgaaatcatgctccattagctatagtctaatgaatacatccttccttgtgttactccctccgttgaaaattagttttgttctttagtcaaactatcatgagcttagccaaaatctttagaaaaatatttatgggtaccgagctcgaattcgcccatagtaagtcgaactcaaaanntcgnccacg

SEQ ID NO: 49397 - DNA, 769 bp, Oryza sativa
  unsure (1)..(769): unsure at all n locations
cgcgtgtacgtaatgacgactacttagggccaacncgagctcggtacccaaacaaaatcctagtccaaatctaaatcggaatcatcaaaaaacatccagaatattaacacgagatgacgagaggagagggaggggcgagccagaggccgccacgcgctgctccttgccacctcaccttcggccgaatctggtaaggagtggggcggcgaccactgcccgatgaggagagaaggagccgacgccggatctggcaaggagccaccaccaccgccgctcgtggtgggggagggcgccgccacagccactcgccgcgagggaggctgccgcgtccgccgcttgcgggagggcaaggcattgctgccgccgtcgccgatgctcgcaggaggaagggcgctgccgttgctcgggggagaaggttgccgtcaccactgccgctgctcggtggggaaggctgctaccgtcgccatccgttgggcaccgccggtggggaggggcacgaagaggtgcgccggtggggagagaggcggcctgcgtggaggggaggaaggggaaaactggaattaggattagggcttatttggtccgggggttttgatggattaggagccgatctgagccgtccataacaatgaacggcttaaaaccgctccccggtcggggccagaatccattaattgggccgaataactgcttaggccgggcctcgttcaattagccgcatgtatgtttggtgttaacgcccccgaacctagtcctgacccggaactat

SEQ ID NO: 49398 - DNA, 731 bp, Oryza sativa
  unsure (1)..(731): unsure at all n locations
gtggtcntgcnttttgatgaccacttcgattactacanggcgaattctagctcggtacccagctgatccagatcagatccattcccgtttacccgagcataagcaaaattcgtactctgcatcagttaagaaagataagggcaaaggaaaaattcatgtaaaagactctggatgcagcatgaggtcacctttgcttgattgcagcttatgtggagcaacagtgagaatatgggatttcagatcggtgcctcgtccttctcatcttagtatcaataatattgacgcacctgatatgcggaagggggtgctgacacgtggaattagtgctacaagtggcatcaatggatgggttgctgaaggaacagaaagagagaatgttgaaggacgtggtgaggcaggtaccgatgagggaaaatcactgtcaaatgctcaggttgacctaaatcttacaatggcaggtggtttgccatctacgcattctgtgatgccctctatgcatgatcatttcaatgatggagggatgggaagagatctgatgattgggcagcctacttgaagtgagctaggtggcttttgcagctcatttgagtctaggggttcctagtcaagaaagccgcatcttgaggaaagtgggagcacaacttgataagccgttaataagcttcattctgctgacagcataagaagaacttgtattgaccgtgaccgtgattaagttgatgatgggcacc

SEQ ID NO: 49399 - DNA, 909 bp, Oryza sativa
cgctgcgcacgtaggacttctgctcatacgggcgaattcgagctcggtacccaggtgttgttccgagctgataaatcgacacttttatgcggattgagccaatcttatccaatcgaatcaaacgaaccttttttttcgccacccttactttttttgtctcccttatctcctccttttcttcacccacacatctttgtcttttcgcctctctttttctccgccttctctctctccaccggcatggaggcggcggctgctccccctacccggtgttgcggcagcggctgctgctgctccccctccctggcgtggcggtggctggtgctgcttcctccctccccctccccccagcgtggcgatggcagctgctactgctctcccttcccggcggtgctgctcccccccttccctgacatggagccgacggtggttctcaccagcatggcaacaatttgatttgtgaatattttgtggggattttatgatttgggatgttgattcagtaaccactgaaggaaaggaattgcttcctatgatttgcctatggccaattcctgcatccaaaggcatgaacagtaaaacatcctatgggatttgcaatcctatcttgttccatcaaaaaaggaccttggttgaaaatggcatcttaattctccattctctggctctatatttgtgaagtcacgtattcacgaaaatgtcatcaggggcttcttttgaacaatgggaaactaaggaattttggagaactagattcctatggaaaaatttggtatgtgctcctttggaacaaaagaatatgtcttccaaatcatttaaagtccctatgaaatgggccatttcatatgtaggaatttcgaaagaaaactagcattatcatattttcttattcctatggcacaaagttaa

SEQ ID NO: 49400 - DNA, 2506 bp, Oryza sativa
  unsure (1)..(2506): unsure at all n locations
agaatcggttaaatgccttaaaaatgctccaaatgatccaaaagagaaaaaccatatcctaaatttatgttttaagtttaaggtttaagctataagcattggtctagcgtggcggccttggccaaaaacaagctgccatacatagtctgctcctcgtactctagggctacctaggggaggacaggaggagtacgtggtgggatcctctgtgcagttgagtcacttacatgtggaccatagtaaaatgggacccacatatcagttgactcaactgcatatgcagtaagtcagaagatctgctttcgaaggagtactagcagcagctataggccacctccccccacccatccaaaaaaataaaaataaaatcggccgtatctacaggtactgctagtctactactactccaactagttccatgcatatacagactagtatccatactctaccagcttgttagtagtagtatgttctctctcttttttttttcttttttcccaattagtttcatacccttaactttagtctagatttacaaattaattagtatttcctccgtttcatattataagactttctagcattgtccatattctatagatgttaattaatctagacataacatctatatgaatatggacaatgctagaaagttctagacataacatctatatgaatatggccaatgctagaaagtcttataatatanacggagggagtactgcttaattaattgcacatgcatagatttccccgttcctctacttgaatcttcgtgtacctccccaaacggagacaaccattattattattattattactaggtgattccccgtgctttactgcaggaattactaaccatttctcaatatattttttcaacaatcaagctagaagtaaaaaggaaaaaaataaatattagggtttttccatacatatcatgaaacaaacaaatgatacccgttctttaatgtgaagcatattgataattatatgttaaatattatagaaataaaaaataaatttgttaaaatattgtgcaaatgatatgaggggtgatgattggatatacttgcatgttaatttgtagaattgaataaattgtagatgatgttgtatgcttgcatgaggttaaatatgtaattattgctagtagatgatgatgtggcatggttgcatgttgagctttagagatgattgggtatgcttgcatgttgatttgtagaattgaataaattgtagatgatgtatgtttgcatgaggttaaatatgtaattattgctagtgggttatgatgtggcatggttgcatgttaagctttggacttagcgggctatagctttatagaaagtgttataaaaccagccccgaaattaacatcggtagctaaacgtggaagaagcgccataggagatccaaacacaatgacgacaccgaggcacgatatttggtaatggagttcaaccaaggcctacatctctggggcactggttacgagcgctcctccccgatcagcatatacaacgtatcagagttacaatgactcacggctggacgctgccagcagccgctccctctcgctatactaagtcgccatgcggttacaataggcacccctctctatttaagagagaccctaggagagagtccgactcttactctagtcctaatacctattacaactccaagtcctaaactgtagctgactttgtacacatattcgacacaaactctaacaaactccaccttggcgaatatgccatgccaacctgaatttgttccttgcgcgaacctccgtgtacccggacttgagtcgatcctttttcgccactcacccatttctaccccgacaagcctctaccaggctcaccgtaaacaagagacttcactatccttgcgatttcttccttttgactccacctgcaacagtgctccaccttctctcgtatcaccacagttgtcttgccaagcgaaattgaattccttcctagctttcacatcatagacttcttaaagaccatgttcaactccatctaccgtcttaaatttgacttgatctaatccatggccagataacccacgtcaccaccaaatagataaatcaaactcaccagacttgaagagaaccctttcttccttgtcgtcttatgaaccgagctaataaatctaacatccatgctttcccgcatccgtagactgaattcctaataatctgggaaaatcaccgttgctttgaatcatccgaagaaattaccaccatagcgctcactcttcctcttcagcgacgcatatttcatatatccccatcatgcaaaccccacagatcctggatatatcctgtactgccaaacagtccgttgatacccttaacgttttcacccgttgttgtccaggatttttccttcacacacctttgccacactcctgccccaccacagccttgccttcgaatcataatgcagaagccctgatgcacagttattttgttggcaatccatgacctcaa

SEQ ID NO: 49401 - DNA, 1037 bp, Oryza sativa
aacacaagaatatttgaggtaatgacgctggatggttcgcacgaaataaactttgttttcctttgaaatgaaagggtaggaaattaaactatttcataagctttatcaagcttaggcccatattatttaccgaattattacatcggattatctatttgataatagagataaattatatatttttgtaaataaatttgtatagtatagaaaaattaatcccaacgatacggtagagaaagtttttttttctaagaaaacatatttctagaactgtggataaaatataatccgacgaaatatatagaaagaacagggcattattcttctagtccaaaagagcgtgcatgcaagtataaaatccttgtgaactccaataatctaaagttttcatgagaaatcctccaaatccaaattaaggaacagctagaacgagcttcgctactagtattcgtaatttcgtacgaaatctattgctagttcctatagtcatgacgcattggagcatggcgagccacatagtagagtagactctaaggagtaagggtgtgttcacttttattcggcttaaagtttttagatatatggacacatatttaaattattaaacgtagactaataatacaaattacagattcgcctgtaaactgtgagacaaatttattaagcctagttaatccgttattagcaaatgtttactgtagcattacattatcaaatcattgcgtaattactaattaggctcaaaagattcgtctcgtaatttacatgtaaactgtgcaattgattttttctcacatttattatcctatgtatatgtctaaatatttgatgtgatgtttttgagaaatttttttttatataaacaaggcctcactagcgcgatagatttttacacgaattgctgcttgctcgctctcggagtagagtgactagcaataggcatatgcttgggcagggctagggcatggtgtaaatcaatcatccgaccgaagcaagcaagcaacaactcccaaggagctatatgccactgtggcccc

SEQ ID NO: 49402 - DNA, 774 bp, Oryza sativa
  unsure (1)..(774): unsure at all n locations
gtgaccccnnttggattgtatacgactcactatagggcgaattcgttctgttacccacacatttgcataaaatttttgaataagatgaatggtcaaacatgtgagaaaaagtcaacttttattgtctattaaaaaacgaaggtaggtaatcacaggttttcgcatcatggtctagcttgccacaactagatatagaagtgagtcgaatcaataaacccatttataaaccaaattacccgcgagacaatctgcagattatccactaattttacctatataacgggttggcccgcttgcattcctaattgggcctgcctgacccaacgagtagagcccgtccagtgccctgacagataccgcagcccaagtagggcccataaaacaacccgtgggcccgtctcttgtccgaccgttgctgcgttgctggcaggtggggcccacaaccagcagcggcccaactcccaaccccgttccgttccgttccccatctgctcctccttccttccgttccagcttgaccccgacgcgtacccgacccattcactctctctcctctctctctctcctctcgcccgcatcggccgccatgcgcgaggaggtgcggagctcgtcggcggcgccgcccgacccgccgccgcgctcggcctcgccgcccgccacccccgtcgccaggtaacctcccctccctctcgctgctctctccgtctctgtgcgggggactcccgctgtgctgctggtgatgatggtgcgcttccgaatcgaatcgggggggag

SEQ ID NO: 49403 - DNA, 709 bp, Oryza sativa
ccgcctttgaaatcgactactataggcgaattcgagctcggtacccataacatgttctgctccaggcattacaataactgcaacataaattaatagacgatcggcatggcgattctcatcatggtaaagctcactcatttatcaattcaatgacagcatataaaacgtcggtagggtctgcagatattacaattttgtaagaggaattatggtaaagtcatgtttgtgtagattcgaaccaaattagtcaaatggtgaccatatggccataggaactgggcgggtggctctctgatagctacaagatgcatttctctctgtacattggaaatatgggatctttgtgccacttttcaagccatctcctccctgctatggccataaatatgcaccacggtggggacttcttttagttcgtgtcttgcttgcttagtaattcgagtgaaaccctgaccctttcccatgaacaagacaagctttcctgttgatacagctgcccttcgttcagacactcaatatattccctaggccctcacattgaggagagagtggtagatagacaaagagggagagagctgagtgaaaagcagtgactgctttcagttcggtttcaaccatgaagagaaagcagttgatcatgcacagccttttgattgggtaccgagctcgaattcgcctatagtagtcgttgccaaccaagtcaaggcgg

SEQ ID NO: 49404 - DNA, 2736 bp, Oryza sativa
  unsure (1)..(2736): unsure at all n locations
tttatgtactcctatattcagcccactnaggtaaattaaaccngctccctgcaggtcgactctagaggatccccgacagtttgtttacatttttacaattcagcattgttcagtgacatctgtaattgtaatttacatctgttctttgtgttcttgataggttttggatcatgcaagttcctggcatccgagtaagttcagtccataattgtttcagatgttcttctttctccttattacatatgactggtaaattaattaaattttgctggattggtgcaggacatctgctgcatcagcactgactcgaggaagcatgtggatgatcttcgcagctgcgtctatgatgtttcttcatctgagagttttccaatccgtgtgaattgggtcgatgctaccaaagtaattagtacctgtggtggtttggttctctttgtagtatattacttatgtaagaagcaaggaacagtgctagttttttcgtgtaaaattgtgaagattatatattactacctccatcccaaaatgtttgacgccgttgacttttttttaaaatgtttgactgttcgtcttattcaaaaaatttaagtaattgttaattctttttctatcatttgatttattgttaaatatacttttatgtatacatatagttttacacatatcacaaaagtttttgaataaaacgaacggtcaaacatgtttaaaaaagtcaacggtgtcaaacatttagggaaggagggagtatgatttaggtcgtgtttttcactctgtaataataatgaagtaaatagttagcaagagtttgtggagggttaatgcatggttaattctttgaattttgtttcagaaagctctcgcttgcatagccgtagaggtggagtaggtcacaagcgtacacaaacacaatagccaattacgagccatatggcccaatatggtgaggcccacaaggcccaaggtgacaaagccccgcatagtcagatccgatccgtaggttgaaatctggacggtcggcacgtcacgcacggacgcgcgcgcttattttagtaccacctcgagaattcgatcggagaagcaccagcttatatacccgcccgcgctagcctggtcatctcttcggagacatccgataaaattggaacgatacagagaagattagcatggcccctgcgcaaggatgacacgcacaaatcgagaaatggtccaaatttttttgagaattctgcccaggtccctggagcttatactttttatcgcagttatgccctcggttctttctttctgccccttctgctgaatctttttcttccgttctcgtccttcgtgtatgaaggcatagttaagttgtctgcacttcagcccctgaagattttttatcttataaatagaccctcatctgtttccttctttagtgctgcccattgttttcttagcagttatgccctcggctctttctttttgccccttccaagttttttcttgcgctatcgtcgtccatggcttcatcgatggaggctcatacttaagttgtctgcacttcacttcagcccctgagattgttttctcttacaaacaagttgctgtatatttcttctctgcttcactttttaataccaatcaggtcctattatatattgtgcattgctgataataatttgtttagtgcacctctttttttgttaggcaccctgtaatctactagtagtactttggagccataaggccaatcttataacagctcatatcaacatcacgtcctctcttttaactatttctttggctccaacaaacgccaatcatatcgtccacaaccacaagcatacgcagtgacgaaccaataacaaaagctaccaacattctatacatattaattatctaattattggttaatatattaattattaacatgatataaattagctggaactaaataatctacccggggtccgtgaccccgagatagtgaacgtagccacgtctgtacgccactaagcatatgctaaaactcagttcaagattttttaattaattaacaataagaatgcatttaaatgcaattaagaatctttcacccttgtattttcaccaattagacctcacatacgcggcataacttttttacattcctattttaaactgaattaatgccactagttatgcttaaaacatacatgtttttttaaggaaagctttttagtgccttttttatggcacttttttaatctacgatccttctacctaataacaatcaagcatatcatcacaatttaggatctccagagagctcgagacaggacgctgttcgctctagcgtccgcgcctggacgttagtcctagtagcgtccttactattttcataatttgcactagtacctctcacttactaaatatttaatttcaggataattaattattataggattaaaaacccggtatattcttagataaaaagaaataaaattcagcttactctattttagatccaactttcaaattatgcaactgcatgtcgcgtgaatattaattcctggtggcgatgacggacacattcagccccttttttcttgttcggaggtttgatccaactcatacctacgttgaggactttgtgtcacacacgaaccagggatgacgagcgtattaacagattctgaacacatcacgacgtgataataatgggcatacgactaacattattggtaggctagagaagagtgtttgggccttttcggc

SEQ ID NO: 49405 - DNA, 846 bp, Oryza sativa
  unsure (1)..(846): unsure at all n locations
agtttggggcgtgttccgggcttaaaggaatgactgggacgatagcagattgcctgatgacgggcaacgagatgccagctgacatcactgccggagccatgaggttaggagaggatggagaaaagggttgatagtgggggtaaaattgtcgactagttaggatgggtggggtagagnacgatggtggagaaagtagacaatgaagtggtggcagcggcaactctaaccactagaggtgagggagaggttggggatggggccaatagaggagacagtaatgcggcaaaaatctaacatggtcagcggttgaatcggagaggtcaactgtgggattgtcagagaggagtataaggcttgtttggttgataccctgataggggcggacgaaaagctcgaggctcgttagctcgctcgactcggctcgtttcattttcctaacgagccgagctggcattttagctcgttagagataacgagccagctcgcgagctgcttgtgagccttaacgagccctcagcaatctgccaggccacaaagcccataggcccatttatttagaaggcccaatagacaatagtgagcactaaaagtgaaaaccctaggtcattcccttatcccttcccttccctgttccctttggctggcggctgagttctgtaggatcgaaacgcaagaactaagccaaccagaggggggggggagggtgaatggttggtatgcccaaaaacaaaaacttttagcagaaataaaagttaccctcaaattcacgagattggtctgaccgaagatgggtaccgagctcgaattcgcctatagtagtcgatgccaaaagacggtgcaagccgg

SEQ ID NO: 49406 - DNA, 2439 bp, Oryza sativa
gtgcccgtcaccggctcgcgaatgatgagctgcgtatcgaatatggctccggccatcttcttcttcttcttctcctcctccggcgccgctgcagcatcagcactcgtatcgtcgacagggacggatccaacttgggacatggggcttttgggtgaacaaacaaactgttactggatgataccccgcgcgttgctgcggaaacttttagaactaccgtaagaataatagtttgtatgcaagtagaaatatttcaaagttaagtagcatttctgtgtaaatccattttttattgaacatgcaaaccggttttttaatgacatttttggtacgtgatgtcttacatgttagtttcgaaaagtagaggcatgacaatgatgataacagaacatgtttgacaaaataacaaataacttggaacaatcaaaggatgttattatatcaaatcatatgtggtctttagctcgaggaggatgggttgaccggtaaaatttggttcgaagatgaattagtattagtattaaacaattggatttgcttgcatggtaatgtagttaattagacattggttttgtgaagaagaattaccctttttgtgagccaggtcattcggcactgctgactggaggactatgctttatgaaatggttcataacatattgcaattagtattttagttaaattttgttattctgggggatgttcaacgtagtacatactcttccttctgacttttgaggatggggttaatcaaagttctttgttactgaaaagggaaagaagtacagtaagggagggtttgagcggatatttgtttgtcacaaaatattaaaatgatgagaaatggtatacgcagtatatacatggtgttataaaatacagtatactttctagtttcctcagtggaatcttcactaaaatcgatgcttttctttgtagttcagctgctgtaaatatattttaggattatattcatgtatttgattaagcatggaagtgaaatatctttcaccttttttcagttgatatgttaccagctgtaccgtctttggatgttcctgttttgtcaacagttgcgctgaaattgatttgacattagcagatagtatgtagtcttagatggagatatgaatagaaaatatgagagaacaacaaacctgagatagtatgtagtcttagatggagatatgaatagaaaatatgagagaccaacaaacctgaggatacttgtacatgtcataggcggtgaaagatggagtagaactttgttcttggaaggttttggattagtttgttagttagattgaaaaatatttaagtgatataaaatagtagtccagtatgtactaacctcttcatttgtcagcataggggttgacatagtgctctcaattgggaaactcttcttaagcacataactgataacaaacttagaagatgaatcaatattcattcctctattaaaacaaaccaacaacgatgctgcaggggcctcccctctagtcgttcaagtaaaaacaaaagaccaatgaattaaagatgactacaactccctcctttgatttttgcagtactcatctttgttgaaatccatattgtcctgagtactactttttgagcatggtccctgcaaaagtgtaggattattgatcaatttagaaggctgtaaagatgtgatatttgacttcatataaaactaattttctttgttttgatactgatcaaaggagcaaaaaagtcattcttgctaaggccttgtttgaatagcccgagattgaggaccatctaaacatggtgtaagagagagatccaaaaaaacttatttttttactttcttagaatagttatttgatataattataagtaagagtggcatgaggctcatgataatcatacctcaaataaattgttgcagtaatgaaatagttgtacagattgccataaccaattcagtgtagctaaatatatagaatggaatcgttgcagtaaagaaatagttctccaaattcccattaatggaatggagagcaatataacccatgcccaatcctcaaccgattaaaatagctatagcttcctttatttgctgataaaatttgatcacaggtagaacaatttcttctcactcacaatttttttatagaagctataaaagtgattttcctgtagataaaataaaagcaaatatagatcagcaagaggaacatggagcgctgatttccctatagataaaaatagaagcaaatgtagatcagcaagaggaacaggagttctcatatatacctagtgtagaattaggagcaacaaaccatgacgcataggattggagttacgtagcaacagaataaccatgcacgtcatttttttgggtgaactctgctagcctcacattttatctgaccttcaggagagccgcaggcttgcagccacgacgaatagacc

SEQ ID NO: 49407 - DNA, 504 bp, Oryza sativa
cgagctcggtacccaataaaacacatatctcctacaaattaaacagtgtcgcgtagcgcaagtctgaaaatataaacaatactctagcacaagattgattgtcttttggttagttttgcatgctactcagataatagacaaaatgcccttgaatgcccatgatttatcaggtacacaaaatatagattgggcattctgcctgttaggatggaaacatcactaaaaatcatcagtattaacaccaaaaactgggtaccttttggagggggaaaaaagagacagatggtaccttttggagatcctttttccataatgttacaatctcagggactttgctcggaagataagatctcgacatcaatgctgattgtggtatactaatactttatagagaatataacgtgatcaccataaaataaaaaatacattttctgaataagcattgtactattaaataagatagtcttgccaaatggcaatacctttcgattaacaattgaagac

SEQ ID NO: 49408 - DNA, 683 bp, Oryza sativa
ctctcactctcctcagacccttctggggtgtattcacgcacggatcgatcggtttggcatggaacgtactactactactgctactcatcctgtaggctgtagcaaatcatgcaaaatgatccactgctactggcccctactgtagcaagtagtagtagtaccaattaacctcttgtcaagacttgtagtatctacctcaggaggccattttactttactgatattttttattcgcccttttctttttaaaaaaatacttattttgtcctaaaatataacaatctattactttctttacttcaaaatataggatgtaaccatcttttttttcataataaaaagacatgcatgtatacaattaactaatacatccaatttctctagattcatcttttttttattatagaaaaaccatctaccctcaacatccctaatcatattgagtgcatccattatatttattatggtaatccaaatgaggaattatatttatctttttatatggctgaatctctctttagtccgaatgtaactcaaattaatatcccgatcatacgaacccgttatttaatttgtttttcaagtgttgttcataatcaacgtggagtttactggagatcattgtcgtgtcccctgttgtttctatgcatcataaaacttacaataaggccaagcgtgattca

SEQ ID NO: 49409 - DNA, 538 bp, Oryza sativa
gagctcggtaccctctcgctctttgactctaaatattctacaaatgcctctaaactgctacgtggtgctattaaattaaataaaatgctagaaaatcttaaaaaaagaacaaaacattggctattgatttgttagttttttaataagaaaaaaaccccaaacctctctctctccctccccacccctatgcggtgttaaaatccattaaacattttataaacacctctaagctactatatcacatactccttagaattttcaaaaaaaagataattatatataaaagttcattaaatatcttaaaaatacttttaattcgccaagtggtaccttacgaacgctcctaggtcgccaagtggcactctaatccaaccatcgatttttatttaaatcggtgatctattatttttatcttagaaggttagattttttttaaaaaaaagcacgcattccgaaccttccgtcacgtacttaccaacgagctatgttcataagaaattataatcaaaattatttttacattaaaaaaatcacaaag

SEQ ID NO: 49410 - DNA, 622 bp, Oryza sativa
ccatcagaaagaggtgaagtagccaagctggaccctcaatgacatacacctacttaatgcactctctgcggaatcaagagaagtacactgaagcatgtcacatttggcagtgcttgctaattataaattattactcttagcagttctcacatgaagatatatttatatacttgcatgccatgagctatcagtttttacttattacttaatttgatgctagatgtctagcttctaaacctaaagtaatttaggtagagcaagaccttgagcctcttgagaaaccaatagaaacaaggaatcaaacaacagcagctagcttcaccagatgaggaagaaagacttccataactcacttgcctgaggcgcgaaagaactgagatcttcaacgaaagccccccaatttcattgacccttacttaatgaccagtgatggcgatttatgcttttattgcctcccaaacttatcattcttactcaagcttaagaccaggacagaatagttggagtataaataaataaagttatcatacgagtcttggacatatgcaagttgtgtgtgtgttttgccaaggagtgcatatgccatatagttcaacaagtatcttgggtaccgagctcgaat

SEQ ID NO: 49411 - DNA, 776 bp, Oryza sativa
tctactcccccttcgtagatggtctaccctgtttctccttttgtttttgccgtacaaaccgatcgccgatcagttattttggtgttcagtttgccttttgatcacaggtgttcgctagcaggaacagcagctaggggagagtacaagagagtgaaaaatcagttcgccggcttacacattagcccttgtttagtttccaacttttccttcaaactttcaactttttcatcacattaaaacttttctacacatataaacattcaacttttttcttcgaattttcaattttaatcaaactttcaattttggcgtggaactaaacacacccttagttagcttggaccaagggtccttagcctgtaccttttctctttcttttcgccatgtacagttctcttttttctatttaataaaaatcaatgaaccccctccaaatatagatgctgagatttgtaacctgcgtattcttttgtacttaatgaaatgataggagagatgtgcacgcttcgcaagaaacatgcatgaattttcctatatataaatttccaagaaacatattaaatccattgttaatttatttcatttatttgtactctcgaataattgctaaaaattattcaactattcatccattcaaccattcggcacataagagtattaattccaacacatccaaattgcatgctgtagttctcaggcccacactttttccttttgttttgatcatcacgatatctggcaacattgtcgctgttcatggacgtgataatctacat

SEQ ID NO: 49412 - DNA, 740 bp, Oryza sativa
acaacagggagtagtttccgcggattgagaagccagatattcagggcgagtggtggcgggccggaggcggaggcggtcggatctgggagagggggagcaacgaagggcgaagacagtaggggtctttgtgatgaaaatcaggtggttctagggtttctgtaaggggtcccttgggccggtattgttatgggcccgatggctcatccttagcctttcttgcaactggacggcacaaaaaaaggaaaaagcggcgaaaaaaaagaaacagacgaaaataactactggaaaccttacgtattttttgattaggtatagaaatgaatggctattgcaacaagagtgaaatcaaggaatacttacctttattggagcatcaaatgacttggcaacactgaccataactggagtgaagaagacccagaaaatatcatagaaaaagagtccgctctgaattaaaagggaataccacgatacacaaaagttacaaattaaaaatgctttacacaatacggtggtgtatacaaatatggactttaatttcgcaagcaaaagaaaggcaaccataaattatagcatatcagaaaattcaaattatcattgccatgctccactagtaatgattttgatggctgaaataataaaaggtgctttgacaagtaccaccagaaaatataagttttagttcatacaaacaattcataccaagagaatagcaccacgtttgaatgatacaagtgata

SEQ ID NO: 49413 - DNA, 3722 bp, Oryza sativa
gcaaaaatttactatgtgaaagttgctttaaaaattcatattaatctatttttttaaaaaaattagctaaatacttaattaattatacgctaatgagtcgctctattttacatgcaatacagattagttcccatcagtagcaacgaacgcagaaggggacggccattcgctgccagtgtaagataactataattttgtgttaacgaaaaataccagcgaagatagaaaaccccggtaattttgattgtttgggagatgcatggattaccggtgaaaatatgtattttccaaaaaaaaacagagagagagatcatgatagctacctagcaggaaaagagaactcaaaattgatcaatttgtcaaagcgtcagaaataataatcaaaatagatcaacaagtggaagggcgaacgaacaccagtagacgccgtggaagtgggaagagtggagtgctcattgatcggccttgttggctgaggactcctgggtgtgggctcaatgggagtttctccctcggttttaattttttttaataagacgtatggtcaaacgttgtgcgaaaagttaaaatggaggggtactatttttctacgcctaatgggccttctccaatagatttttatctaaaaactggctcatccaagcacatattgtgttggttcatcttgaaatattacatggtggtatttttcacctgttttgtgcaaaatattgagctttagtgcagaccctaaagttttttttttcttaaaaaagtatcatgcaggttccaagtcggtagacagttagattaatttttatttagataaagcccatgtttgactcttagcctctaaactagagtataatgcgcgttgggatagtatttctgataaaccttttttgtccccctaaagcacaagagaattgcgcttcatttcttttagaagagaagaagaataaagaggggaaaatgatcccaccctaagagcatctccaacagatgtacaaaattaaaaccccacatatcctatattggggacagaaaaaaaaatatttgacccaaaatacactcctttaaaagatgcctaaaatattggttcccaaaattttaaaatttaccacatcatcattagtgggccttctcaactaattttctaggcgctcgctaaaatcgcgcgcgagcgcgtggtggaggagatcgcaatgcgcgtggaggactggacctggtcgatcgtgatcctagtcgcgcgggagatcacgtgtgagcaagtataaaccagggaacgacggcgagtgagagatactcaaagcaggcaacggcagtgagctgcaaggattggtgacagtcacaagcacttgtgcgtttaaaccattctagcacaggttgcaaaattttgctaacaattctttgttatatttcctttttctcacgtttctgatctgacaatgtatttatggaaaaatcttgatttgatatgatgaataaatatttagaaaaacgaaatttctagctgatcattctacatgacagtgtcattaatctgcaggttagaattataggcaaccctcatgttaggattttcttctatcaatcatgtcttttttatatatattttgatctgacaatgtcgctaggtgaaaacttatttagttgtgatgattaatggttggccagttgatttgatccgtgatgagtcgtcctcgctcctcagatcaacggcttgtggatgaatcatccgacatgatgattttttttggggggcgcaacacaaaacctgcatagctattggcactttgacaatgcaccaaaacatggtgggtctgtgatgggacatgaagtggttgatcacaacagagaagcacgtcacttgagattataccaatactatttttctgataatcctacctatggcccagttttattcagacgcaggtttgtattaagcctattttatttgatcgacctttattatatgaatagccaaccatttatgtctgcgcaggaatagaatgagcagacataaataatgaggcataagtaatggagaaaaaaacagagacatgctcattctattcctgcgcagacataaataataaggcatacgtatctattcatataataaagatagatcaaattaaattggcttaatacaaacctgtgcctgaataaaactgggctataggtaggattatcagaaaaatggtcttggtataatctcaattgacgtgcttcttcttttgcgatcaaccacttcatgtcccatcatagacacacagtgttttggtgcatcatcaaagtgtcaatagcgatgcaggatttgtgttgcgccccaaaagaaaatcatcatcgtcggacgatgattcatccacaagccgttgatacgaggagcgaggacgactcatcacggatcaaatcaactggccaaccattaaacatcacaactaaataagttctcacctagcgatattgtcagatcaaaatataaaaaaaaaacgtgattgatagaagaaaatcctaacatgatggtcgtctataattttaacctgcagattgatgacactgccatgtagaggatcagctagacttttcgtttttttccaaatatttattcatcatatcaaattaagtttttttccataaaaacattgtcagatcagaaacataaaaaaatgaaatacaacaaagcattgttagcaaaattttgctacctgtgctagaatggttcaaacgcacaagggcttgtgcctgtcaccaatccttgctgctcgctgccgttgcctgcttgactatctcactcgctgttgctgactggttaatttgtacttgctaactcgtgatctcccgcgcgactaggatcacgatcgaccaagtagtccaggtccagtcctccgtgcgcattgcgatcgccccctccgcgctcgcaggcaattttaacgagcgggtagaaaattagttgaaaaggcccactaatgatgatgtggcaaattttaaaattttgagaaccaatattttaggcatctcttggagaaggattgtattttgggccttttttattttgggctgtccccaaaataggatttttatgtttctaattttatatatctgttggagatgctctaagaggcagaaaataaattccatgttaaaaagtctaacgaccatacagaaccaaatggacgaactaagcatcttgggcgactgaccggacaagaaagaccaacacagttatttctggtaaacattgtacgctcccggtgcatacaactcgaatggaggtgatatgggcatacaacccaacacagttatagagaaaaccaaaaatcccagattccatcagcccaaccaggtcgatcggcccaggaagagctcaacgcgtacggcggcctgtgactccgtcaccctgtagtatatccgagaactatggcctgttaaactttgctctaggatcacctaggttagatctaggtcaggtggttctatttgggttgatgtttgaacaatagagattgaaaagggagagggtttagatagaccgaccggttgaggtgttggaggatgaagaagcgtcggccatcgtcgtcgtcgtcgcgtggttgtcgcggatgcggcgccggtgaggttgacggcgatgatggctgcggtagtggcggtcgtagatgtcccggcgatgaggcgtggcgcggcggtggcgtttcccgtcactggctgcgccccctctcgatcagttagggtttgtgggg

SEQ ID NO: 49414 - DNA, 5284 bp, Oryza sativa
cgccccggcctccacccctttcatatggcgcagtgtgatgggggcccaccagccattgggcttggcgcccccgaccacggcgcggtcaaggtccgttgtgccgttgggcccgacggatgggagatctatctaacatggccaccacggtcgccagcgcaacacctcagtcacctgccactcagccggtcggctacctcaacgccggtcacaagtggccgggcttctcatcagcagtcagctccttcctcggcttcttcaatttcaggttcaaatataggacccccgtttgatcgatcgggctccaacttctaaatttaactctaagagttgattccggaatagagtcatggagctgtctaacttcacgtctagttcatttttaaagagcacatcactcaatttcactctcattttggatggagtttaaaccgtttggttgggattccgtctaagaggaaatagagctgacgctgtgccaaacgggccttcaaaaaccactttgtgcgttgtccgtacttcaaaagggctctagttgactagttcagccctagtactcttaggggtagatgtgtacgtagtgtgcttcttgaaaaatggctcagttctttatggcctacgttgccagtaatgaatatcagaaaaatcactggacaaatccgtgcatgtgtcagttatacttgtttcgttgtaagtaatataatgctatttttatccggtctcaaacactagtaccacttgttattttcagagagaggcttgatggagatcattagttagtttagcagcaactggtacccacaagtcagcaactcgatcagcgacggccaacaagaaatcaagtcaactcatactttttttttcctcgaatacacaggaatcaacttacatttcatactttagcactccgtaaaacgttgttatatttaactccgggagggaaaatatctcgtgtggtaatatattcttcaggttgttttcagctggtgctgctcggtgtgacactgtcctatctgaagattaaattttgtgttttgaaatttaagctgcacaagtggtagggcagtttcactgtcaactcaggttactgatctgcaattaacttgtatatgtgctgtctgggtttgatttggccctgatgttggggatcaggtaatctactagaaagtagacgcgtccgtgggcgcgcgtgctattataatctgtcttatttaatgatttttttttcgggcttacgaaaaaatctaatataaattgcttcctgctgataaatggatgaagataatattagcaagaattactttagatattaagtgttcaatggaaaagaatgcgagcaggttgatattggtattatggaaaaggtcgtcaccgcaattctaccacacccatctacacagcatggtccttcataaatttaatctatcttttttgcatcataaatttaatttatttcctagattttcattaataaacttgcaaaagcctaaattattgagtacttaacacgggtgatatagagagaattagatgttatatgtcattaatatgtgcgtgtgtacatccatagggtcacacattgctatacgatatttatctaaaaaatatatgcttttgattttattttctcacgttggttaattgatttgtacagttttttcgaaggtttgtttctccatgttattcagaattgtaataattcttcttttttttcatcacggtaaagctagctacatatagttttttttaggttattcctaaatgatctacatatttgtgttcatttatttattcgttatttgggcattagagtaaatggacattgatgcatgcatccatgcacacaagtatttataacccatatgcaatatcttgatttgctattggctagaaaatattggggatggtgcatgcattaaatttattgctatagtaaatataatatgagagagttattattttttttcttggtgtagctattaatttggaatggagggagtaactggttagtttggtgggctgcatcgcgtgaggccttggcccaggtgtgcttgtacgtgcgcgtgattgatttatcgcttaatccagaacagccgcgtcactgccatgtacatgacgaaaaagaaacgcaacaatccagtagtagttatttcaccgtttttcatccacgtgtcgctagttagttggcgatcaatcgaccaatcagctgacgcgaacgcagccagcattaccgagatttagatactctcgtgcgcgggagtatcctcgaaccatgccgcgccacgtggcgttggtgttcggccgggaacgcgcatggaattcggtattagagatatcaaaccttccttctaatggaattgcattcaactctctgcatgttctgaagagacaaaatgtatcactagtggcagtttaatagtacatgcagactactgactacggattttgatctctctgtctaaacctctgctttgctttgctttgcttctctgatgcttgattgaacacaaccatgcacagcaagctaaaactgaagtgccaagagataatccattgtaagccaaacaagttgataagaaactgtagtttctttgaagcatagacctgaatacttccattatattaaaaaaatgttgatacgaaatcctttgaatgagacatagcagaggagtacgatcttgatttggcaccggtcatgcaaccttcactgaaacagtttttgcataatttctgtcccattataaatatgtcattttcgtcctaatttggattgtcttagccttatcctgatacggtatcaatatgtcttagcgatacaaaattttactagcgttcttccttgtactatatgtagaacatctttgtggtccagcaaagagtaccggccggtactggtaccgctcggtaccagtacacatctggccgttcattcctgtatgggtaggatggggaatagaaattcgctcggcgctcgctcggtccttctccttccacagccgcgcctgcgccctcaatccatcgtccccacgcgctttcttccgcccccacacactttcctccgcagcccaacgccggaaattgattaatgttcgaattgctatggagagatttctttagtaaaattgatttctccttctccgccggtgcccaacgccgcccaaccctaaccccccatatcatcgtctgcgtcgtccttcgtcgctcctcggcgcaagggttcaactcgaactcgcggcgcaggagcatgtacacggcgacagcagcgcagaggataacggcggcggtggcggcagagcaacatgggagtgaaaggcaaggagagcaaatactagggttcgagcgagctgccagccccgatccatccctcctgatccatccagcagcaacgcgaagttacaataatacccttccaaccaatttgtctaggcggtaccgcatcagggacattcttggtaccgggcgttaccaaacaatcccagccgttggatcaggccagatccaatggccaacattcagtaccgccttggtaccgcccggtaccgttggacggtaaaaaatctcctatatgtaagatactttttgtgaagaaaaaagagacatacaatgtgaattttctttgcctgtacatggacattttgattttttttttcataatgtatatatatttacaaactattacgatgcaaacaggtcggcaatgccaccaagtaaccgctgtaaattataactttttttttcactggaacgcttgtctgctgtcccctactgaaactgaaagtgatctccctaattcaaaattgcagatattttcctgcaaaagatcagcgcatatcaacagcttgatatcaatcacccaccctcataaaaacaattcaacccctccaaatctgcatctcgatcatgctgacattaataaataaaccagcaactagagtgcatgcaatgtcgaacattgcttattacagttagcacgtagtactatatagtacacgtcgcgtcatcgtcgatcatggcacatataaaacttgacacaagatggtgatagccaatttcttgaagtcagtttagttatctgtattgaaaaaaaacatatattgcaagtggtttattccaaggtcgttggtgcttatccatgttgcatactaaaatatcttgatcacgcaagctaaacctactttggcatcagctatatagtttgagctttgaagctcagggatatgtaattgttgcaaacaatgcgacaatatgaacgagtctttcaagcttaatttccaaaatagaattttctgaaaatacaacccgcagtcgtataattgtcattgttgtctgaaattactctagtgctgtgagcacagagttttaagaaaaaaacgtattggatgtcatattcatatgaaatctgtatgatgttcgtttcgaaaaagaaatatgtactatgtctcaccaaattggaatttgttgacaaagatgattccacagtgttgttgactttgtttctgcatgaagcacgagaaccgtaaaataatactatttggatgggaatttcaactgctggatggtggaagtaatatgtacaatgtcctatataagtgattttgacatgactaacgttaattaattgtgtcctttaatattaagaggaagcaaatagatttttaaaataatgggtccaccaatttaaatgaaaatcaatggtgagattataaaatgccacgtggcgatctaggagcgtttgtaggagcgccacatggcggtttaggagcgtttataagaagattaatggacttttagtatataactaggaaggtagccagcacattcacgtgggcatgtattgtacagaggattaaacttttcggtttagccaatttgatcgggtatctccaaaattttcgaaattttggtccgaaattttggacaaaatttagttgaatttgaacaaatattaccaaaattcatgaaaaaaaaatttcggcagaaataatatcgtatcggaggggtctgaaatgaccgaattttccgaccatgattgtacattgcgtttgaaatatatatataaacaaaatataaatcggctgacacctcccatgtttaaaagtacttttgttatttgaatacgacacatcaggtgaagcctacgctgttcttcggcattttgctttgataatttttccaagatgtttgttaggttttaaaaatatatcatatttaatacatctgtataaataattatctatgatctctttattaatatagaagagaagttcgatttagtttggtttggaaa

SEQ ID NO: 49415 - DNA, 607 bp, Oryza sativa
atagggcgaattcgagctcggtaccccgactccgtccaaatcgatgtttatcataaccttttgaaagatcgggaaccctagtgcacatcacaccctaattcgatgatgaagctggtgccctccacgctcaagctgtcattgtcctcaacgtcaaagggctggtgcggtctcttcctcgtcgtcttcggcaagtacgcgctcacggatcacgtcctcgctgacaactctcacctcaaccacgtggattgggcacagatggactgcgtcgtcctcggctagctataaggcacgatctccgccgacttgcttcaggaagtcatgttggccacggctacggctcgctctgtttggtgtgatctcacccatcaattcctcggcaaccaagaatgttgcaccatcaatgtcaacgccgaattccgcaacttctctcaaggcgagctctccgtcaccgactactgtcgttgcctcaagtccatggctgacacgcttagcgacctcagcaaacccgtctccgatggtgcactcattctccacctaatcaccgggcttaatccccgttttggcaacatgcattcacttttgtccatgtaaaaaccattcccatcgt

SEQ ID NO: 49416 - DNA, 932 bp, Oryza sativa
atgatgaaattgacggaactgctcgatagggcaacggaaagagattttagatgctaataaagcgaatgatgaactttcaatgctataaagccaaaaacgaaaacttttgttactataaatacaattttgccttaaaactttattgtacgtactttctatatctaaagtaatgaaagaaacaatctttctcgaaagcacattgggccacgtagtgttaaaaataatggccatcgaatgaatgcatcgagaatggatggccatccgatcattaacgacatacatgcggtagaaaaaaaaaacatgccgtatgcacttccctcccgagccttatagtgtctcctggcaagaataaaaagaccactgtatgtgaaagacaataagttatactagtttatgatgactataaccatcctgttattaatggtgtggatgaaatcttatctataatgtttagaatttgagtattagtttgtgcaaaaaatagaaatgctaatcaataacagaaaattttaaacagtttgctattgtaagatatacttgcaaggatgattttgtaggcagtggcatagtagaaccctttgtgtcattgaaatgaccatatgtgttattttgagcaaaggcatgatttaatgttgtcattgttcttacttttctttttaattcctacaatatgcatgtgtacagccctctggaaattctgcaacccaaaagccagaaccatgtcaaatgctccctcctgtgctcactcagacgatcttttaatccttgagttgcatgatcttcatgataacaactgaagttaacttacttttatgaagtaatttgttaatgtatataatattgtacgacttagtattataaattgcattttatcttattttttgttaaataaaaacacattatatgaaattacattcttgatgagtgctttt

SEQ ID NO: 49417 - DNA, 522 bp, Oryza sativa
agctcggtacccccacatgccccccaccacggcaccgggggcagctgggccatattcacccggtatttcttcccctacacctacgacatgacaagtgtacaggagaggagcagcattctcagcaagattttggactgtgtacgtccgtgtgcagtatatggtcctttctttatctccaaccaaagttagatgaagattacacgcttttcaaactactaaatggtgtgtttcgtgtaaaaaaactttctatatgaaagttgctctataatatcatattaatctatttttcaagtttgtgaaaattaaaactcaatcaatcatacgttaataccacatcgttttgcgtaaaaaacttaaaacctcattttcatttcatcttcatcttcaggagaaaagaacgtgcgatatgtgttcagatcagcctgttcacggtttgggctcaaaccgttcaacccgtgaaaccaaaccaacccaaaccgtttttccatttattcacgggctggtttgggaccagcttaaccc

SEQ ID NO: 49418 - DNA, 693 bp, Oryza sativa
cccgctatgccgtacgtgtcagcgcgtgacaatgccgcggaatcaaccggaagagacgctccgcatgcattggcggctagctttgcgaaggctatttgcagcttaaaatgtctttcagaattgcctagaccttactaattagtagtgtatcaaattaaaagtatgatgctaattgagagcgtctgttgagcggttaaaatggtggtgggaacgcgcaccgagccgggcgaggcgtggattctatctcccttgattttggctctccgccgttagacacctccattcatatggttgtaagctgcacttaggttctccccgatcctgagcacttgcgcacacaagtattcggacgagcaggtcttaactccatccaccagagtacctgcaagggcaggtggtgattaaatttttggggagcgcatccttcatgcgactgctctgcgtcaaactgacgctacttcatctacaccgagccatctctacttcctctgcatcaacctccggaccatgttgattagtaccggaaacagagacaatggcggcaatgaccactggggcgactacaccaacaccaccgtctctggattcagattattcttctgtacattacgcaccctttttattttagtgttaaacatgttactatgatgatattaatattattagcactatcattgaatcatctattacttt

SEQ ID NO: 49419 - DNA, 589 bp, Oryza sativa
tcgagctcggtaccctggaccaaatgatgtactttcagtaaacaacatgcagatgaaaaggaggaaaaggcttatactatgagagtctttgaatctgattttgaggcaaaagctgcccctgaatttgggaacaccctgccaaaatcaagtaataataatagcatgctaaatagtgaacagagctctgatccacctgctggaaacaatggtcctgttttgcaatgtactgctgaaaacttgatgcacgtgactgatgctgcaaatgctgatcaattaaagtctgagaacagctccccgctagtccctcagtcaacagagagtgaaattggagatgaaggtaccatttagaaactttgtttttttaatttacaacatatgcctctgttattactttctgaatatgtattgagccctgagcatggttaatatgatgcaggtaactcgcgagtggatcacaaagagtgtagaacaccacataataatgcaatagtcttggaagaagtgaatgtggataaaagctgcattattttagcttcagatggagctgattcttcgatagtcagcttcctggacaaagaagaaaatgcaa

SEQ ID NO: 49420 - DNA, 852 bp, Oryza sativa
tactttgaaatataaacatgtccttataaacttaattatcgtgaaattcattagttgtttgttcccatcggaggtcgatacagcgaaaaagaagggggagggctaatgggcgggtgatcgtccacagcaatcgcccccgtccctccctctaacacgcacgttactttctttccctactgcaccgtaaatttcccaaaaaaaactagttacaaaaaaataaaaaaaatagaaaaatctaatacccttaaaaatatattcatgtgcataaactttacacttataaatatataccgtaaacttcgtacgtataaacttttatgtatagaaatattctatatagaaaatatttaaatccaaatttaaatttgaatcgggtatataaacttttaacctataaattttaggtgcgtaaactttagatgcataaactttaggtacatcttatcttaactaattaaaagattcatattttccgatcgtcacctcgtccgtgcactttttcgtccgtcccccacccccaaaaaaaaaatcccagaacacaaatacgagtctgcatcaaatttggatccaaatcctagagaaaacacaactataagaacacaagaacaagaacaacattaacacaagaacacaagaagaaaaggggagggtgtgccaccgtcgcagggacgcatgaacgctggcccgccggcggcttccctcccactggatcctgtggaggggaggacgccgccgccgggccgccaatgcctcccctccccttccgccatatccgggatgccggaactggcacaccgggttgccgccgcctcctttcctgctggatccgacggaggggagggcaccgccgcc

SEQ ID NO: 49421 - DNA, 1423 bp, Oryza sativa
caaatattataacttacaaaggttgaaaatagttaggaacaggaaaaattgaaatatatagcaaccacatgcttcagacctatttagcaaaacaatatgctctagcatattccactttgaatgtcctgcttcacttgggctgcagagaagtgaaaaaagtatattaaaaactattaaaaggtggtttgaccataattaaacaaatcaaaaggctaaggcatggatcaacattaatccgttcatttgagtttagcttcagtggtgttttccaaagcttatagttaccatatcagcctacattaaacataatcatataacaagtcccacccctactatgtttaaatttcaagtagggaacaatgcaatgttcgacagtgccactaaattaagtgaagtgataccttcaaataaattagttcccgactgcaacaaacaaactcagcctaagtgtgttctcaagccaacacaaagcaccaaccataatataaaattctaagaataataaatacaatagttaaatccataaaagaaaagaaacatcaagcttgattaatagcaaccacggacacactacccagaaactgtatcaaaacaaagaaaaatacagcttcatacatactacagtaatacaatatcataagttttttgcaactaattaaaacatcaagatataaaatcactctgaccttgacaagagctgcatgcttgtcaaatagttaaagcttctgttgtctaaaaaaatgtttgtcaaacagtataatcacgactaaccactcgcatcattctaatcacccatcactctaatcattcgtggatgaaatttacatttgtggaatttaatttctgaatttaaaattttcttcatacaaaatattttagttccagtctatcaagatatggctacttctaaagatttgattcccatttgctcctataattttcggatatagaataattctagttatatatgattgtcagggttatggataccacatacctaatagtaattgactaaatatcggcaggacccaccacatatcatgtcttatacggaaacaaccttcggatataggaggagttccgcataaggaaggatgaatagagttctacatactatgcaaatatatcctagtaccaacgatccccattctatgcaaataccggaatcgcgacatcaaacatcgacaatgatgaaacctaaacctgactaaataagtagagcatgtttatcctggaaggacccatgtgatatttgtgaaaaaaatattgacttgcatttaattgtagcatcctgcatgcatgtgaagggaatatttcaccatcatccacagttgcagcctacattgaagaatgggaagtgctaaccaaaaaggaaaaaatgtttctcaaacgatgggaaatttttaccggttgcacctcataa

SEQ ID NO: 49422 - DNA, 1370 bp, Oryza sativa
atatatatcggtttcttataaaagattttccagtttttattaagaaccagtatatatagatatttatagggtcggtttttgagtttataaatacatttatatttgtatttttaatataaatatagatgtcggattttaaaaaatcatgatctactactcctagaaaaacaaaactcaatggactttttatttttgaaccattttaatgcacgaggagttttttatgtctcagcaagaagagaaacaaatctaccatctgaatagccgatacatataacaacataacaaacgatatgcataatctgcacaccattttgtacacctatcgaaaaagcattcatcgataacccataaaatgtttgaggcgattttcaatctcatcgactaggtgtgaacggagaaaacatgtgcaatcagaatctataaaatgcaatggatgcatggttctaagtgggttgatggtctggttaatgataggaaatgttaaataatatagctagggcacttggccctgtttttcctagactaatataatttgtgagcacacttttaaacaccttgatcggatacgatccatttgaatggttgtactctagctttacaattaaatcagaccaaccattagagaaccctcttaagcatagcatatactcctataaataggatatttatatatgttgatcagtatgttatataggagtatgaatagaatatggaaattctaatttatattaatgaaacagaggcatccgtttaggattaatgaatcagatttcatatgtgggctaaaaacgttttttcaattcctaactaatttcagttgttttttcatttacattattagttttagcactattttatccactaaaatttttttattgtaacttataattttctctatattagattatttatagctaaatttaaaaatgggattaaattacataactttattatcgttccggacaaagttatttatttgtagttgaaaaagtacgagttaccccctgaagtattgggtgagtatgaattacccccctaaacctgaaaaccagtcatttttcaccctcaactatcgatacggatgaaaacccccccagcagttttgtaagcggtttttgtctacgtggcagtccagtcagcaagttttttattaaataaaggatagggcccacctgtcatgacataatattctctctctctctttccctctcacccctctctctcctctctcccgttagatgccagcggttgcggctcgcgcgccggcggcagagcggcggggcgaagcagcggtggcagagcgggcggagtggcggtggccgaagcatgccggcaatagcggggcgggcagagaggaaggaggtgag

SEQ ID NO: 49423 - DNA, 1178 bp, Oryza sativa
gccccggccccaccactccccgccgctctcgcggccccgctcaccgcccgtccgcgcgtcgccgccgccacgacaggagggcacgggcgccgtcatgcccgccggccaccggccgcctctccaccacgtccgctgcgcccccaacccgcccgccgcttgccccggccccaccattccctgcagcgcccgtcgccgcgctcgccgcccgtttgcgtgccgctgccgtcgcgcactgcccgttgacgcacgcctgagagagaggagggggagggggaagactgaagagaggtaatgacaggtgggcccttgtgtgtgtgtgtttttttttgctgattggatttccacgtcgacggtacgtgtatgccacgtaggagcaaaaccgcttagtattgagtcgggggggggtgtaattcagccggtatcaatagtttgaggtgtaatatatccggttttatggttcggggggtaattcgtactgtcagaatagttcagggggtaaaacgtaatttttcctttgtagttcaatattgttgtttatacgtttatactttcttcatcatttatgcccaactatagaatatcctttaggattttaatttatgccaatgaatattatttagcactcgttgcaacgtacggatattatgctactaaacttaaaaaagataaactatatggagaaaaaaaaaagaagaaaatagtgggaaaaaatcgatcgccccatgcgagcgctaattagcgatctcgaaaagaagcgcacgcacacatatgccacgcattgacgcatggcacgggacattgacaactgatgccgtcccggagaccgggcgcgtcgatacagctaatacccgaccgcaacgtggcgcgctgacgctaaaaaaaggttgcgtgaaaacgggaacgcatttgctttcacagtggcgctacgctactgtacgcgcaatcccgttcccttcctattgataagataggaaggaatcgtcatcttcattagcgtcctcagtagtactccccaccatcaccgcagcacagcaagaggcgtagttgcgccagccattcccccttccattattcatcctccacctcagtacaactccggaattctccatccaaatctcaaccattccacctcgcgtagtcgcgccgcatctcgcatcggggaggggggagggagggga

SEQ ID NO: 49424 - DNA, 692 bp, Oryza sativa
agacatggtcgctaaggcttgatcatgctacatgtatttaatacaggatcagtgcctttttagttgaattaatgctgctttcacacttttctgtaaagaattagtaaacaagttttactattcaaatatgttaccatttctttttctgaaataggttttgtcctctgcgtgaatgagtggatcaagatccacactcacgcatgcacaatactgataataatggaattcctttaagcctcttgaatcttgtgaattatacttccgtccctgcttgcattgcttgcccttttttttttgtttatgtatttcatgaggcctcataactacttcaatcatccttccttttctgcccttttatattgctattctcaaacagtttgcatgttccagagtagactggtagcatgtgattataatgctttagtttagtatcttgtggagtcatggtttgagaaatgtttgattacctctactacttaaaaagtggagtttgtgttgtgattgtgtggtctatgcataacattgaaaatctatcttggatggatctatgttggtacatgtgtcatccatagtccataggatggtcaatggccagttgatgtggtttgaattatgtttgcagttttgaaggcatgaacataattgcttttccccatctctgtgtttataatttgttttatatttatttgaga

SEQ ID NO: 49425 - DNA, 675 bp, Oryza sativa
atttttagttgaagtttttggtaggggttagttgcgaaataatgtcacgcccggaatttctatccaaaattctaaacgcttacatgtgtgtgaaccctcgtccaggaatcagccgaggcacacaataacaaattgataatagagtacaattattattctaattaataagcgaataaaatgtcattacagaggtagatagttcctctcaaacaataaagatctaagcagcggaaaataagataaacggcgcagacggctccactccacaggcagcttgaccaaggctactcctaatcctccactccatcagcctcattggagaactcttcctctgatgaatgattgcaaggtgagtatatgacatactcagcaagccacgcagcaaatatgcaagtgcacaggataacaaaggatggcataatagggtttcatttgcaaaagcagcatttagcaaacatttcagaatttaacaaaacagttaagtaatttaacaatattaatccaacgctatacaacataccctgttgtataggcccaaccattctgaacaaccatcccggctgcacagttctatcttcaaaccaggaatgtaccattccataccaggagctatcaaattatttccaattatagcatcatttactatggtgagaagtgtgaaactaatcacgaaag

SEQ ID NO: 49426 - DNA, 549 bp, Oryza sativa
caaaccctaaccctttatactataaccctcttgtactcccttgcatttattctacacttgtgggtgtgtcttgttgagtacggtggttgtactcagtcttgctcaatttttcccaaacccagaagaggagcccctggaagatgaaggctttggtgtctagctcgtgcctgccgtcaagcgcctgtggtcgtcgccctagtcttccgccgtttcccgtttgtctttgtgtgtgctgggccttcgccgcccatgtaataaattaactatttacgcttccgcttgataaactctggaatgtatcaacttttggtgtaccttgcctcctgggacaaggaataatacacgcacgtaaggaacgcccgttgggttaattccggtcgtgacagctgtcaaaaatccccatcgtcagtgagttcggagatgtgtttccggaagaactacccggtgtgccgcccaaccgagagattgagttccggatagatctttctctaggaaccactcctctgtacaagcgactctaccatatggcagcaaatgaactggccgaag

SEQ ID NO: 49427 - DNA, 537 bp, Oryza sativa
attcttactcttcttgcctttggcgtgcttagtacgtgaccccacgtggtacgaaaggctaggaggaaagcaattcccgggattcaatggattctcttcattgggctctctgctttgcacactaggctgcaagcttgacttggtgcgaggaggctggtttagcgatgcctgccctgctaaaccaaaggaaggagcttctttggtatatacccatggacaattcagggcatagtgtccttgctctctacaatcctgacaaaaggggacatcctcttctggcattggaagctcattgacctgggtggcaaatgctcgatcaaacacatactgattttggtcttgacttcccaccaatggtagctgtgaaccaagcagcatgcttggaatggaccaagggtgtacccttgttaactctcttgaggctagtggtggatggagttgaaaacttgagttactggaggcatgcctgctgacattctttcctttttctctgttaaacatctgttacaaggattgaggtgagagaggaaacaagcc

SEQ ID NO: 49428 - DNA, 2267 bp, Oryza sativa
ccgaggagagaaaaaaaaaaggttttgggccgacttttgggcccaaagccaaaagaagactttttaaaacctttttcaattaaaattatttcttaaatgcaattccatttattaaaaatactttcttagctcaaataaatcccagaaaaatctaggaattatagaattaagcaaagtatttaaggaaattttatctgggcccattttatattggaatttattaattaaaaaattagatcttcttttcaagatttttaaaaataaattctagaaattccaattaaacaacaatttatatattttgaattttcagggtgtgacaaataagtttttgaaaagggtcaatttgtcaaaaaaacggggtagatgtgtgcggtgaattcggcgatgtataatatacatacgcatatatgcttactactccttccgtttcaggttataagatgttattgactttaatcaaagtcaaactaccacttgtggagaaaccccttttcctcccggttcgtaacccccctttagtccgtgttatccaaccgggactatgaatctgggactaaagattgatatctttcgtcccgggtgaaataaccgggactaatgatcggatcgatctaccaattttttttatttgcatggccctgttgcaaatacatattgctatatgtgtttataccacataatccatatagtcttgtttatgccatagccgatcagatagatctagcgtgtatcggctaatactccgataccactctatattaagatatcacagcaagtaaaatataccaaacgaaagcctaatatacttaaatgcatcaaaagatcttaacataaagggcggatttaacatgtcaataaggcatataagagaaatgtagttaaatcaggtaagatcggctgaaaccccgatactgccctaatcggcaatcaaaggcaggctagagattgagattctaatcatgactcataagatcaaactcaactgatgcagctataagtatgaaaagaagaaaaatatctaaataatcaagccgttggatgtgtcatagagtggtggatatcttatataatctaagccaatatcgatgtttaacctaatcggctgccttctactgacagatgttagccgattgtaagttagatagcgatattgccagagattatgtgagatatatgataactcgatgaattacataaacaagattagagtatcataaagatggaagcactaatcccgagaacgcaagccgccataataagttttacctcttgttgaagatcgaaactgatgcagctcaacccgaaagcaagaactcgtcgaaacaaaacgaaaataaaaagggtagcgatgcgccgagattgtattgaacgtgtgttagtttgattacatggggctcgggtctatttatacctgagaattacaaaatatgtccatatcggacacgacttttatctctaacaaactataagataccacaagtcttgcggcagacttttgcccaaacatatctccaaggaaattacataaaatatcctaattaatagatacaattgccttctcaggactctatccatgcgtggcaatcatcatgaagcacatcaacctaaaccgacaacatatgctatgtcatattgtcggattcggctcaatcggctaacctcgtccgactcgaactttgccgatcttaatcatagccgattcagacttcaaccgatcctcactctgtttccgggacgatttccatctcgaattccatcttggtttcttcttcatctccgatccttggattaccaaatttggttgttaacacatgccccccaagtccggaatattggataatgtttcggatttgccatacgtcaattccgagagaatctcgcgcttgccattttctgaccgttattcagcgctttaaatactaaccgttgtccccgagaaatctcacatcgtttcctccgttttcaccgtcgaagcaatgtcacgaccggaaatcacccaacgggcgttccttgcgtgcgtgtattgttccttgtcccaggaggcaaggtacaccaaaagttgatacaatacagagtttaacaagcggaagcgtaaatagataatttattacatgggcggcgaaggcccagcacacatgaagacaaacgaaaagacagcggaagactagggcgacgaccacaggcgcttgacggcaggcacgagctagacaccaaagccttcatcttccaggaactcctcttctgggtttgggaaaaattgagca

SEQ ID NO: 49429 - DNA, 735 bp, Oryza sativa
ttgattagctcctggtatggaatggtacattcctggtttggagatagaactgtgcagctgggatggttgttcagaatggttgggcctatacaacagggtatgttgtatagcgttggattaatattgttaaattacttaactgttttgttaaattctgaaatgtttgctaaatgctgcttttgcaaatgaaaccctattatgccatcctttgttatcctgtgcacttgcatatttgctacgtggcttgctgagtatgtcatatactcaccttgcaatcattcatcagaggaagagttctacaatgaggctgatggagtggaggattaggagtagccttggtcaagctgcctgtggagtggagccgtctgcgccgtttatcttattttccgctgcttagatctttattgtttgagaggaactatctacctctgtaatgacattttattcgcttattaattagagtaataattgtactctattatcaatttgttattgtgtgcctcggctgattcctggacgagggttcacacacatgtaagcgtttggaattttggatagaaattccgggcgtgacaagttggtatcagagcccccttgaccctaggttatgcccaatggttacccatagaagccctttaaaaatattggaaaaggaaaactgttctccttcctttctcttttaattaaacccaactaatggcgacatgcaattcataatcttttttaatgggtttt

SEQ ID NO: 49430 - DNA, 2318 bp, Oryza sativa
  unsure (1)..(2318): unsure at all n locations
acgggtggaaccgccggtcccaccctgtcggcgaaggaagaaaagaagggacgcaaaacagacttttgcaagcgggccaaggaagaagggacccggcccaaaaaggaagaaggcgcgcggnccgcgggaaagaaagaagggggaggaatttgggccgagcccgaaaggaaggaaggggaagtttattttgttttctttttatttaaattgattcaatgatctttgtgctattaaaactatttctcgagctccgaaaattcacggaaaattccggagagtacattagggcacaaagaatattacaaaatattcccggccattgatttttaagggaaaatttcaagttctcccattatttcacttgattaaattgatttatcttttatttaatttctagaaaatgtattattaatgatttttaatcccgaacgaaaatcggggcgttacaaatctaccccccttacaggaatctcgtcccgagattctgggatggctagaaagaaagctggtgctggtgggcggtttgactgatctgcacattgaactgccacattctgcttcgaactgattgattgactggttgatcaaacctgcacgattgaactggctggattcgacctttctgttcctttgctttgcgaaaactggaccgactggttctgcatgaactgacctagactagaactgtggctgctcacgaaacttacttatcttgatctgaactgttgatactggcagtttgataacctgacaattcaccaggctggctagagaagggtgaagttgttcctaagacttgcatctggcatttgtaactcattgatcctacgtccgcttgaacgggtcctggctcgaatgacacgtaattccaggaaacctgcttgacctgtcttttgtctgaactgcaaccgtccctgatgctgcctctcaaatctaagctattgacctggcctcaccggtgtacctcagaattcaatcagatttcttgagatcggtgtaactctgctgacaccttgcaactggcttcttcaagtactacccggattgttgcactgggttgaaccttcaactaaaacagcgatgaggtgagccaaaactcatctccgagacctaccccccttacagtgggtagtcttactttctcctgactgagaacctttgaactgttgtccttgaaaaataaccaacacttctctgatttgccaagagccctgactttgaaaactgaaaacttcatcggtccatcaaattgaagcaatggcgatgcactttcaccccgacaagatttggaacttaacccttagttgatgataggaaattccacataaaagtgactctcatttagctcatgaacacactgactcttgactaactttcccataagttctaactactggcatgactgtcctgcttctatcttgacttcggtgtcgagtttcaaaaactgaactaaccgactctgcattggaactgacacaactcgaggagttggggtgtcgctaacaaagctcttgatgtgatgacgctgacgccttactgtggaacaaccctctgagaggtgccctgtcatacatcttccatggatagttggacactttgcaaaaactgcgcttgaaaaccataaccacaataggtagcatatattactcctgggattggtggtggcttagctgtgctgatttgctgaggacttggtggcgtactatctgaggttgcgggtgcttcctctttgaaaacaaactgactatcgctctgatcctgattccggcttgcatctgagcttgtacttgttgttggagacactgttgttgcatctgttgcatcggactttgcatctcccgcatcaatacatccatcatctaatcttggacaccaaatgttgatcacgagcagggttcttctggcactgggataccttgtagctttcaactgaaccattgattggtgactttaatacaccgtcgttgctcttctctctaacactgactatcttctgccagggcggaagagaggaggaagagaggggttgctaaagataaggtactaagccacttgcctactgatctgttgggagtagatttttatttttcaagttgcttaagcaaacaacctagtatggtcgcatccccaccaatgatgcaaaccatacccctacacacaagcaaacaacacacgatctagaagctaacgaaactactcttcagggaaggattgggtttaggtcatctccgggaaaactccacttgatcttcgcggaacgacgactccgggctgaacttttgctcctactgcacgaagcttgaggcttgaattgactt

SEQ ID NO: 49431 - DNA, 1139 bp, Oryza sativa
cccaaggattgccaactcagtgtgttgttgaccaagaccgcagaaatccaacgaacaaccctacgattgtctcatcagctagtcagctccaacagcaacctcgacgatatcatccacagcaccaatgctcctcctgctgcacctgactctgcaataaatcatagcaataataccttcagcaccaaccattctctgcactgacagcctcagcaatgaattgtcgtcgatggaagaagttgtttctctccccgacctactccaggccgagcgaagggaaatcaacctcaggagggtgataccaagcagaagaccattatccacttcaaccagcaatcagaaggaatttttctcctgtgaatgatagcaatatgcagtcctatcacatcatcacagaaccaatcaaggatgatgcagtaactaggacaatgccatctatatctctccagaatcagaatgagtaaccatgtttgtgattttcagttcgctacttatcactgtaatcgaaagtttgcagcaatcatgtaataaataaatatattcatgtctagaaacagtgagcttgctatgtttatggatgattcatgttgaggatgcaatgtaccgatgttaagcaccttccctttttgtttaaggcagtgcctcgtattcatgtaatatgggagaaaggtgtaataaaaacaagttctatgaggactctttcagaagatgtcgatatgagattatgtgtataattgtttactgtcaaaggagacctagggtctcatttcagaggaaccatgttctaacctcgagctaataaccaacctgaggatggaaaagaaaatcaagtgattaaccaaagagacatttgtttggactaagagtttcagacgtgtctttttcggatcaaaggcaatgacagtcagtatagcttttggcgaaacacttcaaggtttcactgaaaggtagcagaccaaagtaccacatcgtcaccagaagcatccacaactctcggagtgaagagtacttagtgacaaaggtcaaaagatgactgataggaggtatcgaaaaagatgtttattaccaggcaaagaagtaggtcgaaaggtgattgataagagaaatcgggaaagaacacatcaaggtcaaaggtgtaaagg

SEQ ID NO: 49432 - DNA, 688 bp, Oryza sativa
tgtgaatcaaaacaagattaaggcaatgtattgtttatagatatcaagtgagaaattgtcaaaaataacatttctgatggagaaattctacgatacatggataatcaatatgtatcagatagagtaaattccctatgtacccatgaaaactcacttaatccctttcatacccctgaaatttacccgatccattctatgcccctgaaattttagcttgatctcttccatgcccctgctgttacattttccttcttttcattgttatgtttggttgcaaatgtctgttgtgcccttgatgattaatttagatttgaatataagcttgaaaaacgattaaagtttttgtttgagtgcacagtatgtgaattttatgaaactaatgagactatattattagagcaaaaaattttgaaaataaaacaaatgttataaattaaaaattgtgtttgaaattttaataggataatggattttttttgatcgggagtattcataaaaacaatatcgtgagcattggtagtcatatctctgtatgaatgctcctcattttttatgttttttttaaaaataaataaataaatattttttatttcattatctaaaaataaattgtcataaataatgtatcgcacagtaaactcataactatagtaatctcatgtggcaaacatttacatttttaataatg

SEQ ID NO: 49433 - DNA, 978 bp, Oryza sativa
caagctaccacagcaacgatgcatatgatagaaggtattttaaggaatggcttcaggttcctttgcgcaaagcaagttttgcaaatcttttcacaagcctaagaccttgcatagactgatcaaattttaataccagtgttcacattaaacaacgacggttctgtccaccatccattgtgatcccaaggatatcttcccgccattgagtcgtcatggttttctgaggtcgtccaccttccctcctctcaggaagtagctccaacagcataaaaatcatcatgcaatatcccatcccacacaagttaagaatttagagtctagccaagtgtaatacacgtcccggtgctcaataaccgtgagcacggctatttgaatagatttggtttactcacactgtagtggatgtacactttacccatgctcggtgactgcccaacacatgagcctcgtcccaacacatgagacgcgtcacgacaaagcttttcgataacctcgcattggcagtacccactccatgaactttacatcctcatgcactctaggcgtacacggtttctagcagtgagaggagttctggcgcacccgggaaggaaagactcatacatgcattaagttataattatgtttaaattctcacatggcagtcctaccgatggcgacaccactgtagacacccgcctcgcggttctaccaatggcagccccaccgtagagcccctgcctcacacatcaagaaaccactatgcatggataatgcctccgctcagctatctactccgctaggtctatacccatacgagaagtgcggttgtacgggggtcgtttcatgcttaacttcatagctcggtccttaactgaccagggacggcactagccttttccggacaccacccaaatcctccagccgccccagtcgaaaacaattgtttcactttattttcctttcacaaatcatgtcatcaatatcatggcaatgtgg

SEQ ID NO: 49434 - DNA, 1271 bp, Oryza sativa
cccactccatgaactttacatcctcatgcactctaggcgtacacggtttctagcagtgagaggagttctggcgcacccgggaaggaaagactcatacatgcattaagttataattatgtttaaattctcacatggcagtcctaccgatggcgacaccactgtagacacccgcctcgcggttctaccaatggcagccccaccgtagagcccctgcctcacacatcaagaaaccactatgcatggataatgcctccgctcagctatctactccgctaggtctatacccatacgagaagtgcggttgtacgggggtcgtttcatgcttaacttcatagctcggtccttaactgaccagggacggcactagccttttccggacaccacccaaatcctccagccgccccagtcgaaaacaattgtttcactttattttcctttcacaaatcatgtcatcaatatcatggcaatgtggcgctcatgtctccacatgccgcatttcaattaccttcccaaaggtaattgcccaagcatatagcatttgataaatatgagtatgcatgattctagaatagcatttctaagcaattgtcataattgactagggactcatatgtaatcatggttacaaagatttaagggtaaacaataatcaaggcatggtataatcacaactgggatgttcatcattgcatgcaattttatttgtaaacaaagtgatttcgcaattgggatcaacatgttcaaggaatagtgatgacttgcctgctcaggataatccttattattgatataatcttgatcaaccttcacctcctggatgttgcagacgttgcctcacgactaaccggtacacagattctataatacgcgagaaaaaccaatattcagacaacaaccaaatatgcacaaacagaatgtaattgttggggtcgaacctagggttgctcctattactcgcgcttgctaatggattccaatcatgctagaggctaaggcttcttaatctttctatcgtcatcatggtctatttaggagttaaccaatagtgtataaatgagatatacatctagctaatgtgtggtttagtctagctaatgactatggaaggattatggctacacatgcatttatctaaataaagtggtcatatactagaggttctcttatcggatggatttaggatcaatcaaattattacagtgaatcatttgtatcattattttattgatggaggttttactttaattatgaacatatttttcttgtcacaa

SEQ ID NO: 49435 - DNA, 1513 bp, Oryza sativa
tacacatgcatttatctaaataaagtggtcatatactagaggttctcttatcggatggatttaggatcaatcaaattattacagtgaatcatttgtatcattattttattgatggaggttttactttaattatgaacatatttttcttgtcacaacgaattatgaaaggataataattatccatgctttgaatgttagagttgtttaggttaatcatattatggttacagattatcccttaatgaacaatcctaatttacagttgaactataattataattatatgaggtcaagatttataactagtatttatctaatatacatgtttgtcatatactccctctaatttaatatatgcaacacgcaaattataatactataccgtacagctataatgggatgtatagtatatgtgtaagcaacaatatcttaatattgaatcatttatttgaatagctgctatttactttaagctacatagtacatgtgattttaagtggatttattagtgagttactgcctatacaacttaagggtcgatttccaacctaaacatatactagtgtataggaaatgtcgttaattaatttcatattggtgatttaatcatacaagctctgctattatctctcataaacaagttaaagactcatcaacgtgtgttcatattttagtcacaaaatctgaggctaaactttatgtaaataatttataagtcatggatttagttatatttggacatagaccaataaatggcactaatattttcctatacacccattaatttgaaggatttattataactactttatgtggttgctacagtgacaaaacatattaaagataattatactactgtacaatatccatttttatttattagcacactatttaggttaactattatctaatcatttgatattaattaattaataattataaatatattttattaaatagtgaattatatacaattggaaagcttatgaatttagatgaatttaggttcaagtttcactcaaatccgagttaaaatgaataagttatgctagtgtaaagattcaaatttgaattaatccgagaaattgcgaaaagctactgtttataaacgatttatttttaatacaagacatatccacagccttgtaccaactgacaagtgggaccccgagtttattcctttttcctaccgaattatttttcaatgcaaaattgcacaggtgggcccggcctatcagtggctcgaatggaggtcgtcttcaacctccagccgggcagaggcagccgcgccatgcgcgctgggcgcagccgggatggcacgaggccggcacggcggcggccggggaaggtgcgacaaggttccggcgacctcccaccaccgtcagcgacgtgcggcggagcgagggcgagcggcgcagcatggccaccatggctgagctcgggttacaagtggctaggtcaaaagagagggtttctgaccaatttgatgggagcatgagcatctacggcgcat

SEQ ID NO: 49436 - DNA, 877 bp, Oryza sativa
ggcgccttttcccgctctccccgcgcgcgccccagctccgccgctcctcggcgaactccagccgcgccgcgccgccgctctcgttcaccccgcactgcgccgtcgccctccccggcatcgcagccgccgtgcgcaccccgtccaccgctccatttcccctctccaccttcgaagcgccgcagccacgcgcaccacccctttccgccgccgccgccggctccagccgcctcttctcgcagcttcagccaccgccgtgccgtgccgtcgccaccgtcggcatcgccgcgccgagctccaccccgtcctacacctcttttccccaaatctcccaccaaaattccacctccgctgtccacccgagccacctcaactataccgcctccagccgccgcctctcgccgctctagccgtcgtcgcgcagcgtcgccgcgctccaccgcaccctggctgccactccactccgtccagaaccccacgggagccgcttttccaaagtcaaggtcttgccggccctcggccgcggctccgttgtggccgggcgtcgtcggaacgttgttcccgtcgcctcccatcccagccgccgccatcctttccgccgccggtcgtcgccgaggccgcccgcgccgtcttcccgagaaggcgtcaccgccgcccgttgtcgtcgtcgtccttcccgcgtcggtgagcatctccctccgcctcccctccctttctttttctctctttgcccgccggccgccgcatgcgtgtcgccgtcgcgccgcgccgcgccgccgccggtgtcgccgccggtggccgtccggctgcgcgccgccgtctggtcgggttggtcggcgagccaacccacccctccgccttgcacctctaccgtggactc

SEQ ID NO: 49437 - DNA, 929 bp, Oryza sativa
gcttttgtttcggtgtgagaactaagtgccttttctgtaagtatttacgcttttattgacgttcgggactgtaaattacttgtcgttttgtggaccctgggtggtcctggacagggatttaatacacaaaatagtttggaaatttgggctaaatttctgggcgtgacaaagtggtatcagagccaacttgactgtaggttgagccaaatggtcaaaccgtaaggacaagttttttgaaaatcctatttgcgaagtgtctcctctcgcccttcggcatttctttgcgaaacagtttattaaaatttttcctccctgtccctccaactcttttagttgtcaaacatggaggagaaaccgccagcttcatgtctgttcggaagtcaattcaagcctcaagcttcgtgcagtaggagcaagaagttcagcccggagtcgtcgttccgcgaagatcaagtggagttttcccggagatgacctaaacccaatccttccctgaagagtagtttcgttagcttctagatcgtgtgttgtttgcttgtgtgtaggggtatggtttgcatcattggtggggatgcgaccatactaggttgtttgcttaagcaacttgaaaaataaaaatctactcacaacagatcagtaggcaagtggcttagtaccttatctttagcaacccctctcttcctcctctcttccgccctggcagaagatagtcagtgttagagagaagagcaacgacggtgtattaaagtcaccaatcaatggttcagttgaaagctacaaggtatcccagtgccagaagaaccctgctcgtgatcaacatttggtgtccaagattagatgatggatgtattgatgcgggagatgcaaagtccgatgcaacagatgcaacaacagtgtctccaacaacaagtacaagctcagatgcaagc

SEQ ID NO: 49438 - DNA, 746 bp, Oryza sativa
ttcgaatagccgtgcccgcggttatgggcgggtcgaacaatgtctttcgtgattagtttcacacttctcaccatagtaaatgatgctataattggaaataatttgattagctcctggtatggaatggtacattcctggtttggagatagaactgtgcagctgggatggttgttcagaatggttgggcctatacaacagggtatgttgtatagcgttggattaatattgttaaattacttaactgttttgttaaattctgaaatgtttgctaaatgctgcttttgcaaatgaaaccctattatgccatcctttgttatcctgtgcacttgcatatttgctacgtggcttgctgagtatgtcatatactcaccttgcaatcattcatcagaggaagagttctacaatgaggctgatggagtggaggattaggagtagccttggtcaagctgcctgtggagtggagccgtctgcgccgtttatcttattttccgctgcttagatctttattgtttgagaggaactatctacctctgtaatgacattttattcgcttattaattagagtaataattgtactctattatcaatttgttattgtgtgcctcggctgattcctggacgagggttcacacacatgtaagcgtttggaattttggatagaaattccgggcgtgacaagttggtatcagagcccccttgaccctaggttatgccaaatggttacccatagaagccctctaaaaata

SEQ ID NO: 49439 - DNA, 1080 bp, Oryza sativa
cgggtgggccccacccgtcagcgagggtggcgggcggcccctcccgtcagcggcgcgtgcgcgggaaggagaccgaatggcccgcggggaagagaagagagaggaagagagatgggccgagccggcccaagagggggaggggttgaaaaaaagactttttagggcttctctttttataaaacctttttaactttgtttatttcttaataattattatttgtgctctgaaaattccactaaaatttatttacgcattttaggcttttatgaaatatacaaaaatcctccaagccatatttgacttttaactttgcacattttaattgttggaggctttcacatggattttaattattctaggcataatttcgaggatgtattttagagtcgttttgggacgcgacaccgaacccagcctaaaaccattttgagggttttgaatagaggggaaggtgtgcatccaattccacaataatccaatcattccataatatccaagtgatatgaatattcccaaagtctagagttataaaaccacctaatgttgcctaattaaacagcgaagcatctacctaaattcatactagtggaaccacgaatagagtacccactagttggggttttgtttattctagggtgaacaaggtaataataaaaataacaataataataaggtcataacaaaggtaaataggcatggctaaataaaacagtgataacgcgggaatttaaataaagcgataatgcaataatttagatcaaaataattttataaactaggattcaatatgttcaaggatgatgtgagttgccttgctcactttcccaaacgtcggcttcaacctccacgaagagcggatcttccgaagctgcagcgtctacacgaccaacggaaaagaaaaaggcttttactctaataaactccatataacaagtaggaacaaagcacaaaaatgggttcttgacttcttaaggaaaaattagagacttgaacggtccaattccgagttcaattggccaagttatggccatttgaagtttatatgctctttaaataaatatttaagaatttcttcattt

SEQ ID NO: 49440 - DNA, 686 bp, Oryza sativa
ctagagaaagatctatccggaactcaatctctcggttgggcggcacaccgggtagttcttccggaaacacatctccgaactcactgacgatggggatttttgacagctgtcacgaccggaattaacccaacgggcgttccttacgtgcgtgtattattccttgtcccaggaggcaaggtacaccaaaagttgatacattccagagtttatcaagcggaagcgtaaatagttaatttattacatgggcggcgaaggcccagcacacacaaagacaaacgggaaacggcggaagactagggcgacgaccacaggcgcttgacggcaggcacgagctagacaccaaagccttcatcttccaggggctcctcttctgggtttgggaaaaattgagcaagactgagtacaaccaccgtactcaacaagacacacccacaagtgtagaataaatgcaagggagtacaagagggttatagtataaagggttagggtttgcagtaaacagcattacaagacacttagttgctcaaagctattttgtaaatatgattctagagctatacatattattaatcaaggccgtgaacccacacgagcctgccttaacccaagggctacgatgatttagatcgaactggcaactcgaccctgggtcccagctcgtcccaagccaacccaggccaaccatt

SEQ ID NO: 49441 - DNA, 585 bp, Oryza sativa
cgacgctgctcgcccactgcacccacagctcgattcgactcctcgccgaatagtttgagaatggaaggggttcagcgagagagagagaagtgttgggagagagactcattgcgttgagattcccacataacacgtgccacgctagtaacgaagtccttttgacttggtaaaggacttgggtcttgtgtaattttcttccctggtcgtggccttgacctcctggcctaacgcccatgacagaggatcagtagcttcattgttactacctccagatggtattatttgatgctttggacaaagaaaatggcttgagtttgataggttttggctgtcgaaacatcgagttatctttaccggagggagtaataattgataactaaggttttaagtctaataaaaatattatatgtgatcattgatttttcaaatcatatctacataaaaatattgtaagaatgtaatgtatgtaaggttttttttataacaaatctacaattgatatttttgacatataaaatcctagtacttttgcatatattattgaattgaagctgaccacatgcattctaggatgtgatctatttg

SEQ ID NO: 49442 - DNA, 844 bp, Oryza sativa
ctgtatagtatatcgcaataaggccggtgcttacagaaggcactgtgtgcataacattgttttgttgctcaatcggaatattttgaagtattgcttgggtccggtcgtccggagactccggatatgttcacctgtttgaggtttcaccgttttggttggttcgtctcagctctccttcagactactgtaagttctcgacaaatgttcactgatataaaaaccaaatacacaacccccctaggccaagcggttcatgccttcatggtttctgtgaatcatatgacgcagatatcctcatcccattgcaaaatatatttttttagtgaaaattaacaaactagaaaaaccaaattgaaaaactataccctacaaaacacgtattctttagatcccgttgcaatgcattccaagggcatagccacatcgcactatattcaaatattagtgttctacgataacaaacaatgcggggatttagttttttgttttgttaactaaatctatgatagctgaacggtcaatgcggttgccttttttttttctggcctttttttttctgtattgaaaactcatgtactacctccgtttcatattataaaactttctagcattgcccacattcatatagatgtcaataaatctagacacatatacatgtttaaattcattgacatatatataaatatgaacaatgctagaaaatcttataatatgagacggaggaagtatttatctatgctttctatataagtgagaccacaaacaggcactacgtctagtgacatcatcaaaatagttttaactgttggatcgacaagtttttcaggattaaccgttagacaaa

SEQ ID NO: 49443 - DNA, 1161 bp, Oryza sativa
catgcaaataccgtagtcatgacttaaaacgtcgacaacatcaaaccagtagcaacaaccccaccggagatgatttgaaagaacggcgccacttcatcgttgtggaggaagaagagttcccaccacaaggcaaatctgtttgacatgtggatccaaacaccagtacaaacctccatagcaaccctgcgaacagcacaaagctccgtttaacttctttcgagttgtatacaaaaggggaagaagaaaacctagaacgagataaactcgatatataggctgcgttctttcccacccccaacagtgctcacggaaaacggagcgatccattagcacatgattaattaagtatctgctattttttttaaaaaaaatggactaatatgatttttttaagtaactttcgtatagaaactttttacaaaaaaatacaccgtttagtagtttgaaaagcgtgctaacggaaaacgaggagtaatagcctgaaaagaacgcagccataatgggtataaacccgatagcacttggcaaaccgtgacataatataatgcatgtagctctaggccaaccacgtcataaaaatgataccaaattacacctgacttctatggagaaaaaaccagttttagagaagtcatgaaagcatgctattggccagttttaaaaattactgtgcatagcaatgaattttaataaaaaagttcttttttgcagcgagcaaaggaattttgaaggtattaggttaacacagtgcatatatcacaaaaatgagtatgcttaagtccctataagacatacagctccaccacacctgaaaacttaagcgtgtagcatgcattttaatctactctcgagtgacaaatctcccggatggtgtagactaagtgcatcttatccgagtggcttctgatccaagtggttatttcttgtgggatataccgaagtaaatgtgataattgaatactgactagtgcaaatactcggctagtgaccctcgtggggcataacaattgattgaaagcttgagtgtaggagataggctcatggccatgaattcctattggcagtagtagaggaaacatatggcaaagacgaggtcactcataaacagtagcggtgtcggccaaccatgagggcaaagctatctgttggcggtgacgtaag

SEQ ID NO: 49444 - DNA, 589 bp, Oryza sativa
aaacaagcctactaccatacgagtatatatggatccatcctctttacaaaattatgctcactaaacaggagtaatgtgatgtttggatccagtactaagggtgtgtttagttaacgttaaaattaaaagtttggttgaaattggaaaaatgcgacggaaaaattgaaagtttatgtgtgtaggaaagttttaatgtgatgaaaaagttggaagtttgaagaaaaattttggaactaaactcagcctaaaatttaaattttaaaatttaaattttaagttcctgtcacatcgaatttcagatctttttccttccctatctgctctacttctatttattttcactgtctatatctagatatttgacctcaaatgcaattgataaatggaaaaaatattttctctaatataattttgaattttaatttaatttttaaaacataagtttaaagttttctttatgtagtttggttttcagcattgttttttaattcactaagaacacatatataaatgttttatctgtaaaatatattttgatcgctaataaatcattatagctataatcaaatttgggctcccaatgaggaca

SEQ ID NO: 49445 - DNA, 609 bp, Oryza sativa
ttagggcctgtttagattccacccgaaattttacaccctgtcacatcgaacgtttgaacacctgcatgaagtattagatataggctaacaagaactaattacacagattgtgactactttggagacgaatcttttaagcataatttttccatgatttgataatatggtgctatagtaaacatgtgtcaataatggattaattaggcttaataaatttgtctcacggtttactgacggatactataattagatttttttattagtacccgaacaccccataaaacacctatataatacccgatatgacacgccaaaactttacaaccctatatctaaaaaccccttaatggttgattgcaagaaacaggtcaattagctaggtagcgattccaacgtcatcacacaagctaattaattaaatgattcatgcatgcatgtacgtacagaggtggcctgacatttggtcgggtagatgtgccgtttttttttgacaaattgaaccttttcaaaaacttatttcgaaactaacccctaccaaaaacttcaaccaaaaataggccgttcgctcagcgccatgcgcattgggtaccgagctcgaattcgcctata

SEQ ID NO: 49446 - DNA, 688 bp, Oryza sativa
cattttagaccaaggagaatttaacaaaaattctccgggccacatttgaatttttcttgcacgtattttagtgtttgccaatttcttttcgaattttaattaattctattattccttttaggaaaacgaattttaattcggaatggatttatcaggacgtgacaaatccacccccctttcaggaatctcgtccccgagattcgaggaggctagcaagaagataggttgggcggtcttctcttcttgtctgacttcttccgtcgcgtcttttataacaaacttgcctagcaaaacttctccactctggactgcttggctcgatctcctattgcagatggaatcttctcttcacctgacttgtccctggttgaacctttagctgacttcgactgggttgcggcacttgaagatggggcttcggttccagaactttgcatagttcatatctttggagtcaacctcatacaagttacccacttcacgttatgcgtcgatatcagcttgtcattactaggataccatgctcgttatcatgagaatatcatgcttgtcatttacttctaacttaccactattcacttcatgttgtcctcagttagcattcaacgtattcctttacacctttgaccttgatgtgttctttcccgatttctcttatcaatcacctttcgacctacttctttgcctg

SEQ ID NO: 49447 - DNA, 655 bp, Oryza sativa
cgtcatcggggtcgtccgccgtgagccggtcgtggaccgttcgatctcaaccgtccgttttggattggatcgatctcggccgtccgttcgcgtgaaccgccgcccgtgcgcccggtccaccaaaaccctagccgctgacgcaataaaccctcttttccttttcaaaaataattcattattgcgtcataattcaattttaaccgatttaagtgttttaatccgattaaatctttaaaaattcataactatttcatcttagctccgatttagttggttcaagtctctaaatttttctaaaattgagatctacacattaaaaatatccacatgtactgttcatgcttgtttatgtgctgttttggtgattttgctcttttctgcttagattccgtcgtttccggagagtccgttttcgccggagaagagtttgaagagttccaaggccagcaaggcaagtcacacagatcccaaacaaccctttgagcatgttgatcctatttaaagctattgtttcttttcaactattgcatttattttcgaatgtcattgggtggaattaacctattgattgttatagcccttttgttcttgattactttattccttgataccttgggttataataatttgactagttgagctttatttatattgg

SEQ ID NO: 49448 - DNA, 574 bp, Oryza sativa
gatggcgaaagccaccgagtccgcaaaaaggcatgccaaactctccgccttgccctttccgacatgggtgcgagggtgcgaggagtccctgccaaagatgcctctatctttgacttttcggagtggacgcaataggccggtggtgcggtttcggactacgccactgcgtacggtgattcctgtgcacatgtatcggcggcgttcactatgggccttctacagtagtttggctgtgagcatgtcgccgagttccctaactatgcgaagggggactgggaggttagtgcacaggacgtttcgcctacgctccatgcgtggcagaagcagttctggcagaaggatggccgatccactgctaaggcgcgccttttggagcaactggcgaaggccgaggcggcagaccaaggcgaaggcaaggatgcggcagaaggagggggtggaggcgatgcccaggatcacccagagttgtgaggccctccgccctttccttagatttttgtagtttttcttcttgcgtttgccgtgaaaggcgaacaatgtatatttggctgatggccccttacccttcttattg

SEQ ID NO: 49449 - DNA, 904 bp, Oryza sativa
ttagttaggaattgaaaaaacgtttttagcccacatatgaaatctgattcattaatcctaaacggatgcctctgtttcattaatataaattagaatttccatattctattcatactcctatataacatactgatcaacatatataaatatcctatttataggagtatatgctatgcttaagagggttctctaatggttggtctgatttaattgtaaagctagagtacaaccattcaaatggatcgtatccgatcaaggtgtttaaaagtgtgctcacaaattatattagtctaggaaaaacagggccaagtgccctagctatattatttaacatttcctatcattaaccagaccatcaacccacttagaaccatgcatccattgcattttatagattctgattgcacatgttttctccgttcacacctagtcgatgagattgaaaaatcgcctcaaacattttatgggttatcgatgaatgctttttcgataggtgtacaaaatggtgtgcagattatgcatatcgtttgttatgttgttatatgtatcggctattcagatggtagatttgtttctcttcttgctgagacataaaaaactcctcgtgcattaaaatggttcaaaaataaaaagtccattgagttttgtttttctaggagtagtagatcatgattttttaaaatccgacatctatatttatattaaaaatacaaatataaatgtatttataaactcaaaaaccgaccctataaatatctatatatactggttcttaataaaaactggaaaatcttttataagaaaccgatatatatagtaagttatgagtgtttttttaaataaacgctcatcaaccgagaaaggacgcgaatcgtctgacatatatatatatatatatatatat

SEQ ID NO: 49450 - DNA, 2214 bp, Oryza sativa
tatatttatatatatatatatatatatatatatatatatatataaaagaagagttgtacctctccaattctacatgccaaatcaccgatcaatatatatatatatatataaaagaagagttgtacctctccaattctacatgccaaatcaccgatcaatccctaccgtccatccgcatcgctatgatccctccgcatcgctataatccgtaccgtccatccgcatcgctctgatccctaccgtccaccgcgatttcaccctacccacagcaactctatcctatcgagagctgagtcttcgccgttcgatcccccttcctgccactccctgacccgccaccgccgccgcgtcctactcctccccacccacaaccgctgcatcacctcctcccaccaccttcgcgtcctcctcctccccatcgccgccacgtcctcctcccacccaccaccggcatgtccgccgcgtcctcctcccatccaccaccgctgccactgacggagccaaggtcgtccctagccgccgccgctgattcgccacgcatcaactccaccatcgacacccctgtgctcagtcctcaaccgtggtctccgctcgatgcacaagcagctgacttccgcgcccaatgccggacggccgtgctgcccaatctcgcacggatgcggcctcactggctctcgatgccccctgagcactaccgtcgtcgaggacgccactatgggccgctccactgccaaggccaagcggatctggtcacttcaccaccaaggctgccaaccccgagcccttccaccgtgagtccgcagcctgcttgattattgttgccgttgcctgggtccctcaccgccagggctgcaggcttcagcacactccaccgtgtggtcgctgttgcgtgcctctccgcgtcccatttggcggacagccttgagccttgttgatcaccagagacgttctccaaccctaggtatttaccctagcgatctcttgggttagtgccaattttgattgcaaatctactgcaaatgaatgtgccatgatgttgctcgcagttgtcatcgccaacagctggccatggtggaaactactgacacagtcctggcgcgcctaatgcatcttgctctgaacaagaaggaattcaccaaagagggcaaggagctggcaagcagcaataggcatgattgaaccaaacttaaatatgcataaatcaaggtgattctcatcttccaaatctttcccttaatttttcccctagggattagagattccaaatcgatattaacctgcatacagtaagaattatgagcaatttacagaagaggggaggatatcaggtagttataatttagaacagtttatatgtgcatttctgaatatatattctttgcttgctttttttccaatctgcgtccctctgtaacgggtgatgatctttgtgtttttcttatggacacatgattggtattttctgttgttggtgcagatgggtgagcaaacatggatggcgatgatatcctgacattcaaatgtgaatcaaccaacaaaggtcaccactatattgcattacatatgagtattatataagtgctctcttgccatccttagttcaactaaacattttcattttagcgttgttcaactttgacatttctataattttttaattcgtatgagatgatgccatattttatatgaaatgcacgactagctggcaatgctacaaagtaattgtctttgtaacttgtaagaattcgtatgctgtccaaagaaattagctgcagtgatgtgccccagttgttctcaaacccacaaccttaagggaataatttcatattttcataaaaagaatcattctgaaattttctcaagttttatttttactgcttgcagacagtgagttgacaccatccataggtgaaccaaacggtagcatgcaaggagtccctgttggcaatggtcaaatgcatctaacgccaaatggtgaatatatacaccaacgttatgaggtgcaaccggtaaaaatttcccatcgtttgagaaacattttttcctttttggttagcacttcccattcttcaatgtaagctgcaactgtggatgatggtgaaatattcccttcacatgcatgcaggatgctacaattaaatgcaagtcaatatttttttcacaaatatcacatgggtccttccaggataaacatgctctacttatttagtcagg

SEQ ID NO: 49451 - DNA, 1567 bp, Oryza sativa
ttttatattatggttggtgctttgtgttggcttgagaacacacttaggctgagtttgtttgttgcagtcggaactaatttatttgaaggtatcacttcacttaatttagtggcactgtcgaacattgcattgttccctacttgaaatttaaacatagtaggggtgggacttgttatatgattatgtttaatgtaggctgatatggtaactataagctttggaaaacaccactgaagctaaactcaaatgaacggattaatgttgatccatgccttagccttttgatttgtttaattatggtcaaaccaccttttaatagtttttaatatacttttttcacttctctgcagcccaagtgaagcaggacattcaaagtggaatatgctagagcatattgttttgctaaataggtctgaagcatgtggttgctatatatttcaatttttcctgttcctaactattttcaacctttgtaagttataatatttgtagatatctaagtaagttccttaattatggatttttcaaattgatgtttgacatgggtcccatttatatgaattggcgttcaagttcaagaagcatttgtagatatctaagtaagttccttaattatggatttttcaaattgatgtttgacatgggtcccatttatatgaattggcgttcaagttcaagaagcattcagttcaaactaaagaattcaaagcatttgatcaatttaaagtgatcttgatgaacttttgtttggagtcatatgaaataatcattgatttataattttatattctcattagtttcgaaactcattagtctcattcaaatttcactcggttgtaaggtcgtactccctccatccatatttcgttttctgatttttttttttcaaataggatgggaatatttgtattcttcatacatctaagacttaaatgtcctagaacctgggcaaccatcttattacttattggttgcatgtatccatacaatttttttttgtctctctacacagaatgaattgatttgtccttggtttcgctgaaaaaagtaatatgccttagagggtgtttttttttttaatttcatcgccgcattagaattccatgtgcacttgtgttttggttgtaatgagtgaatatctttttaatcttcattttgtatggaaataaaatgaggtttaatttcttctttgttttagtgatttatttactgttagttgtattattagttgaatgcaataatatgttgtatttttctttttcatttcgacttagaatggaaataaaatgaagctggataactttatttcatcactaaatgaaaatgaatatcctgcatatgtatggagaccataaaatgtaacgttgatgttagatgtgacatggaaaacgtgcattgcacgtgcatgattactagttattgtttaattagattcattaatcctcgattagaatcagcaagcaaataataatgaggccaggaaggcaggaaccacatgcgggaaatatcctccgtcagatgagacggacggtggatatggcctgaaagtcacactgtgatttttaca

SEQ ID NO: 49452 - DNA, 546 bp, Oryza sativa
agaagcccttgtcgctacgcttgcgtatccaacaagatgatcggagtgcggtcttgttctaggtcttgttccccagtcgactgcctgtggcatgttaatcgggcccttatattctttgtcttccgctgttgttctctgatagttgttggcctacctggccctaatgtaagtatttaactcttttagcctgaattaatttgtgatatgttgtgatccaactatgtatgtgtgtaccaactactgatccagggattggtacggataaacacagaagattccgatttccaaaatcgggggtctacactcaacttgaggagtgcaatgccgaactagatcttgaaaaacaaaagctagccgatcttccaaatgccattgaagaacagaagtccagattgagatcggctatcaagaatgtggctgacatgactaaatctctcaagatcatccctggaaccgatgcccaagacatccaagccatcgaagaagtagatcaaatcaggcaacgagctttgtcggctatccagcgctatctttctcaatgacatt

SEQ ID NO: 49453 - DNA, 743 bp, Oryza sativa
attaccacctctaggatgatgccacgacataaatcttactccctctgtttttatctataagcatttgtacgtcatttaggagaattaaggttcacgaaaaaattatagatttatagcgtgtcattaagtgtgagttgatcgaaaatgggagaattaatgcttggtgtaagataaggaacaatttgaatactcatatagtatttgggacaagagggagagagagtagaccggaagggatagagattcgaatggaacacggactcccaatggaacacgcagtaacctatctcaaaagaggcaaaataatctcattacagccgtacgtgtacaggtgagttgtacgagtcgccagtaccagcttgcgaactgatggattaattcatgggaaacaaaagggccgcggggcgatgcatgcacgacgtacaaaacgcatcgctagcatggtacaaactccacttgttgctatggcgctatggcttgcatgcagtaatattctgttgccacttggagaatagattcgagcacacacggccttatccggtatgtcgttgaaactcgaaagcaacgtaacctggcccgtgattactggctctcgtgtcgtccaggtcaaatgacggtggtcgatcgggcgtccatagtctatgcagctatgctgactacctacttataattagctggtacgtatctactccctccgtcccataatataagagattttgatttttggttatactggttgacca

SEQ ID NO: 49454 - DNA, 823 bp, Oryza sativa
tctcttatattatgggacggagggagtaactgtattatatatggcttttacctatactttcgaaatgtgcacgtcgatcggttggtaatctttatgttattggatctcgtcttctgaatgaggtcactctgcgttcgcaaaaatgaatgaggtcactctgtcgtcgatgaattcaagtaatcttccgtgtatggattcacggatccggcgaatccgggccatccgagcatctctcgatgtgatttgggatcgatgggaatcaccactggcggcagtaggggcccgtgcctccctctctcactcgtgttcttgatcttttcctaggacaaactttgcctgaacgaacggaccagaaaaaacggaactgatgaatgagagcctgacttcgattgatcgggtaggtcgggacttgtgccattagctagcatactactgtagttgctaataaagcttatttggtttgaagcccaatttatatcatatcaaaatgtcggtagtgttaaaaaagctagagaagtattgatactatcaaatttattagagtacaatttataaatttgatatcaaatcaaacatccataaaatatattagtaatgaagttatcaaagaattggttaggcatagattggcctcaatcaaacaagcccatagatctctctgtaccttgtctcatgagagacagggaagactagttaaatggagtactccctatgtgctataatataagaaaatttgagttattacttgcatcatttgaccactcgtcttattaaaaaaaagtggaagtattactttattttttatgacttactttattatcca

SEQ ID NO: 49455 - DNA, 691 bp, Oryza sativa
agccctatttagattggactaaaactttcaagttactatcatatcggatatttggacactaactataaatattaaacgtagactattaataaaacccatccataatcttggactaattcgagcgacgaatctattgagtctaattaatccataattagcctatatgatgctacagtaaacattctctaattatagattaattaggcttaaaaaatttgtctcacgaattagctttcatttatgtaattagttttgtaggtagtctatatctaatactctaaattagtgtctaaatatatggactaaagctaagttcatggatccaaacaccacctgagcaacgcctttttggctgggttccatctggctggctgcagatgttcgggatggagtccgtagcttcaagaacatcgcacacagatcatgtgttctgcagattaaaaatggggcatatggtttttctggtggtgtgacttgtgaggataggaacattttgggggggctaagtcggagtgtgcgacaatgtggatactgttgtctgctactgctcacgaggtcagattaatattgtgctttctggtgtcaataatggagttctctatgtcgaatatggcggcgtggccttacctgaccaaagacaccttgctctcatgactcatgttaacgtatagagccttgctctgactttgcc

SEQ ID NO: 49456 - DNA, 578 bp, Oryza sativa
ggctcaccgccgaccagaagtccggcgtcaagcggctgctggggcagtagatcgagctactgcaccgatgtagtatcaaagccttttcttgtgttggtggtgttgaactggtgatcatccggcagccgcgacgaatttctcgttgagagctttttcaggtcatgtgacacgatgcaaaaaggcaatgcggccttagatgtgtgagatactgatgagaactagtagaaacgttatacacagcttttgtggtgcatagaggaggaattcctttgtacaatctctttcaggttggtagtctgattcacattgctttggagtaaaaaactaaaaatgcctaggtgtagatgttgttgtacctattgcacgaaattttgatggtacaaaatgttcattctgaaatggactgggaagttgtacccgtaatccgtaattgttgacaagtcaagatagttttgggttagaggtagggttgcaagcgggcttgtccgcgaacccacttatagataaaattagtgggtaacccgcgagttaaattagtgggtaacccgcgggttacctaataatttgacctaaaaatg

SEQ ID NO: 49457 - DNA, 827 bp, Oryza sativa
tagtgcagtgcatgcacacgtcgtccagagaggcgcgtcccgtgacagcgcccttccccccgcgcgcgccgcgcgcacagcgcgtcgtacgcgcatcatctctccctcccgtacgttacgtggcgaaacacctcgaaacacatgcactcctcgaacccatcgaacgcgcgaggcacagcacgtcgcgcgcgcacgctactctcttccctctcttccccgcggccgtgatcgccttggtcccccacgcgtggcgtacgtacgtacgtcggcggcgcgcaggtcgatcggcatggccaccaccccaccgatcgagtcgcgcactcgtgtactccgtactacgcatggtcgcctatcatttccgtctcaaaagtttcacatgcgtgtgcaataatccgtgaacaaaaagatgcactgaatgggggtgaaaatggccacggaaattcctgatcgatcgagcactgtttctatataaggagtatcgtttccgaccatactatttttgactatttttaaatgttgttttttcacaattctttctacatcgtattaatgtggtcaattactgaccgatcgaagatcgttttcgaagaaatgctaccgattcgatcgtttccgaccggttttcaccccctttctgaatctgatgggaggcactatcgatggagcgagcaaacacgcacgtgtactgtagttacatgcactcagatcgagctctctttggatggggaaataaggagcaggggtaggtccggttggtggtgtgtccatcgcaccagtagcgcccgatgtgatcactccgcgaagagaggagtcgtagagatcggata

SEQ ID NO: 49458 - DNA, 1484 bp, Oryza sativa
ccatccgcgcaactgtcgctggcagcagctgcgcagcgccggtgtcgtctttcccaccatccacgcaggcgccgccggcatcatttggcctgccagtcgttgcagtcatcgccaccgccttgctcgcagtcgccatccgctgctgtcgccatcagggggagaaaagaggaagaggagggagaaaatgaggaagaagaagatgggtaatagtacattgtgatagacttgaaatagagcatatagatggagatgcgttgaagtgagtaacgagtttggttatccaaatcaattggagagctggttatatgggtatttagagaatctaattttgaccattatattgtgcgacctctactgttgcagtagtagtactagactactagtagtactttagggcatctacaatatagtctaaaagtggtccataagcaatacaatatgtgattcagctacctagcaacattgtggaactaattcatagcagcaaagaaataacaaaagctacctataagcatatgggttggccatagagaataaaagatattatttgtctctacctcttctttcctcctaatactatttgctatccatatacattgtgaatattacagtagttaaagtttatatatgtgggtcatatctatatgtactacttttgctatatacattattgttgcccttagtactagtatccaccgatatctcccgctggggcatttaactttttgttatatttagatttagcatttaagtattatcaccatgacacgtaaatccaaacgtgtttatgatatatgagtatctaactatggttagtttagttcctaactttttttaaaaaaaacttttaactttttcatcgtatcacacgagcgtcggcctgtaccactccaccataaataaagtaactggagtagtggagtagtactgtagtactaccttctctcagtcttcttcacttgttctttggactacaatatggagtactactccagctccagtactggttccccttcccatcctcccactcccaccgatggagggtcggaccgtcgggatcgccatcgccaccgtcttccccgccgcttcctcaccacccaaccttttctgctcgcggccaacgcggcccgccggcgtcgacgagccttaggaaggtggcaatatcccttttctcatcgctccgccgcttcctgcattttttgtactcctactgagtttcttttatttccgcctagatgaactatatgtgttgctttcaagcaaaatatggttcattacggcatgcatcattcacaaaaaaaaaagccctccttctaagagcaagtttaatagtatagcccactactagcttcaattcatctatagccaatctaatagctaattcatacaatagttgctctactatactattaatatatggtcttacatgtcatacacacattgcgtcttagattccgcgcaacagctggctacagatctgtagc

SEQ ID NO: 49459 - DNA, 671 bp, Oryza sativa
tgccgccagcggcggccctcctcgtcgccgagccgacgttgcccctccgccgccgctcctcccgccgccccctgttgccgctcctcggtggcgcagtgacctgctgcttgccattttttttctttttttttgtttttctggtagacataaatttgcaccatgtatttgtgtttagacaatatacactgataagtgtaataaaaaactttgataaactgggttaaattcataagggtataaatggaacttttgtgttgagttaacaccgtcatcttgccttcacggaatagggccaagttccatcttcgtttcaaaaaaagagggtcaaatgagtaaacttgaaaaaacatggtcaaataggtagttagtctttaaaatagggtaaaaacgcaattgccccaagttactgctcaccaccagatgtttgcactccctctaggttggacaatgacacggtctcttaaaaaataaatttgaccaatattttctattacgatatatacagaaatacctacaaatatttaataattgtctttatacagaatgctatgcagtctgtcatacttttgtgggggcaataggaatctattcagtgtacaaccatttggatttggaagatgaagtccaatcatgacacatctataacacaatgacacctatgtcgcagtatt

SEQ ID NO: 49460 - DNA, 683 bp, Oryza sativa
ttaactttttcatcgtatcacacaagggtcggcctgtaccactccaccataaataaagtaactggagtagtggagtagtactgtagactacccttttccagtcttcttcacttgttctttgggctacaatatggagtattactccagctccagtactggttccccttcccatcctcccactcccaccgatgaagggtcggaccgtcgggatcgccatcgccaccgtcttccccgccgcttcctcaccacccaaccttttctgctcgcggccaacgcggcccgccggcgtcgacgagccttaggaaggtggcaatatcccttttctcatcgctccgccgcttcctgcattttttgtactcctactgagtttcttttatttccgcctagatgaactatatgtgttgctttcaagcaaaatatggttcattacggcatgcatcattcacaaaaaaaaaagccctccttctaagagcaagtttaatagtatagcccactactagcttcaattcatctatagccaatctaatagctaattcatacaatagttgcttactatactattaatatatggtcttacatgtcatacacatattgcgtcttagattccgcgctacagttggctacagatttgtagcccgctgctcttctctctcatctttcatctcattaaaatatgtttacag

SEQ ID NO: 49461 - DNA, 703 bp, Oryza sativa
ctggtttcttgaaagaattttctatataaaagttgcttcaaaatacgaaataaatttatttttcaatcttctaataattattaaaacccaattaacatacattaatgatttttttcctaactttaatctacggggccatgaccggagttgggtgcaaaagcactgataagcctactaccattctttaacccactcctaaattaaaccctctaactaaggatgcaaacggaccgacccacgaatttacttataggtcaaatactagatgataaccgcatctaaatatgcaagtgggtcaatatatactcatttttaggtcaaattattaggtaacccgcgggttacccactaatttaactcgcgggttacccactaattttatctataagtgggttcgcggacaagcccgcttgcaaccctacctctaacccaaaactatcttgacttgtcaacaattacggattacgggtacaacttcccagtccatttcagaatgaacattttgtaccatcaaaatttcgtgcaataggtacaacaacatctacacctaggcatttttaggtttttactccaaagcaatgtgaatcagactaccaacctgaaagagattgtacaaagggaattcctcctctatgcaccacaaaagctgggtataacgtttctactagttctcatcagtatctcacacatctaaagccgcatt

SEQ ID NO: 49462 - DNA, 502 bp, Oryza sativa
taaaatggaggtcatgggaacaaattctttcacatatgtgtgtgctatgatttgttttctttctcaccaaaacaaatcttgtaatagatccaacgattcaaaattatgtgaaacttacatataagttacactgtagttacatgcaagttacagtgtaattacatataagttacagtgtaattacactacgattgtactataattacatctgtcaaatttttggggaaaaatttgtcgacaaatgtataggtagtcccctctggcatagaagctggtaatggtaaggctgtaactaatcgagaattgagataagttattagtgtataattaatttagtattagttattgtaaatttaaaattatatttattgtattttgtaaaaaagtttatatacacattattttataaatgcatagtttatcagtttgagaaatatgctatcgagaaacaggaaaattattaaaaatttagcccaaaatgaaaaggccctaagctcattgt

SEQ ID NO: 49463 - DNA, 1510 bp, Oryza sativa
gaaacatttgtaacaagtttgtggagcaagtaccacatttaaggcacgtttcaaccggaatgattggataaatacaagcaagagaaacacgcttatatatttttttaagatataaaaattttaggtgtttacttcgatagaagatatacaaaatgcacttatcatctcaaaataataaaaagggttaaaaaacaacaaaatccagatgaaaaaacattatttagaaagcaattgtttgtttaaatctccatccataaatagtggaaattttatgaccatcttctttagattttgacatccaagttgtatgtttccttatcatcctcatacttgtgtagctggactcggaattaaatctatattatctatatagttgatgcccactaacttctaaagctcaatatgcaagtgtaccatattatcacctactagcaattattatataaaatattttaaatcacatgtaagcgtgtattttaaatataatgcaaacatgacatattatttacaattttgttgtatttttagaatacaatatgcaaaaaatgtcaagtcattattttcatattatctaaacatatacatctatcatttttataatgtataacatgcattcgttcacatatatgtaccgcagcaaagcggggagtatcaactagttcaataaataagcaagagcaatatcatgtcatggtttattttcatattatctaaacatatacatctatcatttttataatgtataacatgcattcattcacatatatataccgcagcaaagcggggagtatcaactagttcaataaataagcaagagcaatatcctgtcatggtttagaggaaccatttcttgaggcagtaacaccatcggacacattctaatcttttagagaatggtattttgtacccggcctctacatccaactggatgtatacggctattaaaatagggaacttagccccgtaaacaacccaatctaaaattcgcttatatggagatttgaactcaagaccttgtgatacaactcaggtcactgcaccactaggagcattctaattggatgattaaatagattatggacagataaactcatgtaaatgaattaaatatcataaatgctctgaaaaaaaatcatctaattaaagttgatataaaaagcttctgaagagattgtacttaagagaagcatggcgtaaataatcgatatctccattaacagtttagaacatgctcaccagtcaccataggagaggaccgggacaacaagaggaaacaggaaacggactgattaggaggcaacgacgtgtaatgaaaactgttttattggatttaaatgagaataatgttgccagtgaaggtaataatgattcagagaaaaaaagatcaattaacctttgctaaatagtgattcgactatgtaaagtatagtgactgatatagcagctgtcgttatatatacacactcctgaatagcagcgagaggcaagaatggtcattccacatcatgca

SEQ ID NO: 49464 - DNA, 832 bp, Oryza sativa
accagaagttagctgcataataatacccctttcctatcacaaattccagggccggaaaagaacgaaaaattaataaagggagaaacaaaatcattggtaaatacagggaacttctcaattgtactgtttgttagcctttctttatacatgtagaagacttaatttgatacaggaatatctacgaacaatagcactataatctgtactctcaaataacatgcaaacaaagtcacacattgttaattaggattccaaaagatggatgcatgctaactcatgccattcactcgaccacagattagaatggaccaagaaagtaataatccattccatagaacacaacacaatgacacgcagagtcctaatcagcgtgtggtggtccaatgctccaagctactgagactacgagagatgtggtggactccagtggttgccttgcatacttagcttgccttccctagtctagactctagactagtgatcatcgaggtcgtagtcttgtaaacgatggttactactcattctgttttttttcttagtactccctccgtcctatattttaatattttgcttgcactatttaactattcatcttattttaaaaattttgaaattattatttttttacttactttattatccaaagtaatttaagcataactttttgttttttatatttacataatttttttaataagatgaatagtcaaaagtgtaagtaaaatgtcaaaatcccttatgttgtatacagagggagtaatagtcagtgttgactgctagtagtgttttaactttgatcataattatcaacatgtaattgatttacaatact

SEQ ID NO: 49465 - DNA, 833 bp, Oryza sativa
caattgttatggctttaaaggcacttcattttaaggatgaaaaatatagtaatatgtttacaaaaataatagacctgatactcgaatttatgatagtgcttttgttaggttcaccctttatctgatatggcagtgtgaaatctaatttcacccctcgtagttttatatctttgtaaagagtagtgcttggtatttaagccgaaatcagtgtacctctctgtacgaaaaactgaaataccttgtaacgcacttccacattctcaaattcaggatgagaaaaaatagaataggttatgcaatcattatctacagcctacttgctgctaggtcatcaaaaatactttctttggtttggatcgaatagtcacactatgggttatcttggtgtgttatgacaattttgttcactcatgttacctagtattcagtgacaatttcttctaggtgacaattttaaaccaaaaggcatgacaccccagacccaacttttattaaaaagagccagcaaagttcttagcattttacagcgcgcatacaaaacacttcacctcacatgatcactacacaaacatctctggctgcataatataggggatctaaagttttgtctgcccttttacaggaatgctgagacaatttcctagtgaaattgtgagattgaaggtgccattttcaataaaaccatggacaagctctgaagataatattggaaaccttttgatggtactttcttgttatgaattttcttctattcaaagtgcattatatgctagaagcctatagagttgttgtaagttgtaaaaattgctgctgtttaatgatatccacaggtg

SEQ ID NO: 49466 - DNA, 630 bp, Oryza sativa
gacaatattcaggtacttatattggtcagtattaattttcagttccgtggtcgatactttcattgatgtgatagcttttcttttgttgtaaggtgggtatgggatatggtagctaaagattatctcgtcccaatcctggagataattatcctgaagataatgggtaggggagataatatgcaaggatcgactgataaaattaatgtatggatcgatacacagatggacaaaaccaacctctcaaaccttctccttgatagagttcgttcatttctaccttcttgtcttctctcgatccacaaaatcaagaaataatatgcatcacccccctcctttatgtaccaacttcacatcgcgtactagtatattctaattaagtgagtcatattgattgtcggcacccggggatgcaattcccgaatactcggagcgtacaacgtactactcccagaatcagtggctagtacatgcatccacaaccttatcatcacatccacacataatacacatacaaatagatagcatggttcacataatttagcgagtgcacaagtcatacaatatagatagggctgaccggccaaatgtaagagtggggatcctacagagtcgacctgcaggcatgcaagc

SEQ ID NO: 49467 - DNA, 1230 bp, Oryza sativa
ccattgacgccgatgatgatgatgatgccctggcacttgctcgcattctcttcctcgtctctgccaatgttgctactgcgaaaacggaagggaattgatgaggatttaaagcgtgcaaacgcatgcacgcacgaggcgtggtggcggtcgagcgaagccggcctgcgcgtttgcggatggttggcacttggcttgcaaggaaaaacaaccaaaaatcgaagcaaatcgggcagtttttccgttgttgcttgcaagtgatcgctggagcctggagacgaggtgtggtttctggcgcttcggcgttgagttaactttcggggttgccgcacacggttgagtaacggaatggcattgcaaatttgcagtgccggccttcgtccagctacgttttttttggtcgtgagcgtttttggtgcaaggattgatggatcaaaactaaaaaggcagctttggcacggagcggattaggtgagtttgttggtgatacctctactgtggcttgggccggtagtggatttgccttgtggagatggctaaagtacgtgtcatgtagtcgactaagcattattgggcaagtgtggtatctcgcttttgtgtgtgtgtttttttaaagataaacgtatgcgatcataacacgtgcatactcattctacaaatacaccgctttacctctataagcatattcgaaaagattgtgctgtcatttgttgagattcatgaaatcatcgtagatatcttgctggtatttttaaaatcttttgtgttcttttctttttggtgatggctgataagtgatcacgaattgttgtgttgccgttgcttgagctgataggctgataggctgcctgttgcttgtgctggctgctagagatgttcggttggaggctggggatttagcctatgaaaaaagcccatagagatggacaggtccagtagcctgcaaaattacaggtagcccaatctaatcccaagctgatacaagaaaggcccagatgcccaatgcaaacttacatgagtcaggctctgatatgttcgccgtcattctgaagcagctataccagcctagctatcacagagacacagacgcaatgcaatcaaaagtagcataacatgaacaggatagcttgggcaagataagaataagcttttgggtgccaagacaaaaacctcctgatgcagtggtccaaatacatgcatgctcctttaacctctgccagtactccatggcct

SEQ ID NO: 49468 - DNA, 3315 bp, Oryza sativa
caaacttacatgagtcaggctctgatatgttcgccgtcattctgaagcagctataccagcctagctatcacagagacacagacgcaatgcaatcaaaagtagcataacatgaacaggatagcttgggcaagataagaataagcttttgggtgccaagacaaaaacctcctgatgcagtggtccaaatacatgcatgctcctttaacctctgccagtactccatggcctttctttctggcaaaacagattcctacacattgcatgttgtaacagtgtagaatgcatgctccacctgaggtcttggagaacaaacattgcaaagctataagacagcacaaggctttaatcatgtgattatcctttttcggccatcaatcattaacatgctcgattcggatgtctgtaagctttagcctagtattgccctaccttcatgcagctgcatcaaagtatcctaagcagtacgtgtaaattaattatgacccacagatcatacaatgtacttatcctatatacttatacaatttatccccacaaactttaattttctcctttcacaacgtgccacatcaccttaaattaattcggccattagatctacaatcgatgtctgatatatcaatggaaaactattgtgatccctctatgtatatcatttgatgcagattttgttttatttgttttagttcgttcttcaagaacgacaacaagctaatacatgaagacattaattggaaaaagagaacctgttcattcttcctgatatgtacttctctgtagtggcatatgagtacctaatgatttgatatttacatctagataggatacagctaacaaacttctatgttgtgaaattaaacgatatcgatatccattacccagtgtttttttcttgatggtatttattttgccgtggtacaaaagaataaaacaatttagtatttgcctctttatgcttcatgcatgcatttagggagttgaatagaacaattgtacatgcaaatttgagagtcgatcatatccaactgctctatcaaatttgttctaaaacctccgcagcaacgcgtgaggtactatcatctagttcatcttaattagtactccatctatttttctttttaattgtgttggttagctcgaaattgaactaatcaacgttacacattttaggaaacgaagtggtataacatagccttgacatcatgtagacgaaccatatatgcaagaattgaagcgaacgagtgcgatttcatccacgttaagtacccttctcactaaaagttgaacaatcatgcgttgacagatgaacatcaacgcacaaaacatccaatcaatgccaatataatttccaatcaaaagtacttactcgccaatctatggagaaaacttgagcttcacccagaagccacttaaacagttggtttagatcaattgtactcctcgattagtaatagattagctcgtataaacgccattgttagcagcttaattaacatatagctagctaggtagtctaccaactgctaataaacagaagaacttccatatcaagtaaaatagtaggagtgaattgaacgatcgactgcaattaagcctgtattgtacgtagatgagacagtcagtcgacacttggcaagaaattattctctttgtactatcagcaatctaatgcaaagttttacatacatctgcgtcaaatgctacatctcaacggcaacgtatagtactccagatatgacctagtgcgatatcttaattaatttgtagtactttgtaggtccatctagtacgcagagaaaagttgatttttcttatataaaaaaaaaacttctgctgatttagacatgtcatcattcaccgagagagcttatagcacactagtactccctcctccttcccattttaaagcagttgagggtttcgtgttcaacatttgcacgttcattttatttaaaaattttataatattttttaaaaataagtcgcgtataaagtattgttcatattttaccgtctaataacaacaaaaataataatcataaaaaaatatccaataagatgggcgatcaaatgttgaacacggaaacacacaactgtatttaaagtgggacggagggagtacatagtagcaaagaaattagaaataatatatattgattttttggctccttcgacgctgccatacaattggggtaccaaatcattttctgatagaggcgtgctagctttctcccgattgatcctaattaacaagctagatgtttttattgcctctgcaaattaattgaccactctcttaatcatgtattctgatcgttggtttcagaaatcgccacgattagaggatcttaataagccctactgatcaagaccatctgtagcagtagtagactcgtagtgtagtagcagttcacctcacctaaaagctacagtatgggcagctctgtctgtggctgcaaactgaagaatgcaacagattgatcgagttggtgcaatccacttcctgccacacacacgcgcgccaacaccaccacctaccaaacttctataagctctcttgcatgattaatccttttctgacatgatgcacacctaagctcgaaaaggctatcggctatgtgaccaaaactggaacacataactgttggtttaacttaagcttcaagccggatcaattgacaatttagttttttttttgaaaaacttgttttaagaatgtgctgtgcaaaaaacatatttctaaaataaaccgtgatcttaacaccaaatctaataatgcagaggtccaatatcattttaacatgaaatatgattgggcattgaaaccccaaccgtagactagttggaggcacgacatagcagcatgtggaggacaaggattttatacacctaggtgtgacggcacctatcatttgcatacgacttaaatagttataaaaaaattagtaaaatcgattgtgatgatataagtctatacacaaacatacaggactaaatttaatctacaattagagaaacaaaaataataaaatcagacattgaatagtactcatacaacgcagataaaatttgttatttttgtttcttcatatatcgatcgaatttagacttgcatttttgtatagtgtcttaattatcatgcctatcttattaaattatataaactttttatataattgtttaaattgcatgcatatacctaagtgccatagcacctaggtgtagaaaatactttctcagcatgtggatgctaacctctcaacctaagcgccaatgggcctagtgctaaggtataggacttgattagaagctccg

SEQ ID NO: 49469 - DNA, 637 bp, Oryza sativa
tgtattctgattggttggtttcagaaatcgccaccattaaatgcatcttaatagcccctactgatcaagcccatgtgtagcagtagtagactcgtagtgtagtagcagttcacctcacctaaaagctccagtatgcgcagatatgtctgtggctcaaacctgaagaatgcaacagattgatcgagttggtgcaatccaattcttgccacacacacgcgagccaacaccaccacgtaccaaacttctataagctatctagcatgattaatccttttctgacatgatgcacacgtaagctctgaaaaggctatcgcgtatgtgaccaaaactgtaacacataactgttggtttaacttaagcttcaagccgcatcaattgacaatttagttttttttttgaaaaacttgttttaagaatgtgctgtgcaaaaaacatatttctaaaataacccgtgatcttacaccaattttattattccaaaggtccaaatccgttttacaagaaaaaagattgggccttgaaacccccaccgtagactagttggaggcacgacataaccgcatccggaagccaaggatttggggatcctttaaaattgacctggaaggaatccaagcataagtattctatagggtca

SEQ ID NO: 49470 - DNA, 3019 bp, Oryza sativa
tttttaggttgattttttttatcggagtactaccatgacaaaccaactggatttgatgtaagcataacaagaaaacaaaaaacgttttgaccctacttaggcccacacctcagcctccgtgccatgcatactctgtcgaaagcaaccaatacgaagtgaggctttcactgcgtttcactaattaatcgcattgatttgtccctagtagtggggggaggttttcatttcaggtggaacgaaatgcatcaatcgatcgagtggatcgggtccagtagtccagcactccagctgagctgcattccccaaatcctcctgctggactgccggcaggcagctgagaggctgaggtggtgtctagaaatgagggactaaactttagtcactctcacaaaaatataattccctagggtaaggacttactctctccgttttgaaatgtttgacaccgttaactttttagcgtatgtttgaccgttcgtcttattcaaaaacttttgtgaaatatgtaaaattatatgcctacataaaaatatatttaacaataaattaaatgataggaaaagaattaataattacttaatttttttgaataagacgaatgggtcaaatatgtgctaaaaagtcaacggtgtcaaacattttaaaacggagagagtatgtttttgtgagagggagtaaagtttagcccctcccacccaaaaccccctgagacgagcgagaggaaagcccgtgcagcggcagccatgatgactgcctcttctctccattttcccttttccaacgcccactgcatctgcttgaccagccacggtgcctgccgaatgggacgccccagataagccggattgttcgtttgggccacgacacgcacgcggggcctgcttcggccgtgctgtttacggtcaaactcatgactgaccacccacgggccacggatcgatattaccatcatctatctcttcgtgactttgccacttcagaccttgttttgggagcttcttgaagtagtagcaattcttcccaaaatcttcggctctctccaaacaatcagattatcactctgattatgaaaatctgtatcaatataatctagaagatgaataaggtgctgtttgaatctactgaagatgaagataaagattaaatatttcacgtaaaacgaggtggtaataatgtgtgattaattgagttttaattattacaaacttgaaaaatggattaatctgatattttagagcaactttcatatataaaattttcacataaaacacaccgtttagtagtttgaaaagcgtgccataaatatctaaaatttcatccaaatgttgttagagaaatgaacgcagcctaacaagacagaaactgaaagacctatatttgttctaattcatattctagcaaatgcttctcaaaattttaaggcttgtttggaaagcttctagcaactgcaatttctttcataatcaaaagttctactaaaagtacatctttttatccagtttataagaaactgttattgaaaatctaaaaaataaaatagcaactagaagttgtatttcttagattcttcgtattctcataagttagatagtaaccttaaaatgtagagtaccctgttccaccatacgtcgttaatataattagaaacatagtacaaacgtaaatgcttataatatgcgtacactcatatttgtgaacgcacaaacgtccattcaactagtcaacaatgaggggtatgttagaagaagaagaagaagaagaagaagaagaagaagaagaagaagaagaagaagaagaaggaaagaaagaaagggtggaggaactggagtgaaatgctgttgtttgtgggcctaaatatgtatgggccaactggcctggatcgaagaagcagggaacgaacaaagtggaatccgaacaaagttgacaaggcctgaagccctgaattcagcggtgcaacgcttgcccagcgtggacatgcactcatctagtcatcaggctggtgatcaaactgacaattattctcgacctgccttattaggttgctggtggtactgaactgaactactgaagtactctcacgcagtcacatccccatgttcatcggtgtgcttttgctgttctgcccttctccatgtgcagtgcaagatgtgattatgttaggtcgccaactagatggaggaccatccaacatcgatccatctatgttgcagacatagttttaatgtttaattaataccaaacacagcttgattggaatgagaaacacatgaaatttcaagagtcaggagatcgagtgaaaatactacgcataggtaattgatctgggacaccaaagaaatactaaaatcagtctaaaagtttcctcttttttttcgaggtaaaaggcctactaaaagtttgtctagaatctctcttttttcataacgaagtggttggtagaagtcacatcagctaatgggattagttagaacactaactttaactcggtgtttgttgaaaccaacgtcaacacctaatcatatactcctacttgtggcccctaagagcaggtacagtagcatgctataagccagttataaacatattttaagaagataaatgatgagagagaagagcagcgggctacatatttgtagccagctgtagcacagactccaagacacagtgtgtgtatgacaggtgggactagatattaatagtgtagtatgtaactattgtatgaatgagctattagattgactatagatgaattggagctagtagttggctatactattaaacttgctctaatggaagtcgattgatcatcattaacacacacggagaataagaatttctagcattgcccacattcatatatatgttaatgattcattaacatctatataaatataagcaatgctataaagtcttaaaatctgaaacggaggtattacttattactcctacttgtggcccctaatgaaagtcgattgatcatcattaacacacacggcagttgcatgctccaacaactggg

SEQ ID NO: 49471 - DNA, 730 bp, Oryza sativa
ggacagccctgcttaatattggatttgttattatgggcttattagaaactgttaaagacccttttttaagatttattttggggttatttcttatattgcacttaaaggaacatcggtctgagataaagtttggatcatcgcatggtaaatcgtgtactgcatgattattaagtagggatcaccatctgcttatttctattgaaacaatggatatagtaacgttttttaagaggaatatagtattggttgtgtatgtatgtagtatctcattagctggttttaaaattattatatttctactcattctatcttactttggtctatataaatgtaatttattattacgtatacatgatacacaatatcgagacaaatatgtattgtaaggactaaaattcataagacacatgtatagtccattataccaaattaccaaccgcacataaattatcctgttttggccttgctaagacccactattttagtaaatttagtctatttttagctttgctagcaccctattatatcaataaatgtaagatgtacagtacattacacaaagcaagccttacttaacctagtacagtacgcaaacaccctaatccatccaactccaacccaaggttttgcgctcaccaaccataagaaaatggcaaagagaaccatgatttagcatcaacaagaagcgaagggggttaactgcaaattacacgcaacgaaaaccctccat

SEQ ID NO: 49472 - DNA, 517 bp, Oryza sativa
gccacccctgcgcctgcgacgagagcgccgaccaggagaggttccacggcttcgtcaccaccatgctcctcaggcgccgcccgttcgcccccatcaaggcgctccggctgtgctggagccacgacggcgacgccaacaactggatcgctcatgctgtcaggcgtggggccgaagaaatcgatttctccgcgaggcatcaccaagatgatccgaaaccggagctagagtacacgagcttcatttctcacaagatcaagatcttgaagctgacgcgtgtccggatgggcatcaagtttatcacgcagatctgctataggtgcacttttttggaagaattagagctcaagaatgttaattcacttgaagggcagattcaatcgacctcgctgaagcgcttgtctatcatcaactgccttatctctgatggatttttggttgatgctccgaaccttatctcgctctgcttcttcagacctctcagcgggtagaggcacccaggcgcccatcccttggttgg

SEQ ID NO: 49473 - DNA, 2180 bp, Oryza sativa
aattcgagctcggtacccaaatagattatggacagataaactcatgtaaatgaattaaatatcataaatgctctgaaaaaaaatcatctaattaaagttgatataaaaagcttctgaagagattgtacttaagagaagcatggcgtaaataatcgatatctccattaacagtttagaacatgctcaccagtcaccataggagaggaccgggacaacaagaggaaacaggaaaacggactgattaggaggcaacgacgtgtaatgaaaactgttttattggatttaaatgagaataatgttgccagtgaaggtaataatgattcagagaaaaaaagatcaattaacctttgctaaatagtgattcgactatgtaaagtatagtgactgatatagcagctgtcgttatatatacacactcctgaatagcagcgagaggcaagaatggtcattccacatcatgcacgcaagataacaatgagttagtttcaaagttatttcctcaaatttcaggactccttcagaacctaggatttgatgaaaatctagtcaaaattcataatttaataaaaaaatagtaaaataatcgtgacacaattatttgcatgaatgatctaatatttgtgttaaacataaacatgctaatagtaaagaccacatctactaatatgttcaacacaaaagaaataagcactagattaggataatacctgaaacgactattggccggagcaatagatccgtttccagtgttttgctcagtcgtcatgggcagttgttggtgtagtcaaacgtgagcagactaggaagaacatgagaacaaattgatgcagccccttccatccagaacagcgggaagaaaaagagcagatagcagtcacgcagagaagcgctctcagaactcagaacttgatcgtccgtttacctgtgcagacccttaggaggatggagttcagaatgctcgtatagaaaacccatacgcacaggtcttccgaaatggtaatagcttacccatgcaattacttatgagaacggagttccggatgctcgtacagaaaacccgtgcccgtaggtattctgaactggtaatcactaatagcaacgggaaaacttgatcgtctatttacctgtgtatgtgctcagatgcgcgcagttctttcgaaccgggaggcttaactgtcctcaaacgttgccagtagtgaacagtcgctataagttcaccgccatactctgcttgtcaacatatatgcatataatttacaacccattttaattgagtactaatatttattctacttagcattaattacaagtttttggatttactagaattaaatggacaaagtccaattaattccaacaggatttcggtagaatgtgtagttctattctctgagaataattctaagaatgcctccgttcgaatggaggcataaacgcaataccgctgcatatgcccgcaaatcagcttgcggaggctgtagcacattggttttgttgcgatgaaacgtctgcgtttgtttggatctatcgtttaaattttataagatcacgtcagcaaggctaaccaagtctggaatcttgaaagtaaccttcggccattccaagatcgaaccttgttgtaggatgacttggaagcttttgtgctgtggattttagcccgtggtatttcaccatggattcggtaagggtcggtgctaaactaactactaattaaatatgttcgtatcctttggatcaagggtcgaggcgtcaaacattcttatcgaaagataagctgaattccaaaccatacgcataaactattatctaggtagcagaggagcatatataaacatatgcttagaaaaaaaacatgtgcgcccttgaatacaaaacgtgaggatatgttgcccggtgtctacatccctaaattgtatggtccagaaccagaagttagctgcataataatacccctttcctatcacaaattccagggccggaaaagaacgaaaaattaataaagggagaaacaaaatcattggtaaatacagggaacttctcaattgtactgtttgttagcctttctttatacatgtagaagacttaatttgatacaggaatatctacgaacaatagcactataatctgtactctcaaataacatgcaaacaaagtcacacattgttaattaggattccaaa

SEQ ID NO: 49474 - DNA, 1145 bp, Oryza sativa
ctgttttttttcttagtactccctccgtcctatattttaatattttgcttgcactatttaactattcatcttattttaaaaattttgaaattattatttttttacttactttattatccaaagtaatttaagcataactttttgttttttatatttacataatttttttaataagatgaatagtcaaaagtgtaagtaaaatgtcaaaatcccttatgttgtatacagagggagtaatagtcagtgttgactgctagtagtgttttaactttgatcattattatcaacatgtaattgatttacaatacttcctccgtttcacaatataagtgattctagcatttctcacattcatattaatgttaatctagattcattgacatcaatatgaatgtgagaaatgttataatgatttatattgtgaaacggagagagtagaatagatgaatatgatgtttgcatttttaccatacgacacattttaaaatacggcatatatttttataaacttattgctaaaaataaatagtcagcagaaaaaaaataaaacgtattgtctaataaagtattgtgaaacgaacagattaatagcatcttaatttacctttcactgcatctaatatgtcactttgaatgttgctactccgagctagctaggttcattatgctttgcactaaagcagcaaagcatgcaatgttagttctggctgcctatatatacgaggccatctgacgagcagaacacaagtgcaaacgtgcagcagcagaggcagcaacacctcccctgttcttgctctgtttcctcactctgttggtacacaacaaaaagaagaagcttaattaggtggtttttgatctgatcacgcgccatggtggcgatcacggcgccgagctccatcgagcacatcccgctggtgaggtgccccaagggcgccaatgccgggccgcaagctgtcatcccgtgcatcgacctgtcggcaccgggcgcggcggcggcggtggccgacgcgtgccgcaccctgggttcttcaaggcgaccaaccacggcgtccccgcggggctcgccgacgcgttggagtcgagcgccatggcgttcttcgcgctcccgcaccaggagaagctcgacatgtccggccccgcccggg

SEQ ID NO: 49475 - DNA, 2039 bp, Oryza sativa
ccccctccccctcccccaccgccgcctcttccttgggctcccgaaccgccgccatctcctctctcctctccctcgcgcgccgtgtgctcggaagaagcactcctcctccgcttgtctcggagaagcgaagcggatctgcgagtggtgtttggcttggctgcgggctgcggtacgcgcggtttttgtagcgcaattttgacggtttcgtcttgcgcttctagaaatcctggactggtacgggcgcactctctggtttgtgtttttgctcgttggcccggaccgagacatgtcgacggccgttggattcgaggaatggacgttgctaaagatatggtaattaaaaattaaaaaaagttaaaagttgctgattaatttttttttacttttaagatatggtaattaaaaatttgctactcaaagtctataatgtgtgtccttatgtgtccatgggtctagttgtaaattcttaattattatttcatccgtttcacaatgtaagactttctagcattgtccatatttatatagatattaatgaatatatatatataataatgtctagattcattagcatctatatgaatgtggacaatgctagaaagtgttacactgtgaaacgggggagtatatgtataagagtagcaaaagttaaatatcttgtagtgaccacctcggatgctcccgatgagagttttcaagaaattcaaaatttactagtagtagtatgtgaaatgtacaagtccgttttagatgtttgaaacggctaattaaccgcacgtaaaacaatatataatcaattaagtattaatatataaaagtttgataaattttctaaataacttatatataaaagttttctcaccgtttaaccgtttgaaaaatgtgccaacgaaaaataaggagtaactaagctacaatagcggaaaagaacatagccttaaatgtatggatttcatttgaattttattagctaaattttctactactttcgttatagaatataagaatctatatagaatatgacaattcctattactataaatctgggtatgaaacatggtttgagctcttttcaagatccactgtgctaggaggctggatggcaacacgatggaattgtgcagtgaaagagagaggggtcaacctcatactccacttacatcttcgctccgtgcagctggcggccagctgctggcccctgacaccatttgattcgcccaccttattttccttgggctcctccgtttgattccgcttctggaagaatcagatttgcctctgaatacatttgtgatgttgctggaacgtgtccactgactcagtggagattatctgtaatactgcagaggatctctgtcccgttaatttggtgttactttctacttcctccgtcccagtaaaattgacgtttcaacgccccaggcttgtctcaaaaaatgtgtcgctatacagagaagaggcactcctggacgccaaagcaagtttaattgttgattcaaatttttgaatatattaatgatggctttgcccctttatcaaacgtgtggccaaggcgccaatttatgtactccccgtaacacgtggtagtgagttgtggttacttcattactgctggaaatatcctctagaatattcggagtgcatgtataaatgctggaaatgacagctgaatcaaatcatggatacaatttggtaattttgcacaacagctaatcttagctactaaccttaaaacgtcaattttactgggacggaggaagtactactagtagcacagtatcttgtgctagtgccactgcttcagaaaaaaaatgctggatattgcgctgctgttgatcacctacacatggcttgtgtacatcaacgggagagtcagagtgatgaccaaccagtttgctaccactagttcttagcaaatcttcggtgatcggtgcacggtaatagcattgattaggctatgatagtggcctatttgattatggtactaacttcttcgatcttctgattccaattcagacttctgaaagtctaaacagttg

SEQ ID NO: 49476 - DNA, 728 bp, Oryza sativa
tcagtgcaagctattaggaatggaaaacactggcttatctagacgcctagaatatttttttagataaaggagatttcttgggaattatcctggtcacaagacaacttcctaagttctcgtcagatacttgcagcataaacatactagcaaaaggctaaacgaccagcatgacacttggtacaactactccaagtatctcgcaatgtgacttggcagctcagcgctgttcccttccatagtcaggagcttgtagaaaagatccctgcgcaaggcagcaaccctaccctgcgacagacaaatgatggggaatcacggttattattcaggttaatcgaattggtggaaagaaaaagaggaaatgtatcaatgcaatgtgctcaccgaatctagaacattgctcagcttgccatcatagaactcgcgcgcatagtataatgtgtgaaaaacagagttccatctgcagcaggaagatgactcaaatttgttatgggatgaaatttcattttcttttctttcttgtgtatgtgtggcattggcagaagctacccacttttggcacctcgggctaatctttgtgtggtacgtacatgtccatccatccgggttaatatcccagtcatcgaagaatttgtttatacatgttagcaagcctgtgtggatcatcgtaactgtctgacggtgcttagcactcacatcggagaccctcccgtggttgcagacagggtcca

SEQ ID NO: 49477 - DNA, 950 bp, Oryza sativa
ggggtgtgtgggtgtgaccggatcggagacgtgccgccgttgaatgagtttgaccgggtaaccggcgaaagcagcgttggctggcgaggaggaggtttgggataaagacagggcgcggcacggcacggcaacccaacccaccggggtccggagaccggacggggcggaatacggtggcggccgcgcgaaattacgcggctgcccacgctgcgctgcgcgcggtgtgtgtcaggcgggcgtgggattgcgggtgcgctgaggtggtcgccgttggtcggctttgcgttgcgtctcgtactctcgtctcgttcgttcggcttgggcgccgaaagaggaggagagagagagactgagacaccgaggagggagaaggccgcgaagagggggtgggtgggtgaggtggtgtgggccccaccggcgcgctggggaggcgggcaattattgttgtctccatcgagcggtggcgagacctgcccggaaaagtggacggggtgacggacggacggcagcggcgtgcaccccaaggccggctactacttctcctcgttccgttcgtagctgacacaagattggacgagcgagcacctctcgcctttggcgaggtcgtcgtcgtcgcggcgaacgaacaatcgttgaaatcaaggtactatagctgtacaggaaacgcgagggaaaaaaacgagcagcacgtcgtggtggtgggggtggcttggccggagtcaagtagagcggccgtgtgcgtacgcacgcacgtcggtacgccacatcagatccccgtccgtccgtcctcccgtgttcgcgcgcggggtcgcgtcgcggccgtggacggcagggcaaccgcgtgttcgcagggtcgtgaccacgacgtggcgctctcctctcctctctcctgccgcgcccgcgacgcgccccggtggccaggctaggccatgcgacgcgcattgaattgg

SEQ ID NO: 49478 - DNA, 674 bp, Oryza sativa
tgcatcccggaaatgcttgggaggaagaaaggatcgtcgtccaggttgagtgatcccatcaacacgactgtcactactgataacggccaggaaatggctgcttcgcatttcatctcgcagcaggcttcacagctcggtaggttcaaacccccgcttcaaactttcaatggacgtttacattgttcccggcgtaagttgagcgataagagagactcatagttcttctctcctctttgtcagatgaggctgcgaggaagagactgcaaagaatgaacgagaggctgaagttgctggagatgcagatggaaacactggaggctggcgtcgcgaaggcgagcaatgactcctacgagtagagatgtttagcaatctttgttatagacaccaggtttggtgacatgcaagcaaaattagatgatagcttgagtagttttacctgaacttgcagcaaatcaccgtcacctcgttgtagaattccggatctgtttcaggtttcagcgcttcagttttgttctttcactacgagccaataagctttagtgcagatgtcattcaagttttctgccagaaggaatttacagaatttgacccatacaagcgccccgcaggcatacaagcttgggtatttgtcaatttgacccacagcacaacccatgatggactttcgcggggtc

SEQ ID NO: 49479 - DNA, 618 bp, Oryza sativa
tttgagtctgtaggaaaaaagtaatgttttccaaatattggagtatgtggcttcagaccgccgacaatcttatttggtccacaaattaggccaacatagaagcacaggtttggcttgtttttcctccaaacaagaaaagcatagaggaaggcaaactggcaacttgttttctgccgaacagaatattcattagagtcgtgcctagccagctgccaactgcagaaaagcatagaaatcaaatcttttttaggacggagggcgaggtcattatcagaacaagggttcaaattttcaactaaagcatcggattcagatatcgggcacaattgcccgggaggcctaggactgaaccggcccaagcaattcacacacggcactacggcagccagaaaaccatccagattcccgtgtcacttgagccgcttggcgtcacacgcgccaccgccaatgacgcactgtccactgcaccaacggaacccttcccccggcggaatccttctactagtacctctgaaaatctcttcagtgtttgccagaaaatcttcaggtagacgcacactcgtgccgtgcacagcaggttagaaaccagatgcccgcatcgctcccttccatcagatt

SEQ ID NO: 49480 - DNA, 583 bp, Oryza sativa
ccataataaaatggcaaagagaaccatgatttagcttcaacaagaagcgaatggggttaactgcaaattacacgcaacgaaaaccctgcatcgagggcacccagccgccgtttgtttactcctcctccgcctccctttttcttcttttttttttctttttcctcctctatccacctcgatcgccatcaccaactctcgatttgcgaggtgaggacgagctcgccccgggcttgattagctcaagccctgaaccccccagagcagcagcagcagcagcggaggaggaggaggagggagaagagtgcgggcgcctcgggaagccggctgacagtggtacgtgcatccatcgctctctcctttcccctcctccgctctctctctcgatccatctttccctctctgttttcaatctacagattcggttgattcagtcggttgtggtgagggaaaatgtcctcctttcgtgatctttatgatgcgttctttgtagatcttgttgttgatgagaggttatgatttagtagcatgtttgtgggtgagattagagggggggggggggttgaatcttgagctgaccttgagg

SEQ ID NO: 49481 - DNA, 645 bp, Oryza sativa
ctattctgttgctatgtactgatactactagtatccagacattcgataccatatagtaatgccaatgtacttagattcctcctaatcctagtgccaataatgtggctacaaattaactctctcaatcatggagtaggagcacacaataaccaaaaatttaatgtcagcttcagctgccttagtcatgtttaatgatatggtgacactgtcttgactttgttgctaaggcactgacttttttcgctaatcaaaagattagccacggacaagatgcttagttagttagattagatattgagttggtgagattagttaccgggatgatattgagaggcttctggataacctgatcctacagaatggacggcttcgattcatcctgatccgacgttgttggcttgttgccaaccgacgtggctaccattttctgacgactcgccggtgctcgtgtggggccacactgtcattgaccacccactatcgtgagcaattctcagccgttggattttccacatggagaatccgatggcgccacgtaagcacggcaggagggtaggcgcgtctcttgtgggcccctgtaccgctcctactactacgggtgtaaagctggaggtaatttgcagggacagccctgcttaatattgg

SEQ ID NO: 49482 - DNA, 623 bp, Oryza sativa
gaccccatttatatcatatacaagtctcttaaatatataaaatgttccgccatgtttaaggaaaagtaggcggtattaaaccaaaattaattatggttcttttttaattattccgattatttaataccattatcctttgtttacgtatgggtcatgtaacgctctctcaaatacacgaccttgttaacttgtagacatacgttcaattgctcacgctattcaaaactttaaaatatgtagaatataaatcatgctcaaattgttttcaatgataaaataagtcatcatatgttaaaaaacagagcgagtacattgccattgcaatgctacttcgtcggatagagactcttggaattttccaaaaaaaaccaaggaaatgactgggctgctacctccctgggaggctgggacgaagaactcatgccccgctgcactggataaatactccattcgtcctcgtaaagaaagtcgttatggacagcgacacggtctccaaaacacaactttgatttcatgcttctataaaaatatttattaaaaagtgatatatgtatacttccatgaaagtatttttcaagacaaatttattcatatattttttatatttttaaacttaataattt

SEQ ID NO: 49483 - DNA, 683 bp, Oryza sativa
cataacggataagggcgtgtgtgctcgatctatttctccaagtggcaacagaatattactgcatgccagccatagcggcatagcaacaagtggagtttgtaccatgctaacgatgcgttttgtacgtcgtgcatgcatcgcccgcggcccttttgtttcccatgaattaatccatcagttcgcaagctggtactggcgactcgtacaactcacctgtacacgtacggctgtaatgagattattttgcctcttttgagataggttactgcgtgttccattgggagtccgtgttccattcgaatctctatcccttccggtctactctctctccctcttgtcccaaatactatatgagtattcaaattgttccttatcttacaccaagcattaattctcccattttcgatcaactcacacttaatgacacgctataaatctataattttttcgtgaaccttaattctcctaaatgacgtacaaatgcttatagataaaaacagagggagtaagatttatgtcgtggcatcatcctagaggtggtaattaccaagcgagcatcgatcctaaggtctgattttagataggtgtggacggcggtcaagcatagcgtgttgtgctggatggcttcgcgacactaggccgcgtcggccaacgggaagttcgacggtttgcggaagacggtg

SEQ ID NO: 49484 - DNA, 661 bp, Oryza sativa
ctctagaggatccccacatataaatcgtatttaaattatttttttttattaaataacccacaacaaaatagagtataattacgtaacctttttataataggacgaatcgtcaaacacgtgacaaaaagtcaatagcacgatttattaaaatacagaggcgcatataaatatatatgtgtattcttttttttttgaaacgaaccgcacaagatagtgcgagtttcatgtatttataaagcaggagaaaaatacaatctatagtcatggaagagcacataccagaaaaagaaaatacaaccacaccgcgatatacgtgtattcttagttagagcagagaaaattatatttactttattaaaaagagagaaaatcagagtgtatatgagccaggactagagcccagcgccgtacctaaattgttagggacccctggtaacacaaaatgaggtctcagcaacgacaaatgggtcctgatgcaatttattcgatttctttacttaaacacaaaataaactcattctagccaaatcagtagaacgagatacattggtttgaagtaaaacatggaaaatttaaggttccaaatttttagggttgtgctatcgcgcaccttcgttacatgttaaatcgacacggcccttaatcttaaaagatttttcat

SEQ ID NO: 49485 - DNA, 711 bp, Oryza sativa
agctataacttattttttaaaattacacagtacaacatatacattcacaacacacgcgcactcatctctataaacgcacgcaggcaaacccatctattttcaccatgtatgcatcactcttaatataaatttagacactcgtatcatcttaaacttgatataaagtagagtaaattaaacaagtggcacctcactttatttcgttctagctccgctagagaaaaaggcaaaacggtatatttacaaatgaaaaataaacacttgtggatataacttttacatacgtgttctcaatgatctaatagtggagactaaaaaataaactatgatgaaaaatttctaaaatcaactttaaaattaaagttaaaaacttaaattttaactgataagtataagtataaatgaaaagatgatgcggttcagtttcatggggacgataccgacgtcacgatgaattggattcttggagctaagagaaaaatgaaaatgatatggccggatcgaagcttaagtttggtgaattgctgacgggtcacgcgccgtccctgccacacgaaatctgtggccgtgcttaattaaatcgggacaaaaaaaatagtactaacaaattaagtggctggtaatgtcccccttgatcgatccctttctgtcaccattggccgcacccgtccaaaacgccggaaaatgacacggaattgaaatgacaggatt

SEQ ID NO: 49486 - DNA, 676 bp, Oryza sativa
attgtataatcaaatttttaattcaaaaaatattattaataattattgaaactatatcaaattatgaaagatagtctaggaagatcgcaaagtatttaaaggaaaatcttagcgttctcatttaccattcaatttttttttcgttcatcatcaatcaaaacatgggactataaggattttttttatctttggatggattttgatgtataagaacccgaataaatttagaacaaggggaggcagataaagaaataaataattcaaaaggaaaaatcatattcactttcaaaatttcgaattgagtttgaggaatttctggaaaagttcaaagtacggatctattgtttatcaaaattttagtttgttctgttgcaacgcacatgcattttttctagttagtatttaaaacgtagcaatttcgagaatcaatccacacctattaagtaagtactccctccattcctaaatatttacgacgttgacttttttaaaaatgtttgaccattcgttttatttaaaaaattaagtaagtattaattcttttcctatcatttgattcattgttaaatatatttttatgtatacatatagttttacatatttcataaaagtttttgaacaagacaaacggtcaaacatgtttaaaaaagtcaataacgttaaatatttagggacg

SEQ ID NO: 49487 - DNA, 746 bp, Oryza sativa
agttttgtgatagattgatcaaagtatctgtagttttgtgaaatttactctattaagaaatatgggtgaccggtgaggaccttaacttgttcgtgtctcgcagggcatcaatgtcgcgcctgaggatgcagtcgctgtctatgtacaaggcctccaggagagggcagctctggatgatcgccgagattccttccttgcttacatggtcgcatttgacgaggcgaatgctcctcaggtatggtgcgctgcaaacgttcaaggttttgttgttgaaatgatcagtaattcagtacttatattcagtagtagttcagtcacagtactccctgaagaacaatctatatatatgtatgaaattattgatcatacgagttgggtttcaaccatgataatataaatgttttataatgaatgattttgggcatatatacatatgaaaatgacgtaactaagaaaatttttcatgggcatgtcaagttaatttgtgtttagttttcacttgtgtcaaggagccaaaatctgttccaagtatttttcatggtagtaaacttgtatatatattttcactcgtgtcaaagattcaagctagctgccaaattatgaatttatgttttttttacatttaatatgattgttagaaatatcattatatattttattctattcttttattaaccccatcttatcatgcacctaactgattattcatgccgatcatcactcatcaggatatataattaatctgt

SEQ ID NO: 49488 - DNA, 902 bp, Oryza sativa
agaacctacgaccagagtcagaactgtattcgttttcaacatttatattgggtgcccaatacgtgaaatatctaaaagtctggtccgaaattattttagtttttcaacaaaatttggtcaaatttgaataaatattgtcaaattcaaaaaaaaaattgaccaaaataataatgtattggagggtccaatagaaccgaaatgaaattttgaaccttgcctacgaggaagaaagatgcttgtgctcaggatcagttttcaggccattcggcatgttatactacaagcgcttagcgattgtgccgtataaactacaattaacatgcatagagggtaaggaaatgtgtaaatctcagaaaattcctgcaaaaatgcacccatggacaaagtgaacatgaaaaatataaatgtttatggtgggttcaacatttctttctttctttcaaatcattcgactatgctgattcttttacatgtataagcaaagtcaacaagcacgatcatcttaatgtaccaattacccacgcagcagaatccctgagcataagctaagagcaggtttaataggtggagtaagcaccggctctaatttacatccatgtcattcaaagcatcttgacaggaccattcttagggaaactattctaatccctcgaggggatgttccctcgtttgctcaaaaaccatttaaacggttatgaaaaattctgcaaaaatttgacaacattcatacaacacatatatacaacttcacaaaatcttaagtccaaactcaactcacacgtcgagatataaaaaagacaaattcagcgtatgaatagtagcgtactgtttatatctaaatttgtcttttttgtttctcgatgtgtagatcgaatttgaacatgaattttggtggactagta

SEQ ID NO: 49489 - DNA, 611 bp, Oryza sativa
agtcactattcattgccccctaggtgtttgatcgcgttccctagccctagccctcctctgccgcgttgccctcgcgccccgcgcgccgcgcgccgctccacctcccctctgccgtcgccgtcgccatcaccgcgcgtgccgcctgccgccgcgccgacgtcgccgagccgccccgagcccgcgccgacatcgccaaccctatgccgcgcgtgctgccgtcccgttgccgcgtcgcctcgagccccgagcagccgtcccgtcgccgcgtcgccgccgtcgccgtcaagcccgcaccgcgccgcgccgcgtcgtcccatcgtcgctgtcgcgccgtgccgtcgtgtcgccgcccatcgcatcccgccccgagccgcgcgccaccgctgtcgccgtcgccatcaacgtcccgtcgccgcgcgcgtcccatcgccgctgccgcgccgcgtgccgtctcgtcgcctcgcgccgcgagcccgccgccttgcgccccgcgccgacgggccgccgtcgtttcacccttcctcctccttcccctctctttcttcccctcttccctataaagactccagcccaatccccccctttttcaccccactccattccctcctctt

SEQ ID NO: 49490 - DNA, 817 bp, Oryza sativa
ataccttgcaacctattcttctggcatactccgtactatgccttcgatgcgtctagctaggctcgcctgaagttggattcttgctttccaaatttcaaaagtacaatttctgcagcaatgccctgaaatgagcaatatatataagcatctaacatttgaatgattccaaaggttcggatattctgtagagctgtatgggggtaaccgggtaacataattaagcttaccaaattaaagtaaagtccgttgcaatcttgttgatcaaaagcgtttgtacgtatgccagatttgcttcggggttttgatgcttcaatgaaaggaaaatcgctcatgtaggtacttaaaccagtattttgaaactaatgagttgctaatgagtatttattaataaatcatatgctaagagcacctgcaatggtaaagtaaggtgctatctataaaacatatacatctcagcaatagactagattaataataaaccgcctcaatagtatgtctacatgggtatctatagctctctcatgcattgtctcgtttttctctatagactatctctaaattagtagatagctttgctctctctcttcatttaatatcttccatgtaggaaaatatgctgacatagatctcttatagagagcctatagataaccattgtgggtgccataatgagttgtttcgttttgcgtgtgctagagattagtttccaacatcaacattcgaacacagccttaattaatcaaattcgacactcttcttggtattgctacccaaaacaaatactcacaataaaaatttatggagggagttttaaata

SEQ ID NO: 49491 - DNA, 662 bp, Oryza sativa
caaattcatatacgttgttctagttattttaaactaaatacttttaaaattattgatagtcaagttataaaagtttgattacaaccttatccaaaacgtcaagaattataaaaccgggtgaagtaattatagaacttgagtagttttgcgagcggttttggtcctacatgacagtttaatcaacaattttcttttaagaaaatatgggacccacctttcagattctatctactgatctgtatctttttcccctctcacctctatctctatctctctatccctggctgaggagtcgcgacggctacaagcctactcttgcgcatgctagcggaggcccagtaggagcggcgatgactacggggcttctcgcgcaagtgcccgcagagactgagaatgagaagtgtgagtcctctcgcatgcgccggaggaggctgagaacgagtggcacaagctacggggcatcttgcgcacgcgctggcagaggccaaggaggaactgaggtggctacaagcattctcacacacgacaatgtcagtgtgcgtggtggtggagatgacgtggccaaagcagctttagtcatgaagctcggcgagacgtgctacggcatcactacctgggaggatgcgacggagagggtcgcattggtgcaagttcgctgcttc

SEQ ID NO: 49492 - DNA, 954 bp, Oryza sativa
tgccccttgcaagctaggttcaacatattaaaaagattattatagagaatgttacaatgatcttagcagcaatcaccttcttaaatgagtatacgtgtgctcacaattaattgtatttgtcttttgagtaaggggggtcctttaacttgtttagacgtgtcatgtaggtcactctacttttaaaatacacatccagatcactaatttaaattaagtgggtcattttttcatctaactatccatatgaacctaccatataggtatagcatgccacctaaaattaaaaaaaaatgctttttggacatgtgcagaaaactgcatgtctatctgttcctttctcacagcactagcagttagtaaaacaggaaattacgggaaccaaatcatttcacttttgcctattttgataagttctagttcttagtcctctcttttcactgccatcgaaccttggtagcgacaagaccgacggtagcgacagtgacaaactatgaatataaacagcggtggaggtgaaattctagaagacaacagtttgcggatgtacaaatgcatttctttcaatgctatgtggcatgtcatgtgtataaagtattctcacatgaatagttacatgggcaaatgacacagttaactcacattagtgacctgcagatatgcattttaaaaataaagtgacctatatgatacacctaaacaagttgaatgaccttcatacattttacttttgtcttttttggggcatcttataaaatttgcatttaatttgcagtgatatattacatattaatttatcatctcatgttttttgaattttttaaataattttggatggcgcacaagaaataagggacttcctctggagggattaaaagagtttcctttttttaaatgtgacaaaaaaaaggacccaaaccctccagtcacaaatggttgctacgtttttaggacagc

SEQ ID NO: 49493 - DNA, 960 bp, Oryza sativa
caaacatgaagctacattttgaatgaggcctcgtttgaatggaaatttgaaaagaatttccggcccatataagtgggtgggccaggacttcagcccatccaaatgtggcgttgtagcctccgtgtactagcacggagtaattgccgcccaccgcccgcgtctgctcagctggtttaaatttgaatccggcgagcaaaccaataactcttccctcttcagtcttcgctcagactcctcgccatttgagccatcttccgttgagacgtgtaagctcgaatctttcatcttcccatctgatttcgccaagttgtttctacaaagatttgcttgcgatttcttttgtcttggcagattcgaatccgggaacggaggttggaggttactgagaaccagttcgacgaggaggcgcgcgcagcctgttcggcggaatgctcgggaggaacgccatgctcgggccgccgcgccgtggcgagggggagacgtcccggcgtggagagggaagcgaaggcgacggcaatggcgagggcgacgcggttgaccggctcagcgccctctcggacggggtgctgcaccacatcatgtcgttcctcaaggcctgggaggtggtgcgcacctgcgtgctctcgcgtcgctggcgccacacctgggcgtccgcgccctgcatcgacctccgcgtccggtacaatgacgttgacagcgagccgccggaggagctgcgcgatttcgtgaaccgcctcttccgccgtagggaggcgtcagcgccggtggacacgctccgcctgcagtccagcgacccggacgagttgtttgacaacgacgatgccaacgcgtggatccggactgccatcaaccgcaatgctcgattcattcatctcactggacaccgtacagagatcggggtgttaaagcacagggccttggtctctacccacctcaagatcttgaagctgtcctatgtcc

SEQ ID NO: 49494 - DNA, 2229 bp, Oryza sativa
tcacaacctttcaaatgttagaagtttggaactcttagctggtgctggagaggtatagtcttttcattatgttgtatatgtattttgttttcttcaatatccagcccttttgaacataatgatatttttctgactttttccaaagaaaccttttccctttcaccagatatctggttatccagtgagaacatgtgatacatttttttgctgcagtatcaattgattaaacctacttacttactcatagcattctatgattttccatcatccgttgtgaggcatttgattggcaactaaatctcttgagattgcagctttgagagagcaatgctcttagtcgttcaaaaaaagagagagcaatcctcttagttttggtgtgattgcttgttactttttgttgtcgtgatagtgtatcttttgacatcagttaagattcccacagacaatttcgatctgtgtatttttgttcaaggaaatacactttatgatatactccctccgtcccataaaaattgcatttgtagctccaaggctttgtcccacaaaaattgtatttctagtcatatggggcccaaccaattgattcatctatataagttttcttccatcccacgtaatttgggctgctaatgcttgcaattttattaagtatgctaattatatgggttaattctctcaaacttccttttaatcatttgtatatatggaatgtgtgtatgcagtgggttcattaaataaggttattgtggtcatttttcaatcatactattttgtcctaaattagctagaaatacaatttttatgggacggaggtagtagatgttaatccactgtcaatatatcaccatattattgttttcattcttgatgcacattgaatatcatttgtatgcacgatgtgaggttgattcaatcattatagttcactgatgaaaaagcacttttgtgtccaatatgaaggtggttctttctagggaattgaaaagctgcccaatttttatcaacttgaagaccctgtcccttggtgaatggtgtatggatgctgaattcgatgcattagttttcttgctacagcgttcacctaatttggagaggctttttcttgaacctcagttggtacgtctcctctgacttatatgtagagttccgagtatgcgtgcatgttttaatagatttcattgttctgcaaaaagaacttcaatactaggaaggcattggaaagtggtgttaaacctacgggaagatcatttacttgtaaagacctgcaaatggtgaagatcagatgctcgaaggacgatgcgagagtccatatgctggcacatttgttcagggctaatggcataccctttgataagatttatgtccatcggtctgggagctctcgtaagtcagactgtctcttcttggcattttgtatttatttgcattatcagtattaaattacccatctatttgctgtttaattgaagcatgcaacgttaaatctctatcctgctttctgaaatatggttaaattatcatgtctttcctgtttatacatatgaccgtgttcctcaaaaagctaaatatggttaaatggacattctgcgctcctgatagctattctgttatcaggcttttctgttaaacaatcaaaaggctattctgttagcttgaagttttgattttctgtgtgatcttcacatgtgttcttatctgctttctgatattgctaccaggtctccgcagcgagaaggtgatgagagatctagccaagcaagaactggagttctgggggtcagatgagttctggggttcagattatgagtactgtggtccagatccggagttcggggattcggatttggaattctgatgcaacgtcagatcatctatcgttcatcatatcttctatcgtatttagttcttatgttcggattgcaatcgtcttctatatgtacttagaaagaatctgacggcacgacgcattaagcacgcatagcagggccgtgacagatcggttattcctctttggggtaatattgaatgaactatgtatggctatccaaatactgaaatgctcttatccagtggaatgagttaacattcaaatgttttggagtttgtttatataccttaaacgtacaaatgttctttgcttgaatgtctcaatgggttgcaatcacctttgcactaacataatacttcctcaatcccataatacttcctcacgtatttcgaaattcaact

SEQ ID NO: 49495 - DNA, 1946 bp, Oryza sativa
ctgcagcattcaccaaatctggagaagcttttccttgaacttaaattggtacatatatttatatctgtcgaatttgcttgatgctttacacttttcatatttcgacaaatcaattatagcacatattcactaataattatcttcttctgcaatccaaaaaaaaggattatgacaacacacaggcaatgaaagaaggtaccaaaccaaagggatgctcatttgcttgcacacaccttaaaatggtaaagatcaaatgctctattgatgatgtgagagtccattggttggcacagttgttcaggactaacggcgtacccattgagaatatctttgtgcgtcagactagcagcacttgtgagtgatacttctcttgtaactctcatctctgatgaagttgcagtaccgtcatacattattactgtttttgttagatggaaagcatttggttcacttgatgttctttgtggtgcatgatcgaaaaccataaactaatatgttttgttttctgacatatcctccaggccttcccgccagaccatggtaatgtgaagctagagggtgggaccaataatatcttatgatcttgttcaatatgataatttcgctttatcacattgtatttagcagggttctgaagggtaagcatctgcactgatcatgctgggattacagaatatgtgatgcttcttttgagtgcattggaactatgtatatatggctaccttaacgcgaaaatgatcttatctagtggaatgattttagctatgttatctctagcttgaggtcggcttcttcctgaaacgatttgacgagttctttttgcttaatgctataactgaaagtgtaatatgttcaatcttctatgtgtggtaaaaacgctgtggttgctggattcgatacttgtgacataaaaactttgtacagcgacgagccattaccaatgcgcatatgaaagacatgtccagtcttgcatggatggtaaagcccctgtggatgcaacaagtcaattagttctctctgggaaaaaaaatagtaatacatgcaacagtagttttcatatgttgcattagtatgctatataatcagcactcagcagtaatcgtcgttccgaatcagaagtagaagtatcaatctcatctttttagacagtccagcgaagataaaaccggccagaattttatgaagagagagagagaaaccacaacatggaaaccaaagtacaacaaacgctgtgtttagttccaaaatattttttcaaactttcaacttttctatcacataacttctctatacacacaaactttcaattttttcgtcacatcatttcaatttcaatcaaacttccaattttagtgtgaacacccaaagtttattgtagcccttgactactacggtcactgccgaaagggcaactctacgaggctacgaccaaactattacaaatccgtagcctctgctcatatttccgaaagatctgtgccaatgtcatggtatcaaatgaatccagaatattttttcagacgcgtgccaatgggacatagctttatcacttgatcagtatatacagagtacggaccaacatgagacttggtcaggtcaccggttatcgaatgtatgactaacttaggaggggatgtgacctcttctaagaggatgaatctgactaggttaagttttttttggacggagggagtaagctttgctaatttggcatcgtacgttttgttcagatatatgatggacggggacggaacggatttacgattttacggttgatgaaatcatacagttcgtcatatcattatctgaaaaaaatacagtccgtcatattaaaaaggaataagtccactttccttccctcaactcatggccgtacatgaatagcatccctcaaccgcaaaaccgggtatatcccccaactctgaaaaccgttgcaaatcaactcc

SEQ ID NO: 49496 - DNA, 825 bp, Oryza sativa
tgcttttgaaaaattaaaggtattccaaattttatttggcttggaatggctgtccaaataagcacacgttctgttgggggcctacttcctccgtcattaaaaaacaaatttagtcccggatgtgacatatactgggtgggttttttatggggacggggagagtagcacagtacattcgcacttgtgacttgtactatagaataccgaatagtactattaggcaataattattacagtaataagactgtgtgaactcacaccaaaattagaagtttggttaaaattgaaacgatgtgacggaaaaattggaagtttgtgtgtgtaggaaagttttgatctgatggaaaagttagaagttgaagaaaaactttgaaactaaacacggtgtaaatcccagtgggtgcttgtcgtaaatttcgttcatattcaaacctgtctatttacatggaaacaaaagacacgattagatcattccaaattccaattagacattttgggcaattgatcgtgataaattgggtagccttctcgtttacgtgaattgatttccgcaaccgccgccttctccgtcgctccggcgaacctctcggtaagtccgatccgtctcatctccctccttcccatctctgtactctatccctgacacgcaataatgctgtggaagttcagcgggaggtggagcgcaggccacctgttcgacggaatgcatagccctggagaggcggcgcgcggcggcggcggaggcgagtatgacctcctcagcgccctcccggacgcgctgctgcaccacgtcatgtcgttcatgcgggcgtgggaggtggcgcg

SEQ ID NO: 49497 - DNA, 1167 bp, Oryza sativa
taatgcagatgaattgtttccctggtatgaaagagtgtgcatgaagcgataatctggaaacctcctcctagtgcaaaagctggagtggtaggagcagcgaataattttacttgtccttctcggaaaccgtgcgagtagatggattggtctgtgcttgcttgcttttcctgtgcccattgcgtttcttgcccaggactgaaacggatagtccctccgttcaaaaaaaaaaaaaaaaaaaaaaaaaaaaagacaaaccctagtttccatgccaaatgtttgaccgttcgtcttatttaaaaaaatataaaaaaaattaaaaagacaagtcacgcataaaatattaatcatgttttatcatctaacaacaacgaaaatacgaattataaaaatatttcatataagacggacagtcaaagttggacacggaaacccagggtttgccttttttttgggacggagggagtacaacccatatgagtggggtagtcgacccagaaactgcaggcaagtcaaatcagcaacgaacttggcgtcgcgggggaaccggcaactgggcaagtcaaatcggacccaggcgacgtacgaaagttgtggcaaaaacatctttaatttttacaatagtaaagataaagataaagaaaagatagagatatactagaaaaaatgccgtgcattgcaacgggtaaaaatatttttttattgatacattaactattaactattaggagctaagcaataaattgaaacgttaggatcggtatatattataatttaaaaagttaataaaaatccttcctttagttttaggcccaaattggtcattcattcctcccttttcaaacctaacatagtctgatacgtggtcagctcatgcctatgttcggcatgcggcttcaattgtggactgggcactcgcattggcatagccactactattttcaccttctagctggcaaagccactaccattttcattttccgaaagccattttggggccggtatgatgcggaagccatccttcccccattaaaccggatcgatttttttttaagtccttaaaattaatgggggtttttatttaattgattttttttggtcgggttttcccaaaatgaaaagaattcacaataattgggaataataggtggaagaagtttaccggttggt

SEQ ID NO: 49498 - DNA, 774 bp, Oryza sativa
tgattgtctggccttcgtgttagggttgtctattggatcacctaggtttagatctagtcgggtggttctatttgcaatggatgaacaacaatagatgaatgaacaaagagggagtgagaggatttagggttgtgaccagtcgttgttgaggaagaggaagtccggccggccatcgtcgttgtcgtcgcgggcttgacgtggacggcggcgatgatgtgctcggttccgatggcggtgatgcggttgcagcagtgacggtgtcgacgacgaggcgtggcgcggcggtggacttcccgtcactggctgcgccccctcgatcggttagggtttatggggtggagtggcggcggcgacgaacctcgttccttgtaacgttatcccgtcccgtcctccacccctctttatatggcacagtgtgacgggggcccaccagcgattgggctgggcgcccccgatcagggcgcgggtcaaggcccccttgagccgttgggctcaaggggagggagatccatctaacacttcgtagttctgtaattgtgttgatgattgcaactatgtttatactcttcattttctcatggtgtcaagtccaacagctgagacatcttggccacattactgtgcatgtcgcctgctctagtatgttataaacgttatctggtggccaatactatttcaatgatggtttacatttggaaccatttaatcagggaagcaagtggtgtggacaaacttttttttttccacttatcacaaatttattttatttttttc

SEQ ID NO: 49499 - DNA, 909 bp, Oryza sativa
attgtgagcacacgtatactcatttaagaaggtgattgctgctaagatcattgtaacattctctataataatctttctaatatgtggaacctagcttgcaaagggcatatatgcatgtaacgctcctttgcccccatcccaacccaaaattgaagtatcagtgttttgtaaacacactttccatgcacatcgaagcatcggtgtcttgtaaacacactttccctgcatgcttcatgctcctctttgatttgcagaaaaatcatttgaattttggaggatttcaatcctagagaaaaaattcctataaatgcctttggtacagatgattaaatcatgtcatatcctttaaaattcctatggaatggacaatcctatagcgattttgtaggaaatttagtaaaagcttcaacctcttgaaaattttccttcgagtatttctctctcaaccgattcctatgtttttcatgtagtccaatcaaacagtcattcttatgtttttcttttattttgtagtcatctgttttgcacttgcattagaatcatctgttttgatttgtgggcatggaattcaaaagcgaagtctgatcaaacaaacagatcatcatcacaatgcaaggtgcatatgggcgaggtcatcaatcatcagactgatcgtagccgtcgcatctgtcataacagtagtaatcatcatactcgtcataaccttcaagggcggaaggaagcttgacagtctttgatcgcggcgcactttgctaccagggcgtcctcgacatcgcaagatcgtagcagttgcttacgtcaaatagctcaaggcagcggcgaatctagaataaaaattacccgggatccactacatagtagttatctaattattcactagtaaactattcaaaatagcacataattagt

SEQ ID NO: 49500 - DNA, 1113 bp, Oryza sativa
tccccgtgcaacagcgactgcgtcttcctccgtcgtcttcctctcccctatgcagcggccatccgattccaccaacacaaaaggttctccactcgtgcctccctctcctctcctctactctcatgtcccgtgaggtggagaaggatgcgcgggggctagatccggcagcccccgagctcggcaccaccacgacggcgaggaggaggactggcgaagagtggcgatggtgataggcttggccttcggtgagcaactaatggccgcgatagcctcggtggactatgattcggtttttgtagttaaccttttgtgttgaatgttgatattctatatatcattcggtgattattctaatttgtgatggattaggattaaatttttgcgttggatttgtaattggattgggattaagtccttggctcaaaacatgtgctcaattcgagccgaagccgatgcgtcgagccacattattttttcatttctagaacctcaaaggtgcaccaacatctatgattctccacatcagtgtcggttacgaagtctagtatctatgtgggattctcaaatggcacccattaggtattctatagtaatgaggtggtttgttgttaaatatagtttctcagtataagaactattagcaatactaaaaaagagagatgcaaaatgcatgagccaataaaacttgcatccgagtctcaactgttcggctgctcagcttcttcatgacatacttgaggcttcatcggttggtgagtgggtcatgactatagatggccataaggcccgcccggcctaggcacggctagacacggcccaccagctatcggaccagcatggcccggtcggcacttcgtgccgggccgtgctggcccatgggctacacctccagccctgccacggccccgtgtcgtgtcggtccgaagacacgggtggtctatcgtgcctttttttaaataagtctattttctctccctcctcgtgggctgtgacatatgtatatatatagctaaaataagtccatttttcctccctcctctttgggctgacatattatatatatatatatatatatatatatatatatatatatatatatatatatatatatat

SEQ ID NO: 49501 - DNA, 662 bp, Oryza sativa
ttatgttcctacctgaacttctagtgcattagtattcaatcatttctctctatggtgtattgaacttcaaatttatttcatggctgacttgttaccgtgcctttactagaactcgcaattagcagttcttttttatttgtctctggccaaaggaagttatatatttgtctctgaccaagctagtatgttagttacattttttttacataatggaagtacatctcacaaatatttcacaactcacttgagcaaaaccttgggttcatctcataccaggacaaattttggttgccattctggaacatttgttggtagtgcaacatgtgtactaactgattactaaaagtggcagaactttcaaggctagtttaatattcatctgatgattgcaaacctgtgatttttttcctataatcttgtccatgtaccacttttgatttgtcaatgcacatatcttttgatttatttgggtcactgaatcatttggtatctatggaaatgtgcagctgcttctgaggagggaattggaaaatttccccatgttcattaacctgaatactctgtcccttggtgaatggtgtatggttcctgacttcagtgctttgtcaaccatacttgagaaatcacctaatgtagaaaggctttatattcaccttgacatg

SEQ ID NO: 49502 - DNA, 821 bp, Oryza sativa
cgcgggttagccacttacacccctaaatcccaccacctattgcccttcccatccgctgcctgtagaccttctcgtgtcctccctcctgccttccgttgcgtcttctcttcgaatcaattcgttctttcccccgctgacctttctagtccttcacctgccaccgccgacggccagctcttgtcccggcagttgccttggtaattgcaatgtcaaatactccctccttccaaaaatatgagacctatttcttgttgcatcaatactaagaagcaattaactcacttgtcatatggcaaaaccaatgaacatgcaaccaataagtagtacttatggctacttggtttccgatccacaatttaatttagtatatagcgactacaaataggacttagatttttggaaaacccaaataatgaaatagatctcagactttaaagagaacatttattaattactttgaagagaatattccatgtactacatagtactagttcataaaattcatcaactaacatgagtgcagaacgaacttacatgaatctaaagggagaaaatattcccagaaaaaaatagttgaactccaacataaattccactcgcattgatcaaatcatgcagttcttcatttcagaaacgtcctcatgcacctgggaagcgcgttatcatacttgtcaagatcttcctcgtagcgggaaggaccggaataatcatcatcatcatcatcaaattcctcagacgtccattcatccgagtacatggaatattccggatcagaatacaccgaataataccgcacaaaaccgggggagatggggagcctc

SEQ ID NO: 49503 - DNA, 710 bp, Oryza sativa
aagagccaattttcagtggcatataagggattagactaattttcagtggcatataagagattatctctccatattatctctccttgaggagcccagactaattaacatgttcagatgagtgaatactatttttttatacacaaagggtatttttgtgcattaaaattacttgcattacaatagaatgtatgtggttttagtggacagtagatgctatgtgcaaattcataaaattatttaccaacagaaatatattctttaatacataggaaatgatacacacactttccgatttttgtttatgtccagtgcaataacagaccgttccatacatgaaaaccatattggtacggactccattgacgccgttgcctacaaaattgtcagcaatgccacgtcggctcatagataagaatcgctgaaaaactaccgtaagattttatttttaaaaatattcaaatataaacataattataagcctagttataaaactgatcataaattcccatttcatagtatagacatttataatcagtttactggttggtggcttggcgctctcccacatgcttggaaaacagtgttggcttggcgctctcccacatgcttggaaaacagtgtttcttattaaacatttgatcttgttacatgagagatgagttaatttctgcttagtcctggtgacaaaaaagttacacgtaagacttttg

SEQ ID NO: 49504 - DNA, 1264 bp, Oryza sativa
tggaatgatctaatcgtgtcttttgtttccatgtaaatagacaggtttgaatatgaacgaaatttacgacaagcacccactgggatttacaccgtgtttagtttcaaagtttttcttcaaacttctaacttttccatcagatcaaaactttcctacacacacaaacttccaatttttccgtcacatcgtttcaattttaaccaaacttctaattttggtgtgagttcacacagtcttattactgtaataattattgcctaatagtactattcggtattctatagtacaagtcacaagtgcgaatgtactgtgctactctccccgtcccataaaaaaccaacccagtatatgtcacatccggtactaaattcgttttttatgcgacggaggaagtaggcaccaaacagaacgtgtgactaatttgaacagcattacaatgcaaattaaaatctgcataacttttatttttcaaaagcaatttcatatctaaaaggcagggccatcatcccataatataaggcacgatcaaatttgggacattctccaaaactaatctttgtgttataatttctcatatattatagcaacaaaattataaccatatcaaagtaaatccaaatgtcaatccaataatattattttcagcaaataaaatttaatttatattatactaatggttagtcaaatgttttaaaagttgaatttcgaaatacgtgaggaagtattatgggattgaggaagtattatgctagtgcaaaggtgattgcaacccatcgagacattcaagcaaagaacatttgtacgtttaaggtatataaacaaactccaaaacatttgaatgttaactcattccactggataagagcatttcagtatttggatagccatacatagttcattcaatattaccccaaagaggaataaccgatctgtcacggccctgctatgcgtgcttaatgcgtcgtgccgtcagattctttctaagtacatatagaagacgattgcaatccgaacataagaactaaatacgatagaagatatgatgaacgatagatgatcgacgttgcatcagaattccaaatccgaatccccgaactccggatctggaccacagtactcataatctgaaccccagaactcatctgacccccagaactccagttcttgcttggctagatctctcatcaccttctcgctgcggagacctggtagcaatatcagaaagcagataagaacacatgtgaagatcacacagaaaatcaaa

SEQ ID NO: 49505 - DNA, 593 bp, Oryza sativa
gtccgccacccatgcgcttgcgacgagagcgccgaccaggagaggttccacggcttcgtcaccaccatgctcctcaggcgccgcccgttcgcccccatcaaggcgctccggctgtgctggagccacgacggcgacgccaacaactggatcgctcatgctgtcaggcgtggggccgaagaaatcgatttctccgcgaggcatcaccaagatgatccgaaaccggagctagagtacacgagcttcatttctcacaagatcaagatcttgaagctgacgcgtgtccggatgggcatcaagtttatcacgcagatctgctataggtgcacttttttggaagaattagagctcaagaatgttaattcacttgaagggcagattcaatcgacctcgctgaagcgcttgtctatcatcaactgccttatctctgatggatttttggttgatgctccgaaccttatctcgctctgcttcttcagacctctcagcggtaagagcacggagggagccaatcactcgtctgataataggagttggccattctcagcgtcagtgtgggagtttgatgacgatggatctgatcatgatgatgattt

SEQ ID NO: 49506 - DNA, 773 bp, Oryza sativa
tgttacataatataaagcaagacaatcgtacccatggtttcacacaattgttatagctctagttaactagttcaggatttctagcaagaagttgtacttactcaaaaagctatgagacattgcaataactagcagatcagcagaagtgttgctatattaagattaatactctatcatgcgcacatcaaagataaataaagtattgtataattaatatataaggaaattatattacaaaaaaaatctagtaagaagaaactatcatacatagtcactagctatcgtatggatcctctcctctattctgacagcaaccttctggagatcaatcaatgctgtagtagtactttgcaatttcgtttgcaggctgaacaatctgcagacagaatgttgaatggtaacatgagagatttattgtttcaatatggtacttccaacctaaatagttcaaaaatgtggttctaatataacaagcaataaaagaaacaggcaactgaggatttaggggttgtttcgtacaagaaatacatatgcaaactgttcactatttgggcaatgcatgtggcaaagtaacatgttcaaaattgtaaatacattctcataaataatgaaatataatttgtccaaccagaagtgagcaagattttagcaattcgttatacatgctaagagtctacaagagagcattcataaccaataatcaggagaaactatatataatgcaaaaacaaaaagagaaaatgatgtgggagggtaccgagctcgaattcgcc

SEQ ID NO: 49507 - DNA, 866 bp, Oryza sativa
agccgggcaataaaaagcacgctctctaaaaaaatttatatgaatgcaaaatttacatacatgaagagcgtggagaaaattcttcccagaaaagaaaaggttggactcacattgataacacattgaccaaatcgtgctgaaggttcttcatttcaggaaactacgcataccccggggaagcatcttaatatcttatcatatttgtcaagatcatcctcgtagcgggaataataataataataataataataataataataataataataataataataataataatcgtagtcctctaattcctcaaagtagaatggattcctaatcatagtccaaactgatacaatcgacaagagaaggcgtgccttcttatggacaatataatgtctgctccggagcccgctgcttggtagcgtgcgaaaaggtctgccaacctaaagatcgcggagggctgggaataaaggatctcaggttgcagaatgacgtactgctgatctaagaggttgttccatacgcatagctcaaattcgtcatggtctacgtggctctggcaggaagctagggacaaatcgttggcggatgacctgaaccttggaccccactggcgcttcctccaaaactctcataacatccaaactctaaatgtcgtgtagaactgcctttgtaacccttcttttattaattaaatttaaatacgatgggataagaattaaccctaattaaaaattcaaataaattatataaaaataaaatatgagtaatattaatctagggtgaattcattagttgagataacacaaatattgagtaaaatgcatatatgcaaaatttagaattgtggaatcaaatttatatgggaaatacac

SEQ ID NO: 49508 - DNA, 2876 bp, Oryza sativa
tcccccccttctccaccccactccattccctccgcttctccctcttccccttctccacgcgccgccgtcgtcgcgccgccgcgccgccgttgtcgtgccgccgcgccgccaccttcgaagccgccgcgccgtcgccccggagccgccgcgccgtgcgtcgccgccttgcgccgccgtcgccgtcatcgccgccaccgccgccgccggtgagccgtctcccccccttcacctcgcgcccaccgccgtcgccgcccggggaagcaaagagccaagagagagagagatagaaagaagccgggagggagcagaaaaaaaaaaggagaggaaaggaggaaggagccgggaggagagaaatagagaaaaagagagagagggagagaaaagagagaaaaagaaagagaggagagaaaaaggagagaaaaagaaagagagggagagaaaagagagaaaaagagagagagggagagaaaagagggaaaatagaaaagaagaaaaggagaaaatagaagggaaattgggggagaaattaggaggatttaggaaataaaaatggtcggggttaatcatagattatttttggaaattcctcgagcgtaatagtatttcggtcgaaattccgagttaattataaaaatatgtttcttgatcagattagattaaaattggtagtaatttagatataattaataactaaacaattagatgaattcttatagactattatagattattttgggtaatctctataagtaattgattcacggtagaaattcggatttaatcactaggaattttagacgtatattatatttagtcgtttagtcctagactaaaatttaatcgtataatattataagataattttaggattccgtccgatatttagcttgcgatagaaatttccaatctattatatggatataatgctcgggtagattaaattaaaaacttatggcaacaaaatatttatacccgcaaaatagtttaaatcgaaactgggtttgccttagttcgcggataataaagttaatataaagaaatcgactttcgcattcgactttcatttgattcatttggatttttatttgaattctaaccgaattcaaatcaattttcgcacgtaactatagagcccgagggagttgcggatccaagcgaagatcaagacccgcaagacattgagcaaggcaagtcatcactattccttgaacatgttgatcctaattgcgaaattgttttgtttacaaataaaattgcatgcagtgatgaacatcctacttgtgattatgccatgccttgattattgtttacccttaaatctttgtaaccatgtttacgtatgagtccctagtcaacaatgacaattgcttagaaatgctattctagaatcatgcatactcatatttatcaaatgctatatggttgggcaattacctttgggaaggtaattgagatgcggcatgtggagacatgagcgccacattgccatgatgttgatgacatgatttgtgaaaggagaaataaaattaaacaactgttttcgactggggcggatggaggatttgggtggtatctggaaaaggctagtaccgtccccagtcaattaaggaccgagccatgaagttaagcatgaaacgacccccgtacaaccgtacttctcgaatgggtatagacctagcggattagatagccgagcggaggcagtatccctgcatagatggttcacccctaagtgaggcaggtgcgctacgatgggacggccgttgaggtagggccgagaagcgtgccctacatcggtgtcgccattggtaggactgccatgagtgtgtgagagagagaacttaacttgaaccataatttaatatgcgtgtgagacttctctttccccgggagcgccagaactcctctcactgctagaaacatggacgcctagagtgcatgaggatttaagttcatggagcgggtactgccaatgcgaggttatcgaaaagctttgccgtgacgcgtctcatgtgttgagacgaggctcatgtgttgggcagtcgcggagtgcgggtaaagtgtacatccaccgcagtgtgagtaaaccaaatctattcgaatagccgtgctcgcggttattgagcaccgggacatgtattacacttggctagactctaaattctttaacttgtgtgggatgggatattgcatgatgatttttatgctgatggagccacttcctgagaggcggaaatgtggacgtcctcagaaaaccataacgactcaatggcgggaagctatccttgggatcacaatggatggtggacagaaccgtcattgtttaatatgaacactggtattaaaatttgatcagtctatgctaggtcttaggcttgtgaaaagaattacaaaacttgctttgcgcgaaagaaccatagccatcctttgaattcctctgtcatgtgcatcattgttgtggtggcttgctgagtacggttggtactcacccttgcaaatataaaattaatcagaagcgggagatgaagcctcggaggatccctatgcctactaccaggagggagatgaagacgatggcgctcagtaggtcttagtacggtcgttgcctgtggcaatggcatgccgctgcctgaattccgctgccttatctatttctgcttttggatgtattccggaccgctcggtccgatgatttaagactgtgcctgcgggcttatgatgtaataattcatactagactctcgtgtatgagtacttgatatttcagctatgagttcgtgtgtaccagactacttgatccagggaaatggtactgtttacacgattgattcctgttataaaaacgggggtctacaccgagacggctcggcacgcgg

SEQ ID NO: 49509 - DNA, 1149 bp, Oryza sativa
ctcggtacccgagaggaggtgaggtggagccgcatcaggagctcaatgagatggtggtggtggcaatggaggcaaaaaacggggagtagacaagtacctctctcaaacacctcatggagttcgccaccgaactgagctctagttggatctgtcaccaccccgatctccacgtggaaccgacaccacctcgagcttcgcatccaatcatctccacattgcgataggtctattaccctacatggccattcgactttgccacctcgccaaccccacccccaaagccaatcccttgccgctcgttgtcatcgccgtcgccaccaccacagaagaagagagccatgactaccaatctagctccgccatgctctccccccccccatctctctctttttcttccccatctcctggctacgtcgagctcaagtagcttttcacgacaacagcctcgtcatcgttggcgccaccgccattgtagcccaattcgccgatgtgttgattccgtctcggtcactgtcaccacttttaaaatttctttatgctaattagactaccctttagagcaagtcagggggttattcgtttggtacgaaaagttgaggatgaatgatgtctaattttataattaaggggataatttgtaccgtcatagtagttcagaggttaatttaggctgtcttcgctccatcgtgtttccaaccggaatagtgcgcatggaaaacagaacggtccattagcgcgtgattaattaagtattagctatttttttcaaaaatggatcaatatgattttttaagcaactttcgtgtataaactttttgaaaaaaacacaccgtttagcaatttgaaaagcatgcacgcggaaaacgaggaagatgagttgggaaacctgggataaaaagccctacaccttttctttttccataaacaatacactagttcttaggcctatatatactgggcattttcggtaattcctcgccccttgtgtctcgaagccgttctaccacctgctggtgctccaaagttgaaagtcgaaagcagcgagagctcttggcgcccatcgattcgccaagaaatccccaatctctccgtgagttcttctccccctcccctcgatcacctgctccgatgcttttcttgcgattcttg

SEQ ID NO: 49510 - DNA, 955 bp, Oryza sativa
caggcgcggggccgaagaaatcgaactctccacgaggcatcaccaaggttctctggaaccggagccggagttcacgagcttcatttctcccaagatcaagatcttgaagctgatgcgtgtcggcatggacatcaggtctatcacgcaaatctgctctaggtgcacttctttggaagaattagagctcgaggatgttcgcctacttgaagggcagattcaatcggcctcgctgaagcgcttgtctatcatcaaatgctatatcgatgatggctttttggttgatgctccgaaccttgtctcgctctgctcatcagacctctcggcattgagagaaaggggggatccaattcctcgtctgatagactttggtggccagtgtggctgaatgacgacgatggatatgatcatgatgatgatttctttgcaaatgctagtgctgtacaatctgacgataagagaggcagtaaatctgatcaagatgatcttgaaggttgcaatgatgatgattgtactgtggcctatgatgagattgcagatgagtactccagtaatggtggtcctggtgatgaacatggaggatattctgagagcgatgattctacaatttgtggtccctatggtttatttaatgttcttgtaaagacatctctgatcatgatagcccgggaaggagaggtagtgtttaatcaccctgctacgtttgatcatgtcattctacatattatgttctctcttatttgtatgctttctttttccgggatgtacgcattacttttgcacaattctttgcaagcaaatatgtcactgtatgagaaaggaactagttaccggtgcattaacagaactgtcttcataaacttaatgtgtagaagaaagtttggtcagttctgcttgttacgagatttctcaaattagtatggttaactcagtttatagtacaaagagtgctcatatt

SEQ ID NO: 49511 - DNA, 3032 bp, Oryza sativa
ggtggcggcgtgcgatctgaatcgggggggaggaggagaggagttaggttaaaagggtttgcacgaatcttgaagcatatccaatggtctaaaattcgaatgatatggggttggattttctgtcacaagatgtatagacagccccaagaaagaaatgttcctctatttaattccctctattcactactgcattcatctatttccctccattcaccattgcagaacatcttaatggtgtcggttgtaaacttggcgtacgtgctggttccgcagtcggcaccaatttttccaggaccagcactaggtcacttgtgctggttgtagaatcaacactttcgtgctctctccaattcaagaagaaaagagagaagtcggctcgtagcatcagctcatcaagctaatgctttcgagcggcccctttcaagcagcccctaatctcatccatcacagctcaacaataacaatctccagacccattcatcatagatcaacacaagtaagatgaagaactaaacaagcaagatgaactcactcttccgggtcctagcaaagccactagcaccgtcatcgccaatttgtctctccattggaggagcgccatggaggacatcgactagcggaggtgtcgtcgttggcacgcaagctcaaggcgacggggcagcggcgcggggggaggagaggacgacaggtggtggcgtcggatatgaacacgagagagatagagcaagagagggtaaggatcggcggtgactacggagaggttaaaaggatgagttggatggtggctcggctcgactcagtttttttattaagaatcggcatctataatatattataggcgccggttgttttttaaaaaaactggcaatactgtacattataagtgtctgtttttatttaaaactggcacctataatcattcaaatatgccggttccatatttttccctcccgatgaacgtagggtaaataggttataggagccggttttaaataaactggcttctatgatcatgtacctatgaggattttttagtactggcttcaaatcataagttgggttaaagtcaaaatacttaaaatttgactaaattttaagataaatatatcaatattcacaaaaccaaattagttttttaaattaatagtcaaatatacttttatagtaccatgtattgaaaatgttacttataaattatagacttgatttagacctgaaatagtttgactttttctaaagtcaaaactattataatctgaaacaaagctaaagattatcgattgtttaaaaaggattgagtttacaaaacttctttgtttgaaacttatatcaaatgaaaaacaataggttaaggctccattcagagctgatgattgggctaaaattttaccatttttttcatgagctaaacggctaaacattgtgttttttactaaaattttatatccaatagtttctttagaaaaatatattaatattttttcgagtttacaacggctaatatttaattaatcacctgctaattatgtttctcattttacatggggctaatcgatcagtttagcatactagtactcgtagctccgaactcagcctaaagaccttaaacagtaaactcaatgcgccaaagatcatgtactcctatgcaatgcatggtggtatacaaatcagtgattgcttgcatatatacacatcgccactagttgatccattgattattaaatctaggtagctaccaacctgtccgaccattttcacgttactccatccgtctcataaaaaaccctaaccaagtaccggatgtcccatgcatatgcattcagatatctagctagatcaccccatatatgcatattcagtcttaaagtactactccattagagcttttgacttgaaactacttatggcggtacaccttaccaacaagccaccatgatcacagagaatagttagtagtcatggtagacagtggtcagtgaggatgttgtgaaagtcaggtataactataacaatccagaattttcttgatggccagctaattttattggcgtaaaaaagaagctgtcaagtttacatattttcttggcggctaaaactaacagccatgtaagccatattcttgttggctcagaccgacaaggttataactctggcgctctgaaaagctggatatgatcacaatttttttgtcagtctaaccgccaaaacttttactgaaagttagccagtaagaaatttagatttcccttgctctctaaacttggctttgattctgttcttgacggcttctggccaccaacaaaattcccagttctgatagtatatgcgctagaggagtctatgaggggatgatgatgaatgggtgatgagtggtcttccccggtagtggtcaccgtagaaaacatcctcttgctgctttcgcttgaagagcgataatcactgtccgaaccagaatggaaactgcacaacagcacaagtaatcagatagcatagctaggcttcacttgggtagactccttccgggcttccggctgccgctgccttgataattgacaagccaataattaactgtcatgacagaaagtttattactacatcattctgaattacaaactagttcataagatcgatcaaataatatgaatgcctctgttgctgacttgaatcagaatggggtttggaggtttaactatggaaggaatgtggacagtcaagagggctcagagctagctagtttaagagagatgcaagggtgatggaaattgaagattttaattatccgataaactgatctggcttcatgctaagggaggaattttctcaaccagatcactgtgcagactgataaagtttgatggggtggtcgataccaagctaagagaggtctggaaaggcaaaatgcttgccattgaaaatcaaacatttcctctacctggtaaatattttttcacgaacgcctacctggtaaattcaagggagagaatccaatgtgcagttcaattggttgaggaattggaggggtggaatggagg

SEQ ID NO: 49512 - DNA, 1017 bp, Oryza sativa
gaattttgtcattgcattgaaaggaaacggacgaggttcattacatagagttaatagattgtaagggggaagagaaaatttctttccaaatttgaattacatagcgagcttcagacttgagattttcagcctacagagcagcttctcgcacacatcgctgtagacatgaggtgatggaaggaccttggcctctaaagacaacatcatgtctgtgattccacaatgcccagaaacaaaggagatagaaaacctgatagtgtagaatcggcattcgaaggcctggcttgggctgatgaaactggattcaacatcttgaatcaacggttgaacaccaatcttttcccagaaactctttgcaaaagggcaaaggaaactgtttcaatttcgtcattgcagatgtcgcaagtgtcattgggtacaattgtcttcttgtgtaagtttttctttgtggacaaacggtcttttactagtgcatgtggtttatatatagagctgtttctgtcttgcagcgatggaaactgctgcgcaacttgcttgatgaaatcctggccaggctgaggcagctaaagcctgaaggtcgatgtgcttgctgaaagatttatgatcccggaggccctagctgtttgttctggttgcagtgaaactggtgatcccagtgatgttatattagttacttcggtgttataggcgtagtttttctgtttgtctttccacatactttgggcctgttcattttgatgccattttcaactataccttttttgggtaaagttgtcaaaaaaaatatttacgtttagtttgttgctaaatttgatcaatacataagaaatcatgccaaaattttggtaattttgccatcttactaaaattttggcattgtcaaaacttggtaagatttattttggctacaatctgaacaggctctcggtttgtcatgttctcttaggcttttctcacaaagccgggcaataaaaagcacgctctctaaaaaaaataatatgaatgcagaatttacat

SEQ ID NO: 49513 - DNA, 1058 bp, Oryza sativa
cttttggacctggttggaacgggtgcccattgggcctaattcctctgattggaaaaaaggccttcctttactaaaggcaatctttggttctaaaaaacggaaggtttatggttttcagttccacgaaaaagtcaagatcaaactattttcttggtctcattgtacgaaaatctatgtaaaattctagagtccgtttggttggagagagtgattgggaatttagagggatgaggttattaattattttatttggtggggaacatgggagtttgggtgggacgggggatgggaattgagaaaggaactccatcctttttcaatacttgagtagggatggtaattgagagtgaattcatcctttattttgtctaaacaaatcttaaccatcaatatcaattttcatttaagatctaatctccaactaaactccatatcaattcccaccacctctaccaaacaagagattgggactaaaaatcaaatcctcatgttatggtgtgtttagttcacgtcaaaattggaagtttgattgaaattggaacgatgtgacgggaaagttggaagtttgtgtgtgtatgaaagttttgatgtgatggaaaagttggaaatttgaagaaaaagttgggaactaaaccaggccttaatcacaccattaattctctagtctaaacctccaatcctcttcacttgtatcaaacatgaagctacattttgaatgaggcctcgtttgaatggaaatttgaaaagaatttccggcccatataagtgggtgggccaggacttcagcccatccaaatgtggcgttgtagcctccgtgtactagcacggagtaattgccgcccaccgcccgcgtctgctcagctggtttaaatttgaatccggcgagcaaaccaataactcttccctcttcagtcttcgctcagactcctcgccatttgagccatcttccgttgagacgtgtaagctcgaatctttcatcttcccatctgatttcgccaagttgtttctacaaagatttgcttgcgatttcttttgtcttggcagattcgaatccgggg

SEQ ID NO: 49514 - DNA, 755 bp, Oryza sativa
tatagggcgaattcgagctcgtacctctttgctcacactttgtttaacccaaggaattaatacttttcacccttggggcaagttcatggaaattcatttcaaaaaaagctttcactttttttcggaatgcgctcagaggtacgttaatttttttttgctcttaaagtttgaaattctatgaattatcctcacttaatgtgaaaagcagatatttggagacgtaatgtgtatggattcacttgttagtaacccatctcattaactgtttgcagagtggatctaagagttcaggtgatggtggaccaactcagagggcatcagcattggctgctctttcatctgcattcaacccatcttcccaaaagaataaggtattgttaacactcccaatgcacagcagaaaaaatataaaatttgttgatcttacaaactataagcaatgttgtgttctttttagggtaatgataggcctaaaagctctgatggtggacccactcagcgcgcttcagcaatggctgccttaacatcagcgttcaatccatcagcaaaacccaaaacccaccacaacgtgcaggtcaaggttctcagcgagcagctgctgttgctgcgctgtctatgttttgactgctgagggttcatctcaaagcccacgcataggtaggtcttccccaatggcaggtatgacttgtggcctactatttccttcccctgcatatattttaagggtaacaatatcaatttccttcatgtggtgc

SEQ ID NO: 49515 - DNA, 1261 bp, Oryza sativa
cttttttttgggacggagggagtacaacccatatgagtggggtagtcgacccagaaactgcaggcaagtcaaatcagcaacgaacttggcgtcgcgggggaaccggcaactgggcaagtcaaatcggacccaggcgacgtacgaaagttgtggcaaaaacatctttaatttttacaatagtaaagataaagataaagaaaagatagagatatactagaaaaaatgccgtgcattgcaacgggtaaaaatatttttttattgatacattaactattaactattaggagctaagcaataaattgaaacgttaggatcggtatatattataatttaaaaagttaataaaaatccttcctttagttttaggcccaaattggtcattcattccttccttttaaacctaacctagtctgatacctcgtcagctcatgcctatgttcggcatgcggcttcaattgtggactgggcactcgcactcgcatagccactactattttcaacctctagcttgcatagccactaccattttcaatctccgaaagacaatctcgtgtccgtatgatgccggagccaatcctcccccattaaatccgatcgaatcttttttgatgtcctaaaattgatgggggcttttgatctactcgatcttctctgtccggttttcccaaaactgaagagaattcacataactcgggataataggctggagaagcttaccggttggtcatcttcaatgcagattaaattcgacaaattaaagctaaatcaaaagggaaaatcataggaaaaatgatgaggaaggagtgaggaatctttttttgcaatcaattagaggaggaaatacatgggagaagcagatcgacgtcgcgacaacgctagggtttggcacgggcggggcggaggcgcgctgcacacatgggatcgcgtgggaagagatatatggaaaaatattaggtatagatagatttagttatacataataactataactatttattacctaataacttactctatggcctatcacatttggaagattatggctagtcattacacaagttacttttctagtaaaagaaattatacattacttgggccggggccatgcaagcctcgatgatttcagcccgctcgttgtccgttatatgttaatctatccgatacttgtaatacttttatttcttctcggtaattaaccgaataagcaaactggaacagaatcggatcgggagacaagaaaaattgacgacgcacgaatatt

SEQ ID NO: 49516 - DNA, 612 bp, Oryza sativa
catgttctcactggataaccagatatctggtgaaagggaaaaggtttctttggaaaaagtcagaaaaatatcattatgttcaaaagggctggatattgaagaaaacaaaatacatatacaacataatgaaaagactatacctctccagcaccagctaagagttccaaacttctaacatttgaaaggctgtgaatcacattttggccaccaaatgtttcagcattgtcatattcgccatctttactggaattatgaccatcaccattgttaccatactgaagctcaccacactcatttgcaatctcactatattcataggtgttgtcatcactctcaatatcactaccatagccataaccatcctcgtttccaccaaacacaaatccttttttagcgtaattaatcctataccctgccttatcattcttctgataaccaaaatcatcatcatcagtggtttcatcaatgtcatcttcatcactaatgtgctgataatcatcacccaagaaaaggtcatcaagtatgatagagcatgtcaccagcgactccaagttcttgaacgatggaactcggatgtaaggtgtgactatgttcagaaaaacaaggtttgga

SEQ ID NO: 49517 - DNA, 662 bp, Oryza sativa
aaaacattgctaaaatttcgatgaatgcgcacaaaaaaacagccatatacaccaatggttaggacagcattgaaagatgtaacggtaccatgaggggattcggaataatcaatctactatagtatccatgtaaataaacaacatgctcctaatgacgaaaacatgtctaaatgtagtcaaatataatacaccaaaaatgaaggcgctaattaagcgtctaaatgtagtccaatagaatacaccaaaaatgaaggcgctaattaagcattagaccaggagcagaaatgcagatttgaacacggggtcttccggctagctccacaaggtggtgggctagacgacctgggttcgaagcctcaccccttctaattatttgatattaggtccttccctaatattcgtggttttttttcagatttgaacacataacacgcgtttgcataacgaatataaagcatgtaattaaaggcccgaaaatcaggggatccccccgcgacgcgaacacaatagcccaccaaataattcaaaccaaagcatcgcaatctgacgaaacgcaagcaatcacggaggacgaatcatgtaaatgccctaacaaaacaaaaaattaggggattgaggggatcgaagtctcacgcgcggccgaagaagaggaggaagcggtc

SEQ ID NO: 49518 - DNA, 632 bp, Oryza sativa
  unsure (1)..(632): unsure at all n locations
atttgattcgagctttctagaatgtaaagttcccttagatgagcgagagagagagagagagaagatcacgcatcctattggactgagccagcccaagtaacctattgggtaaggaaacagacgcagcttctgctaatttatatgcatggcccatcataagcaacatcactggttgctgtatgttaacaatttagactccaaaaagaatttgaaaatgtgcttcagagtttaaattgcgtctgtcatactaccttaaaaaccttttgccagatagcttcctgcccggtaaatgctaaaggcaaattaattccttgaagtgccatccagtcaatttctttctcccatcttttccaatcccaccagacaaatgagtctatagagatgctacatgaactttgtcagagataaacagttggaaaccaagtaaagaagagtaaaagtagccagattgggagatntnntttgaagactaaaaatgtgtggtttgatcttgaaaagaacaaaaggtagatctttgaaacaggtagaatacagaaattaaaaaaaaaacttttggcagaatcgcaggactgaaatgcttagaccaaataaaagaacttcaatttgacacgcacagcggcaataatagattt

SEQ ID NO: 49519 - DNA, 686 bp, Oryza sativa
tttcgaaattcaacttttaaaacatttgactaaccattagtataatataaattaaattttatttgctgaaaataatattattggattgacatttggatttactttgatatggttataattttgttgctataatatatgagaaattataacacaaagattagttttggagaatgtcccaaatttgatcgtgccttatattatgggatgatggccctgccttttagatatgaaattgcttttgaaaaataaaagttatgcagattttaatttgcattgtaatgctgttcaaattagtcacacgttctgtttggtgcctacttcctccgtcgcataaaaaacgaatttagtaccggatgtgacatatactgggttggttttttatgggacggggagagtagcacagtacattcgcacttgtgacttgtactatagaataccgaatagtactattaggcaataattattacagtaataagactgtgtgactcacaccaaaattagaagtttggttaaaattgaaacgatgtgacggaaaaattggaagtttgtgtgtgtaggaaagttttgatctgatggaaaagttagaagtttgaagaaaaactttgaaactaaacacggtgtaaatcccagtgggtgcttgtcgtaaatttcgttcatattcaaacctgtctatttacatggaaaca

SEQ ID NO: 49520 - DNA, 1149 bp, Oryza sativa
gatccggcggcgggctagggtttagggttttttggattttttttttgtttgccgaatttattttacggcggcgatggcgtccagcgccagctccacccagtccctcgcctcctccatctccatctccaccgctgagccacggccgccgcgacggcctccgcggcggcgagcggaggagggcattatgcggttggtggtgagattgagaggaggaaaagctacacgcacgggattggtgtccggctccgatggagtagtagaagtagcttcttgcagaagccaagctaaaaactggactagccaaactgtatagtcgactgtccagtttgatctagagcagtcaaaactgacgttagagcaaaggttaataaatgggcgcgcccacagtcaacactatagctaagccaatactagtgctccctcacggttttataattctcgaagttttggataatgacacagtttttaaaatatatctttgatcttattttttatatatataataaataaatgaatgtttacttttatcatagaattttaaagacaaattcatatacgttgttctagttattttaaactaaatacttttaaaattattgatagtcaagttataaaagtttgattacaaccttatccaaaacgtcaagaattataaaaccgggtgaagtaattatagaacttgagtagttttgtgagcggttttggtcctacatgacagtttagtcaacaattttcttttaagaaaatatgggacccacctttcagattctatctactgatctgtatctttttcccctctcacctctctctctatctctctatccctggctgaggagtcgcgacggctacgagcctactcttgcgcatgctagcggaggcccagtaggagcggcgatgactacggggctcctcgcgcaagtgccggcagagactgagaaggagaagtgtgagtcctcgcgcatgcgccggaggaggctgagaaggagtggcacaggctacggggcatcttgcgcacgcgctggcagaggccaaggaggagcggaggtggctacaagcatcctcacacacgacagtgtcggtgtgcgtggtggtggagatgacctggccacaagcagctctagtcatgaagctcggcgagacgtgctacgg

SEQ ID NO: 49521 - DNA, 3518 bp, Oryza sativa
gcaacaatcaatatttggaacaaattctggaccaaatctacctgtaatgttgaatggaggcaacagagataaatcaaacagaagatccaaattcaacatgaagacaactaatcaagacagctaaaagagaaattctccaaataaaggcgacatggatcaaaacaatcaaatatacatattaaaatcagtgtgcttactgctcggtgaggtacacgaggaagccatcgtcgccggcgtactcgccgcagaaggcctcgcactggcccgcgctgcggcggacggcggcgcaggccaagccgccgcggttgatcctggcggagagcgcctcggtcccgcgcacggtgatgcgccgccacagcgcgggctcgtcccgcgcggcgcggcgccaggtggcacacacctggtcggcggccatgaggatgtcggcgtggccgagcttgtggaagatggccaggatcgcgtccagcggcaggccatcggcccagtccctcgcctcctcctccttcttcttgcggcggcggccgcggcggcggcggcggcgagaggaggaggaaggcatggcgtggcgctcgcggggtggggttgcgagggttagggtttggtggaggaaggcgcgcgcgaggtggaggggttcactgggttggagttgaacctgtgattttgtgaggatccataaactccgtcgagtttggtggaaactttgaaaagtccacaaagtcctacactacaccctttagcctccgccccagaataagtttatttatgggttattatatctaacatttgaccgtctgttttacttaaatttttttattattaatatttttattgtgaaatggtaaaacatgaataatattttgtgtgtgacttaagtttttaaaatagaatggacgatcaagcgtcggacatataaacccacaaataaacttattttgagacggagggtgcatatgggattttgtttgggtttgatgtttttatgggttcagatttattgattcatttttttcttggtaaaacactggttttttagcggttgttttagataatatgttttttttacaggattgtgtttataaatagtgggaaagtaggatggtgggggagtagtagagataaatctgaaaataaaatcacaaggatttctaaccttataatttactctgtggttcgtagagaagtagaagcttggtctttgtcaacagcgttgtgaaatagagtatggtcatcgaacggaaatagtatcattcaataattaataggaaaacagattattaactagaattttacggaactttgacgtttgcaaatatatatatgtatatattttgtaatattatttacgtctttggagatttaaatgtacaactatataaatgaaatatgttgatgcttttttaaggccgtgttctaaaatgggatcggcttggctacctccttaatttccattagtgcgcttttttaaatattgtttcgtttaaaaaattttcgttacagaagttgctttaaaaaattcaaataaacttatttttttatttttcacaaacactgctcgacagtagaccaatggccagtggccgtggactcgtggcagccagccccgtaggagagaggaggatggtgggcttgtatattatggtcgtggattcaacctttataatttctttctttcaagtaattcgacttcgatctctcttactatttccttttttacatgttgaggatcgtaaatggcaagcaaggataaaaaaacgcggcacacttagctttccacaacaacggtgatcatctataaatcagctctgtcatcatcagttcatcactctatgatgctttcatccgtactagccactcaaaatcgtacgtttgcgcgaccatatgagaagccatctttgttaaagatgaagattttttctcttgcaattaaaatgatctttgccctaaatattactatgaagttgcccatatataggtcacatatataaccaacattttttaatagatgacgtcgttaatatatagacacatggttgaccaatttttcttattaaaaaattacatatttgtaatttatttggtgtgagttgttttatcactaaaagtactttaaacatgatttatatcttatttatttgaaaaaaaattgaaaaagatgaatagtcaaacatatatctaaaagttaatatggcatcatataatacaaaaatggagatagtatttgcttcacttggtccatgtgttaaatttcataagtacccaacatatgaaattgtggaccattaagttcccaactgtgttgcttgcttacttttcatacttgccaagtgggtgacgagagacactagaaggctccagagggataatgcacgtacgtatttgatgattgatcagacggtcatcatttatccaatcatgtatccgatggtatttgtttttcagcttaagtggcctaatttgctcctgagaaagattagttttttcacgactttagttgatgtttctcaacttctgaagatgacagcaagctagaactcatctgaagatgttccatcaccaacatacatgtcattggctgtttatgtacatccggtaaccggaaattgtagaggctggatttatcccattttgtaaagaaaaaaattcactctacatatgtccatccttcggctttcaggtacctgcgatcacccttgtcgagcatcctgcaatcctgctcctcatcgaattcattcacatgaacgtcatggaggtagcgatgaggctccaggaaatactccgacttcaagaactcatccaggccgtcgtcgcggtcctgttcgaagcagatgctggaccacggagaaagatcgccagtgaactcgtcatcgccatagtcagtgtcggcttcttcgtccttgccattctgcgccctatcggcttcttcttcctcgccatgcgaccgtatctgaatacttagagccctattggtttccctaataaatcaaagccaatgctaaaatttgaatttttaaacttaactttcatatctatttttaagttattttcaatgtatttttttcagtatttgatttagaacgcacatataaaagtacttttattctataataaattgttttgacttattaagaaattagagtaaatttcacaaaactacatatacttatgtcaaattatcacaaaactatagatttaagaatgtctatcacaaaactacagatttagcgttaaacttttcacggaactacagatttaatgcaccatatcacaaaactacagatttagtgattaagttatcaaagaattacatattctagagcttagatcatagcactattatttatttaatttaaagttataaaaattatagttttgtgataaaatagttttttaatgtgtagttttgtaataaaatagttgttaaatcaatagttttgggatataatatcttaaatctgtagtgccatgataaatttaactctaaatctatagttttgtaaaatacattcttaaatatgtag

SEQ ID NO: 49522 - DNA, 1364 bp, Oryza sativa
ctcggtacccaatctatatatatgtatgaaattattgatcatacgagttgggtttcaaccatgataatataaatgttttataatgaatgattttgggcatatatacatatgaaaatgacgtaactaagaaaatttttcatgggcatgtcaagttaatttgtgtttagttttcacttgtgtcaaggagccaaaatctgttccaagtatttttcatggtagtaaacttgtatatatattttcactcgtgtcaaagattcaagctagctgccaaattatgaatttatgttttttttacatttaatatgattgttagaaatatcattatatattttattctattcttttattaaccccatcttatcatgcacctaactgattattcatgccgatcatcactcatcaggatatataattaatctgttaaacgcacgaattaattaaatcaagctcctaattactaacaaccaaattatggatgaagaaacaagaactgaacaaataataaaaccccaaaaatttaaaatttgggaatacagatcgatcgaagcaacagataattaatccatgtaaactcactggtcggcgaggaactggagcacttcgtcgtcgccgccgaccttgctccagaactcctcgcaccgcccgtcgctgcggcgcaccgcctcgcgcgccatggcgcggacggtgtcgcgccggtggcgctgccagtaggggaggcaggcgaacccccgcatgtcgatgcggcgccacagcgccggctcgtcgcgtgcggcggcgcgccacgactggcacgccagcccggcgcccatcaggatgtcgacgtggtcgagccagcggaacacctggaggatcgcgtccaccggcagctccgcccagtccctcgccgccggcagggtcgtgtggtagaggaacacgccgagcgggaccgtccgggtcctcctcctctggcgccggcgccggcgccgccgccgccgcgacggggaagccatggcgatcgatctcgatcgctaggattctcggatcagtcgtatagccttctagtccataagtcatatgccttcagttggatgcggatactcatatgctgaacatatacggattcaggtgatttgaaataatacagattggaacatggttttgcattttgggataaaattaaataaaattccgatggatatttggtgatactttcgaacaaaattctcagacaaaattttaaataaatttatactgaatgcatgcatgcctgaattcaaacaagtattttttatatatatatcgcgttgaaaagtttaatacacctgtttttctttcttttgattacaatatatatatatatcccccaactcatgattgccagaaag

SEQ ID NO: 49523 - DNA, 979 bp, Oryza sativa
ttcaggtgatttgaaataatacagattggaacatggtttgcattttgggataaaattaaataaaattccgatggatatttggtgatactttcgaacaaaaattctcagacaaaattttaaataaatttatactgaatgcatgcatgcctgaattcaaacaagtattttttatatatatatcgcgttgaaaagtttaatacacctggtttttctttcttttgattacaatatatatatatatctgacaagtgatgattgccagaaagatttaattgcagagaacctacgagcagagttcagtactgtatttcgttttcaacatttatattggggtgccaatacggtgaaatttcaaaaattctggtccgaaattattttagtttttcaacaaaatttggtcaaatttgaataaatattgtcaaattcaaaaaaaaaattgaccaaaataataatgtattggagggtccaatagaaccgaaatgaaattttgaaccttgcctacgaggaagaaagatgcttgtgctcaggatcagttttcaggccattcggcatgttatactacaagcgcttagcgattgtgccgtataaactacaattaacatgcatagagggtaaggaaatgtgtaaatctcagaaaattcctgcaaaaatgcacccatggacaaagtgaacatgaaaaatataaatgtttatggtgggttcaacatttctttctttctttcaaatcattcgactatgctgattcttttacatgtataagcaaagtcaacaagcacgatcatcttaatgtaccaattacccacgcagcagaatccctgagcataagctaagagcaggtttaataggtggagtaagcaccggctctaatttacatccatgtcattcaaagcatcttgacaggaccattcttagggaaactattctaatccctcgaggggatgttccctcgtttgctcaaaaaccatttaaacggttatga

SEQ ID NO: 49524 - DNA, 552 bp, Oryza sativa
ccaggagccgggtaatccgtttttgcaaggtccagtggagcaaccacgccgaggaagaagctacttgggagcgtgaagacgagctgaaggcagcccatcccgatctcttcgccagtccttctgaatctcggggtcgagattccgtttaagggggtaggtttgtcgcgtcccaaatcgactctaaaatacatcctcgaaattgtgcatagaattagtaaaatccatgtgaaagcctccaacaattaaaatgtgcaaagttaaaagtcaaataaggcttggaggatttttgtatatttcctaaaagcctaaaatgtgtaaataaattttagtggaattttcagagcacaaataataattaagaagaaataaacaaagttaaaaaggttttataaaaagaaaaatcctaaaaagtctttccccccctttttcccttcttgggccggctcggcccagctccctccctctctctcctctcccccccgcggcccatccggccggcccccgcacgcgcgccgctgacgggcgggcccgaccgccaccctcgctgacggg

SEQ ID NO: 49525 - DNA, 1650 bp, Oryza sativa
ttttagggtttttctttttacaaaaccactttaactttgtttatttcttcttaattattatttgagctctgaaaattccactaaaatttatttacgcattttaagcttttaggaaatatacaaaaatcctccaagccttattcgacttttaactttgcacattttaattgttggaggctttcacatggattttacttattctttgcataatttcgaggatgcattttagagtcgttttgggacgtgacacattagtacacattcgggacaacttatgactcactattatttaatgatggcttaatgatagttcacgatggtcaatcgtgattagttaattaattaatgtgccaactaaaacctggtaatggtgggttgtgagcacatggttttgatggtcgtgctcatgacaattaaggaccggttcacgagtttcggttgtgaaacattaaccgtgccaaccacaagccagcatgggcaacggctttatcttttgtatagcatggttcattgcggggcaccagactgagaagtggcggagataagcccacgggggtcgctggggagtccatgccttgtttataagggggtgattatgatccaggaaggtgcgctgcagtggattgtgttatgcgaggggtattgtcacaactcctttccgagataccgtggtggtattgaggcacatggtgacataatgtggggttgtgtcttgtgggtacagtggtacacctctggccagagtaaaactattcgaatagccatgcccgcggttatgggcgggtctaacaatgtctttcgtgattagtttcacacttctcaccttagtgaatgatgctataattggtaataatttgattagctcctggtttggaatggtatattcctggtttggagatagaactgtgcagccggtatggttgtatagaatggttgggcctatacaacagggtatgttgtatagtgttggattaatattgtttaattattacttaactgttttattaaattctgaaatgtttgctaaatgctgcttttgcaaatggaaccctattatgccatcctttgttatcctgtgcacttgcatatttgctgcgtggcttgctgagtatgtcatatactcaccttgcaatcattcatcagaggaagagttcttcaatgaggctgatggtgtggaggagtaggtgtagccttggtcaagctgcctgtggagtggagccgtctgcgccgtttaatttatttttccgctgcttagatctttattgattgagaggaactatctacctctgtaatgacattttatacgcttattaattagagtaataattgtactctattatcaatttgttattgtgtgcctcggctaattcctggacgagggttcacacacatgtaagcgtttggaattttggatagaaattccgggcgtgacaagttggtatcagagcctccttgaccctaggttatgccaaatggttacccatagaagccctctaaaaatattggaaaagtagaactgttctcctccctttctcttttaattaaaccaaactaatggcacatacacttcataatcccttttaatggttctcattcaaaatttattccagtgttattagtacagaacatctattactgtactaatggctt

SEQ ID NO: 49526 - DNA, 709 bp, Oryza sativa
tccgtcgtttccggagagtccgttttcgcagaagaagagtttgaagagttccaaggccagcaaggcaagtcacacagatcccaaacaaccctttgagcatgttgatcctatttaaagctattgtttctattcaactattgcatttattttcgaatgtcattgggtggaattaacatattctttgttatggcccttttgtacttgattactacattccttgataccttgggttattacaatttaactagttgagctttatttatattagttcaactagatattagatataattgcttagcttgcttagaaacattagtacacattcgggataacttatgactcactattatttaatgatggcttaatgatagttcacgatggtcaatcgtgattagttaattaattaatgtgccaactaaaacctggtaatggtgggttgtgagcacatggttttgatggtcgtgctcatgacaattaaggaccggttcacaagtttcggttgtgaaacattaaccatgccaaccacaagccagcatgggcaacggctttatcttttgtatagcatggttcattgcggggcgccagactgaaatgtggcggagataagcccacgggggtcgctggggagtccatgccttgtttataagggggtgattatgatccaggaaggtgcgctgcagtggattgtgttatgcgaggggtattgtca

SEQ ID NO: 49527 - DNA, 1475 bp, Oryza sativa
ttgtaataattaagcagtattaatcatccactgtccaacgctacaccacgttgcgacaggcccaaccatccacctaaacaatccaaattcaaaagattacactagggtgagactaatcacggtgaatctggttgactgcccataaccgcgggcacggctattcgaatagttttactctgatcagaggtgtacaaatgtacccacaagacacagccccacgacacgtttccatgcgccgacatgccaccacgacatcccggaaagaggccgtgacaggaccattcgcataaccccctctaaccaagcacaccacacctcaggtttcacccccactcctcgcaaggcagcaggcagtcccctctcgtgcctaggtgaatccggaagccgcataggccgtcgcagggcccatccaaactccatcatgcccacccttgcctggatgcgtcggctagaggaaagctacactacaagcccagccgttgcccgcgctggcttgtggtaagtacgataagttcttccagggcatcccgcgaaccggtccttaactgccatgggtgcgaccagcaaaaccatgcacccacagcccaccatgtgattcattttaattaaccaacacccaagcggtgtcactagtccaacattatcatataaacctatagtctaggttttaaatgagatctccccattgtgtgctagttgaactaagcatggctaagcaaaccctagtcctaactctaatcatgttataacccaagctaacaaaggagcatggtatcatattagcatggctgtaacaataggtaaccatcccatagtaatattgcaaaacaaatgcgatatttgaaagaaaacattaggacatttgcaatataggatcaatatgatcaagtgacaagcatgacttgccttgctctgctgctggagggacctcggcgactatctcgaagtacaccggagcgtcggaagagccggaatctagcgacatacaaggcaaacattgcaaacaggctataagactactgaaacagggaacaaaaccatttttaatggattctacacatttttcttgatttactgagacttgaatgggattaaacggagctcggatgaattagttatgaattttagaagattcactgtgtttattactataacaaaaatccttaaataatttattgcgcaatattaaccaggactgacgtcagcacgggggcgcggcgccgacatgcggggcccaccggtcagcgactcgggagagggaggaagggcgccgacacacgggacccactggtcagcggcgcgggagagaaggggcagcggcaccggctcggcttggctcacggccggccgaccgaccgcggcgacggcgacggcgcgcgcgcgaacgcgttgccggcgacgacaaccggcggcgaaggcgacggcgcaaaggcgatgcggaggcggctgcgctaacggcggctaggaaggggagg

SEQ ID NO: 49528 - DNA, 527 bp, Oryza sativa
caactttttaccaactatggatggagattcacaaataggcttcaataaatgtgtactccttatcctattttggttattttacttcttaaattggtgtcctatttttttttttgaactttacttgttttagagtgttagtttgtaataattggttgtagctcttttgagcaaaggccgggatgatctattccattatctaaaaaaaatcctctttagttggatagttatcgggctctaactcatttggaatcaacagtagatttcgaatatgcatttgcatggaattaaaataaatacggtggataatattgttttggccaaagatccttgctatatatgtccgcgcggctgggacgcgcgtgtgcatacaaatacaaggaaatgctctctttgcgccacagtcgattggaaagtgatcgcacatcaatggatctctgatacggccggatcgccactataaaacaggccattttctttacggcggggggaggcagcaaaaagagtacagaggcacgagccgagggcct

SEQ ID NO: 49529 - DNA, 1095 bp, Oryza sativa
atcggactcctcccgcaaaaaatcggctcggcaaaatctaaactcggtttttgggaataaaatcgaacagaactcgattcggataaaatacccacccatttgctccgattctggaggggaaagatagaggaggatgagaggataaaaccccctcaaaaatcgaaaaaatcggggtcggattgggtgcggatttgagggcacaaggtggcgcggtagggcggctcgggctcggcttggccggcggctggaggaggaagatgggtccgacatgtgggtcccacatgtcggtgacccgagaaggagggggcgggcggcgtcggctgggccggcttgggccggttcgaccgcgcggggaagagaagagttgggccgaaatcggcccaacgacttaggggaggattttaaaaacttttccaattaaaataattcgtgaaatgatgtttcatttattaaaatacttcccttgctcaaacaattcctagaaaattctagaaaatagaggaacaagcaaagtatttaataaaattttatctagctcatttttatattgagatttaacaaattaaaattaggtcttatcttttaagcttttaaaattatttctaataattccttttaaacaacaatttataatttaaggattttaaacaagaaaagaacttaacaattataattagatcattattgatcaaataattactgaactgttctttgtatcatttaggaattgagctccgaaaaatccgagaaaattccagagagtataattaaccatggagaatttaataaaaattaaatccatccatgctttatatttaggaaattttatttcccacatttaacttcacttgtaaattaatgaacatttaatataaattctaataataatttattaaataatttataaatcctgaaacaaaaatcaggaagtgacagtgtcacgtcccaaaacgactctaaaatacatcctcgaaattatgcaaagaataagtaaaatccatgtgaaagcctccaacaattaaaatgtgcaaagctaaaagtcaaataaggcttggaggatttttgtatatttcctaaaagcctaaaatgcgtaaa

SEQ ID NO: 49530 - DNA, 874 bp, Oryza sativa
atagagggggaggtgtgaatccaatttcacaataatccaaccattccatagtgtccatgtgatatgaatatcctaaaggctagagttgtaaaaccacctaatgttgcctaattaaccagcgaagcatctacctaaaatcatactagtggtaccatgagtagagtgtgcactagttggggttttgtttattctagggtgaacaaggaaataataacaataacaataataagatcataacaaaggtaaataggcatggctatataaaacagtgataacgcgggaatttaaataaagcgataatgcaataatttaaatcaacataattttataaactgggtgtcacgtcccaaaacgactctaaaatacatcctctaaattatgcctagaatcattaaaatccgtgggaaagcctccaacaaataaaaggtgcaaagttaaaagtcaaataaggcttggaggatttttgtatatttcctaaaagcgtaaaatgcgtaaataaattttggtggaattttcagagcacaaataataattattaagaaataaacaaagttaaaatggttttataaaaagaaaagctctaaaaagtccttttttccctcctctaccccttgggccggctcggcccatctccttccccctccctctcctctcctcgcggcccattcggcctcctctccttgctgacgggtagggcccacccgtcatccccttcctcccgccgctcccgccgccccgcccacgccctagcgccgccgccgccggaaatcccgccgcccccgtgtcacgcccagaaatttagcccaaatttccagactattttgtgtattaaatccctgtccaggaccagccagggtacacaaaacgacaagta

SEQ ID NO: 49531 - DNA, 757 bp, Oryza sativa
agagagaggacgacggcgcgagctcgattccgacggggagagaaagcggcaagggtcggaaacggaggagggaggcacggggagtgcttaaatagtgttgggagtgagagagggcggccggaggggaaggaaaccggcgcggcgatctcggctccatcaatgacgccggcgaagtttgcgggaggatttccaaacgaatccgagagagagagagggaaaagtggggggaaagaggcagggaatcacggggagtgatttcccccctctttattgcgcgcggggccggcgggatgcggcggaatccgcggcggcggcggcgctagggcacgggcgaggcggcgggcgcggcacgaggtaggggatgacgggtgggccccacccgtcagcgagggtggcgggcgggcccgctagtcagcgacgcgcgcgcgggggaaggccgatgggcctcaggggagaggagagagagggagggagctgggccgagccggcccaatagaggaagggggaaaaaggacttttagggatttttctttttataaaaccactttaactttgtttatttcttcttaattattatttgtgctctgaaaattccactaaaatttatttacgcattttaggcttttaggaaatatacaaaaatcctccaagccttatttgacttttagctttgcacattttaattgttggaggctttcacatggattttacttattctttgcataatttcgaggatgtattttagagtcgatttggg

SEQ ID NO: 49532 - DNA, 3451 bp, Oryza sativa
agtctatcaagtgacaaacagaattagaagttgcaaaatcaagtcgaacacaggggttaaaaacatttatcaccagtttaggtctatgttgaggacagaacaattcggtgcaacaataaatatatagtgcagatcaagctacatctgaatagatatgtaactctaagtatattacttagaaacaaattgaaaatttatactagttgacatcaaggaagttttattacagtataaattaaattacctatatagactctagaatcccccttaggccaaaaggacatgcagtaacttgtagccacacaacctctaacaaatagcatgcatttagcatcagcctaagtatattcagcacaatgcgccatctacctaagtggcatgaaaaaaatgtatattcagcactcaaaggcagaatatcagatccttgtatcctcaaattcagatcaacacatggccaccaactttcagttaatctcaaacagaagagcagctagttcgaccaacacagtttcagattatatatgtgtgtttatttaaaatccaagatatatacaacttaatgtattacaagttgcagaagtacaaatcattatatgcccagaattttctctattacagattcctaaaattcaatatgagttacagttaacttctcggaataatcatcacaaagaactaataatctaaaacatgatattcgttagaaaaatcatttcagtgtcagtagtacaactgaaagtggcaaagaaggcttttgacacaaagagggactagcaagaataacaatgccttgaaacaatattcgttcctctgcatatacttcttatttaagagaatcctatgatctctctatacaagcttatacattatattcaatgtctaatctaatcctaatagctttttacaagtttgtactgtgaatcggcaaacaaataagcaatccctagctggatcaacaatttcaacatgtgataaagatttgcttcattcagatgttagcagagcaatctaatctgctgcaccgaaaccaagaacaaaaatagcaatgcctgtagcaaagaaaacaaaccttggttgcagaaaccgacttgcagagaaagggttgcacggtgctgtggatctcgaacaggaggcggaggcgacggaggacggcggcgcggtgccggatcttgaccgggaggcggaggaccgacagctggtggaggcgtacgacgcgccggcggacggggtggcgcgatctggatgggaaggacggagcgtcggcgctcgcggacagggatcgggacagcaacggaggatcgcgacggggagggagaggaggaggcggaagcggagggggagagggcggcgcaaggcggcggcgggcggtggccgccgatccagtcgccgagctcctaccgccgtgggttctcccataaagaagacccttttttactgcccatgggctgaaccccattctgagctacagtgtccagcccatcgtaaccctcattttatatggcccaacccaaccctgcccttatccctcctataacccatacaagacacaccattttcaacccattactgtttcaacccgtacaacccatgggttggccagcccattaccaggcttagctgcagtagagtagccaaacatgtttgtcctataaaaaaatattctatctataataatctaccaaaataaatggtcttcatttgcagtaacataattactttttatcgaggatggaatcgtctattcccttcatattgtaagatttctttcaagttctattctaataagtcaaaacatttttaactttgaccaaatctatagcatccagatatttacagtaacaaacatattcattgtcggtacataatttatggaggatttaacgaaaccaagtcaatgttgttataagttactccctccgtttcaggttataagactttttaacattgcatacattcatatagatgttaatgtgtgtgtctagattcattaacatatatatgaatgtgggtaatgctagaaactcttataatatgaaacggaggaagtagatagttttgatttttgatgaaactaaagtgcgcgattgcgatttactgcaacggagggataattttaacttataataaaattaaagtgatttacaacataaaatgaattaaggggagtatttaaatacctcggcggcacgggaaacgagggtacgtgatgttgctaaagaggaggttgatgatggggaaagatgggaggccagtttactaaacacgaagcgcccgaccattgttgccaatcgatcaatctgtggtgaactcggcttcgaaattctcgagaaatcgatcggattggatgaaaagggtcagcttggctcttcttatatgaaggaagggatcgatcaccttttgaaccacacacgaaattgaagctgaatacggaaacatattaggataaggatatgtatttgtgatccgttttctgagcagaaagtggggggctgctagctggcatgagcgtgccagcagcgagcacttccctcccataactactatatattagttaacacttaacactaatgatgggtaattaggaagattctcaagatttttctttcttttttcgggagatttttttactaacagattgaaaatttttaagtcagatttgaaaactttcgatttaagatttaaattttaaagtcaaattttgaaaactttcaactcggatttgaaaattttcagctcgaaatttgaaaactttcaactcagattcaaaaactttcaactcgagattcgaaaactttcaagtccatatttgaaaaatttgaaaacttttaacttgagattttaaaattttcaactcgagatttgaaaactttcaacttgagatttgaaaattttcaactcaagatttgaaaactttcaacacaagatttgaatactttcaagtctagatttgaaatacttgaaaactttctacttgagatttgaaaattttcaactcgagatttgaaaactttcaagtccaaatttgaaaattttaaagttgagatttaaaaattactagtaaactattcactagtaaaaataggaaactagtctaaactaattacgattttttctctaatccatacggcaggaacagcgaacagcgaaaaaaaagaagaaacggcggtgtcaaaaaaaaaaggaaaaaagcggcggtgtcaaaaaaaaaagaaaaaagagagaagaagcgcgcgtgtgtaggccttgtgggccggaaatacgcaatggcaacgcgcgttcgccaattagcattcgcacataaagcgtccaaattcccaaatctgcatggctaaagaaccttttgctttcagataatcaaaactaattacgagaaaactacctttcatcactgggtcctaatattcattctaactttctaaggtactccctactcggttcattttattttttt

SEQ ID NO: 49533 - DNA, 812 bp, Oryza sativa
caatctcagcgaatcgatcagagcgagacctaatagaatttttttaacgactagcaccaaagacagcgaagttcaaactgatagagcagaaaaaaaaatacatgattacaactctggaaggtcgtaaccgggaaaacgaaaaaattaaccaccgcccacgcaccgacaacgccaatacatagacctaggagaaggctagcaccggaccggccgccgttaagcgtggccagggccgaccaccgctaggccaacaaagaaactacagccgggaacgcccgaaacccaccctaaaaaccagcaccaaaactccgctctagccacatttttaagattgaggagagggtgagagagaagatgaaactgctctccctctaggccttccaatgtgaccaacttgtataagctaggacgccgacgcaaaaggacaaacatctagagcgagcatgtaccaattgcttgggaggttttagcaaggggctgccaagacgatgtctacagggagtgaagcgacggtggtactgtcgctgccgtctgtcgaggtctcaaagagaaccaagactaggttttcatccgttagcccacaagaggagggggacatcacgacaatgccctcaggagggaaaacgacgcccgaagcgtcgtcattgtcagcccagctaagaccgggcgcaggttatcacccgcagccctcccctgccaatccatagctattgctttgatgctccaccaccgaccatcctctgccggcacgtgggcaaagctacatcgacgtcctccacgggccagcctcctgcgtactgccacacggccaa

SEQ ID NO: 49534 - DNA, 1893 bp, Oryza sativa
tacctcattccttcaaccaaacaaaagaattgggattgtcccatcctacaaaccaaacaagtaaatggaatcatcccaactaaatcaggaatggtttcatcccatcccacctagtcccaaaaccaaacacatgctaagaaaatgctattacatacttgccataaaaacggttggagcccaacatatctgccaccaaaaaggttggaatccaacatatctgccattagattctaaggcttgaaataacaccgttaggagttgagttctcatccaaatcaggacaaggatgtccctgcccacgaaattgcaggattaacgttctttggcatcaatatacaagaaaaatatcaacatgatagcaacaagaatacagtcaattatcaatgctgctagctgtcgctacctcccaagccacgtgctgttgctgtcgccaaaacctataaatgcgtctttagtactggttgataacatcaactcgtgctaaatatacttttagtactgataccttcagagttagttcataagaaaaacatctctattcaagttagatatgtggagtaggtgggatgataatgcgcgtgaaaactgaggtgagaaatcttgagtttgaacctcacattcccaatttttttttacttagtatgcatctttagtaccgattccttcaaccggtacttaaaaatcaagaactttcgtcttagtttacttgtctcatttactacaaccggtacgaaagaggatttagaaccggcactaaagatcatttttttactagtgtgtcgatctcacaaaaatcgatctccatgagttctctcattgccgtctctagatctaagttcattacaacctttttttaagttgatttactctttgatttgaaatggatcagagaatttgggaatttaggattgctgcaaggagaggggaggggatcggttcttgcttcgtatgcagtaagtcgggagagaggggcagggaggagataattttagtcaagggcaaatcagtcttattatgttgccttgtttcttcgcttagttttatgaagtaatttttgttcttttagttacactagtttaaatggtaatggcaaagagaagcacctcaaaccaacttcagtggcaaatttacaattcgtgttttttttaatgtttgtacagagttaggggtgaaagtagtgatatatttgtaattcttcctacattcaatttctagtagtttcttcatggtttgtgagttttcttccttcgttagtaaaaattgaaaataactttgctacataaagctagcaaacctatgctatacaatattcccaacttccgaaattcttgggtacttttcaatcatacttaaatcaataggttcaacacaaaaattcatcaactgaataaaaacagtttgatgccaattatttcaaatcaaagaaagttcaatccatacaagttgaagtaacagtgatgtataattgtgcattgcaccgtcaatgtatcggtcagtatcattatatctaaaaaagctactttagaattatgaatacccatcctacaaatcctagatctgtcactgccatcagtaaaccgcgcttaccatggaggctcgggaagggcaactagcataatgatttagcaaatttcacccgaatccaaatttgagaaaaaaatataaaactcatggaagcggtacttgaattgtataactagttaaaccctatatctatatccaagccctgaacgagtggttcgggtgcatagatatctaaatcgaacggctgaagatggtgacagccggatctgcagcgaattataaacaaacagttttaagtttccaaataaaattgtaaaggaataagttcgctttagttccctcatattaacatagagtttgaattacatt

SEQ ID NO: 49535 - DNA, 555 bp, Oryza sativa
aaaaattgagaccgcctatacatttgtgattgtagtacaatcatgatgtatttacaaacgtgacttttacacaatttaaaaaaaaagtccctttgttgcatgctatttccatgaaagtgagagtaaatcctctcacatgtgttcacatgtgtgcgctgtgattttttccatcctctcacattgtgcaacaaaatctaacggttcaaaactacgcggaagttaaattatagttatatgcaagttacaatgtagttacatcatgttacatctgttaaatttttagaaaacaaattgttgaaaatatatagaaaaacttaaaaaaaaagtacacatgacacaaaatctattctctcaatcctaaaatacaacttctctaccaatattctcttcccaactaatcacaaccctccattagtaaattcttttacctatcttcacttttcattcaatcacaacctttttcttatttcattttatctactgtcttaatataataattgtattatgtaaaaataaaagtctatatattctgtgacggaggtataataagctcta

SEQ ID NO: 49536 - DNA, 1134 bp, Oryza sativa
atagggtatttacaaacttgtggctaactattacagtagaagctatacgatgactcaactctagtgttttgctatagacttaaactatctatctaatctatatttgagaattaagttagaatgagactaacttatgattgaactcccggcttcggcaagaactccaaaatgactctggaaaagggggttgaagcaagggtgagtacaacgtactcagcaagctattatattcaataataaatgtatgaaatggtaatatttgagtagagctaggtttaattgcagaaagctgagaataaagaagtagaaatcctgaaatgtttgatatgcaacagtatttaatagagtttgaaattatgtttctaaccaagatgccattgtgagtcccaatgctcgataaccgcgagcacggctatttgaatagttttaataatattcatactgcagtagatgtacgctttacccgcaatccatgacgtgccaaacacattagccttgtcatggcaaagcttttcggttactaacatcagtggtacctgttccatgaactctagtccccatgcgctctgaacgtaacgttatcagcagcaagaggagttctggcgttcccggggttttcagagagaactggttgagagacccccgtcatctcaatcaggttttcataattcacacacagctcgcgagataatcaagatatttacctgcgcctcggtaaatatcataatcgccctgctcggcgtaagtttgcctcctgcgcgaggacttaagaagaaccactatacagaggtaccacctttgctagataacttaatcagctaggtctatgcccatacgagaattgtggtcgtactcgtatgttcttcacatgtacttggcagttttatgtcggttggaacagtactagccacccggaaatcaaccatttctaccgtactgtcccaatctaagtttattatattttatgcaatctaactaggcatggctaagcaaaatctagcatatctggtttgctatgttcaggttatgcatttgaaatcatgtatgactaatgcatagaacagagatatagaatatagggtagttatgctcaaaggagaggaataataacttgccttgctccaacgcaaataa

SEQ ID NO: 49537 - DNA, 768 bp, Oryza sativa
gttttgccgggctttacaaccaatagtccaacgtcgaggatagtaaaccacacgaacgtccccgtggaaggcgtaaagttccaaccggcagcttttcagtggctaatgggtattttggggtaaaagaaaatatttgcaaaaggcaaatataaattcaaatgatatttgaataaattcaaataaaattataaaatagcaattaggcatcaaaatgaagcatttgaatttatatgaatttaggtccaagtttcactggaatcggatctacggtttaggagatatgggcttttaaagaataggatttgaattaaatctagaaaatatgaaaggttactattcatggggcccacctgtcagcctttctattctttttcttttctttctctctcctcctcttcttcctcccgtcactttctttcttctcctccttccagcccggtaacagaggggagagagagaatagggcgccgatgcactgatgatggaacggcctcgacggcggtggtaaagtgtgttcccgaacattgagaactcggggaggtatgtggaaggaagaggggaagaggtgagtggctggaacggcggcgacaaaagctcggccgcggcagtaaatagagtagcggtggtggtttgattcaaaagaaaagggaagggggaaaggggcaaaatggaatcacctcgacggggcggatttagtggcgcgaggatttggccgacaacgctccggtaagggagatcggtggacggccggccatggctagagagaga

SEQ ID NO: 49538 - DNA, 672 bp, Oryza sativa
gagagaaaagaggagagcttcaagctcggatgtcggggataaacagagggggttcctcctcttatataggcgatgaaaggcggttgtggaggcggtcgtcaactcggtcacggtgatgctagcgtgaaggaagaaaagacggcgccggcttgattccttagcggcgacgtttgcggcggcatttgcggcggcgtgcgcgtgtggaacacgcgcactgggaggaggagggaggcggctgggttgtgggctgacttgggccggctcggcttagctgggccggaagcccaagaggaaggaggaaaatagaaagaaaaaggattgggccaaaaggaagaaagaacggagtttcggcccgatgacaaaaagaaagaagtctaatttatatatttgatttggataactaggttttgcgaagaatttgaattcggagagaattcacaaaagagattttctaatttatttgagtgcaatatttagaggtggagtttgagggaatttatttggaagcactcaaatagaaaaggaaattaatagtattcctcaaaatatttttgggaatatggtaggaaaataggtggaggcaaaaggataggatttgaaccctaatatatatggcataggtttcaaggaattgtttgaggctaaaaggaaatttaggtgacaaggatataa

SEQ ID NO: 49539 - DNA, 884 bp, Oryza sativa
tttcgtcaaaattaagaatttcggctaaacagccgaaatcaatctacactgtcatcgtttcatcgagttgaggcaactttcggccgtgtggccgaaattgattgcaatagtactgatctgcagcagcccgccgccatcgacgccatctgcttgtcggctacagctgcgatctgcatcgacgtgtctcatctgccgcttagtgcttagggtcatcaagtcgtagcaacgtcgtatacaggtgcatgcgcgtgtaccctgaccgaggagaagcagtagcagggccggcagagttttgctgtgcacggccagaaattttgagtatcaaatctattcggtttgctgtgtaaaagaagagaagaaaaaaaaggatcaggctatcacagccgatctattactgctcacgtacccaaaaaaaaaaaacatagcagccgatctaatctaagatcggttgatctttggtatattttggtacagtaccgaagttactgttacgtccagaaaaatcaacaaaggctagttttaataaaattggctaaacacagtaacatatcaagaccatatattaatctattcggtcaaatatttcggctatgagctatatggccggatttaatcaaggaatttcttcatcaaccatgatgagcgggaacgagatcatgtcggtcacattggatgatttcgaaggagaagaccgcaagtccatggaggagtacatcaaggagatcacacaggaggcgttgatgagggcgtgcactaggactcgtcaaggcgtgatcatcaagcccgggccttcctaagctcgctcccgatttggtaagcaatgacgaggtaatacaatctatccaacaacaagtagcatctacaatgggtaccgagctcgaatt

SEQ ID NO: 49540 - DNA, 1405 bp, Oryza sativa
ataggggtctttcggctagctccatattgtggtgggctagatgatatgggttcgaagtctcacttcttcaaattatttgatattagattcttccctaaaattcgcgttttgaatacccatgaattacattgcatctttccctgaccggggtattgcaaacctcgacacaaactcaatgcgtactactcaacttgtcgcatacatgttttttctatgttatatatgagttgtatataaattgtaactactatgttatagtaaaaaacattatcaaaatgttgtaatctgattatattatagttatacataaatgttttttaaaaacattaccatatgttgtataactactccctactccctagagtatgcaatatacatagcgtaagcgcgatgcaacgtggaactatggatgtctggcattttggttcgaatcgagacatgaccagtcgggacagatagatggtttaatgagcaggttgggagtcgtgacattaatgtgcctatttgatttgtcactggcatgatgatgtattggctttgtttagttccaaagttttttttccaaacttttaactttttcaatcacatcaatctgtcctacacacacaaattttcaatcacatcgttccaattttcaatcaaactttcaactttgacgtgaactaaacacagccattgattggagataggaaaacagagaggcacctgtgattaattagagaagggcgagaccaactacgtggaactcgctcacaatcggctgagtgatgaggagtgatgacgtgatgtagcatactccctccgttttataatataagatattttatcttttctattagttccataatataaaaaattttgctatattacttgtcacatctatcaattctaattcaaatttctatctattttaacctccaactatccaatcaccacaactaaaatcacatctagtaggggtattgtagtcttttattttcatccttaatctttcccaaaagagaataatcccttatattatgggatggagggagtatgcagcaagttttgtagccccttcgttctcattttaagaaaattcaaactcggttacttttaaataataatcatgctaatcatatttatgctaatattatacatgttatatcactagattcatattttaaaatagttttatgcgatgctaatttcatattcgttggaaacaaaacatggaataagtcaatggtcaaaacatatcattaataactgtatgaacaaaatataggccttatatatagtttgggactaggcccctttatatcggtggcgcatctataataagaaggatgggttgtcaaaatgaccgatgttcgtcgctctcagggccgcgcacaggggcgtgtggcccgtgcgaccgtacatg

SEQ ID NO: 49541 - DNA, 1321 bp, Oryza sativa
ttatattatgggatggagggagtatgcagcaagttttgtagccccttcgttctcattttaagaaaattcaaactcggttacttttaaataataatcatgctaatcatatttatgctaaatattatacatgttatatcactagattcatattttaaaatagttttatgcgatgctaatttcatattcgttggaaacaaaacatggaataagtcaatggtcaaaacatatcattaataactgtatgaacaaaatataggccttatatatagtttgggactaggcccctttatatcggtggcgcatctataatttgaggtttgggttgtcaaatttaccgatgttcgtcgctctcagggccgtgcacaggggcgtgtggcccgtgcgaccgtacatggcctccaaatttacagggcctcaaaaaattagcccaaccgaagaaggcccatgtattcgtgtgaggccagagcgccagaaccctgttcgagtccgcgcgtatctccgcgcggcgacttcgcgtgcgtggcgcttcgtattctcaaccccaagccccgaggccccacggcgttttgtattctctttcgttttcatatctgtaacttattcaattcatctcgagtttcgacgtctcgtctcctccgagcaccaggctgctagccggctcatccaatttcacattttcattcaaccagcgaatagcaacttagcaagcaaccaacaagcaaggcgctaggcagcaagctagcaacaacaacgaacattctccgttttcagtttgacagtttctaattatacaaaacaggagttaaaaaatatactattcatgatatatcgcatttgctctgcagtatatatattattttagctatatttggtacttgatttatgtctcacttagagtcttgtacagggcctacaaatttgacggcatggccctggtcgcccttgtgacattgctatctgctggctgccacagaggcgtggacgccgtgtcacgacgtttgccctttccggtttgctgacatgtcggcttgactacttgataacctcccatccttgccgtgccagtttgctgcctccatctcggacttctagttttcgtctggcgtgatgactggtgcaatgacatcgcaatgcatccttgccgtgctagtttgtttccctggccctgtctcggactcatagttgccatctggcatgatgactactgctatgacaacacgatatagtgaggaagctaaaaaaagaacacgacatgacatcgagacgaccacacttcaacttcgcgcttcacattacatgagttctttcttactatattttt

SEQ ID NO: 49542 - DNA, 1376 bp, Oryza sativa
ctagcatatctggtttgctatgttcaggttatgcatttgaaatcatgtatgactaatgcatagaacagagatatagaatatagggtagttatgctcaaaggagaggaataataacttgccttgctccaacgcaaataaatccgagatgggcaacctgattatccgatctttgaaataccacaggttgccatctaaaatataacagactctactaaagaaaaggaagaaccaaattcaataaaagccataaaatagcaagaaagagataagcagtacagagggctagggtttagggtataacctatctcctttatagggtataaggattattaggctaatattttatacgcgggttctaaagagttggtggttggggtggagagggaataagtggctacggtcacctatattttatgtgcaggctctgattggttggtggatagggagtatagtggataattgaacaggttgagcagatatgtgactggtattggctgatagtaggtttgggtagcattatacttagggtttagtcatatttaagccgattgtggagtgggacaatatatcgggcaggctctatattttatgtatatgttctaggtaggtggagggtaaatggttgagattatagctggcggggagtctggttaataagctaactatggtttcaattgtttaagccgatattgaggtaagataaatatcggctagagtttgagtgttctctagtcgtcgctaaagcatgacgactaggtttggtatcttctctagctggtgtcgatagacaatataacggctagagggatgggaggtttgtgcaagtttagcgaggcggaagtgttactccgacaaccgtggatggcggcggagcggctaggattacacagagctcgagatctaactgcgcgacgtactgtggaggtcgagggaatagtgaagctccgaccgctgtacgcatcgaggcgtggggtgccaggagcagcacttcgaccttaggtttggttttgccgggctttacaaccaatagtccaacgtcgaggatagtaaaccacacgaacgtccccgtggaaggcgtaaagttccaaccggcagcttttcagtggctaatgggtattttggggtaaaagaaaatatttgcaaaaggcaaatataaattcaaatgatatttgaataaattcaaataaaattataaaatagcaattaggcatcaaaatgaagcatttgaatttatatgaatttaggtccaagtttcactggaatcggatctacggtttaggagatatgggcttttaaagaataggatttgaattaaatctagaaaatatgaaaggttactattcatggggcccacctgtcagcctttctattctttt

SEQ ID NO: 49543 - DNA, 718 bp, Oryza sativa
tctctttaatgcatataggcaataaaaatatgcttattttgtagtattacttttggaaccatcaattttaaaaatgttattgaaaagtacaataaattgtcataaacaagattagcataaattaattattttattccttgagttagacaccgttgatatttgaatatatgtctgaccattcatcttatttaagatttttatgcaaatatataaacatatagtcatattcaaaataacattagtaacaatataaataaaaaaaataaattataacaatatatttttttaaacaagattaacgatcaaatgcagatttaaacgcaaacataaaaaatagagttaaatgtacaatataaacatatccagaaatagacagcctataaataaagcgcgtcatacggcgtgcttattaattttctagtctaggaggaaagtcaatttatgtctccaacattggaaaaagtttacctgaggtccccctttttgttaagttacgaaccagattttagctaacatggcaactgagttagacccacatgtcggggcatttcagtccaatacatttctgttggcatcagtggtggtcactggcgagaacttgctgagaaaaggcgaaagcatggtggagtggggagaggaggcggcgaaggagcaaaggtattaccacctcctctgcgggcttggccggtgggacacgaaatttttttattttttatac

SEQ ID NO: 49544 - DNA, 949 bp, Oryza sativa
tacatctcgtggctcaacgaggcctgcgcccaactcgatggcattggtaagcgtatcgacgaggccttgaagcaagagtgttgtcgagcgagccgatatgccggaggacatgtgctggcttgcatacgagatcactgcccacgcatggatcttgaatttctccgcaaaggttttggtcgttctcggagggatccggcggagatagaccatctcgcgagatcgatgtcgccgttggccgagaagattttccaatcaatggactggcgttggccttcttggtaggattcgtaccctgcaacaagatatcttgggaaaagatgtaatgtgacaaaatatttatgtacaaattgtaaggaatattttgtgaataaagaaatctatctttaacaaatgtttcttactcagggtgtcgtgtgtaaggccgtgttctcagttaacgaccttagttagccgtttgagttgtacactctccctagcccccagccttgtcgtcggagggatgtcctcgggtggcaaggctcttggacccctggcctgtcttggttgaataagctctgatcctagcccccagccgtgaagttggaaagattggtttccgattacacggtttggttaatacgcacggcgagaactcttacacgaccagatcttacatggtctttcgtctctgaaggatctgacaaggccttatcggctctgggcatctccagccgaagatcccttgggttcctcggaggccttgtcgagacggtgtaaacggacataaggacaggtttcaacgctaggcgtcgtcagagtgaggagttgttgggtgaaaacactttggtcattatatgagaccaagaagtagtctttattgatactgtaagggtgcttacaggtacaatggtattgaatcttacatagaatttaaggaagttgggcaatgttccatgaatttgttaattcg

SEQ ID NO: 49545 - DNA, 1191 bp, Oryza sativa
aaaacaaatcaatctactacgacatataataaaccaacattggctgccatggatatatggatgaagttagagcttattatacctccgtcacagaatatatagacttttatttttacataatacaattattatattaagacagtagataaaatgaaataagaaaaaggttgtgattgaatgaaaagtgaagataggtaaaagaatttactaatggagggttgtgattagttgggaagagaatattggtagagaagttgtattttaggattgagagaatagattttgtgtcatgtgtactttttttttaagtttttctatatattttcaacaatttgttttctaaaaatttaacagatgtaacatgatgtaactacattgtaacttgcatataactataatttaacttccgcgtagttttgaaccgttagattttgttgcacaatgtgagaggatggaaaaaatcacagcgcacacatgtgaacacatgtgagaggatttactctcactttcatggaaatagcatgcaacaaagggactttttttttaaattgtgtaaaagtcacgtttgtaaatacatcatgattgtactacaatcacaaatgtataggcggtctcaattttttgggaaaaaacgaaccatttagcagtttagaaaatgtactaacagaaaacaagaaagttgtactccctccatccacaaaagttacacctattacttttgtcaccaagactaatgtcacgcccggaatttctatccaaaattccaaacgcttaaatgtgtgtgaaccctcgtccaggaatcagccgaggcacacaataacaaattgataatagagtacaattattactctaattaataagcgaataaaatgtcattacagaggtagatagttcctctcaatcaataaggatctaagcagcggaaaataaataaacggcgcagacggctctactccacaggcagcttgaccaaagctacacctattcctccactccatcagcctcattgtagaactcttcctctgatgaatgattgcaaggtgagtatatgacatactcagcaagccacgcagcaaatatgcaagtgcacaggataacaaaggatggcataatagggttgcatttgcaaaagcagcatttagcaaacatttgagaatttgataaaacagttaagtaattaaacaatattaa

SEQ ID NO: 49546 - DNA, 956 bp, Oryza sativa
atcgattgcccaacttcccagtcagaccgcactaccaacacctcactatcagactgccaaaacctagaaaaatacaaatcaaaaactcttaaaagtaaataaatttatttcttataattgtgtttataaagtacaacaacaacactcctctcaatttttgactaaattcaaattctaagctaaaccataatttttcttaaaattattctcttataaaatcaataccaagaggcctcagcccctcttctatttatatcataagatagtatcctaaaaaccacgaattctactcaaataaatactcctaatcccatagaaaacctacgcatacaagtataaagcttatctttttacaattcaaacttcaatcttttcaaatttagaccctatccaaatttaactccacttttcatacgcacacaatccctctgcatatcgaatcttcaccaccacatgcgttactttttagcctaagtatcccgtatgatctcctaatcgtttgatcatcaacttctcccaagttgactcccgatccatcaccggcaacactctcccgaggcattaagacacaactgcacatgaataaacaagaaacatatctgagcacaagtcctttcccaacttaactcaacattagcatataacagtatagcataaattagaattcataaacatgaaataatcacgagtgttcaaagaaacaacccgaaactaactccaatcaggagccagtcgatcagatcgatgggctagccggtcttaccgcaagcatcatactaaaaccctatttttcgtacaatcatgttcattgtattttccccggtctgaccagcatgcatagaccggtcagaccgatcctaactacaaaccaccactccacaaataaaacaccaaatatcaaaaccaatataaatcaaacatctcatgctaattggtcatcacaaaataatagtgaa

SEQ ID NO: 49547 - DNA, 757 bp, Oryza sativa
tcgacaccgttgatagtaccaaggtgatgcccgccagctgttcgacggttggccttgatgtcaagggtggcgcagaccataccagggtcacgtgtcggaccatgatgggtgtgcccgagggcgttctagtacctgatgcatcatccaaagtcttctcgccatggttgatggctgaaatggatcttattccattgctgcccactgggtgttcgatgaaatgtcccaaagacaagaagctgctaatggggaatgctaagagaaattcatggccaccttcttggttgggtggagtgattagacgatgggagttgcaacctttgcattggccaggatccaaattatatttggaaggtttaccattgatgcccccatggccaccaccggctggagtaagcttcctggcatgggagccttttgatattggagttttagtcattggaaccgtgattttaacacaggagatggctgggttgaaaccatggcctccaccaagtctagtaagttctttggcatgggggatggagggaagagaggtctatggtcttgcaatgcaggggcatcatatgaatagccaatctatggaacttgctcgtattatatctaaagaacttgctcgtattatgaaggaaagacagttgagcaacaaagagctgcaatgtatatttgaaggtgcaagtcctgggaagatgtgtattaacccaaaagcattaattcatgatggatctttgaggtcattgctatccaagctacaagttaa

SEQ ID NO: 49548 - DNA, 668 bp, Oryza sativa
tggtgtatgtctttgggagatctagacctttactgttcttaaaaaaaaaatctctagtgtagtactagctactgttcgtcccttcgcatatccatgcacacttaacagttgaaatgtccttttgtataattaattgaaatgtccttttgtcagttgttaagggactgaaatttttaaacagatatattcatctatctggcacaatacagtgacgcatatcgggggtgtttggatggggctaaaaatttttcagtacacgtcatatcggatgtttgatactaattagaagtattaaatatagtctactgacaaaacctatttcataactctggactaattcgcaagatgaatctattgagcataattaatccatgattagcccgcgtgatgctacagtaaacattctctaattataaattaattaggcttaaaaaaattgtctcgcgaattagctctcatttatgtaattagttttgcatgtagtctatgtctattactctaaattaattatcaaacatccgataggacagggacagtttagtccatgatccaagtaccaccgggggtgtctggatgatgacaacatacagagtatatgtaagacaccgctagcgcttaccgctttggcgcacctcccctgcagttgcacagcatgcccatgaagcccg

SEQ ID NO: 49549 - DNA, 1465 bp, Oryza sativa
tgctttcccccaatgagacagctttccctcacacagcagacaagaaactacctatgggtaaccttcacacctatcatctagttactgccagtagtagtgccaagactcggaatcatactagttcaggtattctcataagaacaaatgcctgtatggtaggctcacataaatggcttatgaagtgaagtcctcaattgatagggcaacttaccaaactacaatagcacacgacattggtagtatcatatatttataattaaggacacacagttgtcactttgagcaactaaatagcacacagcttgacagtaggctcacacatataccatacccggtaatgatcacataggtacattaccaccgaacccaggttcacacataaccacccatcaccctgatccaaaacgttttatccgcccgttgtttattacacaacaacacgtgctatcgaaaagatagtacacagtcacacggttcatatacaaataattataaatatatgattaatcaaaattatattttgcttcaaaacaaccttgagcagagctaagcataactactctaccttgaaatgagcccaatgttcaactcagaaaaactaggatgacaaggtatcataggtaatcaataattataaaaggcaaggtataatagcaattaggtcaccctacccatcgatagcatataaataaaagaatgcatgtgttcaaaaaaatatttataaattgggtccaatatgttcacttgccttcctccaagtatcattcctgcattgtgccttctgcagcgaaccactcctctactccaacgtctacacaatcacaaacgaaaaacaaataaacaaaagaaaagactaactaaataacatcaaataaaataaaccaatgaaccaggaatttgagctcgattttacaagaatttagtaggggtaaaaatggagcggattcggatggatagtggtattttaagcggattcagagtggatgcggatgtagaacggattgttttggatgtcggaattggtgtggactcagttcggaaactgattaaatttgtcagatgctatgtgtgtatgcaagcaatacaccattgagttagcaatgcaaaggacaacaacgcaataatcaatgaacggaccatcgtaataattatgtacttaagtactaaataacatgaatacatgatatccacaatataaaaaacaactaagcaagtgttagttagacggtgaaagccctggactaacgaatctaggttaattgatgaattgggccattagatgtgccaactcatgttatatgcaacagattgaatggttacataagttgataatttcggattatgcggcaaatagcctatcggatagtccgcatctgttgtattttagagatatcttgtccgcatctgcatccatatccatcggatttctaaaaactcataccatatcatcgtttcagatggattc

SEQ ID NO: 49550 - DNA, 1606 bp, Oryza sativa
aaacatgtgagaaaaaattaacggcgtcatctattaaaaaacggaggtagtatgattcaattttaacttatcgcacatcaatcttattactgtaattttacattatcatactcacgtattttcctcatcgtctcatatttataatgcagcccctcgcaacgaagtagacggtgttaataagcagtagcagcccaaggatgatatatgtaagattcttgtcttgtgttgtcacctcaataacctgaaacattgtaagggctcggtttgggaaaactggtagaaatgacgcttgacgggttgaggtagccttaggccccgtttagaccctcgggactaaacagttttaagtccgtgtcacatcggatgtttgaaaattaattataaatattaaacgtagactattaataaaacccatccataatcttggactaattcgcgagacgaatctattgagcctaattaatccataattagcctatgtgatgctatagtaaacattctctaattatagattaattaggcttaaaaaatttgtcacgcgaattagctttcatttatgtaattagttttgtaagtactctatatttaatactctaaattagtgtctaaatagagggactaaagttaagtccatggatccaaacaccaccttagttcccaattttttttccaaaaaacatcacatcaaatctttagacacatgcatggaacattaaatatagataaaataaaaaactaattgcacagttgggaggaaatcgcgaggcaaatcttttgagcctaattagtctatgattagccataagtgctacagtaacccacatgtgctaatgacggattaattaggctcaaaagattcgtctcgcgatttccaggcgagttatgaaattaattttttcattcgtgttcgaaaaccccttccgacatttggtcaaacgtccgatgtgacatccaaaaattttcatttcacaaactaaacatgcccttagctgatcacctgctggcttatggaccaaactgacccgaacacattttttaataaaatcataatttaattgtgtaggatagggaatctataagatatactcgatcagtctgaagtccctcactttaattactactccgtattttccttagcaagcataccattaattcaatataagatctatctttcttagagttatgcctatgtataaagagggaagctatatagcgcacgcgcgccaggaaaataagttgtgcacaggccttatccactaccaaccgattcccccctccctgcattcgcatggatgagacgtctagcgctgccgctattcctcctcttcgtcgtgagcgtgcacctccatctccaacctctccatcgagacatcatcaagcccagaatcggttcctctttctttcacactgggggagacaccatctttgatcggtcgcccaaaatccacaatagtcccggttcgaataaaaaccaggactaaagatgatttttagtcccggttaaaaactttttgacctaccaaccgggactaaagatcatttttagtcccggtttaaaaagttgtcgggtcgagttaggccccaactcatttttagtcccggttgg

SEQ ID NO: 49551 - DNA, 2310 bp, Oryza sativa
gacctgggagcaccacatcggaatagtcgccgctccgcgttgcaaccaagctcgccgcttgatccgccgcggcaaggacgacaggaatcgcgccgttctgtgatgccagctcccttcacctcggcttctccagcgcgcactgccttgttggagtcgccgccgccatgagcggagaaggtggaagaggagaacgacaccgacggtggaggtagggagagtggcgttagccggcgattgggtgcggaggtagaggtggagcccgcttgccgaagatgggagaagccaacgcggcaagaggagaggggcggcctcgaccgaggaggggtggatctggccggtcctctccggcgccgccgccccctgctccgcagccgcagcgcgctgccgatgctgccgctgcttcggggatggagaggaagggtggatctggccggccagctgccgtcatcgccctagtgccgcctcgctgacgctgccccagtgccgtgtctatgcgatggagaaaggaggaaaggagagagaaagggagataaaaagtgaaaaaaaaatactagtgggacccactatcggtaacatgcattgtggagtacgtggcaaatggggttcttcatctagctggtatcccaagttcgccaaaatcacacggggcactgcaattgcccttagagtcatgcgcatgactgaattggtcgtgtaaagttgagctcgtcgtgcgtgattcgttcggacgggagcgcgtcactcgggcacggtcatgacgcttgggatggcattcgccgctaccatcctgatccaaaatccgatatggcaatgccatcggaacactttacatagcataacaatctgacatgagcagctatacgacagtcctacagaatgctgatatgtggggccttctcattttttttctatttcttatttttactctttttctttatttttcctcttccactctctctctccctttccttctctctggtggatcggtggtggtggttctggcagcgattccagtcgatcagcagcgatagcgcctccctccgacccatcacaactcctcttctcgccaccaccagccattggcaccaccccaagtctgaggacaacaaccagtttccaacaccgaagaggccaggcgtgatagccaaccagttctcctttactggctcgtggtaaatatgcctcgcctaacacaccttggcataagagcatttggccttggcacatgcactactaaaaaacccttatagggaccggctcataggtgccggttcattaaaaccggcacctaaagagcttttcccacctcccactacttgtagtcttgtacccccttctcgaataagcctcccatccccgtttctctctcccatccccgtctctctctcgtctcgatctccctcccggcactctctcgtctctctccctccccggctcagatctggcgtgagggggcgggaggcagtgggtagcggaggcggtagccggcggtggcagctgcagaggcggaggcggaggcggctgccggcggtggcagatgcggtgcaccacggcggcggcggcggccccctcctcctccacctcaccctcctccgtcctcccctcccccttcccctccccggcgctctctctcgtctaactccctccccggctcagatttagcgtgagggggcgggaggcattgggtggcggaggcggtagccggcgatggcagctgcggaggaggaggtggctaccggcggtggcagctgcggcgcaccacggatgttcatatgtgtatgttcatgttcatgtttatgttctcttgttcatatgtgtgtgttcatgttcacgtttctcttcttcatgtgtaccgagaacgaattgttgttgttattgacgtgattttgcttttgaatgtggggatattgatgtgtaccaagaaggaattgtcgttgttattgatgtgattttgattttggatgtgggatattgttctggatctgagggattatgggatgtggaggggttctggatttggctcgggattcagctcaattcgagccgaagttttttttttggctcaggtagacatgataggtgccggtttcatgtatttgtgccgaccaattggaactgttcgggaaaccggcacctattgtcactttccaaccgacacctatggcatgttctgtaccagtgatgctagatctctgctcgtcgcctcgtcctacccattgcatgcgctgatccgcggtccggtcctgaccacgctggcggggagagaagggaggagtgacgaagtgagagtggaaatgaaaaataaaaaca

SEQ ID NO: 49552 - DNA, 2498 bp, Oryza sativa
tattgtacgtgctctcggcaataaatagggcttgctggctagctcgggggaaattaggccatgtttattagttcccacacaaaaacttttcatcttgttacatcgaatgattggacacatgaaaggagtactaaatatagataaaacactaattacatatattgcgtgtaaattgcgagacgaatcttttaagcctaattccatgatttaacaatgtgatgatacagtaaatatttgctaataatagattaattagtcttaataaattcgactcgcagtttataggaaaatgctgtgtatacgatttttacttaagatactggtacgatcaaacagtaaacagcggacggagcggacggggtggacggcacgggcctccgggcatctaacgggtgcgcacgctcatgcgccctgaagcccagacccatcgtcatgggagtattagtatttgagactattatatgaccgtactgatctaccagtaacaggtgctattcaatctaactaaatttatcatctgaaaattgtttttcttaaaatgtaatcagttgaatgaataatccaatttttgtaaataacatcaagttaattctattatattaaaaccaatatttaatatattttgattaaatatttatcttgtgcttaaatattgctatatttttctataaacttgatcaaaccaaaacaagtttgattaaaaagaatccaaacgacttataatatggaacggaaaacggagatagcactacataaaataaaatcgattatgacgattagaaataaaattactccgtgtagctgtgtgaggaggcttataagatagcaagccaaaacaagattagcttgggctttggatatttcaacggtggaagagagattttagtgtgtgggatccaaactacatatgtataggggttagcttgggctttggatatggtctaacgggtgcgcatcgaaccaaatcggatggtacagtactacagtaggtagctgcggtggcacccgttagtgtgggatccaaactacatatccaaacggtagaagttaattaggatacaatcattccatcgtacaaacatcgtaacaatattgtcgtatgtatagcggagctcgcagtttataggcgaaatctgtaatttgttttgttattagactatgtttaatacttcaaatgtgtgcccgtatattcgatgtgacacgttaaaacttttcacctcttaaagtaaacatggccttgtgtttaattcacgtcaaaattgaaagtttggttgaaattggaatgatgtaacggaaaagttgaaagtttgtgtgtaggaaagttttgatgtgatagaaaagtcgaaagtttgtccaaaaaatttggaactaagggcaaaggagagatccatagttggaaggaaagcgtagcaagtaccttcatctgcacgccggagaagcagctaggacgtcacaagctcacagaagacaagaaagagagaactgatcaaacaggaaccactagttccaactaccaactgacagtgactgacccttaacataaactcaagagggaccaacattatatatataactatacaaatagtatccaagagcagggaacaaaagctattctaactgcaggacatctatttcattgtaaaccttctaaaagtgtaaatctataatataattttaagccaaattagctgagccagccagaaaccataaacaatgttagggtttattttcattggcttgtccaaattttctataaatttacacaaattttagattttttttaatgaaatttacatggagtctataaacctaggcataggacttgagccctagctactctaggcctagatccgcccctgagccgattcaattttctttccacccctgttggcaattaagttggcaatgccaaactcttacagtaaatcaaataattaattgttactggttctattttgaattaattttcgtttggtagttgttttcttaagagcaataaacaaacagcccgacgctacaacttcatttccaagcaatggtgcctcagagtacgtgaagttaaagcttaaatcttaaattcaataatgtataaaaatattatttatatatatcctacatatatatatatatatatatatatatatatatatatatatatatatatgtgtgtgtgtgtgtgtgtgtgggggggggggtaatagtaaatactccggtgtaaacatgcatattggaaaatgacacgcatgtataagggatgcgatttttttttactatgatcttggtataaatatgtactccctctgtcctaaattataaattatatatatttttacacagtatttaataacatacttttacctgtattttattctattatgtggtcccaacaaatatgaaactagtgtcatatgaaagtacttcaaaatataaatatagcgatataacatacataatacttagtataaatatagttagtatgattgttagttaaaagctag

SEQ ID NO: 49553 - DNA, 758 bp, Oryza sativa
tatatatatgtatatatatatatatatatatatatatatatatatatatatatgtatatatatatatatatatatgtatatacacatatatatatatgtatatatgtacatatatatatgtatatatatatatatacatatatatataccactttattattaactttattattcagaaatatatatgtgctgaattcactactattcactactattcttagtgctgaattcactgttatgagtacagaattactgtttacaggttactgttcactcgaaaattttctttaaatttttaggatctttgcagggtggcgaatccaaaaacagccggcgcttgatttagaaattttaaagtcctactcggtactagccgtatgcctcacttatctgcctatttaagcaaccaacttcaggtatccctagtcatatttgaactagctaagcgtttaccgtctccccaggcagttccacccgaggggaacacttctctacggatactggttctccagacgcctatgcaagatgcaggctaaaaacgagaacaaccgagaggtttctcctatagggtccctagcataaacgcttatctagagcaaacaaacggggaaacttaaagaaaattacttcatattaagcaaataggcttacatacggttttcctttcgggaaccccgaaggtagatacaaacaagtttttctcaccttacaaacctttatattacaactccttgcttcaatatatattatgcaaggta

SEQ ID NO: 49554 - DNA, 631 bp, Oryza sativa
tcagaattgggtcacagcccatgggcagtaaaaaagggtcttctttatgggagaacccccgccggtagaagctcggcgactggattggcggcaaccgcccgccgccgccttgagaggccttctccccctccgattctgcttcctcctctccctccccgtcgcgatcctccgttgctgtcccgatccctgtccgcgagcgcatacgctccgtccttcccatccagatcgcgccacccagtccgccggcgcgtcgtacgcctccaccagctgtcggtcctccgcctcccggtcaagatccggcaccgcgccgccgtcctccgtcgcctccgcctcctgttcgagatccacagcaccgtgcaaccctttctctgcaagtcggtttctgcaaccaaggtttgttttctttgctacaggcattgctatttttgttcttggtttcggtgcagcagattagattgctctgctaacatctgaatgaagcaaatctttatcacatgttgaaattgttgatccagctagggattgcttatttgtttgccgattccagtacaaacttgtaaaaagctattaggattagattagacattgaatataatgtataagcttgtatagagagatcataggattctct

SEQ ID NO: 49555 - DNA, 701 bp, Oryza sativa
tatttggaggaacaaaagaagaaatgggggatacaagtttctagtaacacagaaaggaggaggaggaggaagaagagaagtagatcgacaagggatgcccaccggccgcccaggtcgccgtcgtcgccgtgagcctcagctcgccaaattgatcaatcgatgcccccatgttttctgttgctgctcatatatgctggtagtgctgcttgcttaggcctaggctggaacatgactaaccgagcccatggtgcagcccagtagaggcccgacacttgggcacgtagtacatcggcaatgagcagcaccttgcgcaacttgatgttgtaatgcatgatccagtgctggaactcctcgtgcaggtacctcactggccttgcacaccatgccaccgccgctgccatgctcgaacatgacgcagtcaagcgagccgttctcgaggtacttgtaaacaagtgccttggtggtggtgccttgatgtggtaatatagctgctcctcggtgcggcggtccagtgtgcggtgcagggtcttgacagccacctgtacaccgttggaaaacttgccgtagtacaccatgccgaagccgctccaccaagctactacgctccgcgtagcccccggtgaacttgcgcagattctccggcgtgaaccaggcgggcttctcccggagtatgtcatccaggaagggttccacccagggtt

SEQ ID NO: 49556 - DNA, 2324 bp, Oryza sativa
attattggtatatgaaccgtgtgactgtgtactatcttttcgatagcacgtgttgttgtgtaataaacaacgggcggataaaacgttttggatcagggtgatgggtggttatgtgtgaacctgggttcggtggtaatgtacctatgtgatcattaccgggtatggtatatgtgtgagcctactgtcaagctgtgtgctatttagttgctcaaagtgacaactgtgtgtccttaattataaatatatgatactaccaatgtcgtgtgctattgtagtttggtaagttgccctatcaattgaggacttcacttcataagccatttatgtgagcctaccatacaaccatttgttcttatgagaataacctgaactagtatgattccgagtcttggcactactactggcagtaactagatgataggtgtgaaggttacccataggtagtttcttgtctgctgtgtgagggaaagctgtctcattgggggaaagcagtgttggggcggagtgtctaaagagcctccttacatattccttggctgcacataacctcaagtgtgacacttgcgcattgccgttaaaaggatgatgtatcttatgggtcaagctgtacaatatctgttgagtgttaaactaatctattcgaatagctgcgtcagtggtcatggacatgcttggtgatttctcatgaggggcagtttgtgaaaaccaggaatgagctgtgtgctggttaatgaatatagctatatggtcttgtgcagatagatcatgtgtcgatgaatggttggtagcacctgttatttataaatgttgttttaaatctattcataatttgtttataactaaaaattgttgtttatgcgaaatagccattgccttctttgttagccatgcatatgcatatttctgtgtacttgttgagtattctagaatatactcaccttgtaatgcccccaattatagaacaaatgtttttattgtttcctgaagagtttgctgctgaagacgaggaataggttgtgtgtcacaattgactacatgtggcaagttgaatggagcttctacgtatttatcttattttcactgctactttattatattcctaggtccttcgtagcagaataaatttaaactgtagacataatcttatcgtagtcattttattaataaccgttaggtttcttttgtgatgttggctgtgatattatctgtgtctacgtgtgctagcctgattctggagtagcacttaagtggtcctattttgggtcttcataaagttggtattatattagagccgcatcgactgtaggccgtacccttatttagactggtcttactatagccagcgacgaggacgatggcagctcggtgcacaagaagttgctcctctccaaggagcagtccacgtcggtggagagagacatagatagatagatagatagatagatagatagatagagatggatgcagcgacgatggcagtgcggatggatgcggtgctccgcgtcgggctcggggcacctgggtggagagagagatgggtgcagcggtggcggcagtgcggatggatgtcatgctccacgttgggcttggggcacctaggtggtgagagagagatggatgcagtgggagtggcagtgccgatggatgcggcagtgttgatagtgcggacgaatgtggcgctctaggtcgggctcagggcacctgggtggcagcgcagatgaaagcggtactctagttcgacctcagggcagagagagagagagagagcgcggtggagtggaggggaagagcagtgctgacagcagcgtccattcacgcgacggcgacagagtggagattatggaaactggggagcttgacggctcgaccgagacggaagcggcggattggagaggatgtgaacaaagcggcggcgagtctacatggcagcggctatgctactggccagcgtggcttcgacccctctctctgcacatccctaacggtgcagatatcggagttttcttgcgacggtgccgtgcggctcacaaaatgcagcagatgggaggagtagtggaggcccacgacgtcactgattcggaaccggtacagcccacggaacatggcggcgatcagctcgtacgttttgctggtctcgatgatgtgatatccaccggctctgctgtggcggcgtgacggccagcatccatgtcaaacggggtgaactcgaattaggctgctgtgggaagcacgtagagtatagatggtttcctccagcggtgatgtgcactctaggttgatgccgatggcacactcagaggcgaggtagtccgtgccgagcacca

SEQ ID NO: 49557 - DNA, 1231 bp, Oryza sativa
cataaaatgcagcagatgggaggagtagtggaggcccacgacgtcactgattcggaaccggtacagcccacggaacatggcggcgatcagctcgtacgttttgctggtctcgatgatgtgatatccaccggctctgctgtggcggcgtgacggccagcatccatgtcaaacggggtgaactcgaattaggctgctgtgggaagcacgtagagtatagatggtttcctccagcggtgatgtgcactctaggttgatgccgatggcacactcagaggcgaggtagtccgtgccgagcaccagcaaggcctcgccgacgaagtgcttgatcaccaggaagtcgatcgcagagctgccgccacttggagcgatagaggcgcacaacacgcaccagggtggctgcgtacggcgtgcgaatgcagataacggtgtcccacgaatttttttttattttttagacctttttttaaattttattaatataccttttcaatatttccaaaaattaaaccttttgatagcgttgtcctgccatgccagatgcgcgtgacgccatgccagatgcgcgtgacgtgatagagttatttggccatgccagatgggctggcgtggccaaaagttcagatttagaaataccttttagaatggtctattaataaaattttaaaaataaaaagtataaaaaataaaaaaatttcgtgtcccaccggccaagcccgcagaggaggtggtaatacctttgctccttcgccgcctcctctccccactccaccatgctttcgccttttctcagcaagttctcgccagtgaccaccactgatgccaacagaaatgtattggactgaaatgccccgacatgtgggtctaactcagttgccatgttagctaaaatctggttcgtaacttaacaaaaagggggacctcaggtaaactttttccaatgttggagacataaattgactttcctcctagactagaaaattaataagcacgccgtatgacgcgctttatttataggctgtctatttctggatatgtttatattgtacatttaactctattttttatgtttgcgtttaaatctgcatttgatcgttaatcttgttaaaaaaatatattgttataatttattttttttatttatattgttactaatgttattttgaatatgactatatgtttatatatttgcataaaaatcttaaataagatgaatggtcagacatatattcaa

SEQ ID NO: 49558 - DNA, 634 bp, Oryza sativa
tacctgctggaggccattcggtgctggtaatagtcatcttacgtacttcttcttcagttcgcatcggtgcttttctcttctgagtcttactcttcttgcctttggcttgcttagtacgtgaccccacgtggtacgaagggctaggaggaaagcaattcccgggattcaatggattctctccattgggctctctactttgcacactaggctgcaagcttgacttggtgcgaggaggctggtttagcgatgtctgccctattaaaccaaaggaaggggcttctttggcatatacccatggacaattcagggcatagtgtccttgttctctacaatcgtgacaaaaggggacatcttcttctggcattggaagctcattgacctgggtggcaaacgctcgatcaaacacatactgattttggtcttgacttccaactaatggtagctgtgaactaagcagcatgcttggaatggaccgagggtgtgcccttgttaactctcttgaggccagtggcggattgagttgaaaacttgagttactggaggcatacccgctgacattctttcctttttctctgttaaacatctgttacagggattgaggtgagagaggaaaccaaccaggaaagaatagacc

SEQ ID NO: 49559 - DNA, 834 bp, Oryza sativa
taacaaaaattctccgggccacatttgaatttttcttgtacgtattttagggtttgccaatttcttttcgaattttaattaattctattattccttttagcgaatgatttttaatttcgggatgaatttatcaggacgtgacaaatccaccccccttacaagaatctcgtccccgagattcgaggaggctagcaagaagataggttgggcggtcttttcttcttgtctgacttcttccgctccgtcttctataacaaacttgcctaacaaaacttctccactctggactgcttggctcgatctcctgttgcagatggaatcttctcttcacctgacttttccctggttgtacctctagctgacttcgactgggatgcggcattggaagatggggcttcagttccataacttcttataactcgtatctttggagtcaacctcatacaagttaccacttcatgtcatgcgtcaacactagcttgtcattactaggataccatgtttgtcatcataagaatgtcatgcttatcatttacttctaacttgccactgaatgctttggagtatgatgtcacgcttatccagcataccatgtttgacaacttgtcactaactgcatcatattagctttcctagcctccgggtgctagatactactgctattcgatgcaagggtcgataacttttgcctttgaattacgtttctcaaaagaaccaacttatcacacttgacatgctttgacatcttcctaaataactttactactgaacttgttattgtctgaccgttttcctgccaaatctgaagctttgttgttagatgcgattttaatc

SEQ ID NO: 49560 - DNA, 1197 bp, Oryza sativa
  unsure (1)..(1197): unsure at all n locations
tgagaagtgtgaaactaatcacgaaagccaatgttagacccgcccataacggcgggcatggctattcgaaatagtttactctgatcagaggtgtaccactgtacccacaagacacaaccccacatcatgtcaccatgtgcttcaataccacccacggtatttcggaaaggagttgtgacaatacccctcgcataacacaatccactgcagcgcaccttcntggatcataatcacccccttataancaaggcatggactccccagcgacccccgtgggcttatctccgccacttctcagtctggtgcccccaatgaaccatgctatacaaaagataaagccgttgcccatactggcttgtggttggcacgataaatgtttcacaaccgaaactcgtgaaccggtccttaattgtcatgagcacgaccatcaaaaccatgtgctcacaacccaccattatcaggttttagttggcacattaattaattaactaatcacgatcgaccatcgtgaactatcattaagccatcatgaaataatagtgaatcattagttatcccataaatgtgctaatgtttctaagcagggctaagcaattatatctaatatctagttgaaccaatataaataaagctcaactagtcaaattgtaataacccaaggtatcaaggaataaggtaatcaagtacaaaagggccataacaaagaataggtcaattccacccaatgacattcgaaaatagatgcaatagttgaatagaaacaatagctttaaataggatcaacatgctcaaagggttgtttgggatctgtgtgacttgccttgctggccttggaactcttcaaactcttcttctgcgaaaacggactctccggaaacgacggaatctaagcagaaaagagcaaaatcaccaaaacagcacataaacaagcatgaacagtacatgtggatatttttaatgtgtagatctcaattttagaaaaatttagagacttgaaccaactaaatcggagctaagatgaattagttatgaatttttaaagattaaatcggattaaaacacttatatcggtttaattgaattatgacgcaataatgaattatttttgaaaaggaaaagagggtttattgcgtcagcgggctagggtttggtggaccgggcgcacgggcggcggttcacacgaacggacggccgaga

SEQ ID NO: 49561 - DNA, 577 bp, Oryza sativa
tgtgtagcgccagctacatataccaaagttagatttagtttaaataaaagggagtcaggtgtacataccgtgaagtaccaagacccgtatctgtttgttttttttcttatctctgtcaaaagctcaaatcaagaatttgttggcatggcctcaggccgcacgttgcacctaccccagtatctctagtactagctttcttttccatcttaaaactagtagttggatcctgcttcattgtgacttctttgggtccagatcttttttccaacaaaaagttgtataaaaatttgaatattcgtggtactcttttcaaacggctaaatggtgcatttcatatgaaaacattctatatgaaagttactataaaatatcagataaatattttttgagtttgtaataattaaaactcaattaatcatacattaataccacctcattttgcataaaacactaaatcttcatcttcacctacatgaatttcaaacaccaccttaatactacctccatcatataaagcatgtcgtgttacagataaaaaatatcccacagaagctgtcgttttaacatcttcacagga

SEQ ID NO: 49562 - DNA, 1224 bp, Oryza sativa
cttaacggcggccggtccggtgctagccttctcctaggtctatgtattgggcgttgtcggtgcgtgggcgggggtaaattttttcgttttcccggttacgaccttccagagttgtaatcatgtatttttttttctgctctatcagtttgaacttcgctgtctttggtgctagtcgttaaaaaaattctattaggtctcgctctgatcgattcgctgagattgcacttagggcccctttttcaaaggaaattcataggaattttagaggatttcatttctataggaatttttcctatataaccctttgaatcaaaggaatggattctatggaatcctatgaaattcctatagaatgcatcttcccatacaagttttggaggaaatttaacatgaggtagaaccctatggaaagaattatttgagtctttatctctccttaaattcctgtgtttttcctgcggcccaatcaaacagttattcctatgtttttcctgtgttctgtaatcatctattttacactagcattttttgtctgaattctatgtttttcccattctcctattttcttcgttcttgtgattcaaagatcccttaacaaattattgcatgcgagtgagtccgtgcagttcccgtgatttgttgatcttttcctctcgtaacagtaggagcctgtgtaacatcaacagacaattttgccagcgaacattgaccaacgtacagtggtcgaggcggtggtaggtagaatttgtgattcaaaatgaagctgagagtggggaccagagtttctctatttctttgttcgtactgtagtacgtacggaggtaccattcgcatgatagagaccactactgtgacataataaaaatttttagattagatacgtgtattaaaaattagtgaaattaaatgagaaaaagttataattgaataagaaaaaaagataagttggaaatttaaatagtgcaataaataaaaaaaataaaatgaaccgagtagggagtaccttagaaagttagaatgaatattaggacccagtgatgaaaggtagttttctcgtaattagttttgattatctgaaagcaaaaggttctttagccatgcagatttgggaatttggacgctttatgtgcgaatgctaattggcgaacgcgcgttgccattgcgtatttccggcccacaaggcctacacacgcgcgcttcttctctcttttttctttttttttt

SEQ ID NO: 49563 - DNA, 739 bp, Oryza sativa
aaaaaaataaattaccgtttgtacttatatcatcctttaaccattcttttcatttacactacagctaactttacattttcgttacaatttggaccaccccattttatccatctccaaatccgatgactccaccgcagctccacctccaaatccaatgactctacaaccactctgcacactaactctttctctccttttacgtttttttcctccaatatttgggaaaccaccatatctagcaaggaggagcccggatctaacatcttcgctctatgtcaggtcggctcctacctccccgagtccctgcaaacccgacaccccgacctcaactacgaccataacaatagcatacatgctggcaggagaggagaaaaaacatatcggtcactagtgggtgcggctatatatgcgaaggtggagagaaggaacgatgttggctcatgaagaaagagcggtggtgacagtgcgtggaacgacagctagtggttgtcggtgctccgagaagtttaccatcaatacaatcccaactgagtttattgtatttttttttgagtgtagtacattggcggtccttaaacttgtgtaggtgtgtcatctaggtccctgaactcctaaaatgcatttttaggtccctaaacttgtcatgtgtgtcatataggtcctaaccggttcaaaccggctccatgcgctgacgtggcattgccacggtggcacctacgtgtcattggaatccacatgt

SEQ ID NO: 49564 - DNA, 2021 bp, Oryza sativa
ttagttcgatatgtgcttgtaattaattccacgttctcgtatatgcgaaaaaatatcctgttttcggatatactctctccgtccctaaatatttgacaccgttggcttttttaaatatgtttgaccgttcatattattcaaaaacttttgtgaaatatgtaaaactatatttaacaatgaatcaaatgataggaaacgaattaataattacttaagttttttaaataagacgaacagtcaaacatgtttaaaaaagccgacagcggtcaaatatctagggacggagggagtaacaaagttaatataatgtagtactactaatgtatatatatgtaggtgggtgtgtttaaattttgagagagataaccgaatagatggatggatggggctgagctcggtttcctgaactcgacgcaacagcgactgtacaaagacatgcttcttgtatttatgcacatttacattattacatactccctcctttcaaaatattcgacaccgttgactttttagcatatgtttgactgttcgtcttattaaaaaaaagttgtgaaatatgtaaaactatatgtgtacatgaaagtatatttaacaatgaatcaaatgatataaaaagaataaataattacttaaattttttgaataagacgaatggtcaaacacgtatttaaaaagtcaacggtgtcaaacattttgaaacggagagagtatatgtatatatatggatatgagatttaacctgtcagggaacagaacacgccagtaggccacatcattcacacacagcagaatcaacatacatatacatatatgtatatatgatctcttcaggaagacaccaacgcactgtgacagcaaagttcagacaacatatacattatacatgctcgctgtatccgaatcctactaatcattcacacagcggctaattagttaccagcaaagggaacagctaaatcaaattaagcttaatttctgacactggaacacgtatggtatattcagaatattataccagtatgacatcatgcagatcatggcaggtgaggcaaagaaaaataaataaaagaatcaagcgtataaatacacacgtatagtattagtaaactagtaacgaaatggagatgattgcaggcggggcgtggaccgggagcggaatatgctcggggatcccggtcggattccctcatccccacctccgttgttttctcgatcgagacgcggcgtcgtggtcaaacccggccggatgacgtcgctgcgccgtccgccagagacccggccggccgccaccgccaccggcgacgacgactacttcgccaatcgccgtcaatggccgcgagcagccggcgactagggagtagggacttgctgcatctgcggctctgggctgcttctgggcttggctgctctgggccatgatgccatgatgggccgctgcaagtaaccggcgagtaagtagccgtgaaggcccatctagaaaaaataaaaatgaaactggtttacaattggaataagttcacttaggtccctgataattcacgttgagtttgaattacattcttcaaccgcaatgccagatataacgtgtcccttttcttttaaaactggtacaaatatagttccaaggcagtattgtaggctattttgactgacgtagcacgggaagcaaaaataaatgatgaaaaaccttgtgggcctcacatgtcagtgaaacatcttcctcctctctctctcctcatgtcccctctcttcctcatctctgttcaagtctccagcgtgctgtatcagaggggtgaagggcagtgtcgctacgaacgagcggcgcacaacacgcatggcctcggtcacagcgcctcattatcatcacaatgtccgcgttgagatggggtcggtggacccagtgattgcaattttggttcgaaattttggaaatttcagaccccaccggcaaatcaatatatcgaccgaaatttttgggttttatcaaatttttgtttaacttggtcaaatttattcaaatt

SEQ ID NO: 49565 - DNA, 772 bp, Oryza sativa
aggtacctgcacgaggagttccagcactggatcatgcattacaacatcaagttgcgcaaggtgctgctcattgccgatgtactacgtgcccaagtgtcgggcctctactgggctgcaccatgggctcggttagtcatgttccagcctaggcctaagcaagcagcactaccagcatatatgagcagcaacagaaaacatgggggcatcgattgatcaatttggcgagctgaggctcacggcgacgacggcgacctgggcggccggtgggcatcccttgtcgatctacttctcttcttcctcctcctcctcctttctgtgttactagaaacttgtatcccccatttcttcttttgttcctccaaatatttgagtgttgaagcatatatggttgctatttgaattggagcaaagggtgctaacaatttggtatcagagctgtcgattcatgggatttctagcatggagttgatgggagagtactgcagcaacgccccatgcaagtggttgttagatttgggcaagggtgctgctcatgacaccgacacccacaacctgttcgatggaatgcctagccaatctgagatgcccaaggaaaatcagaggatatctaagcctgtccccatcaattctaccgtgaacaaaaaggagaaatggctagacaaagctctagatcggatattggagaagtttgaacaaatggaggccatgcgcatgcaagaggagaagatcaattagatatttcaaaagttggagaagataaaggtttgtagga

SEQ ID NO: 49566 - DNA, 1680 bp, Oryza sativa
gaaagagagggaggagagagagacttcgggctgggcttggcccaaaggaggaagaggagaattatttttaggtttttctttttattaaactttgataattgtttttgttgcttaataattatttccggtgctctgaaaattcaagtaaaatttgagggctccttttagaccaaggagaatttaacaaaaattctccgggccacatttgaatttttcttgtacgtattttagggtttgccaatttcttttcgaattttaattaattctattattccttttagcgaatgatttttaatttcgggatgaatttatcaggacgtgacaccaactccatataaacctccggttgtgatgctatggtatccatatccaatgtcactatatggttatccttttatgtattacatgccttggatgcatcaaccacctatgccgtattaccaagagtggaaggaatcacctaggtcagtgccaaatcattcatctaactcaagacaagaccgtttcccacaaaagaatcggtctggtggatcaaaggtgaagaaggtgaagaaggtgtgggtgaggaaagaagccaaagctccggaggtcgttgctatcaatgaggaatctcaagatgttcatgtacctactggagatgcggtggaaaccacgcaggcaaaggagatcgaagccgacgccgtgactgccaacattgaaggtctaatcgagacaactggtcggtttaaccgccagactacggccggtctgactgaccctcctagccggtctgaccgacggcttgtggccggtctgaccgggcccagaggccggtatgaccggggggcattggagaagagtgggaaaattaagagcaacataggagcttccacttcgaccaaaaatatgaagaatcattgcttagctcctggaaaacaaccacagctgaagtggataccttctggcttatctcgctctcaaaagaggaggctacaacgtcttcgagccataggtcaaaaagaaaaggaggccggagatgtagagaacaaaacaagtaataatttagagcctcgaatagcaacctaggaaagtgtggagacccaatgaggtaaaagttaagagaccggtgatttcccattgtagagataaatccaatttgatgatagaagaatcatcggtcattagagataagtctccttcacatgatgctatgggtgttagggcagtatccgtcttgccttcgaaatcacgcaatctagaaagccgtttttgcttagagggcaagacattaatatgctcatgaggaaaccaagagaagatgaacggtgatggatacaacatcacatctttgagtcgccgtttattggatgctaaggcaaggtattagtttattgtgtttactattatattatatgcctatgccatgttattagaacattgcttgctatctagcacatgtgtgtttttgcttatcaaattaatattatacatacatgttgcaaatgccagttctaggtagtagaattggtaggttggcatataatttgtttgaagtatgatttggctcatgactctttgatatttatttaaagccaaatcatatgtgtttttatggatcaccatataagatatagatttcatatttattgtaccatgaaagttttgcttactagtaattcggctaatgtcaatggtcgatgt

SEQ ID NO: 49567 - DNA, 1299 bp, Oryza sativa
aatacaacggtgtgatcggattgtagattggataagtaatttaagagaaaaattgttttgaatatcgttaaaggtatatgtgtataggcttgataggatgtgtgtcagagtcagtccatccgatttttctccttcagtcggacgtgcgaggagaagcattttcgaaaagtttccggtcagtccatgtctctgaattttaccttgtcctttacatacagtttaaaaaatatttgtaataaagcatagggatagaatattttcccgtcagcccattttatgtctctaaattttacctcatcgcttacatgtcgtaaaaaatatatttgtaataaagcatggggatagaatactttcaccataaattaaatgaaaatttaatttttagaacaaaaactaaatgaaatttgtacatcattttcaacaaaatttaaaccaaaataaaaaatattttttggttttcactttctatgtgaaaatattttatggatttaatcttttaattttttttgaaaaaagtagctcgaaaatttaaaagtatttttcaaatttggtaccaaataattgtcccaattcatttaaatctttggtttttcatgaattatgtttctcacatttagatttatgtttcttaagtaagctaagtacgtgagcacgagatatggggcgatacagccttttgaaaaaaaaaaattaaaattgtcaacacacagtgaactaacaaagttaagttctatatagaggggatcaaaatataaaatataaatgcaagggcatgtagggaatgtggaaaaattcaggatacataaggactgagaaaaatttatagacacgtaaacaatttttctcttaaattgaaatggttttataaatgtttttaaaaattttagtatagtgacatctattaaagaaaatccgactcaaatttgatgtacacatcgagggaaaaaaacaaatttgggtgcaaatagtgtgaatattgttcatacataatactctcctttatctcaaaatatgataatctattattggattagacacacaatctagtactacgattcgggtgtaaatagacacaggattgttcatacactgtgagtaattgctttttttatttctcgatgtttgagttgatttagacacaggattttatgaaagggtatatattcagccttttacactaggtttggttattgcgtttcgaccctctacttcgaaacacaataaccatgcctaccgtagaaagactgaatggtaggaataaaaaaccaagtattttgtggaataaaaataaaccctcaa

SEQ ID NO: 49568 - DNA, 622 bp, Oryza sativa
  unsure (1)..(622): unsure at all n locations
tagcagactaggtgctgagtgctgtccatttttgcagactgaagagagaagatatacgagactgtccattgttagtcagatttgtaaaaatagactctgatgtagtttacttttgcccctattttatttttaacaatacaaatatataacagatcctaagagcttatcttaatttaggagaagttgctcgtttcattaaattaaactgtgaagtaaaaatgtgtgctcgagtctgtcaatgcaatcctgtgttcttgtttgaagatatggtgtagggcaggctaggatcgaacactgaatggtaagactgcttctgccttcatttgtgcacttggtgctgccacgccgattaagcagtagaacaaagtaattttgtcgtgcacaaatgagttatatttcattgaaaatcgaagtgaaaatgaaccaaaagaaatagaaagaaaaaaaaggggngggaaaaaaaaaccttttttggggggtttaaaaaaattttttaaatttactccaaaattattggtaagatttgatattagacgctcgattacttggcttaagttaaggatatcaaatttggggaagcaccaaaggaattattgtgaaggagttgtgggtgcataacgtt

SEQ ID NO: 49569 - DNA, 581 bp, Oryza sativa
ggccaattcgagctcggtacccattttgcttcttgcagacccatttgcttaatatgagtagaaaattgaacgcgaagcgctccttgctttcttttgttggtgtcattatcaatactattgagttattatcaggtatttttcttaataatacaatgtgttcgctaacacaataaaatgttaaacatccagtatgttaaagttgcagtctgacgcctattttgttttgctgcagctctttcaatacttcagaattcttctgttgtttccagctctacatatccgaaatcgtctaaagtctctcaacagagttactctggtaataacaaacaccaattttgtttgatcagttgatctcgttggcttttctatgcactgtctcaatatagtttggtcgccattcaagtctcactacagatgttgaacttggcctgacaccaaatatttataaaatgctacctgatattttttttaaaaattaaattttttccaaattggggttttttttccccccttttgaaaaccccaccatatcttgttggtcctcgtataagtttaattagtgacattcttgaagctttgtt

SEQ ID NO: 49570 - DNA, 701 bp, Oryza sativa
aaaatgcacaaaatctcgtccaacacaaggtaaagggttcttgcacctgagatgtgtgcataaccgaagcactcgcttgagttggcgtgatcaaagtgccttcctccaccacaacccgcatcaagacggaggagagatcgacaatcacatgtgatcatgctaccgctccagagatttcaacatatgcatcatgccggcggtaaggtatacaaaagacagcaaatgattcaccatttcttttacacatacttgtctttagatgagtttggcttgatcatacctggttatgcgtcctcagtccattttcgtatgctatggtttgggtggtcgtcgacattcataggctttttaaaattaagcatgatgcttaggataaatagccttctttaattaaagttgacgtggtgtcaagtttgcttaaatgaaccgtaagtccagtactttcatggacttcggatgtatatccttcgtgaactaacccctgcagggaatttttcaaattgacgagcgagtcctcaagcacgagtcacactggaggtaagacagagctaggagaaaaatcagttgctaacataaaaaggagaaacatatcacctatcaaggggtacggtgcgcatatttctaattgctccttaacatgttcatgcaaatttaccttacccctgtttgagttttgcttaaatgaaaatttggtgaacaat

SEQ ID NO: 49571 - DNA, 765 bp, Oryza sativa
acgttagacgtgggtgtagaggtggtgacagcgctcaagagcacttaagtcctccctgtgcgggtacatagtagagcgacatctaggaacagcgagttgctagtgcctgaagtatcgcgttaggattaaaattaagctttccttggacactttttctcactaagaaatcctctctgccctgtgcccatatttatcttatgtccttgatgaaccggaggaagagataatcacacacgttcccttggattcgatacccttgaaatactccgtagggaaagtgctacatcggtatatccatgcgcttgcggattctatctgtgatcgtaagaaataccaacaactggcatcccgccatgcctcttgaacgatgctgacctcgatcttgtcggtgatcaggagatgcaagcctactacatgctaaaggatcagatatttgctcacacgcgggcatacgatccggagctactaaaaaagataggtatggatgttaattctcataccatttggaaagttgttggatggcagagatttgcggtggcagatgagcctggttctcgtttgcttactttacaatttcggtacactttgaaagaaatagaagatggaatttcctttcgctttttccgtaaagaatttacacttacatggaaatgattaagtacacttttttgttttcacgatgactataaaaccgtttttcggaatttctgggttcgagaaaaacagattttgggaaaaaatttttggtggtcccatttgcaagaa

SEQ ID NO: 49572 - DNA, 624 bp, Oryza sativa
tcaacttttggtgtaccttgcctcctgggagaaggattaatgcacgcacgcaaggaacgcccgttgggttatttccggtcgtgacaagttggtatcagagcccccttgaccctaggacgagccgttagatcccgagccttagcaatattttcaaaataaaaatcccttcttatttgtgaaaatcctctattctctctctgtcttgctgcttcatttattgccaaaatctgacctttaaaatgttgcttttctttttgtttttgtttgtagatggccggcagcgtcagccgtcgtggtttggacatgactggcttcgtcttggagctgcggggcatgtgcgtggtcctggggtatccacatggagtggactaccaggccaggccgcttccggagcaggagggtgacgatgcggagccccacgctgcttgggaggtcactgcagtgatcctcgctggctctcccgagcggatttcgctgacagtcaccgcgggtggggattccttccccgccgcttgccagagcgccgctctcctcgccatcggcactcttcaccagcgctacccggacgagttgccgcactcgccctaccgctaccaccctcgtcgcggaggagcccgcgactac

SEQ ID NO: 49573 - DNA, 714 bp, Oryza sativa
catccaaaatttgaccaaaaacttgaaatatgatatttcataatttttatacaaattttgaaaccttttctcccaggggtattttggtcatttcgacaaatttgtacagtactaacggagactaaccggacggcgatggtaaattttagaagttaagcaaaagtcgatggcatattgtagaacatgataaagtcagtggcaaatcgtagacgtgtgacaaagtcagtggtatataatggattctctcaataaaataattaagtgaagcacccactagaagtgaaataaaataattaagcaagtataaccattggaaataaaaaaattaaattagtataaaaatgaagtgcaattactactgttagtgaaataaaataattaagtataccaaaaatatgcagtgtatgtggaaatatgttaaggaaaataaaagaactaagtgaaataaaataaaataaaattgctgtaggcaaactcacctgtgacgggctctatctgtggggccatcacaggtgacctcacctgtgatggcccaaagtgttgggcccgtcacaggtggcctcacctgtgacggctccacagttggcgcccgtcacaggtgaggccacctgtgatggccccatagttggcgcccatcacaggtgagtttgactagggttggacatcttctagatcgatccagatctggcacccactatcactcactcactctct

SEQ ID NO: 49574 - DNA, 1485 bp, Oryza sativa
atcgtgtttacaaaatagcttggagcaactaatgtcttaaatgctgtttactgcacccctaaccctttatagtataattcccttgtactcccttgcatttattctgcactgccgggtgtgtcttgttgagtacggtggttgtactcagtcttgctcaatttttcccaaccccagaagagaagttccttgaagatgaaggctttggtgtctagttcgtgcctgctgtcaagcgcctgtggtcgtcgccctagtcttccgctgtttctcgtttgtctttgtgtgtgctgggccttcgctgcccatgtaataagttaactatttacgcttccgcttgttaaactctgaattgtatcaacttttggtgtaccttgcctcctgggacaaggattaatgcacgcacgtcaggaacgcccgttgggttatttccggtcgtgacacgagcttcctctcaccacggcgcacctcttggcgatgacggcaagcgacggcgacggcggagacggcgcggcgacgacgccgaagacgggcggcggcggcggcggacttggaacacgtcgcggcggcgctaggaggcacgggagagctcgggagagggggcaaacggaagaggacaacgagaggaagctatatatggcattggattgaagagatcgagctccaaacgagaggaatcgattcgggaagaattcaaactcggttttagggataaaatcaaaacgaactcgattcggagagaatactcaacgattcgctttgattcttgggggaaaagaaagaggagaacgagaggaacaaaacccctcaaaaacccggaggaatcgggctcggatttgggcggaatcggaggtggaagacggcggctcgggctcggtctcggcggcggccggaggttgaagaagggcctgacatgtgggccccacatgtcagtgtcccgagagagaaggggcgcggccggcggcggcttgggccggcatgggccgcgcgcggggagagagagaaagagagagttaggccgaaatcggcccaacggcctaggagggggatttttgaacttttttgaataaaacaatttgtgaaatgttgtttcaattattaaaaatacttcccttgctcaaataattcccagaaaactctagaaaatagaggagcaagcatagtatttaataaaattttatctagctcatttttatgttggaaattttcctagaaaattagggtttagcttgtaggcttttaaaacaatttctaaaaatgatttaaaatatgcatttttaatttagtcgatttttagggcgtgacaactaaagatcctcagccccctcacaggctactgacaggggatgaaccatgactaaagatgatctttagtcccggtttaaaaccccacagccattctacgatctttagtcccggttggtaacaacaatggggactaaagatcatctttagtccaagtttatcccctgtcagtagtctgtcaggggg

SEQ ID NO: 49575 - DNA, 1122 bp, Oryza sativa
atttcatcagttcgtatacgtatgtaagtgccatcaagtgtgttttccttttaatggtgtgtgtccttttttttttatttagaaaacgaactgaggcaactgtgcctcagagatgctcgggcctctcctatgcactatgcatgcttgcatagcttatagccgtatattggctatgtataggttggtgtgtccctgttagtgattatctgtttgtttcggttttatgcggcttgttgctttgcatttttgcttcatgttcttagaaattatatacgtgtaggtggataatgtgcaagataaagtgtatccatcatgtatgtgcccttagacgatatcgatttgtaaaatgaccttcacgtgcttaggtctcctctgcttgaatcgtcttagaaggaggtgggattattttatcccgacgtgccctcatttcgtgtatatcgactaaaacatcgtttttttttcaaaaagaaataaattgacgaaatagataaatatgtaataatataataactagttgggtggcccgcgcaattgcgcggctagcacgcaaacaaaatcatatatttttccgtatgacatttacttaaaatttattaaatagctatcttattgtcttaagactttgaaagaccaaaccttatcattccggtatttctaattatatagtttttaaaattcacaccagctgctaccccttacttctgtcatatccttctttatttgcttgctcgatctgccattatttctattcattctccttgaaacctctaaaaaatggatcttatagtttttagagtttattgtctcgttaggttttgtttttataatttctataagttccgtcaaacgctgccattatactcctctacggcccatccactgtgttttctctttattgtcattgcgattttaaaaatcgaatataattattgttcgggttcaattttttactttctagaagtcccgccaaaccgtcagcggctttactattatatttctttatggcttgcccactgcctccattctttattgtcattgagattttaaaatcaaacatgattatcattggttttttttactttttagaagttctgaacctttaaaaattggatcttgtagttt

SEQ ID NO: 49576 - DNA, 1431 bp, Oryza sativa
ggctctgcaactatactcctatacactttgcccgctgcttcttctttttattgtcattgagattttaaaaattgaatatgattatcaatggggtttattttttgtctttctagaagtcccggaggctctgcaactatactcctatacactttgcccgctacttcttctttttattgtcattgagattttaaaaattgattatgattatcaatggggtttatttttttgtctttctagaagtcccagcaaccgccttacccgtttgcttcacggcatgcctgtcgtccctccttttaatcgttattaagattctatttggtgttttattaacggtttttatatgtcgtatcaaccgccaccactctacttctttataggcatgttacttaatttatctcgtcatgtgttttacatgggtttcttttaatagtctttatttttttatcactaattttaattatttataaattatattcctaaatgatttttttctttttctaattaatcgtgtgttaattgtttaatgacgattaattgtatatgtgcagcagtgtaagctttgtttatttgacagcacaactcttatccgtgtaggtttataattgaattagattatacgtgtactgtgtacaccgccaaagaaacagaaaaggaaagactcctagtatgtaacgtacacagtacatatatatggacttatcttttctacaacaaatctatacagttaaaatctataattgaatcaaatgttttaattaatctcgtattgggttcttatgtggactcctcttacaatattgcttatttctaatttcgattttcagttattttttagattgtatttctacgtggactattcttttctttttcttcgattaatgtgtgaatttctagcctccacagagaacgtggtgccttcttttcgagctgtcttaataatataatagatggacaagtatgcaagttcagacgtagaaaaactaacaaaattaattaactgtgaatagttagcgcatactatttacaattaaatttgtttttctcctaaccagtcgtgtaaatcgaatgtgaacttatatatttaccttttttagataatgtaaatggataacatatccgatctctgcccgtaagcacacatcaaaaagtatcggaagtaaaaaaaaaggaattaaaaaaaggcgtgatgggacaaacccccaacttctgtcaataaaataatctaccaaaataacattttcaaaatcacatagattctattacaaaattttataggcactatgctatccaaatagaaataaaagttcattggctatcaatgccgagcgtgtagcatcattgcatatagtatcatgttgtttctgtgaaagcatcatacaccaagactgaagccagtcctcataatgtttaacatttttttatgttcaaaaa

SEQ ID NO: 49577 - DNA, 668 bp, Oryza sativa
caagttcagacgtagaaaaactaacaaaatttttttactgtgaatagttagcgcatactatttacaattaaatttgtttttctcctaaccagtcgtgtaaatcgaatgtgaacttatatatttacctttttagataatgtaaatggataacatatccgatctctgcccgtaagcacacatcaaaaagtatcggaagtaaaaaaaaaggaattaaaaaaaggcgtgatgggacaaacccccaacttctgtcaataaaataatctaccaaaataacattttcaaaatcacatagattctattacaaaattttataggcactatgctatccaaatagaaataaaagttcattggctatcaatgccgagcgtgtagcatcattgcatatagtatcatgttgtttctgtgaaagcatcatacaccaagactgaagccagtcctgcataatgtttaacatttttttatgttcaaaaattgcatcattacggcaacgttagattgaccaacgtagagtactatctttaaataaaatcattttttaaggtataagcacttttattagtcagttaaaaaaattattttacactgtggggagggggatattaaggtaaagaaaatacattgacatgtaaaaaaataatttatagagtgatatattatatattgatcta

SEQ ID NO: 49578 - DNA, 2918 bp, Oryza sativa
tatagggcgaattcgagctcggtacccaaagatggaactaagtttaggcagctccacaactccacttcaaacttaaatcctaaaaataaatttaggaatcggagatctaccaaacatttccatatttccatagtagtgcaatatggtatatgaatcaaggttacactgtatatggatcccacttccccatgacgccatgttacatttggctggggcagctcttatttcactcatttgggattctgcgtaaagcaaactgtcggtctattatttatcactagaagagccgctggtcattttaagggcatgtttagttcctaaaaacttttctcaaaaacatcacatcgaatctttaaatacatatatggagcattaaatatagataaaaagaaaaactaattgcacagtgtgcatgtaaatagcgagacgaatcttttgagcctaattagtccatgattagctataagtgctacagtaacccacatgtgataatgattgattaattaggctcaaaagattcgtctcgcggtttccagacgagttatgaaattagtttttttttcattcgtgtccgaaaaccccttccgatatccagtcaaatgtccgatgtgacacccaaaaatttttatttcaccaactaaacaggccctaaaagtgtgagttgaatctataaagctcatactccatgccagttcttaattatcaactgttttttttataagagggtccatatttctttattatctgtaaccgttcataatcattactaccatgagtacaaagtatagtaacctttagttataaatataccgatatgtgctactatacactacatgaatatacttcatacaaagtatatgtcaaattttaaattacatgtttgtaatatcacatattaaactgctcaaactactagatgttaaaggttcaacttcatgtacacaagcctaggaaatatgagatatttaactatttatcactcttagatgtgacgattaattatttgtcacatgaaactaaatgttgtagacatatgaggtccatatgttaatgacatatgagtggtaaatagttcaacgccctggaaatggttatcagaaaaaaaaacttggatatcatttttgctcggtatatattctggtaacagccccagaatattggaatttctgcgtcgtgtttgaaaaccttgaacagtatacacgacgattaactgtttaaatcggtgtggaatataggtgaccgaccgacacctcagaatttgggtgagcgatcaggccggctgtggaagcacagcagaacgtacccgaggcctgaaatgaagcgcgacaggtggggagggagtattccctccgtccaaaaaaagaatcaatctagaaggggagtattccctcgttgctttaggagggatgtgataaattaagtttttttgacggagcgtcccgaaacaaacgaatctagaactggatgtgacatattcatttggatatagatatgtctatattcgtagtactatgatgtattatatttagtactaaattatttttttatgggacggagggattaattcgatagctgatggttgttgttgcacgacgcacgatttgcacgggacgggagacgggatggagcattacccaagtccgctgggtacacgtcaactcagggtctccaaatgatacgggagacgggacggcctctcaattgatgggacttgggtgtgtccggaactctggatgatttcttccagatcaaaccagcggccggcagcctaaccccacacaagtagccggcgaaacgaaaccgactcggccctgcccagcgcaaagacgacgatcacacacaagcaggcagcaacctggtaggacgcggattcccgaatcggtccaggtgaccgagagctggggcgggtgtagcggcgtagcccaagttgaggcccgtctgttagtttggctcggcctggcccaacgttgttccacgcgactctgcccgtgctgaggttggcaatcagcccagcggcagcggggtcttcatcatgtggatgtggtggtgtaagaaaagccaagagataatgaaagggattttcaaggtggatgagagtcaagtgtggaagtgtgataatgaagtctttggagctacctgatcaacaacagtcacatgatatcagctaactgtgtcctaatcttccttgatgcaatccaaaatatataataacaacagccaaagtccaatgattgtgacggcgactatttgggagccttcgcggtgtaaataaagccaagaagatatactgtatatttcttttcaagagcaaattaagagatttttaatgtacagtcaggagatcgcggctctcgtgcgtgtcattggactgctgctgctgcgtacgtactacttcctccttttcatattataagattttttttagtattgtccatattcatatagatattaatggatctagacatatatatctatctatattcattaacgtatatatgaatatagacaatgctaaaaagtcttataactggagatagttctatagtacagtacactaaaatccatcacgccaaagcccaaaccgccgatccatacacaaccacacgttcgcacgcacgccatccgctgctgtacacgcgggcgacaaggacactcgaccacaccgcgctagcttgctcttggcgaaagccgacccagcactgcactactgcttggcccggcctgcatatgccgccgtctagctctagcagcgaaagacccacgccgcctaacctgctagctagcaaacagcgcaattttttggcccaatctgcgtgcccgtttgctccggtggcgatggtgagcaagcagacgccaagttttgggtgttgacatcgccacatcgggctgctaaaatttagcaatcaacgttgatgcgc

SEQ ID NO: 49579 - DNA, 638 bp, Oryza sativa
tgacggagcgtcccgaaacaacgaatctagaactggatgtgacatattcatttggatatagatatgtctatattcgtagtactatgatgtattatatttagtactaaattatttttttatgggacggagggattaattcgatagctgatggttgttgttgcacgacgcacgatttgcacggcacgggagacgggatggagcattacccaagtccgctgggtacacgtcaactcagggtctccaaatgatacgggagacgggacggcctctcaattgatgggacttgggtgtgtccggaactctggatgatttcttccagatcaaaccagcggccggcagcctaaccccacacaagtagccggcgaaacgaaaccgactcggccctgcccagcgcaaagacgacgatcacacacaagcaggcagcaacctggtaggacgcggattcccgaatcggtccaggtgaccgagagctggggcgggtgtagcggcgtagcccaagttgaggcccgtctgttagtttggctcggcctggcccaacgttgttccacgcgactctgcccgtgctgaggttggcaatcagcccagcggcagcggggtcttcatcatgtggatgtggtggtgtaagaaaagccaagaga

SEQ ID NO: 49580 - DNA, 577 bp, Oryza sativa
catacaccgaaacaagtctagataaacccaatctgaagctacaaaggccgactctagtaatctagagctaccttcaatcttgtcgagttcatattaaaaaaaaaactaccctagtcgactagagctccatgcccccaagctgacaaagactatattaggttgtctcacatattgtaatcgagtaatactaatacataaagtcaatattggttttggtcaacagaggtatggctattacctatcagttaagaggcctgaacctatataaaatttcttatctcatatctttttatctcaatctctcgtataatctagttccatcgatcctcatattatacaaatatcgtagtcagaatatagctaggccctcacatatccatcgcacatatctaaattcgttgtagtcgctctcttgcatggactccattctccccatcgtatagataacggtgtacacaagttagaatttaatttgtaattttctacaacttataaaatttgcattaaaacttatatatttgtgaagtgatatatcttcatctctactattataccaattgaaggggtcccgagctcg

SEQ ID NO: 49581 - DNA, 584 bp, Oryza sativa
cattgtagcatttcacccgagagtattccaagggtatcgtatttattttatcccgtggaaagatcatgtagagagaacttgactaataatttatatattacttgtgataatcatattctaagtagggattaagataatccaagggtagagtgacacacaagcattaacttctcattctcataatatatcatctaaactaagtgggaagaaaagataaagaaaatctattcctatacttctaatatacatagtatacatacattctagttaaccgatatactacctaataccctctatctgatgccctcctagtactttgtcacaccctgaagttcttttccccaagactaaattgaatttataattgatctcgagaaaataccagtgaaaccctaataaattaatgccaataataatcggaattggcatgtggaatttttcttgagttctacatgtcgaaatgtgctaacaagatttttagtggaattttttcagagctctagaaataattttaaccaattaaaattgagcacaagcaatgtttaatccctagaagttcatttctttctttttctttttctttt

SEQ ID NO: 49582 - DNA, 754 bp, Oryza sativa
taagcactgatcgcgattaaagaaatacacacgttgtgtatggtatggcattttgaaaggggatggggattgtgtgtggtcgtgaatgtattattagtgcatatattgcccaaggagtaaaaatgactgaaaaattgtttctttccttaatatatttccattgttttaacttatcaattatgttattataaaccttacttgcatacataatgctgaaatgcaactagtgtcagttaaacatctaattttgaaaagagtagtgttatgcatgcttaaaaaactctttgcaaacttcttgccaacaaagatctcaactgtttgatttaattagttgaagttataaaaatcaagattcgatcacagtgtgacacatcaatgtagaatgacttgtacttatctcaaaatgataagtaatgtacaatagatgagatggcgtataagatagcatatgctggtttataaatttgtgtttgcatttttcttttgcctaatttctctaaatgctactacctccgctcgaggttataagactttctagcattgcccatattcatatatacgtctagattcattaacatctatatgattgtgggtaatgctagaaagtcttataatatgaaacggaggaagtatattttatatactctaggatcctttcctacagcttcaattaaaaaaaaaagcaagcagaaggcaaattcaataaaagtttcacataagcacatgcagatgcagttacctatacataagggaa

SEQ ID NO: 49583 - DNA, 560 bp, Oryza sativa
tttcggagactacaatcagaacttgtggaatgtgcccagtcttttaagatgttcatagaggtagagtttgcgtgcgtggtttcataggggtgagtgtgtgtgcgttgtaaatgtttgcattgtgctatgtaattctaataaaaaaggattgtgctctaagaccttacccaagatgaagaagggatgaaggactttagtggtccaaggcttaaatcatagagatttaggctgataatttattagttgttgcctatagtgggggttgttttcccttttctagattttttttcttttttttcacctattctaaacagtttgttctcaccttaatataaagttggcatgatgaacaatattgttgtcggcaaagctgacttgggagacctaggccccggcgaaatgcaagatgttcagctgatttgcgatgcgaaatcgagtgtggggagcaaagcggcagatatgttgcaagttagagggtggccaaacaactatttctatcaattatattttcgaaacctcaagaccatcaaccatttgttgtttgaatgcccaatcttaaa

SEQ ID NO: 49584 - DNA, 1464 bp, Oryza sativa
catttttttataaaatagctaaataccaagttcaatcattttgttttttcaggtgggaatgaagggagaagacatgcttgattcttccaatattttggcacatttgagtggaatgaacccttacggctataagtacaacagcactgtggaatcctggatataattctcataaacacacaaattaaagtgtgttttcctttcaattgtgcaagcattaaacacagttttcccttgctcccagtaaataagactgatgctttagaagctctattcgcaagagaagtgcttaggtcaagttattgtttctgcacactactgatttgtaaatagaattgtttccttgtcataatagagataacaagtttcaagatttgtctcgcaatttttcgatgttacaaattcagacatggtccactagaagtattcatgggaaagtaacacaaaacacaatggtcacaaaccagtaatatcagcataatctcatagcacgattaaacccagctaattcttatcatccttgtgggaagaagacccacaaatccgaagccagcagaagaatgagtaattggaaagtggattgcagttcataacatctgccgtttctactcaagttcataaacatctgtcgtttctacttacacagtatgagtgtacccatattgaagagaaaaggagcagaacttgagctgggcactattgtagtgatacaagcgcacgaccatacggggatagagaaaaaaaaactacaccataagtacgctatctaattaatgacagcactactcgatttaacaaagataactggtccaacgtcaatttcaacactaggaagaaataatctgaataataaaagaaacaggtattgagaacattttggcctctatccaagtaatacagggcatattctacaagcataaaatgaaaaacaatactttcaaaatgtttatgcatggaatcgtggatgaagatcaaaaacaaaaatcagtgacacttgagttacaaaactcaaatgccgaaaaatgcgcattattctattccagactgataattcaaccttttacaggacagatttagtaatgttaaatacttgtaaatactggccactaaaaaggtagacatcttgtttaattaattcttgcttccattttagttatcaaagcataaactagaaatagaaatacaccgttgctttagggtggaaatctatctatctatctattatattattaagccacccttgaaaggaaacaccacgttcgctgtgggggctagaaattcccacattaatcgaagaaaaaaaatagaattcaaataggattataatgactcggcatcctcctacaatttggaaagttcagagagagatttatgaatcgtacacattgcaagttttgaatcgcacattgtatctgctgcatgccatcctgacaccgtgacattggaatcaaagtagacactaaaaaa

SEQ ID NO: 49585 - DNA, 638 bp, Oryza sativa
actaatcgatctgccagataatcgaagatctttgttatgctgtcgagcttgcaatcagctagcaataatttgtgatagcgtgtggtgttctgttttatccagtttgctgggaccgtctttcagttcatgtttagatctcattggctgcacccgtgctttatacttgtacctacaaaaattattcgtgcgttgcaacgggtgaatgttattttaatcttattattgttatacggtttaacaaggatgaaattcactgtgggaattcgcttttagaaaatcatgagctagaattaggagcctgactttcatctcaagttagcgtgcaagattttttttttaaaaaattcttatacaacatcttttgtattttcaaaagcaaacgaatttaaaatctgactcatacacggatttgtatttccaaaagcgaacaaagcatgcaagttttttaaaagaaatttttcatacgacctcttttgtatttccaaaagcgaaacaaactaaaaaatcgacccaaatacatatgacgtaccaaaataccggtaaaaacatcttcaatttttataatagtagagatatatacatctgctctatatttgtacgcatgcttataagttaaatttttttattttaaaaattaa

SEQ ID NO: 49586 - DNA, 1001 bp, Oryza sativa
tagctgcaccaagcagatattggtttttgtcccacattgaaaaattatgatgaaagagcacgatttaaaatgttagggctatcatcactcatcagactatattttatgttgtgtagatccatcacctaaagttatggctctagttgagtctaaggtggagcaagcctaaggttggtgggtaggactgtgcgctctaattacatgtattaaagcataggtttgcactctaataagccctggatttttcacattttggttcttttgaaaaacttatttcgcaaatagacccctagaaaaacttattccagaaatggtcctttttggggcgttagagtggctggcgccgtcgttcaacgggacggcgccagccgccgacctcctgccactgtggcacactcgaaccgacgtggtaggaggagggcgcctgtatggctggcgccgccccagggaggagggcgcgtcatcccccaacccacccctcgcctctattcctgtttctctgtatgaagttgcaacggtgtcatttttgttttattttttgaatgttttttcacacttaggatcacgatacaaccaaccacaaaaaaaatttaaactcgaactaccacttagctaagtctgaatatagctagcataccacttagcctaatttgcaccttcaccaaaattagaccataactcctttagtaaaaccctttgatcagcatgttaaacataatgcactctaccactatatgaaattacttaatctaattcaaaatataaccacatgaaatgatagctataagtttataagttaaacagtacagagagatgcaatttttttatttttattttatttttttgatatttttttcatacttaggagaacatagaaaccaaccatagaaaaaataaactcaaacggacaaaatatgtgacatgtagaattttccaaagctctagcgaaacggacaaaatatatcatttattaaaataggcgtaactttctcatacggact

SEQ ID NO: 49587 - DNA, 658 bp, Oryza sativa
gcaatttctgaacaccaatgccagattagaaagtaattgaaaaataggcatggagtcaaggactttgggtaaattgcaataaaatgccaaaacgaaatggaatcagcatttgtaccacgtaacaaaattttgcccatcgatcatggaagaaacgtgcatacgattttgtggctggccaataaactacaaaacaactgaaattattgacaactatgaagagagaatgccatgttacttctttcttatggaacatcccctcttgctcaaaacaaagtcgtggaagaaacatgcacactgcagctggtgcagaaatgtttatacacacaaaatgcttggtatcagtaggatctaaccatgaaaggaatctctcttattcctaatggaaacaaccaatgattgttgccagcgataatattgtaccatctcatcagcaataagctaataacagcacacaattaatactttctccgtaagatcatctcgtacactccacccaggcacccataaatatagtacttttgtagtatcagaactctgaatgctttcctccagtagaaacaaaagagagcaagctagtactaagtgtacttcattgcttaaaatgcactgctgaaactgaaagcaagtagcctactgaagcattagatgttggattcta

SEQ ID NO: 49588 - DNA, 667 bp, Oryza sativa
cgacgaaggatttatttaccatcaaatgcagaggatttgatggtaattctgacgttgccactcatcccaatgatccaatctgctctggtagatggtgtgttacttcaggcttcagcagatcgcctaaacttatccgtttctaggtcctacactacacctgaagactactatttaatcaagtagtactaaattatagcagtttgtgttaggtaagaaactaatcatttcttctttcatctctcttgaataggggaaacttgttcctttcttgtcttggcggcatttttgtgttcctttcgttttctttcttgttgctggagtgatgcaagagaaggaggaattattggttatgcagtgatgatatttctacgtaagtatgtactatttcaaaccaaaggttggtggccaaatgaaaagaatatgacatgagtgtcatagtttcgccgacatatcatttcatcatttttccatggataattagcccattttgcaggagctcgcctctgggcagacgaaaaatagaagaaccaaacaactggaaaaaggattggtccaacatcgcagtcaataccagtgcactgttccatgatttccggcaaaaatgaattgcattaatactctgacgatataattatctggacagagcaagaacagaccgaaacaacct

SEQ ID NO: 49589 - DNA, 571 bp, Oryza sativa
catgcttgcttgaagcagctcattgtcccgttcgagccgtcgtcgttcaccctaggaggagcgccgtcgccgagccgttccacaagtcaccgctgccgccaagacctcgacaaccctagctcgacccacggtgagcatcctgaaggctagaagaccacatgcatgcatccttttcgttaggaatcgacttccatgcacacatgcacttttaccccaagaaccaccgccgctcacactcgccatcggcactacttcgatgtcctctaaccaagaaaactagaggaatggaatcgcgagagcttgctcttcattttatctcttgacctcaacctgacacgagccaccgtttgccgctgccgagctcgagatcgagctcagccatggctagctctgctctagacagagcagagggatgacttccgtgaattagattaagtgcagggatccgtttacaagtgtagaaacacactgacatatgggcctaggactgcgggttgattcctagaaacctcaagggcctttgtgcatattggtccctcaagccatgtggaccccatcctttaaaatctga

SEQ ID NO: 49590 - DNA, 668 bp, Oryza sativa
tttttcggccgattactcacagactttatagttgcagaagaagaaaattgctgtgaaaaagaaaccagcagcaacaattctcaaaccggctccaccagtaagttattttaattcttttattagttgattccagccgattttgtctaacacttgtctcttttacaacctcctccttcttctcctcctgtgcaacaatcatcaagtgaccgaactccatcggctgtggggagtcaccatgttgagaaagaaatacaaccagctgctcctgcaatcctggtaagttttgtcttataaaaattttgaatcgaccacataactcatgtcgagtctcaatttttagaattctttcttgcaggccttagccgatctattttccttcgacattaaagactatcttgatgaagaaacagaagaatataccaccagcaaatctttagttcccttgtccgatgatgtaaagaaaacccttgaagacatctctcatcggctagaagcatcatcactggacaacttggtggtaaactgtgggcctattaggactcggctacatgagatccatcctctaatcccagatgagctagccgatatccttactccagctatctatcttgagcagcatcaattcaagctagagaaagccaagctagattagccggacgtcgggagcg

SEQ ID NO: 49591 - DNA, 696 bp, Oryza sativa
ccttgcttctgcaaacctctgttcatgcaaggttaccttctgtgcaagatgtgataaactatcaaagtcctgggacgagaatttctccttgatcagagctatcataccctgaaaaaccaaatcggctaactgggcatcagtcaagctcaaactgtagcacttattcctcatctccctgaatctctgaatataatcttgcacaggctcatcatgcctttgcctaatcgctgttaaatcagacaatttcatctcatgaactccgctataaaagtaactatggaattgcttctccaaatcggcccaactgttgatcgaaccatacgacaaagaagagaaccaagtaaagccgatccggacaaagacaagggaaacagcctgaccctcaaggcgtcaacagccgatgcttcatcacactgagctaaaaatcggctgacatgttcataggttgagacactgtcctgcgctgagaattttgaaaaatctagaaccttgaatcggttaggcaatggaaccctctcaaaccactcagggtatggatgccaatacaagtttcttaaatcaagtgattgggatagatcggtcgccatgccgagacagtataaatcacttagatcgaaatatatattaacagcaagactatatatgttcatagcatagccgatcagatagatctagggtaccgagctcgaattcgcc

SEQ ID NO: 49592 - DNA, 1552 bp, Oryza sativa
ctcgttaatttttggacaggactaataattggctgcccgatttgatactaaaactcagacggttgaatgatttagttgaccatcaatgaaacatcaagcgataagctgtgatacataaagtttagtcatttgaactttgaaaacaaaagcctcccgccattctaaaatatagtcattttaaaaaacgcatggaaatacttatatttggaacaaacatagtatataagaaactagtgcacaacgaaacaatataacatatgtaacatcttaatttgggaagtggactgaaatatataaaaaaatacataaaacaatcaaatatttcagttcacacataaaaacatagttttaaccactaaaacatcaaaaagaaaaaaaaatggtagttcagatgagacttctctactcctcccggtcaccactcaccacatctaacctccatatatagaatgcacgtgggtcagtgaaatgggagagctggctccggagtccgggaggtgccgctgagcaaggtggacattgccggtgacgaggttgacctctacggtagggtgcatttctcagatatttaaatatttatcacttttaaaatatgatgtttaactatttgtcacttgtagtctatgacatataggctgaatgataaattcttaattatcatttgtatcatttgtaagagcggaaaatagttaaacatttatacattttttgcgactacacccgatatatttgcatgtaaactgaccaattttctcactccgggctgctttttgttgctcataccaccgatacaaagagcgtcacatgtgtactacaacgggccgcggtgcttgaagaaaggagaggctaaggatatgttcagaaaaacttaagattttaagagatagcttattgatctaccttatgaggatctaaataagatggatttcttatagcttttaacttttactccatccacttcaggttataagatgttttaactttagtcgaagtcaaactttttcaagtttgactaagtttagagacatatataataatatttataatactaaattagtttcatcaaatcaataattgaatatatttttataataaatttgtcttgggttgaaatgttactacttttttctacaaacttgatcaaacttaaagcagtttggctttgatcaaagtcaaaacgtcttaaaacctgaaacggagggagtacattatttttgaattatataatcataacttcttataatgtagaataaaagctactacattcgtcctaaaatataacaatctataattgaatggaaaatataatagtagagtatttgaaagagcatctcatttttaaaaaagaaggggcggtgggccatcaacgttgcagtagcgaagtcagtcattggtcggaagtcttgagttgaccgacgacgatatatttccgtgcatcggacatctgacaaagaaccatgcctcatattatcagtttcgaaatagagatatcgtcgtgcacagtggtaattaaggatgtgtcgttttagcgtgttgattcatgccgagctca

SEQ ID NO: 49593 - DNA, 1019 bp, Oryza sativa
ttcaatgtgacacccaaaaaatttctttttgcgaactaaacacacccttaggcttccatcggatggcctaatcagccaaataaaataccaaattttaaatttgcaaacttaattttgagatattttcaacgtagtttctttttcagtattgacttttaagtcaccaaaaacacatatattaaagttttaactacaattttatttttattctctaatgagcagttttggtttattaggaaaaagcaaaaggatagggcctttattctcaaaccatagcagaaaatggacattatgctattttcaaggtggcgcgggggatggatgaccaccaatcgggtgtgtcaggcctgcatcgaggttgcgcggggttgcagcctcgaggtgccggaccggagctgcaggccacggtggagcgcgttgcggtggcactttgtggcgcgaaggcagtgagcagcgaacaaaaatggctcaactaatcgagaccgacctctctatcaataaccggctgcagggacattttcgtcagaatcagatcaccatgaggaggagaaaagaacaattcaaaaatcagtgaaaaagataaaatggtgattcggtgagtaacgcttgcccgagcttcgcatttcatctaatcgaattttatggatagcattccagcgaaaccgattttaaagatagcttgatatccattttctccccccagcaatccccagtcatataagctttgcgcgttacaaagcaaaaacatgttactagtgttgctaaacacatcaattagcgagcgtcacagcaagtctcagctggcccagctactacccaaaccatgattttttttcatttttaattttttattttttaatatttacagaaatattatactgatgaaaatatttacagaagtagacggcagggtgacgtgagggacggacaagttgaaaaaaaatagaaaaatgcattctaaaaaattacattaaccccggcagcaagggacctaagtgcaaaatgcgcacaccttgccg

SEQ ID NO: 49594 - DNA, 959 bp, Oryza sativa
ccgctctccccaggtgcttgctactgcccatcgatggttttctcccgctctagtgttccattccggaggttttgatgcgatggtttggggggtcacgggcgtgagctttttgggctgcttgcgtagaactagtcctaggtgctgcacggcgatgggggaaggtggcggtcgtcgggagtggcggaggggcagaaggcgaggaggttgggcaggctggacgggtgggacagctgaggaggcggggagacctgagagctggggtcgccggcgaggagttgttaggcgacggcgtgggcgcccccaaaagttgcgcgtgagagaatgggttaaggaagaggagaaatgcgtgagagaatgagttaaggatgaggataaatgacctaggttagatcgaatttgcgacttctgtacgtgctagtgggaaatttcatcccaaattgaacggcaacaccctaacaccagcccgcttttaggttgttgggtagcttgggtttctcctggaatcagttccaaggttgtctgtttctttgatggcaatcaaactgggccttagcactagaatgacttgctgtttatattgagatgattagggatgcgctgcatttgcttaacttcacaaaaaagttggtagtgttgttgttgagtgctactgctacagcaccgtcatccagcgctatttgcaaaaagaggaacttgtacctgatcattgtctgttctcagtctgatctaacaaggtttaggtggtcaaactggaggtttgctgttcttgatgacatcttgtgttctttgttgggttagttctggtgcaaaacaatttgacatctcgaagtcttcatgtttgttaaaaatgtatgatgcgccgttcaatatagttgtggatgagtatgactcttctttaagacttatgcatacctaaatgcacatgccctttcttgccgttattaattatgaggttgcat

SEQ ID NO: 49595 - DNA, 527 bp, Oryza sativa
tgttgccttcaccatcaccactacgaattttttaagtattattaaagataaaaatatagtgctacagggaaacaaaatatattgagagtggatggggttgaagatgtcaaagattataaccaatacgatagtatgccactttatagtcagtttgtacagaagattaagaatgtcgagacatctactcagaagaccgtgaagccttacatacgcacggacggtgtgggcaaaaatgttaaagggtaatgattgttgagtggcatgtaagcatctaacaagttagtagttatgtaatggtggtatgtaaggtgatgtgtgatcatatcgcaaaatgacgaacaattgtactcaagatcaattagtttatgtgcaattaccatttgtagtgtaacatttacagatttttatattttaaaagtttttttaaaagaggtttcaaaatttagtagcaattttttatgtgcacttaccattgtttcaaaatttgttaaaaaattttaagtactatgtacatttaagtaagaatt

SEQ ID NO: 49596 - DNA, 681 bp, Oryza sativa
cgggagaggacgaggagcagccgcacccccaccgctaccccgagcgcggaggtttcggcggcggcgagcgcgtgcggcggcggcgccatcgcggcgagccacaggccataggaagaggcaggtgtccagggcgaaaggccacgaaaatgcctatgaaaaaaaaaagaaaaaaaaaacgtagcgaagccgagacgagagagacgaagtggatggcgaggcgcgtgacgtggcggccgccggcatcgcgcgttgagatttttctcgtgttgacccgcacagcgaccgggccgggagcgacgcatatgccgcgtgccgcgtccgcatatgccggcccaggcccacttcagcgtgggcagttggtccgcttcaccgcgaatccacgcggacgtcgccgcggcgaggcgatcgatcgatcaatcggcgaagacgacgacgacgactgctcgcgagtacgggagccactgaatctgtcgtcgcttcaggacacgcggagttggtgcggagtcagcagcattcagcagcaacacacctctgttccattccatcgctgcaagcctgcatacactcgggtcctctacagtaatgaactgaatcactggttgatgctaaaagcatacagtaatgattacagtatgcattcttcccagtctcaacatcaccaacatacgattgaagatacga

SEQ ID NO: 49597 - DNA, 544 bp, Oryza sativa
tgctggtggtatattcttctgtttcttcatcaagatagtctttaatgtcgaaggaaaatagatcggctaaggcctgcaagaaagaattctaaaaattgagactcgacatgagttatgtggtcgattcaaaatttttataagacaaaacttaccaggattgcaggagcagctggttgtatttctttctcaacatggtgactccccacagccgatggagttcggtcacttgatgattgttgcacaggaggagaagaaggaggaggttgtaaaagagacaagtgttagacaaaatcggctggaatcaactaataaaagaattaaaataacttactggtggagccggtttgagaattgttgctgctggtttctttttcacagcaattttcttcttctgcaactataaagtctgtgagtaatcggccgaaaaaatgaagtgattacaaaaaggatcaaagagagctgcttactcttgaaaaatgagttggggcagaaggagttggaggggtctgcttgggtgaagccgatggtgttctttctgtatcgc

SEQ ID NO: 49598 - DNA, 647 bp, Oryza sativa
tatgcttttggtcctaaaatcaaattggtttttggtgttcatactcatagggttagccgatgaggttacatctaatccagtgatcatggtgatgtcgatcagagttggggtcatcagcccttggttgaacaaaaaagcattaatggtattggaccagaaataagtagcggcagccatcagaggttcatctttagcttaattggctatggtaagggcaagcacttggctgattccgatctcgtcccagtgaactttcttgctagccgatacgcacttgtaccatgtaatccaacttttctcgggtggagttttctcgagagatggccaagatttgaaggtgtttttccagtgacctagatctgggttggctaatctgaaaggaatcctatttgtttcaccaatgatgaactcggtaggatcaaggttgccgattggaccaagaaagtaatgattttcatgcgataagatgggaattgcaactaggttggagaggtgctgcggatccaaaagaaccgagaagaagaaagcaagatgaggaaaggggaaatcaatctgatgagagaaaaggggatctagccgatgagaactcacctcagcatactcggctgacggcgcggtagacgggctagcggaggacgaaatcgcca

SEQ ID NO: 49599 - DNA, 666 bp, Oryza sativa
cacccacatagtagtgccatatattacatcatgggtttgcactaacccctactttatacttcacactgccatcccctatatggtagtggcagcatatatcataagtatataacagtaacatgggtttatcaaaatgcattgctccctaaccaaaatgtcaccacctggcaaatgattcacagagtgacatagccaccatcggtagcacatttgcgcccaaagtaatctataacccaagcttggaaactttcatcacttgcaactcgcagataagaacgaaagcattcttgttctggcttggtgagaaagattgcaagttcaattttgtcacttgctgggatggtgaggtcttctatgcgcttccaaatacttgcatttggatctcctacagagggcacttcaacagatgcaacagactgtgcagatgcaagagagttagcaagcctaaggatactagctatcagctcatcctcctctgctttgtggcggctcgttttatgcttcacaatcttcttggtaggtgatttcacaaacttacgcttctgccctgaaaaagtggcatcagttgcggactatagcgaggtattgtgtcggaatcattgcccccatcttgcagtggaaatgtatattcttccaactccttgatgcaaccactgccatccctat

SEQ ID NO: 49600 - DNA, 1082 bp, Oryza sativa
ctcaaagcttttgcttttgcagaaaatgaatgtaactattacattttctatcataagaaaatacatgtactcaaaaacccgaaatgccagtactacattcgtgcagtgcaactccagttcccttactgtttacaaagctattagcgaaagtaagatgaggctctgactgacatacgttcgtatcatatgggaatcatcaggcagcagcagcagctgccctcttgttgatcggtttgcttctccttactccgcaggatccgatcaatgcagcagcatggcagcaatgtcgtggatccagtgccgcatcatctgaacctgctactcttatcctcagtgttggcattcgttctggagacgacccagcgaacacgctcgaagggcagcaataccgtgatggtaccggtgtgtcgccgcttcggttcggtaccctgatcgtgcaggttttaccgtcatttgatatgctctcgacgacaccatcgatcttcagaactccattatccatggtgccgaattttctgaggtaatccatgcgatctccgtaaggtggctggcctaccgggccattagcagaaggtacagttgtgtccgatccggtaaatgtggttgccgaagacagtggtgtatcttgttacgccgcgactgagccttggttctattaatcgggtgcccaactgaataaaacaaaaattagaagtcaaccaaccaggataagttacggagttagcaagcaatagccaaagcgaaacgaataaaaaggagcacagaatgagtacgtaccgtatggccgtggatggtgtggcgataggcgagtgcattgatgaggtgttcgaggcaagtgaactggataaacgcgaagccgtggtgccggccggtgtggcgatcgatgggcatgtggacgctggccacgtacccgaacagctggaaatggcggcggaggtcctcatcgccggtgtaagggccaatgccaccgacgaacatcttgcacagcgtgggcagagccatcgtcgttaccggtagcgtcgaaacaagatttcgacaataataaaaggggtggaggaaatggataggttcagagacaagga

SEQ ID NO: 49601 - DNA, 644 bp, Oryza sativa
tcggattttacaccacatatgccatatatttccaggtgtggtgaaaccatgtgtcttctagggacttaagcacatctgttaaagcagtgtgcgcatggcgtatgcccaatactttggaaatttctttattcacaatatacaagcttctttatagctattttgctatatcactcatcatattttacaaagcagttggtatatcactcggatcatgttatttggaggattcacaccgcatatgctatatattgatatcaagtcacttggttgattacgattatcaaaaccactcggttggttggattatttattccttgactatatgcttggtttgttcaattaaccacattgtcgggggctactcctattaggtgcatctagtcggtgcatctgactttattttccagccctccacagtcttcagatttggtaaaagtactcgggagaccatgacaaagatgattgaagcactcggctttggagtaatctggttcgagagaagattatcttttcgactgcgaaggtctcaagggctactgtggatattatgggtaccccatacccatacggcatggttatccgactagtcataagggataacttatatctatggaatatgtaatagatcatgactcgggtattac

SEQ ID NO: 49602 - DNA, 714 bp, Oryza sativa
aaagcatgtcataaatatgtgttgatgtaaaaacacgaggcctgggagatctgcttaactccagtgcaggtccaaaacttgcctttgggtgtgtgagcatgccagttgatttgatcctgccatcaacaagaaacaaagacaaagaaacccggttaaatccataaacgatagccaatcggctagttgccgatgatatatcatttatctttgggccgatgtcatatgtagatcgatcggcagtcatgaataagtaagaaagaactaaatttactcgattggttgcagatattaacgatatgtaatccctatgtccatatatacttaaatcaagtgattgggatagatcggtcgccatgccgagacagtataaatcacttagatcgaaatatatattaacagcaagactatatatgttcatagcacagccgatcagatagtctagcgtgaatcggctaatactccaataccactctatattaagatatcaaaacaagtaaaatataccaaacaaaagcctaatatacttaaatgtaacaagatcttaatataaagggcagatttaacatgtcaatcaagcatataagataaatgtagttaaatcaggtaagatcagctgaaaccccgatgctaccctaatcggcaaccaaaggcaggctagagattgaattctaatcacgactcataagatcaaagggtaccgagctcgaattcgcc

SEQ ID NO: 49603 - DNA, 1501 bp, Oryza sativa
cccatggtaggctttatctcagattaacaaaggttcaattagctcgtacaattaacaagactgtaaccccggaattgcaaagttacttaataatcgacattcccatgtaaaaagaagttaaataattgacaatttatgtggtcactcctttggagcacgtgaatgtttcctgattcctatcaaatttctgcaaaaaatctatgaacctcctacattacaaatggggcctcaagtcccaactgggctgatgccacggattacacatgttagagaatacacaaagtctaggaatgggaatgttgtcccatgtaggaaattttcctctgtcatccacatagtagcgcgaggattataaatttctgacagtactgtttatcagcgcagtcaatctctttaaagttcgaccatacaatcaaaattttcctgctatcttgtaccactaaaccaccttcaggctggagatgtgatcatatcatagttctggttggctgttaatcagattgggatggagcttgaagcccagaagagactaatctattatgtcatacatccactagaaagaaaaacacagacagaaacactaaacatttaaaaacccctttgagtagcagagtacatcttcagttgtaggccaggttgtgcaattccagatagcgcaataattatgtcacttgatcaatgttttgttatggtatgtacatgtgactaaatcaacatgtccagctgcccagttgactgtacatatgtaacatgtcaacctgcattacttgctttaagtaccacttcttttgagctacatttaataatggttttggggggtatcagattgtcaatcatgtattgttaattaacatgtgcagcttcacatgcgccagtaatgttcagttaaactaaataagtaaaatttaataaccatctagaataactaaactcaaatgatcatagcctggcaataaatccagaaatcgcaaaagatataccaccaccatttgattagaaaagctactgctttttttcatcacaccgatgggcaaagatttctaaactaaagttcacatacaacatcaacaaataacccttttatgtccaaactaaacagtgcagacttttccttaacaggtaaagaggcctgtagttaataatgccagtccagcactagaaaatgcagcatattccaactattaattcatttgcgttgttccctccttacatgcttatttcagtatataatttcatctggaattctggatatgccaccatcgactatccttgacagttgacattgaaataagaacattaaggcgtaaatgccaatcataggtcagtcctctaagaggtcctatgcaatcatttcatataaaggttttcatcaatgtacaatggtgaatagatatcatctctatgataatgtacttggctcctttttacttaaataatttgaagaccacgcctacaattataaaatgctagtaaactggtcacaataagcttaagctaattt

SEQ ID NO: 49604 - DNA, 667 bp, Oryza sativa
ctgaagggaatcctattggtttcaccaatgatgaactcggtaggatcagggttgccgactggaccgagaaagtagtaattttcgtgcgacaagcttggaattgcaactaggttggaaagatgctacaaatccaaaagaactgagaaggggaaaacaggatgaggggctagaagatcgatctaatgtgaagaaaagagatctggccgatgagaacttacctcagcgtactcagccaacggcgtggcagacgggctggcggaagacgacatcgctgcaggcggagatctaattggagatgaagtcgcctagggatcgccttatgcgtcggagaaatcgtcgaagagagagaagacaaagttagcttcggcggtgaaaacgcaagaagacggtatgaggtttctcgggggcaacgattagtatttaaagcgctggagttacggttaggaaacggcaagagcgaattttgctcgaaatcgatatatggcaaatccgaaacattaccaaatattccggacttggggggcatgtgttaacaaccaaatttggcaatatcagcatcggggatgaagattagatcggggtggaatcgaagacgaagatcgattcgggaacagagtaagagtccgagtcagactgggtcaggtggtacagccgattccgacaatac

SEQ ID NO: 49605 - DNA, 572 bp, Oryza sativa
atatttaatattttatacatgtgtttaaagattttatcaaacgtttttgggaaaaaaaaaaactaaacaaggcttaaagcgtaacctgctgtggttggtcgcacactgtgacacgaatgagcgagacttttctgctcgtgacgtgggaggagacaaaaaagaacgacagtgtttataaaaaaagtagtagagaaattttgagtcgtactgtcgtagcaagaaaaatacatgtcatgcatcagggtttaattcattttgctctgcatgtccatttgtagtcaaatgattaacgctgtatactgatatagcttctcgctgtgtctctctatatatcagcattgcaggagatcgatgctttacttgagagcagcatagcgtctagccggcgacgtacggtcccctgaaaaaagtagggacgaactgcgggcctatgactgttccgtgcatatgcatgagccacgggccaccgccgatctatcggccgaccgtctcatcaaggcagttattcgcatctgcaatgttgtttcctcggcgcatgcagatccagtcatccaaacattaatcaattattt

SEQ ID NO: 49606 - DNA, 661 bp, Oryza sativa
atctcttctggagattgatattttggatatatgaattagctagatcgatcaactttgttaaggttttagctagaaaatgacatgtttgcattagtaatagataataacatgtgtttgttcagagtcatttgtagagcaagtatattctagggtcccatcgtttggcttttcttttaataagccaaaacggcttattagagtaaaaataaatttgtaggtaaaatttttatatatgtgttctcggggacttaaaagccaatgctgaaaaaaaaactacgttgaaaatatctcaaaatcaatgtcaaaattaagtttgaaaattcaaaatttggctttttctttgtctgaataggccatccgatgggagccctagtcagtatatgctgagtttgcatatctgaaaagaaaatcattctttttcttgtttgaataagaacaaaaagatctttctttccatgtacttgtttgtaaagtgtctccatttgcttcttgcaacatgaatagcatgatgataggtggtcagcctcttttcatttctctttgtagcctggtgagctcacaatgctctttttttgtgttcttttgcattgattttaatatttttctgaggtcacaattgctcatcattttcttccttccaagtcatggagctactattatt

SEQ ID NO: 49607 - DNA, 665 bp, Oryza sativa
  unsure (1)..(665): unsure at all n locations
ttctccctctatggatttacgcctccacacctttgtaggcggtggtcgcaactcgttgaaccttctatccctccgctctttggcttctctctgttttaattcttgggcccgaagacgttgcaacctcctcttttggatagtcgtcaaatacttaggcatccaccttggtttcggctccgttccaggaggtaaataatgtcccctgttgattctacccgaagacaatgaagcccccgagctaccctttgtaaacctctcatcaaaccagcgctggagcccggtcagaccggctagaaggcccggtcagacaggcttgagaccggccgtagggctgcggtccgaccggccagagggcctagtcagactggccgactgcgacaagctggtcctggcttcggatttgttactcgaagactccccaacttcatctccagatggtactggcacatcatgagatcccactttaatagttatcaccttcaaagtcctcgtctccaccttaacgcgctttccttccctctttccttcattgacccgatttttaacataaaactggcccattgttggtgaagacaaatgctcacaaagctgcctncttggtccctcccatcctaggttgtatttgcatggaggcatatgattgaacaatgggcggtgttgccccc

SEQ ID NO: 49608 - DNA, 764 bp, Oryza sativa
ctgttagaggaatttattaaacaagtaaacaacaaacgagccaactcgatttgtgtgtgtttttttcttgtagttgatgccaaccaaaaatagctttccaatttggacaaatacttcagcacggatattgtgaatcttttgtgtctcaaatgatgagcacttaatagccattgtgtccacctattagctgctcatcactccacatgctatattaagtgttattttgtcacgcccggaatttctatctaaaattctaaacgcttacacgtatagaaacccttgtccagaaatcagccgaggtacataataacaaattgataatagagtacaattattactctaattaataagagaataaaatgtcattacagaggtagatagttcctctcaatcaataaagttctaagcaacggaaaataaaagaaacaacgcaggcgactcctctccacatgcagcttgaccagggctacgcctaatcatccactccatcggcatcactgtagaactcctcctctgataaatgattgcaaggtgagtatatgacatactcagcaagccacgcagcaaatatgcaagtgcacaggataacaaaggatggcataatattgtctcatttgcataaacaacatttaataaatatttcagaatttaataaaatagttaaataatatttcaacaatattaatccaacgctatacaacacaccctgttgcataggcccaaccatactgaacaaccaacctcggctgtacagttcaatctcc

SEQ ID NO: 49609 - DNA, 667 bp, Oryza sativa
aaatctgtttcgtcgggtttgtgctcgggccgtactgggctggggtgattgggctcactggaaataagctcatttttggtccctcatgaattcatccctaaaccgaaatacagatccctcgattcacaaaaccggcccacacggacccccaccggatcacaaggtcctaggttgtactatgtccaattttagttaacatggcaagttgagtcagggtgggaaccccgtaggatccacatgttaacacccaacactttctttctccaccgtaggatggcggctggcgaagcagaggagcaactctgacatgacacatgtggggtatgtgtgggtcccatgctgattcggctaaaaacgggtataacattgtctagaaccgtgatttggttttgtaaattgagagacccgttatatctattatttcggtttagtgatgaatttaagatttggcgacaaaggacctaaaatgaacttattcgtatggttgatcacgccgagccgccgagctacttgaatgtccacagatatcggttttgggcctgtgagagaagttgggaacacctcttccacgcagtaaaatgtaagattttatcagcatattattaagtaatgagtatattttttagcaatgttctatgaaagttttaagaaaacattgtttaacaat

SEQ ID NO: 49610 - DNA, 1858 bp, Oryza sativa
aaatttgatattaaaaataattaataactaacacgtatataaaatacaatatgaatattacacattagtagttttgtaaagttattgcaaaatttaaaattatgttgtcattttaatatatttaaataatataataagaaaatatatgtgctattatacgagagaaaatataatgatgccagccgcgcaagctgcgcgggccaccatactagtttagataaaatgaacacaaaaacacaagttaagaaaagttagtgccgaaagcatcctcagaaatcattttgtttttaacatcttataattacgatgtaattacgtatcgcttacaatgcattaaatttatgcaataattatatttgatatgttttcattataaagctttctccatacatactcccacttgcgctgcgctgtaacagtgatcatagaacaccgaaaaaataaagatgttttagatacttccggttgaaaaatggaccccaaataacagcgaccatacagacatacagtttgcactcatacgtcaatcatagtaaccagggacacgtacgtgacacgcgcggtccacggaggggcttccacaactcacgctctccgacgtagatgccggctccaacggtagcagatttcgctcctcctagatctcacacccgcaacaacagaacacaccaaacaatgggacgtaaatacacagctggtggtccagctagctagaggcaccatccacctatattttaaatataattttctcttaaattacttatccgatctacaatccgattacactgttgtgttcgtaacaattaaatctttacaataagatctcacatgattatattttgataaaaaatcacaaattacttttatgatatgtctaaattacttttagattttactaagttacttatataaaagtaaattcagtaaaaactaaaagtaatttacttcttagatatatatgtaaattacttttagtttttactgaatttacttttatatgtctaagaaataacttcgtgaaatctaaaagtaatttagacatatcataaaagtaatttgtattttttcatcaaaatataatcatgtgagatcttgttgtaaagatttaattattatgaacacaacggtgtaatcggattgtaaatcggatgagtaatttaagagaaaattttatttgaaacataaatgataggaatatttcccctacttgctcaataaattaatagcaaccaaaactcataaaataatagcacgtgagtggtctctggttaaaactaatttaagatgcctcttcaattagatttaccgcaaacaatgacgtcctccctgcttggaccgccactcttttttttttcctcccgcgaaaatcacgtgagatcaacaagtcggcgacgctgcctcgctcgaccgttcgatcgatcggcaccgcacggcgccatctacagcggggcttcccagaaaagcgcaaaacaacacggccatcgtcgcggtggcccccgtgcagagctggaaagtgagtcgccactcacggccacaccgtacgtaacgtgcggccgtcgagcccctccaatccggagcagagcgccaccaccccccgcccgtgtccgtcccccgcgcgacgcgacgtgacgcgtccacactatccctagcatggcggctctcccgcggcgtgacacggactctggcgcgtcaggccaaacgcctccccttcccgatgcacactgtagctacttgcaacttgcgcaaggagtatccccgaacgcatatttcctttccttcgtctacctccagcagcatcagcggcggcggcagctggatcctccctcccgagactgagagcacggcaagatttgcaaaa

SEQ ID NO: 49611 - DNA, 1166 bp, Oryza sativa
gaaataattcgtcttttggcacgtttctagtttatatatactctagatctagatcaatgtcattcgcgttcatgcccctaccaccattggagaggagatcaatcgatgcatgtttgtgggctggaatgcacggtacaaaacagtatgggaagcttctagggtgaacagttgaagataacagagcatatttgattcaggatactgactgcatattctattgctactgctgtgctagcttgcaaaggatgtcctgcagatggttcaaagaaacagtatatacattgtcacacacctttatcagatcgcgatatctacacagtgacagtgtgatggtcaatgacctctgccatgcttttgggcataattaaggacccatgacaaagaaagtttgtacctctttgttgacttgcttatgtagttggcgacatacctacatctagctaattaaatttagcttgccttcgtcttatataacatgaggccatagaatgctcaagtcatcaacagaatagcagacaaatatactctttcttttccaaaacagcgacacggtctccaaaacacaacttgacttattgtttgtataaaaatatttattgaaaagtgatatatgtatacttttattaaagtattttttaagacaaatctattcatataatttttatattttcaaactcaataacttgagagttattcatgatttatattcccaaggtttgatttaaacattgtcctaaacgattttctttacgagtacggagggagtatatctatatccggatttattttactgggatgtatcgtattctagtacgagattgttttttttatgaatgaagtatgccattgataattaattaagactgagtttgggtaactccacctttccgtactgaaaacggtattaccaattaacacataattaattaagtattaacctaaaaacatgaaaaatgaattcatatgatcttaaaagcaacttaatttcttgtagaatttttttaaaaaaatataccgtttaaaagtttgaaaagcgtacacgtaaaaaacaaaggatgtgagttgagaaagaagaagaagaacacaacctaaccgtataccgcgtcgtgcgcaaggtcgtcttaatcgatattaatattgggtgtgtttagttcacgctaaaattg

SEQ ID NO: 49612 - DNA, 643 bp, Oryza sativa
tatcacaaatatttgaatgatttctcttgtgctaagaaacttatttccaatcccttttattcaaaatccaacttcctttagccacaaatatttcaccgagaatccataccacatattttggaggctaaaatcctagttatttacctccatctatttttgctatcatcccaaaatttatccaaagttagtagataaatcttttgtgtcaagttttatatttggtccttattaaattctttaaattggagcatctttatttttatccttttaaaatttatatttcaaaataaatatctttaattttgttttaaaaatatttcaaacctattttattataaaaattccatatttagattctttgtcaaaattcaaaagagtccacaaacaaactcccttgggtttcatatcctagaaatcctatttaaattttttttccaaacttctaaaaagccccccaacatatttcttaagatccatttcctagaaatcctaattgaattccttgtccaaaattcaaaaggtccacaaatattcatcccttagattttcatctcctttgatttccatttaaaaaccctctacacaaaataatcaagttcctcctcttttgggccaaaaccccctttcttttgacccattcctt

SEQ ID NO: 49613 - DNA, 778 bp, Oryza sativa
atcatctcaaaacatttagtttcaaaagcttttaggctgcgttcgtttgcgtgatatagggtgagaaagcacctcgttttccgcgcgcacgcttcccaaactactaaatggtgcgctttttgcaaaaaaaaatttataggaaagttgatttcaaaaataatattaatctatttttgaaatttaaaatagttaatactcaattaatcatatgctaatggctcacctcgttttacgtatcttcccaatctccttctcctcaaactcacccttagaaatcatgagattatacccatagcacatcattatgtcgctcatgactgtgagcacagctaatcgattagtttttagaactctgcagagtttgtacagctttacccacatgatatgaacactctagtttgttttgagtttgcaagactccaccacactcttcatgttgaatgtggtctagaggtcataacgagtctttaacattaagtattgtctaatcttgcatgagcaagatacgtgttcctctatcctaggccatatgccatacacgttatatgacctagaaccgttaagtggcgggcccacgctttaaacttaacgccgtggtgacggacacaacgggaacccaccatgtggcacaatatcgttgtattggacacacttagacgcccatgctgtgaggcggaacagtacactcgtccctcacggaaatcacacacgtagggaatttatcatcctacgatcacacatttaggaacagtacactcgtcctaggttcaacatacac

SEQ ID NO: 49614 - DNA, 648 bp, Oryza sativa
acttattaatcctattagagcatcttcagcagagaccctaaacaaagctatcaaataacttttaggaggaaagagagaatctaggttcaatagaacccctactaaaacccctagaataggaaggcccccagatctcatagatctcatcccacagtcctcattcctgggggctcgggcatagcccccatcgatgtttcttcagtgcgggaggaatttttgcttcgtgcgcgtgcatctcctccccccgcaggctgccctgactttcaaactctgatttactcgcacatatactccgtatgtacgcattgcagatagaaaagtgcagggcatctgaacatttgtttacttacaaatctatatatagttctgaacgtctgcaagcgtccgtttatctgaatgcaattagaaaagaacgtggttgattttctgaacatacctgtaagtaaagattttcttgaatgtttagttcccaaaaactttttcccaaaaacatcacatcaaatctttggacacatgcatagagtattaaatatagataaatttaaaaatcaattgcacagttatgggagaaatcacgagacgaattttttgagcctaattagtccatgattagtcataagtgctacagtaacccacatgtgctaatga

SEQ ID NO: 49615 - DNA, 1043 bp, Oryza sativa
cctcgagcgttatcagtaccactgtatcaaaatttaatttctgaattttccatttgaaaagtgttacactgaagttcatgccagggatatcaattagttctccctctacatatacccaaattaaaatataaaaactgaaatcggaaacgaagttcaaataaagatttggcatttagaaaattcaaaagttttttacactatcaatgattacgaatggtagcaatccaatgtggggctttccattcggccattgacttagcttctccataatatatatgggcttctattcggcccaaatttcttgctcaatcaattgagcccatcagtaccggatcgcactaccacaggtagggatccaattttggctgtcactaatggctgtgttccgtccggtagtggcagctctgcaggcctgcaggctcagcaacaggatctaccaagcaaatcccttctttctataaagttaaaaccaaaaactgaaaccccgtgcttccacatcattatcaaattatgaaccattggatgaatgtatttagattgcttctcagacattggatggaatgcagcatagagcctaacccattagtcaccgatcgggtgagtctcttggcctcctcagtgccaaatatagctcacatgaacacattggcccatctccacatacatctacatatatcagcccgtcaatccgtataaaagagctttatggctgaacgctccttcagttgatatgtgctacctaaattatctataaatttttgataaggctgctaaaaagaatttctccaagaaagctattcgtttcttctatttcttcttaatattataccttttatctaacaaattgatgttaaccaagtcccgcagcaacgcgctgggcatcctctatttatactaaaagagccgcagcactgctgctgtacagtcaccatctaacttaaccgaatagacccaatgttctccaagaaaagttgtagcgcccgttccgccgtcgtggcgcctagcgggaaaattatctctaaaaaaaaccctaattgcgaaat

SEQ ID NO: 49616 - DNA, 903 bp, Oryza sativa
ttaaaagtttatgtgtgtaaaaaagttttgatgtgatggaaaagttgaaagtttaaagaaaaagttgagaactaaaccaggcctcaatcgcacttgtgagtttttttaaaaaatttctttgaaatttctatgttcggtcattgataagctattgaccatatgaattgtcgtacgttgataaaccgacaaacgcaaggcctacggagaatttggatcaagttcggccgtcctatggacaaacaactgcacgcaaatttggccgttcatttgtgtgattaacgggatagattcaaagctacagtaaccacataaacagtactccatgctacagtatttattgctacagtgctatgaatagtcagtgcgcgatctaggccgtccatcttatgttcaatgatgcatattgctactggttaagttcctgatccaaatcccctacggaatgccgcagtacaaatgttcctttcgttttcaagaccacgtctagagtaattttgggacggtcgaccgaatcatatttcactagctaaattctatattgaccaataaccatgtatacaagtattctctaccttttaaatgcatgatgtagtttatttttggatataatgtttgactctaaacatgatttatatttttttatagttgcattaaactttttattaagaaaatgactaaacgatatgtcaaaaaatcaatatcatcacctattaaaaataaagatagaacttgttcatgacgtgttaaaaatcgtagttcctttatttatcttcttgttcttaaaatgatatatgagtgcacgacccacatgtgcattaagtcaagcaataaaccatttgagtgtaaccaacacaacttaagaattttctaacaattgacaagcacaccgataatgatcctatt

SEQ ID NO: 49617 - DNA, 1086 bp, Oryza sativa
aaataaccgtctcgtcatcttttttcttgaaggcaaatcatctcatcatcctaattaattactgacgtgtaacaatgttaatgctcgtttgctttggagtggcggggcggataacggttcctgtcgaatttatagtaagatcgagctagggaaggcgaccatgtatgccgtgtgctaaagagcagttagttaagtataaaagtggcacgcacaacatgtgttctcattccaaacaaactgtactgtttgagccagacgtggcagggccctcgagctttcgtccgtgcatcgatcagcacaactatatatctagctttgtgaatagttcctttttattttttaagatggtgagtaggtaattgctaaatttgaattgaaactatatatctcaatctagcttaaataatcgtcttgtcatcttttctgaaagggaaatcatctcgtcatcttaattaattcctgacgtgcagcaatatttgctttggaggggcggctaacggttaccatcgaatttattttgggatcgagctagggaaggcgaccatacatatcaatgcagtacgtgtgcgaaagagcagttcaatcggtcagtacaaaagtggtggcacgcacaacatgcgttcttaattcttattcaacaaaagtgtactgtttgaggcagtcaggcagacgtggcaggaccctcgatcttttgtccgcgtgcatcagcacaactctgcaaggcttgtggacccggccggcctcccagaacggcgaaagctacgtggagtggagttgtggaaacgatctagctagcacacgacacacacatagcgggtggtaggctagtagccacgaaatgattggggggcgctgcctgtgtagtatttcctccgtttcatcgttcaatcatttcacacattcgtatattcattaacgttaatacgaatgtgagaaatactagaatgacttatattgtggaacggagggagtaccattttcagtctggtccgaaataaataacggttttgctattttacttacaacatatttttaacctcctgtcttttaattattttcagaatcttgtttctctagatccaaatt

SEQ ID NO: 49618 - DNA, 654 bp, Oryza sativa
cacctaaggacttttagagcttaattaatctagtgctagtattaaactttgaaaattaataactcccaaatgcaaagtgataaaatagaaattccttcaccaaaaatcttatccacacagcacctaaccacactagtaaactcatgcattttaaagcattttagatttttacatgttttagcatttatcgttaccgttattccttttaggcggcgaaaatcgttatcggtgagatgattggtcttatagctgatctcaagaaggtcttataccaatcaaggcaagtgttgcccttcctttgaacacattgaatcccatattttcgggctaagtgttttgattgtaaagttgcacgggtatttctaactataggtactttcaaaactatagattatagttgtaccattaaaagatgcatgaattcccttttgaaaataaccccttgctgttttgaaccttaggattaattagagtactttaattgtgctcatatgagtatgctatgcttttataaagtgcaaatgcttagccttgcttagtaataaataaaaacatggttatggatcacttattatacttttgaaaacccttttgaacaatatggacagaggtgattctctgattatttgtgaaataaaatgagataaaatgtga

SEQ ID NO: 49619 - DNA, 884 bp, Oryza sativa
tcgttaagactgtttccttcagcaatctgaacttatctcccaataaaagcttcttaacaagccaaagtaggattacaaattcataatagaatataatagcttctcgacaggtatatactagaaagattacaaattcatagtagtgcataagtcataataggattactactttataatagaccggtgtgtataacaccataagaaacattacaatatcatgtgtcaatgacttgacagaacatagagcatcaattaacatcaaaagtagcccaccggaagttcccaacatatgttccatctaaaagctctaatatctaaatattacttatactactaacacagcgtacttcaaatttcaactgtcacaaaatatttactccactattggcaatgacagtacgccaatgtgaaacctccaagcactttcttcaaactaattgttgatgctatgctatatgcctgcattaatgtttcgtaaagttaaatctgaaaccatgtgcaaagattataggtaatgtttcatcagtgatgaggaattgatatggtagcaatagataatttatataacctcaaacatatacctgacaaacgagtctaattgctgcccacaaccgaatttgcagttgaagcttgatttgggacaaggataatagaattagtatcatcctcctagtatgcaacaaacaagtaaacacagattattagattgtgtatctctattaattggttagaaacatgaaaatataagaacttactaaatctgtgcttttgtggcggcctcctctaatccaactagatgtacacaccaaagcttgtactgtgatgggagtaaagagctgcgataaacactaatcactcgaccccctgtgctgaaagctgattca

SEQ ID NO: 49620 - DNA, 667 bp, Oryza sativa
caaccaaccaggataagttacggagttatgcaagcaatagccaaagcgaaacgaataaaaaggagcacagaatgagtacgtaccgtatggccgtggatggtgtggcgataggcgagtgcattgatgaggtgttcgaggcaagtgaactggataaacgcgaagccgtggtgccggccggtgtggcgatcgatgggcatgtggacgctggccacgtacccgaacagctggaaatggcggcggaggtcctcatcgccggtgtaagggccaatgccaccgactaacatcttgcacagcgtgggcagagccatcgtcgttaccggtagcgtcgaaacaagatttcgacaataataaaaggggtggaggaaatggataggttcagagacaaggaattttatacaggtttaagacttcctattcaagaagtaataccctactcctgtacggagataatttcgtcgagtgtgttattgattgtgtaaactagtaaaaagaattgtgccccaagaggcacacggaccctccttatataggggaaggaatccgctttacaaaatacagtccatatcctaacggaatatgagattatagataaaatacaatcgtaatcgactaggatctcgggtattttcttgacatacaagttaaaaactaacccgagtgctcataa

SEQ ID NO: 49621 - DNA, 583 bp, Oryza sativa
caccccgatctaatcttcatccccgatgctgatattgccaaatttggttgttaacacatgccccccaagtccggaatatttggtaatgtttcggatttgccatatatcgatttcgagcaaaattcgctcttgccgtttcctaaccgttactccagcgctttaaatactaatcgttgcccccgagaaacctcataccgtcttcttgcgttttcaccgccgaagctaactttgtcttctctctcttcgacgatttctccgacgcataaggcgatccctaggcgacttcatctccaattagatctccgcctgcagcgatgtcgtcttccgccagcccgtctgccacgccgttggctgagtacgctgaggtaagttctcatcggccagatctcttttcttcacattagatcgatcttctagcccctcatcctgttttccccttctcagttcttttggatttgtagcatctttccaacctagttgcaattccaagcttgtcgcacgaaaattactactttttcggtccagtcggcaaccctgatcctaccgagttcatcattggtgaaccaataggattcccttcaga

SEQ ID NO: 49622 - DNA, 1139 bp, Oryza sativa
tatatttaatactctatgcatgtgtccaaagatttgatgtgatgtttttgggaaaaagtttttgggaactaaacattcaagaaaatctttacttacaggtatgttcagaaaatcaaccacgttcttttctaattgcattcagataaacggacgcttgcagacgttcagaactatatatagatttgtaagtaaacaaatgttcagatgccctgcacttttctatctgcaatgcgtacatacggagtatatgtgcgagtaaatcagagtttgaaagtcagggcagcctgcggggggaggagatgcacgcgcacgaagcaaaaattcctcccgcactgaagaaacatcgatgggggctatgcccgagcccccaggaatgaggactgtgggatgagatctatgagatctgggggccttcctattctaggggttttagtaggggttctattgaacctagattctctctttcctcctaaaagttatttgatagctttgtttagggtctctgctgaagatgctctaataggattaataagtcgtcacgtgctgctaatatcaatatagagttttgaactaacagacccgtagtactagctgcagattctgtggtgagacagcacagacacaaacgagccatgtagtgtgagtgtctgcgttgtactttgtaattcttaaaaaaaaaaaaacgagccatgtacgtactttactaccattgaggccttgactcctttcgcgaagggaaaagatcgccatagtggattaaggtggacaggtggtacacgatgtactctacttgattgccggtccgcgatgaaagtaaaaacggcttaaggtggtacgcgacgtacgtgcctgcgtccatccactttgcgcgtcgtcttttttatcaaacaaaccgaacgaaaagcggcgcccaacagtgcgtggctggcctgattcttgatgtggcgagctcaccacgtacacgtaccgcttcgttcggctaacgaacaatctcagaggagtgcagtagtacgtcaactgctttcgtcttcttttgtagtactagttgttacgttaggtgctatggctccagtgctatatgcatgcagcgagagtggtcgcaaggacagagactgctacacccgcaagttgcaaaaact

SEQ ID NO: 49623 - DNA, 859 bp, Oryza sativa
tttaaaaaaagttagcatgattttgacgcttctaaaaaaaaactcatataaaaagaagagcttccgtgtaaacgaccgcaagcagtttgagattatttccattgctcgatgcgagctcagcatggcttgcaagctctgtcgtgacacactctagtaacactagaaatcctcactcgaattgacctgcaggttccatttcatcgtagtaaattaatctggatccatagctcgaaagttgatgaatgcatggtatgcagatcgaacgtactcagattcgttatatcaggagaagtcacattttttgctaggttagatttttttcttatccatataaatacttctatatatcctcaccctacaccgtatcgggacaaacagattgtcaccgacgaggcgatgatcacggagtagctagctggagtagtacatactccactacagcaagcgagagagcgagctatcaaatcgaatcaatcattcatggttcgtccgtttgctatgtctggtgatacatcttgttctcccttgcatggccttcgacaccattaccttacatttttgtaactatcccaaaaaatgcactagtacacgacttctaaatgtagagtatcttaacggtgctatctggtaggtagcattctactacaaacatcaccataaaagtaatctcaataactgatttgtttttttaaagataatagaatatttcattagggcatgtacaaaagtagagtcagatatgagctctatgttatctagagactagcattctacaacagttagagacaatatggtttctaatcattaatgcatcaaaatactttttcttacttttctttcctttctttcaccaccatgc

SEQ ID NO: 49624 - DNA, 2675 bp, Oryza sativa
aattcgagctcggtaccccttctgtgtttatccgtaccaatccctggatcagtagttggtacacacatacatagttggatcacaacatatcacgaatgaatttaggctaaaagagttaaatacttacattagggccaagtaggccaacaactattagagaacaacagcggaagacaaaataatataagggcccggttaacatgccacaggcagtcgactggggaacgagacctagaacaagaccgctctccgatcatcttgtgggatacgcaagtgtaccgacaagggcttctcttcaacactctcctaaaagatatataaatagcaagggtgagtaccaaccgtactcagcaagccaccacaacaacaatgcatatgatagagggtatttcaaggaatggcttcaggttcttttgcataaagctaattttacaattcttttcacaagcctaaaacctagcatcgactgatcaaattttagtaccagtgttcactttaaacaacgacggttctgtccaccatccattgtgatcccaaggatagcttcccgccattgaatcgtcatggttttctgaggacgcccacattcccgcctctcaggaagtggctccatcagcataaaaatcatcatgcaatatcccatcccacacaagttaaagaatttagagtctagccaagtgtaatacatgtcccggtgctcaataaccgcgagcacggctattcgaatagatttggtttactcacactgcagtggatgtacactttacccgcactccgcgactgcccaacacatgagcctcgtcccaacacatgagacgcgtcacggcaaagcttttcgataacctcgcattggcagtacccgctccatgaacttaaatcctcatgcactctaggcgtccatgtttctagcagtgagaggagttctggcgctcccgggaaagagaagtctcacacgcatattaaattatggttcaagttaagttctctctctcacacactcatggcagtcctaccaatggcgacaccgatgtagggcacgcctctcggccctacctcaacggctgtcccaccgtagtgcacctgcctcactcaggggtgaaccatctatgcagggatactgcctccgctcggctatctaatccgctaggtctatacccattcgagaagtacggttgtacgggggtcgtttcatgcttaacttcatggctcagtccttaattgaccggggacggtactagcctttcccagataccacccaaatcctctgtccgccccagtcgaaaaccattgtttaattttatttctcctttcacaaatcatgtcatcaacataatggcaatgtggcgcttatgtctccacatgccgcatctcaattaccttcccaaaggtaattgccccaagcatatagcatttgataaatatgactataaatgattctagaatagcatttctaagcaattgtcatagttgactagggactcatacgtaaacatggttacaaagatttaagggttagcaataatcaaggcatggcataatcacaagtaggatgttcatcattgcatgcaattttatttgtaaacaaaacaatttttgcgcaattgggatcaacgtgatcaaagaatagtgatgacttgccttgctctaggtcttgtgggtcttggccttcacccggatccgcggctccctcggtctctatagttacgtgcgtaagaacaatttgaattcgattagaattcaaacaaaatccaaataatgaccgaattgaaaaacgagcgcgggaggtgaattctatataggctactttatttgcgaagtggaattattcttctccctaagatattttgtaatttatagtcatgtcctaagactcatcgaattattgagttcttaatcacatgtaaattattaccgcgaaattgatttcttacggagattactaaaaataatctataatctataggagttcatccaattatattttcattaatcctatatttaaatgctagtactttaggtatttaattagtaagaattcatctaactatattttcgttaatcctataattaaatgctagtattttaggtatttaattagtaagaattcatctaactatattttcattaatcctataattaactttcgcaattttacgactataattaacctacgattaaattcttaactattttgaattttctaaacttctaaattttactcaaacgcctatttattttctctctttctttcttttctttttccccttttttttcttctttcctttctcttttcttttctctctttttcctctcctctctttctttttctctctcttctctccctcccggctcctttctccctctttctctctctcagcttcttgccctcccgggcggcgacgacgatggacgcaagggggggcggcggcttaccgacggcggcgacggcgacggcgacggtggcgacgtcgccgcaaggcgcggcgcggcgcggcggcttcgtggcggcggcagcgcggcggctctatacgacgccgcggtggcgtggaggcggcggcgcggcggcgtggaggcggcggcgcggcagcgtggaagcggcggcgtggtggagtgggtagaggaaaggaagtgaggatggagggaaagagtgggaataagggggcttatatagggga

SEQ ID NO: 49625 - DNA, 1157 bp, Oryza sativa
cttgctcaggataatccttattattgattaatcttgatcaaccttcacctcctggaagttgcagacgttgcctcacgactaaccgatacacaaggtctataatacgcgagaaaaaccaatattcaaacaacaatcaaatatgcgcaacaaaatgtactattcgtgtttgctaatggatcccaaccacgctaggggctaaggtttcttaatctttctattgtcaacgtggcctatttaggagttaaccatcatagcatttatgggatacatatatatttggctaatcggtggtttagtctatcaaatggcttatggaaggattatggctaagcatgcatctatctaaataggacagtcatatactagaggttatgttgttagatggatttaggatcaatcaaataattacagtgaatcatttgtattatttattttattgatggaagctttactttgattatgaacatattttacttgtcacaataaattataaaaggttaataattatccatgctctatatgttaaattcgggaagtttataatattatagttacatattatctcttaatgaacaatccggagttacaattgaactatgaacatatgaggtactattcatgtttgttatatactccccagtttaatatatgaaaaagataaattaattgtgtaactataatgggatgtacaatatatgtgtgcaacaacgtataaggttttggtcgcctactgtacatgagcttatttagaaagtgtactacccaatgctccaagtgattcctgaatatattgtagtttaattatacattagctagtttctatgagtgatattgtatatgtgatgcgacaagtttaagcactggttctattgggttactaataagtggtaatcaatttaggcatatataagctattctatatggtattgcgtcgattaatttacttagtgattcctccacatctagctctattattattctcctaaacaggttaaagattcatctatgtgtgtttatattttagttgcataatcataaggctacacttgatttaaataacctataagccatggatttaattatatggccatcgaatattaaataagtactagtattttcctatacatccattcatttgatacatcacataaaattag

SEQ ID NO: 49626 - DNA, 975 bp, Oryza sativa
tgtatgagtcggttttaagttcgttcacttttggaaatacatatccgtatttgaatcgagttttaagttcattcgcttttggtaacacataaggaatcgtataagaaatctctttaaaaaacttgcatgctaacttgaggtgatcgaactcattggactcctaactgcagctcatgattttctaaatatatatctaaacaaatacccacagtgaatttcaccttaactaaaccatatctcttctctactacttaaaaaataagagatgcttccatcatccgtcaaaaaaaaccgccaaaaaaccgggcgaaagagaaaaaaactggacaaaaaaaccatgattgtccgattaaaaaaagggcgaaaaaaaataatccgatcccctggaaaaaagggcgacaaaaaaccggctaaaaaaaccagacaagcgagaaaaaaaaaccgtaactgtccgataaaaaaaaggggcaaaaaaaataatccgattcagtgccaaaaaaagggcgaaaaaaatctccgttaaaacaaaaaaatagcgaaaaaaataaaaaaagtccgactcctatctgattccctctcagaaatgaaaaaaagtccgactatagatccgattcccccgaaaaataaaaggtgccactccttttgagtccgaataccagccaccgctcctcggttttaatctataccgtgatatctctcacatcttggtgaaacaaaatgatgtgccggattgaagatctgtttacaaaaacggaacctacaggtcgagagcatttcatttttatattattttaatttttaggtttgtacttttgcatttgagtccctgtaatttttatatttacatttgagtccctataatcttacaataaggtacttaatgtcatttttgataaaaataataataaaagagagaccaaaagcataaatgtgcataaaaaaacaacaacaacaaaagttctgtttcccctaagt

SEQ ID NO: 49627 - DNA, 707 bp, Oryza sativa
ccggacaccttggttcctgtattactctaacctgtcagagctggacgggagggccctctcctgtcgctggtacactcctcgagtcttgacttgtatgctagctagcttttgacactgcatgattggagatcgcgtgatagatcgattgcctttctcaggaagcggcacccgtaacgttcttcgccgtctgccaatcgctaccactcgatcgatcgctagtggccacattattcctgaaggtgaaattaagctagatatagctaggttttttgtttgaatgttgactacgaaaaagaagaaagatacgttgtactcctacgtacctacactgtcgtgcttggactactccagcttaattgtcgtttcctcgccggggtacacgttatttgggatcgaattaggacgtactactacatgcacttgtcttttttcttctcaatacatcagtgcatctttgctacaagtagaagtagaactgaccgatcaatcagcgaactaattaagcgtggcgaacacacgcaaaaacatcgcgtcgatcgatcgaatcgaaccatgtgctgtgtcaacagctgtcgactgacaggagaaaaaattagagaacgagagcgtaaaaactgtgatgtttttgcacgtatatgcacacattgtacgtagtactactacatgtattattgagacgagtctatatgttttggcgacgcaaatct

SEQ ID NO: 49628 - DNA, 655 bp, Oryza sativa
ctcaaataattccaacaactcatcttgaaatctggaaaacagcataccatttagcctattttacaccttcaccaaaattcaaccataacctatctagctaaaccacttggtcagaatgctaatcatagtgttctctaccgcctggtgcaatggcttaattaaattcgaaatgtaaccacatgaaataaggccacaagttgcttaaacaatatttagactgcagtcaacatcgtaacttagacctctttactaaatcaccatggtaactcaaaaagtaattaaatcttggaacttggcacattgaaccatcaaatccttgtccaccttgcagcaaccttgtctccccaaaattctaaattaaatggaagagaggagagggattaaaaccacatgatatagtttcaacacttagaaaatttagagctttgtttctccttctacacatctctctcttacatgtggggactatgctcttgtgggacccatgtgtcatacactcacagccaacacatcatctacacacctttcatttaattattcatttgttaatccaaaagtgagagagtgagataaaaatcaatttatacctaaactactactctacctctcacatacacctaggatacatcaacttggacccatttatcatccaatc

SEQ ID NO: 49629 - DNA, 626 bp, Oryza sativa
agcataaagtcgaagaaaatattaatgagaaaagacggtaaataatcctattgggcatatgttcggtgcagcttgctacagcgtcggtacttcatgcaagcaaaaagtgagggctgccccatgaaaacacgcccattacaacgaaatgaatgtatgtgtgactgaacaggatgatccatccccacccatccccaccgttgcaacttgaaagcaacacaagagagttcttcaaccatgcatgatgcatccttccggtcctctcgagtagtttttagctatggagggcagcaaatgacgccctaagttctcttctgtaactaacctcgagccacatctttttttggtatgtattcctatcgccacccattctcaactaagtgtcggttcatgctgtttacccagaaatgttattttctgtaagtttttctgcaaacatatagagctgtaagagaaaataacaccaaaaggtaattatgatgtaccgcctctactcgttttaggctgttttcaatattagagatacaactatgtctatcatcactggtggagaaaccatctttcgtcggtcgggctaattccacaatagtcccggttgcaacaaaaaccgggactaaagatgatcttta

SEQ ID NO: 49630 - DNA, 717 bp, Oryza sativa
ttttgggtctaaaaccagcacatttctcttacacaggttttaggtgtcggttttatttaaaaaatgacacatatttggacattaaggtaccggttttaaatatttggcgagtggggctaggtacatgggtggaaaatacattatactattataggtgtcggttttagattttccggcacctatagtgacgacacatatttatcttttttaatagtgattttggccagccagcgaggtcgggtgttggtgcgctggagtgctggatgtaggagggtgcagcggcacactaggcgagatctagagaacttcaatgaaatcgatgtgcatcggtcggtgggggtgagagcataaggtggaatcactaagcaacacagatcttaaagtaactagcatggtggtcagcgtagatttcgcggctagcatcattatattttctctcatataatagcatatatgttttctcattatattattaatatatattaaaatgacaacataattttaaattttgcaataactttacaaaactactaaagtgtaatattcatattgtattttatatacgtgttagttattaattatttttaatatcaaattttagttatttgtaaattatatatattcctatatggactctagacttgtctttaaatttttgtttaattccgaattttctgtaaattgtatttctatatagactttaggctcttcttccaa

SEQ ID NO: 49631 - DNA, 504 bp, Oryza sativa
caaagaaaatactaccattttttttgctgagtccaagttatggtttagcactggagacacattattaattttcttcttgcaatatgtattcagcgtgtgggttgataatttagagagctctaaaacgatagcggaaaatcaaacaaaaatcttactaggcgcaagtgctaaataatgacaggtatttccaaagagatgcaagattggtctaaatgggttgaggcaaagtcatgtttctagggacatgcaaaattgcaattgatgcatacttttttcccttacaacaaaattgtgacaaaattattgtttgtgctttattaaggtttttgttacaataaacttatacgcaatgattacttaacatattttcacctggtgtgatttgaaattaatagatatctttttccccgttacaacgcacgggcacctaactagtctttcttcaaatttgaagggtctttcacataaaacacttgtaccacgtgattggcgagtacccaaggg

SEQ ID NO: 49632 - DNA, 581 bp, Oryza sativa
tctatctaattatgttgatatcatgccatgattattatgccttacacattgctaaaatgcgttgcttaaattacgttgcaaatgttttgtgaactaaaatttactttatgctgaaaattgaaaccacatatagcctttctttgacttagagctttcatgtatataggtttgatagtgctcttaccagtacattatgaatgtactgagtctagccatgttttgtctaatttatgttttgtaggaatagacttagtttagtttgagtgatgtgggtttcgactgcttcttttaggatttgtacttaatggggtaaacctctagttggtgtgcttgaggattgggtagtcaagcttctgctgctctctgatatagatatatttggccggtcggcctatgtatctatttagtagttgtaatctgaattttatttgctttagatgtaatttgctatgtatattcatgcttaaaatgaaagtgtgaatctagtgcatattctgggaactagattcacatgagtatgagttaggaatatttcagatgttgtatatctttaactatttttatcaagtcttctgaatgtg

SEQ ID NO: 49633 - DNA, 697 bp, Oryza sativa
ttttggtactctcctattcctacattttggtgcacatgtgatgggtatagccattttccagatgggccattcaaggtgagatatggaaactgaaccttctgatcttcatcaaaggttcagttccctctaatcctcatttcaaatggcacatataaatatggtcctagctgctaaaacccaacactagctgccaatctgttcatgtgctgcccaactaaagtattccatcaagcaatcaacctgaaggtgagatattggagaaaaacaatctgaatattaattgtttgccacactgttgcaagcatcaaccagcaatcagtttgttttcctccaattctcacttccagtgcctgaacaagcacagcatatccaacactgaagctagtaactactctgaagcgctagaaattgtaaagcagttgggttcaggacttcaggtagagagagatttatagccgtggttgatagaacacaaatcattcagattcagcagcagcagcaacagaagcatctgtttctgttacacctgcccttcatgccaattgtgtgttgtctgtgatgaagaacctttctactcccattttcagaggactagcagtacaggtaatggccaaaaaaaaaaacaaaagcagcttcagaatgtgatgggtgcatagtggctagtcactagtgacatgactgccctacacataggtgc

SEQ ID NO: 49634 - DNA, 659 bp, Oryza sativa
ttactggtttgtgaccattgtgttttgtgttacttttccatgaatacttctagtggaccatgtctgaatttgtaacatcgaaaaattgcgagacaaatcttgaaactgttatctctattatgacaaggaaacaattctatttacaaatcagtagtgtgcagaaacaataacttgacctaagcacttctcttgcgaatagagcttctaaagcatcagtcttatttactgggagcaagggaaaactgtgtttaatgcttgcacaattgaaaggaaaacacactttaatttgtgtgtttatgagaattatatccaggattccacagtgctgttgtacttatagccgtaagggttcattccactcaaatgtgccaaaatattggaagaatcaagcatgtcttctcccttcattcccacctgaaaaaacaaaatgattgaacttggtatttagctattttataaaaaaatgatacgaatttaaatctttaatctatgactgcaatggagaaaaatgatgagatgattgaataaccatcttgatgaattgtctctaaggctaatgaggtaatcttgcccttgcatatttatttgtgatattttcagctaaatttggtctattttctgataagatagttagaacacttacaacatgttcatattgt

SEQ ID NO: 49635 - DNA, 578 bp, Oryza sativa
atatgggagataagaagagctcgatatgaatcaatccaatcctaatttctctccaacttgttttctttatctttaatgtctctccaactatactctaacaaaatcataacgtgcgtaacaacatcacaatctctctaaataaaaagttccactgaaagagaagtgatgatgcctgaaagttccgtatcagcatgcttttgtaatttgcatgttaccgacatgccagttttccatcgaaaggaactgggataaatctatcagtgaagccaaaaataatgcttgccgcaaaaacaaaatcagggggtcaaagataatgattcttcattggcccagtgcgctcatccactataccaagttacaaccatatccaataatttgcgaatggtcccgtaggaactcactaaaacatgaaccataccttgtagaaatggacaagatcttaggttttccaagtcaatcaacttggcgacattcgacggcatcgtcgatgataagtaggctgtgtttagatccaaactttcaactttttccatcacatcaacatgtcatacacacaacttttcagtcacatcgtacca

SEQ ID NO: 49636 - DNA, 628 bp, Oryza sativa
aacttatcaaagatgtggttaatcttacctagtgaaaagtaaatttcaaaatgctattaggatgagccacatcatcagataaacaataaccattgaatcgagaaaaagacaaaatagagagaagctaaagagttcagccattgattatagagggaaaaaaagacgatgaactaccgaagcattccagcaattcagaaatgagagagagaaagagcaaacaagaaaagtagctttgtaagagagtgggggcgttggctggcgtatggcatgtgatataattttgcactatacgcactcagtaaaaattattttacaaataatcattcaaaattatttatattatatgtatatacaatccttacaaccgactaattccaaattactactgtaactttaatgtcacaaaatttattatcacataaacatatcaataaatttttctatgattttaatgttttactttggttcacctctttagtgtaaaagttaataggttggccttaagagtgagtgtttcatctacctatatgccctatatgcttgcaggtcatggctgatcaattacacttctcccaagcacatacttaacagaataaaacattgtttactgatgccaatttaaattaca

SEQ ID NO: 49637 - DNA, 1384 bp, Oryza sativa
ttcacattggcgtactgtcattgccaatagtggagtaaatattttgtgacagttgaaatttgaagtacgctgtgttagtagtataagtaatatttagatattagagcttttagatggaacatatgttgggaacttccggtgggctacttttgatgttaattgatgctctatgttctgtcaagtcattgacacatgatattgtaatgtttcttatggtgttatacacaccggtctattataaagtagtaatcctattatgacttatgcactactatgaatttgtaatctttctagtatatacctgtcgagaagctattatattctattatgaatttgtaatcctactttggcttgttaagaagcttttattgggagataagttcagattgctgaaggaaacagtcttaacgagcttctacgaatcgagctcgagtcgagccgagccttgatcgagctcgaactgagcctaccttcaagctcgaaggtaatgctgggctcggctcgagcctgtaccgagctcgagcttaggtaggtaagctcgctcgagctcggctcgttgacagccctaataaggaccattttacatataaagagcaactatatttgtctactatcaaactctctatgattgttgaagaaaaacaaataatgtcacatatgctccaaatctcattgaattcctttcacaccctagaattttgttccatccttaatgatgactatctctctcgtgacctgatcttctggtaaggggataactctcgttttgatcgagtgcgatgtttgcgatgtggttatcaactagaataagtccagaaccatgtgcaatcgctacaccacaaacgttgtcataccaaccgtgacgcacagctaatgatccctgcaatgcaaatgagagaacactgtaaggacaaaataagatgcaatctaaatattgtgaataggtaattaagcgcaaaggagtagtaacgattgaagtggtagatctaatcgacccgacaaatcaacacaccaattattgggagctctaaatttgtagtcgttggctaatcgagcgaggcctagagaaaaggtgaatggcgcttggcaaaattcaactaaataaaaatcaattgttctagagggtgtacatagacacttatagaggaaaatagatctagggttaagtgttggttcgtagagatggagggagacacttccgaaataggcctaatctattacaaggctcaaggcccaaatacagtttcagtaacaatactatcttgtttggacgttttccattgactcgggatgaaatttgatatgagaccagatgcatttgaaaggtgacgacataagctcccaacaagtccaaaatttctcaaatcggagttggaatgaaggc

SEQ ID NO: 49638 - DNA, 1173 bp, Oryza sativa
ttatatatgctaagtctcacactcttatattgaatctctgacagtctgatatttactctctaatactctcatattagaattgtgatagtcatatatatatatatgcagagtctaatactcttatataaaatggctgctactctcatataaaaattgtgatagtcatttatatatgctaagtctcacactcgtatattaaatctctcacactctcatatttaatctctcatactctcatattagaattgtaatagtcacatatatatatgctgagtctaataatcttatattaaatggctacaaatgtcatattaaaattgtaataatcatttatatatgctaagtctaacactcttatattaaatctctaacactcttatatttaatccctaatactcttatataagaattgtgatagtcatatatatatatatatatatatatatatatatatatatatatatatatatatatatatatatatatatatatatatgctaagtctaataatcttatattaaatggctactaatctcatattaaaattgtaataatcatttatatatgctaagtctaacaatcttatattgaatctctaacaatcttatatttaatctctaataatcttatattagaattgtaatagtcatatatatatatgctaagtctaataatcttatattaaatggctactaatctcatattaaaattgtaataatcatttatatatatgaagactaacaatcttatattaaatctctaacaatcacttatttacatcacttgcctgcgcgaattccttcgatggctagctaccacttcggcttgagggacgacgccgacgtcttctttgcaacattaccaggaaaatgtattagtctaaacgggccaaattacatatataatcatatatgtattaccagtaaatcgtataagtagaaacgcgtttgttctaacacttttagtacaagtgcattcacgttcgtaagcatttcgtgcaagttcgttcgtgtttcgtaatcgtatcgttcacgttcgttcgcgttcgtccgcgttcgttaacgtttcgtgcatgttcgttcgcgttcgttaacgtttcgtgcacgttcgttcgcgttcgttaacgtttcattatgttcgttcgcgttcgttaacgtttcgtaatcgtatcgt

SEQ ID NO: 49639 - DNA, 658 bp, Oryza sativa
ttgagatcagttggtatttctggaagtagttgaacagctttgcttttccatgtcaagaagaagctcagctgctcagttggtgcggccgttcatagaaagattcgagattcaggtaggttgtatagttcacgggagcaatcagcagtgtggaaatttttatcacgaaactaccagacatcaagagtcatattctgttttccaggttgtaaagaaatgatattaatttttctgtcgacttatcagcataagcgcaccagtggtctagtggtagaatagtaccctgccacggtacagacccgggttcgattcccggctggtgcaattttcgtttttgtcacctgaacacattgatcattttgctggtttaaacatcatgggctaactttcgatcaaaccgatttaccacgtttcattccttttgtgatgttaccacactaggcttctagtacctgtgaaatttactttggttccattttttttgtaaaatcttatcaacagttcaacatactggccaaatacgaaatattcagtcgtagcaatctcatttgtctttaaccctacggatattcagcgaaattcccaaattttagaactacggcttcacctcggaatgggtttcatgggctctttccttccgaatgctcatccatatgtatgg

SEQ ID NO: 49640 - DNA, 952 bp, Oryza sativa
ctgctagttgctatgcattgtgagcttagcaatgtacatgctgcctgctggctagcaggcaggaggcagcacagctcttatttataaatgacttgccaatctgaaacacactgacaggaagtcatatgttcttctgataccttcaagtctatgctttgatgataacttgtttctttatctttctgttcagaaccaaggctagagttggaatgatctgtttagtaatgtttcgtttcgttgaatattctgtgttcgtgttttctggatatcatattcagctctatttctggttttatggatgatgccgttaatggtttattacttctcttttgagaccaatgtgatgcgtaattgatttagattttactacctgcagcacaaatgtgcttttgtacatggcatttacatatgttcatatggggaggataaccaggtaacagagtactattccacttccttttgctgacttgctgagttcaaaaatcagaagttcaatgtgaaaactggccagactaagatctgtgagctttctgctgaatttctgcatcaactgcgaatttgtcattctggataaattccaccatgcaactgtgaatgtgcattttctatatggccaatgtgttgtcagcttgagtgaaaaaaaatggaacagttgacaatgaggggatcatgctactgaactgaggctatgatttatcctcttggtgacaaacaagctatcggtagtgtgctatggtaatttgtgctatttgcagtgaaagggtagttttcttacgtatacattgtagtctcatggatcatgtcgttattttttttctcctttttggccgttcagaacttgagaagtttaggccgtgtttagtttcaaatcttcaaacttccaacttttccatcacatcaaaactttcctacacacataaactttcaacttttccgtcacaccgttccaatt

SEQ ID NO: 49641 - DNA, 680 bp, Oryza sativa
aaaaaaaggtaaaaatcagaaaaagtgagaataaattttgaaaatgtttaaaaatccgggaaaatttaggaaaatgtgggaaaaattataaaatggtggaaaatataaggaaaaatcggaaataatttttttaaaaaggaaaaaacaggtgcatgaccattacataccgacaaataacaacatatcacatggacaaaacaagggcatgaccattgcacccatagtaacaagttcatatcaaaccatacaagttcatatcaaaccatacatgaccattgcatccatagcaacaagttcatagcaacaagttcatagcaccaagttcacagcaacaagttcactagttttcatcacactaagtccacacataaaaagtagtagttcactagttttcatcacaccaaaccatacatgtcttaaattacatcaaaagtagtagttcctccacataatttattcaagctggagtttcttcttgcttctagtattagaagctgggctggatgggttagccacttcaataggagccctccttggtgtacacttcttgacggcttgcttcttccttggtgtgtccactgtctgtggagagacttcataggatgcaatgtcatcatgaacaactggagggtgctcaatttggagagcaaaggggttattggatccagttatagaccttg

SEQ ID NO: 49642 - DNA, 772 bp, Oryza sativa
acataagctcccaacaagtccaaaatttctcaaatcggagttggaatgaaggcgctaggtgtgtttgaagtcagtgttgcctcaaaggccgaactgaattcctaaactcattggacttgaatatattgtagatcctccattcgtccgatgtattctttggcaatgttttatatttctcatgtttggttgtatgcctatacttaatggtcacaacacttaatgagatgcatcaccatctttttcatctaatttcaccctcaactatcctcccacctctaaccgcccctcattttaatgaagtactctctctgttttgtattatgacagtttgacttttttatgttaaatttctttaattttgattaaattcatagaaaaatttagcaacacttacaacgccaaattagtttattaaatctaacattgaatatatttttatagcatacatgttttgtgttaaaaatgttaatatacctttttttttatataaacttggtcaaacttatttaagtttgaaatacatcttataatgttttcataagtttttttgtggggaatgttttcataagtttgactagagaaaagtgaaaatgtcatatactatgaaatgaagaaagtacttttgtttcttcaccttactcttaaaaaaatacttagaaatactcaaatacagatggagagagttggtatgtagtattactcataagtcgtaagtagctatatgcgtgggatttttctccatttttttctctctcttttttcgtggttacca

SEQ ID NO: 49643 - DNA, 631 bp, Oryza sativa
agtcaattgctaggagtcgcaccaattccgtagtgaataatgtcatactaagtctaatgtgcaataaaataatcttatattaaaactcaaataatattagaacactacacaatcttatatgataagtctaattacaggtctaataatcttaattaattgcatcacaaatataacaatcatttatattattacgtcacttgcctgctccaattccttctagggctagctcttccactcaggcttgacggacgactccgacaacacgtcttttctgcaagatacaaaaaaatgtattaggataaatgcgaagtaacatatatatatatatatatatatatatattgcatttcacgttaacgttcgtcctcgttcgttcgctcgttctcattcacgttcgttcgcttgttctcattcacgttcgttccctcgttctcgcttgtcttcgttcgatcgttctcgttctcgctctcgttcgttcgatcgttcttgttctcgttcacgttctcgcggcaacgtacgttgacgtgttcgttctcgctctcgttcgttcgatcgttctcgttctcgttcacgttgtcgcggcaacgtacgttgacgtgttcgttctcgctctcgttcgttcgatcgttct

SEQ ID NO: 49644 - DNA, 915 bp, Oryza sativa
tggccttttccgataaggatgtggggggcctagccccctgcctggggtggcgcgacactcctgaggaggctgcgccttcccccgcattggcgccgcgacactcatcatgccggcgctcgaaacaacctcaaaaatcacgaacgcgccccctacctggcgcgccagatatcggagaatgaactcctccaccagggaaccgggaggcccccctttgtgagttcggccgggggcagtgggtgagattcgaggattcggtgagcgaagctgtgtgatcttgagggggttcaatcccccaaagacgatgagacaaaaggggtttatatagatttgggccgctaagaagcgtaataccctactcctgtgtttgggatcatggtcgagtgtagaacacgagtgcctggggttgcgagactcaagcgccagttcgctcggaagtcccccccctccaccactaggcctgaaccttcttttatacctcaaggggttaccacatgggcccaacaacctaacctagctttggtggagaagtattataatctttgcattaaatgcatgtctttgtctcttgacttgggaagccaagcgcacgtcgtcttgattatggggcctgtcaaatcttgccgcctgatatggggggtgcccctgtcagtcaccatttaatgggtgaagacttatgggctcctattacaccgggaaacaggagccttgctttgaccagagcgggaggaccgactccggctgggataagaggatgagaacctctcaccatcattatttgatgggatatgtcgggctgcacgtcgcctgacactcgcgatggtgcgcctgacattctgggtcccatcggtcattcgactgggtcacagaccgggttgagtgcactgcacaccgcattaaatgcgacgtggcgcgacc

SEQ ID NO: 49645 - DNA, 612 bp, Oryza sativa
aagcaaacgagcattaacattgttacacgtcagtaattaattaggatgatgagatgatttgccttcaagaaaaaagatgacgagacggttatttaagctagattagtggattagtagattgagatatatatagtttcagttcaagcttagcaattacctatccacgaagctagttatagctgtacattgtaaatttccccttttgaaacttatcaaattcatagtctctctttttttttattgataaaggagagttttgtgaaaaagaaagaattacatggtgtttagggtccgatcctgaaaacaagcatgggctcctcatctctctgaattggaagctccgctaggttggtggctcccatcgtggcgccgtcccctttatctataataggatcattatcggtgtgcttgtcaattgttagaaaattcttaagttgtgttggttacactcaaatggtttattgcttgacttaatgcacatgtgggtcctgcactcatatatcattttaagaacaagaagataaataaaggaaaactacgatttttaacacgtcatgaacaagttctatctttatttttaataggtgatgatattgattttttgacatatcg

SEQ ID NO: 49646 - DNA, 1125 bp, Oryza sativa
acgtgggacagaggtagtacgcacttcattttagcaaggacccacgatttgtatattctctggagaaaaggatattttccctggatgcgtcgcttttggtaattgcagaattgttgggaaaagagtacagtgacagcagtaaaagcagccaggcagacttcaggtctttggattcgtctgcagtcgacgtgtcactgcacttacagatagtctgtaatatcttcggtcactatccattgagtccattccattgaacggattgttagcttaactggaaggagtccaaaccgggtagacggacaagggccgggtaggggaagatgaaagggctgtttgattgagtactttaaattacttaatatttttttattttttaagaaagatatattttacacctctacatccaacccaatccaaaattcgctatttaagatttaaacttaaaatctttgggtgctacttagatcactgtaaccactaaagtattacatgtccttttacttgtcatgattcttttaagctaacttatcaaagatgtggttaatcttacctagtgaaaagtaaatttcaaaatgctattaggatgagccacatcatcagataaacaataaccattgaatcgagaaaaagacaaaatagagagaagctaaagagttcagccattgattatagagggaaaaaaagacgatgaactaccgaagcattccagcaattcagaaatgagagagagaaagagcaaacaagaaaagtagctttgtaagagagtgggggcgttggctggcgtatggcatgtgatataattttgcactatacgcactcaataaaaattattttacaaataatcattcaaaattatttatatatatggatatacaattcttacaaccgactaatttccaaatactactggaactttaatgcacaaaatttatttttaccataaacttttcaataatttttctatgaatttaatggtttaactttggtaacctttttaaggtaaaaggttataaggtggccttaaaaatgagtggttcatttacctatatgccctaattcttgcaagtcatgggtgatcaattacactttttccagcacatacttaaagaataaacattggttact

SEQ ID NO: 49647 - DNA, 1562 bp, Oryza sativa
aagtagcatgttctgaacctataactcaaaagtcatgaacatataaaacactatatgcctaaaacacgttgtaacttgtaaaatctataagaaaatcattataactccaaaaattgtgaaaccaaatgttttagtattagaaaacacatctccacacccctgtgaagtctaatctaataaaaatcactttacaaaagtatttcataacactacctaagactatactactataaaccgataaaacttctaaaaattcataactccctaatggaataaaataaaataaaaattatttcacctaaattcattttagatcagtaccaactcactgtgcataaatcatgtataaatcatggattttcagctctttcggtgtttaattgcatatcgtgtcctttatccagataattgcataatcggtgaaggagtggattaggtgctaacatttctctgatcaaggcaagttttctcctcccatcctttgaacacattgaatcccataatttgaggaatgaaaatatttgtttgctaagttgcatgtgaacttagattatatcagtatttgaaattgggttaaggtagttatgacctatttgctgcataccccaccttgaataattgatcctcttgctgtttgaactcctagaaatggttaaagaacactctttgtgctcaaatgggtttatatatgctctatgtgcaattacttgcttagccgtgcttagaaatatgcaaatgctcattccatctataattaaaatgtggttttgattaaaatgtggttttgatacttgaacctttgctggaataaaatgaatatgatgggtatttgcgaactaaaatatgtaaaatgtgattttatacttggacgccaagtggtgtgcatatggtgttagttgcataccgatagggggagtgtttgcccaagtccataaggaccgaacttgtgtcacccatttaaagttattagtacatccacatgtgctagtatgggatggcctaagctgattaatctatttaggactagccttgcattctggtaggccggtgtgtatgagtttgtataattcagaggagcttcctatttaccccgacgtggtagtttaggtgactaagcgtgtccaatacaacggtattgtgccacgtggtgggttcctgtcgtgtccgccaccacggcgttaagtttaaggcgtgggcccgccacttaacggttctaggtatattccaagtatgcctaggatggaggaacacgtatcgtgcttgtgcaaggctaggctctaagtagtgtaaaggcttcgttatgacctctagatcacattcaacatgaagagtgtggtggagtcttgcaaactcaaaacaaactagagagttcatatcatgtgggtaaagctgtacaaactctgcagagttctttaaactaatcgattagccgtgctcacggttatgagcgctttggtgatgtgtcatgagtatagactatgttttaaaaatgtgatcatgtgacattggtttgaaattgataaatgtgttgagttgtgtgtgtggtgatacattatgactta

SEQ ID NO: 49648 - DNA, 1497 bp, Oryza sativa
tggttcagctcctccagttcatctatccacaaatgctaaccatttgcgccatcctgcccctaactctgtcctggttcagccagtatcctctgcagcatttcagacaacacaatctcaaccagcatcctctgcagtatctcagaattctgtcagtgctgctagaccattacgagttcagacaacacaatctcagccaccatcctctgcagtatctcagaattctgtcactgctgctagaccattacggggttactcacctcagaattctttcagtgcaccagttagggttcagtcgacatcatatcatcaggttgctccaggtatatctcaaggacttcaggttcagtcaacatcataccttcaggttgatccaggcagggcggttagtgctgaactgcagctttctcagtgttcctcgcttcaaactcagggaattcaacaccagcatgatccatcggcagatatttaccaaaacatatggaaggaggcacttgctaagctggcatcagagctgggggtttctgattacaatattgatccaccagggcgtcttccaagcactcctcaacccaatcagctgcatgctcaaatgaggcctggtcatcaacctactcaagcaacggcaaggcagggagttcaagctaatggtggtcatgttgcagcagcatcacagaaaaggacttccaatggccaccacttgccaaatcacaaacaattcaaccctggtgccaattgaactcacagagcagtcgtactccaagtgaatcttatctgagcaattttgtagccccgccttgattcctcctggccaccagggtcctagaattggattctttgtgccaccattttcacctagacatggcaactgcaccatgttttgtgctcctcttaggctctgttcgtttcctggagttcccaactcccccatctcattttccgcgcgcacgcttttcaaactgctaaacggtgtgttttttgcaaaaagtttatatacgaaagttgcttaaaaaaattatattgatccatttttgaaaaaaaattagcaaataattaattaatcacgtgctaatggactgcttcgttttccgtaccggagggatgggttcccaactcaaccaaaagaacagagcctagacaattagtataaagaggaggtgttcttacttctttagtcttggcaaatgttagcattagttttcttagcctaccttacaacagtacaaactacaaagctatctcaggagagtagaacagggcacccggcactccattaggatatagtgttttagtgctgatctttctgatgtaatggctcatagttcctacaaagaaaatgtaatggcttaaagctctgaattaatggtcgatttttcagtagaaaatatgatggtagccatttgtttgatctatatgtcatgtacgagtagtatatttttccttcaagcataccacaggtgagttggatgttcacttgttgctagtttgggtcgagtgttt

SEQ ID NO: 49649 - DNA, 671 bp, Oryza sativa
cttcaatcatcaaagattcagaacgcaccgagtttatatcgatcatgtgatggtagttgatagactagattttggtctctcgaggagatattctctcgctatttgcatgtcacttacatagttataaaaaaattaaaaaaaaattaaaaagatgtattaacatgtgatatatcactccacaaacatgcaggttcaaatttaatttatacatccacaacgaaaaaaacaattaaactacagctagttaacgtatattaacagtcaaatttgttttttcattgcgagatgtataagttgaatttgaacttgtttatggagttaatacatcttctaatttttttcataaccatttgagtgacatgcaaacaacgaggggatatcctctcaaaagatcaaaatagtttccctccaaatagtacttctttctcacaattcacttctattttcctaccagtccacgtatgacagtgataacacactgtggtcctggggtcttgaggcactgatgatagtgcagtagtgcacagccttgcgggagtttctctcttcgttgagactgcagagaaatagccaaatagccaaaccccttttcagtgtcaaaccgctccgatagtgttatatttgccgtgccaatgtcgatagtgtgatcgaatggtctaactctataaaca

SEQ ID NO: 49650 - DNA, 637 bp, Oryza sativa
caaaatgggtcaaaaattaaacctttcggtatctttcccttctcctttctacatgctgtacgcctgtacccagtggtatagtagctttcttagggctctgaccaaaaactccacgtcaaggccattgtttatcaccagttcttcctccattgcaaggttagctacatttgcagtacctcctgaacagagatggcttgagtctgctggagtgagcttatgtatacatcactgttaggggtacgcagaagccagcaaaattgacacactacagctcttgctacacatgcatagagcaacagactccacatggtgcaagatgtgccggagattaagcttcacggtatttacattattgaacatatgcaagtgtccaagtattcatcatcagagtcatccgtatcgctgcaaaatattaaaacgaggatccatagttagagggaaaaatagatgcactgcagcaaagataaacttgaattctcaaatcgattttgaaatatagtcaaagatcggcacaattctgatacttcaaatggagtaattaaaggcagggcgctatttcaaaatgcatatcatttacagagacaaaactaacgtccaagtctataccatccaaccccatacaaacacccagaaagaa

SEQ ID NO: 49651 - DNA, 502 bp, Oryza sativa
tgctgaatattgatagtaggaattttgcttcattgggttgcattttttttccaatagattttgatgatgataatgataatataaatatgacacctccactcagaattactgtgtttctgcatttcctcaatgcttccccgtgtttgaaaattttgaatttgaatttatactgtggtatttgaaaatatgaatttgaatatggtatttctatgtgttaaaaatattcatgtttgtattattgtgatactaaagtaggtgtaaatataaagtgtacgttgacatgaaagagaaaaagaaataggggctaagaaacgagagttgttgctggagttggaggcatttttaggatcataaggaaatgagggcagagcctatttaccctttgagggctttaaaatgggagggctattgctggagacgctcttacaaatttaaaaattagatttattttattttttaaaaaatcctatatactttttttttaaaaaagtactgattagca

SEQ ID NO: 49652 - DNA, 613 bp, Oryza sativa
tttgttaattgaagcatcaactcctttacaaaagaattgcgaaacaaaacttgctttatgctgaaaatgaactacatattgccttcctttgatatgccttacatgtagtatggtaggattgactggtgcttgccaatacattaacttgtttaatgtactgactcttgctgttgatataaccttttgtttgcgggtttagacttagtctttgagtgatgcgggtcccgattgcttcttctaggatgagaacttaatggggtaaacccctagtcggtgtgcttgtgattgggtaatcaagcttccgttgttctctaataagtctatttggccggtcggcctatgtaattattaagttgttgtaagtcttaagtttctttcatcttagttgtgtttgctatgtataatcatgcttaagatgaaagtgtgaatctagtgcacatcctgggaactagattcacatgagtatgagttaggaatatttgagaggttgtagatctttagccatttttgtcaagtctcctgaatgtgtaacacatctggtcgctgccttcgagtggtttgacgggcacatctcaggctgaagttgactggcaggctaagggctcagcaatgt

SEQ ID NO: 49653 - DNA, 695 bp, Oryza sativa
ccttttggggtcacccaaaggtgaagtgctacagcggtattccgtgcgcttgcggaattatctgtgatcataagaaataccaacaacctcatgtaataatgcttgaaggcattgagttatgtcttgccttgcgccttaagatttctcgcggcttcagcgtagctatttgggtccacgtcagctccttggattcgatagtcgaacttgctgtacggtctaacgtacgaatacgaaaaagatagcaaataaagcctataagcaaattgctacaaagaaacgataaaaccaaggaataaataaaattggagcaaggagaggggaaaaaaggaatgggttcaaaataattttttgtttgaaaaacaaaagagaggttttggtatctcaaggctgagaatcaaacaaaaacaaagaaaggataaaatgggtaggcagggtttattcggtggatttggttttctagtcggtgctatagagtaaggcaacacgacggctagatatttggatttgttagccgatgctaagatgggcagcatagcggctaaatatttggctcgtctagtcgatgctacagttaagcagcacaatggctagagagttgggaagtttgtacgggtttgaaaagtgttactctacagtcatgagtgacagcagagcgggtaggagcgcacatagctcaaggactagtgtgcggcggt

SEQ ID NO: 49654 - DNA, 978 bp, Oryza sativa
aatttcgttgtctcacatccaaaatattaatatacaccgaatacatccaagtttctgaaaacatcatgaactccccaactatgttatattttgtgcatgattgttggatatgtgaaaagaactgttgttaccattattgtcctccatgaagacatgaaagggagaaatttcattgtctcacatcctaaatattaatatacaccgaatacatccaagtttctgaaacatcatgaactccccaactatgttttattttgtgcttgattgttgcatatgtgaaaaaactgtggttaccattattgtcctccatgaagacatgaaagggagaaatttcattctcacatcctaaatattaatatacacagaatacatccaagtttctgaaacatcatgaaccccccaactatgttatattttgtgcttaattgttgcataggaatgaaaccgatttaagtacaggagctaacccagccaatcatttcattgagcagtagggaagcatagacacaaagcaatgtacttgttgtcaaactgcatgctccagcgcacctgagccctgaggagctagcatttcaagcttcagtgaggagtagagattccatggtaaggtagggaaaaatgattaccaacggaaatcatttgtatgatcaccccaatgcatcagctatcaatctagaccataagattcagcaatctgaaagttgaattagggaaaccattattgatgaacctataacaggaaaagataatctgcagcatatcattttatacccacagttttttcacatatgcattttaacaaacacaaagcgtgcacacactagatggggacagggaagcagcagtcctccacactgccaaaggagtaggcgtcgacggcggtggcggtggcgttggcggcgggggattcggcgtcggttgcagtaggcgtcggcggcggtggcgtcggcgtcggggaggagtcactgccaggggcgg

SEQ ID NO: 49655 - DNA, 1576 bp, Oryza sativa
ttagcacttgcgcctagtaagatttttgtttgattttccgctatcgttttagagctctctaaattatcaacccacacgctgaatacatattgcaagaagaaaattaataatgtgtctccagtgctaaaccataacttggactcagcaaaaaaaatggtagtattttctttgatccttggtgccattactgccaatttactgcaaatttctcaagagtatattcacattcagtctcttgaacggggtggcctcagcagccttgagggagtgcctccgagacaactccaccaccttctactccctgacaatgaagtagaccattctaggttccagcagctgcaagtaacaatcattaatcctccttttcaagttctattagttgggagctattaacttgattgtttagatagcatcagatgtttatcataggtaatgatgactgtcttcgctaatgcctactggattgcccagatttgtaacaaaaaaagattcaaggggaaaaaacagaacccagggaggatatatatgtcatataatcagttttatcaaaaaaaaagcacttgacaactatgtaaaggatgccgatgttggtcatactcaacatggacaccagggtagttgaactatcctttcacttggtagctgtcagtagaagataaaaaatagttaattattcagtgctctctaatctgatactacctaacaaagctgagtacaaagcatagataaaccgttgatttgatcacaaacagggaagcaactaaagagaaaaaagggcgagtttaattggcagtaataaagcaatgtttaaacaactaaacattcacctacagaaaccaatatcagattatatgagaatctttttaggtgatggacgaatgaagcatgtgatgctaatttccacccacagattatcattgatgcattttacttgtcaaaaggagaacaaatgaggaaacattctgcacaagatgccaactctctgcttctatttagaaggaaaatattgaacctccatcctggaatacaaatcgttgtcccacagcttatataaatctcttgcattagatttaaagcacagtgttgtgctcaggacaggctccttctgaaatttggttctactacaagttcagtccaagtagaaaattaagctaatcctggttttctatgtgaacttatatctagcaaagaccctcatcttgattttataatctccttaacccacacctcatgcaccgatttttaattttgaccttagtattatgttccacaattctgaagggtagttgccacaaaaaaaaaaaaaacttacccaacttgaacacaatttggaaccatgatgccatagattaaggtaccattattgtcctccatgaagacatgaaagggagaaatttcgttgtctcacatccaaaatattaatatacaccgaatacatccaagtttctgaaaacatcatgaactccccaactatgttatattttgtgcatgattgttggatatgtgaaaagaactgttgttaccattattgtcctccatgaagacatgaaagggagaaatttcattgtctcacatc

SEQ ID NO: 49656 - DNA, 1582 bp, Oryza sativa
ctcgcgccccgcgccctgccgcgccgcgtcgccatcacatcgccgcgtcgagccccgcgccacgccaccccgccgacgccatgaggccgccgcccctcttccctcttccccattatctctttccccttcccttatataatccccccctattcccactctttccctccatcctcacctcctctcctctacccactccaccacgtcgccgcgtcatcgcatagagccgccgcgccgtgcgtcgccgccttgcgccgccgtcgccgtcgtcgccgccaccgccgccgccggtgagccgtctttctccccccttcacctcgcgcccaccgccgtcgccgcccggggaggcaaagagccgagagagaaagagagaaaccgagggagggagaagccgaggaagagaggaaggagccgggagggagagaagaaaagaaaaggaaaagagagaaaaagagaaaaagaaaagggaaaagagaaaagaaaagaaaaaggaaagggagaaaaaggaaaaggaaataaataggaaattagagggagattagggaagtttagaaaatttaaaataattagaatttaattatagattaattatagtcgtagaattgcaaaatttaatataaattatggattattcttggtaatttctacaagaaatcaattcgcggtagtaatttagacgtaattaataactaaacaaatagatgaattcttatagattattatagattatttttgggtaaaccctataagtaatcgattcacggtagaaattcggatttaattactagggattttagccgtgtattatatttaatcatttagtcatagactaaattaaatcatataatatttctaggatttcgttcgatatttagctccgatttgagtgaaacttgaacctaaattcatctaaattcataagctttccaatgatatataattcactatttgataaaatatatttataaatattaaataattaatatcaagatgatgcataatagtcaacttaaaaatatgttaataaataaaattagtattgtacagtagactagatgtaataatatttgtctctaacatgtcttgccactataacaaccacacaaactaattttatgtgatgtatcaaatgaatggatgtataggaaaatactagtacttatttaatattcgatggccatataattaaatccatggcttataggttatttaaatcaagtgtagccttatgattatgcaactaaaatataaacacacatagatgaatctttaacctgtttaggagaataataatagagctagatgtggaggaatcactaagtaaattaatcgacgcaataccatatagaatagcttatatatgcctaaattgattaccacttattagtaacccaatagaaccagtgcttaaacttgtcgcatcacatatacaatatcactcatagaaactagctaatgtatattaaactacaatatattcaggaatcacttggagcattgggtagtacactttctaaataagctcatgtacagtaggcgaccaaaaccttatacgttgtagaacacatatattgtacatcccatt

SEQ ID NO: 49657 - DNA, 596 bp, Oryza sativa
gtttagttaccttcaaacttctaacttttctgtcacatcaaatgtttggcatatgcatggagtattaaatgtggacggaaaaaaaccaattgctcagtttgcatgtaaattgcgagacaaatcttttgagcctaattacgccatgatttgacaatatggtgctacagtaaacatttgctaatgatggattaattaggcttaatagatttatctcgcagtttacatgcggaatctgtaatttgttttgttattagtctacgtttaatatatcaaatgtgtgtccgtatacgtcaatttttttttgccaaaacaactaaacacggcctgtattgtcatgatgaggacacaactagctcggatataaccatgactaccttatgtattaatcaaccaaaggtgtatatattttaaattagatttacttgttatatatttgaacaaacgttgctacacaatgagttatgtgtgttatcatttgcagagttacttgcttgggtgaaagaaaagagaccgagcataaggaatgcatggatgattgaagaagtttattggggaccaaaccaagaccttctccaagtcttctttcatctcaccac

SEQ ID NO: 49658 - DNA, 653 bp, Oryza sativa
tttcaaaaattttctattggaaaattgctttaaaaaattatattaatccatttttgaagtataaaattgttaatactcaattaatcatgcattaatagctcacctcgttttatgtatcttcccaatcttctttatctcctcctggaacacagcaacatgtatgtaacactctcttacacccccgcgtcactccgctccagggcgacacgggcggcgaacacaccagccccattgtcagcccctctccctcctttcctcagcatcgccgttagcaaagtcaggcggctgtagggatggtggtgccagagccgtcatcctttagttttgctcgtggtcacgacagttggggcactaacgagaccagggcagaaacttgcagcgggcagggcgctggtggacgctcctatctgcagatccagctcaggctgtgcgtgcactagtgagggtggcaacaaacacgtggggctggttgacaccgtgtgtagcaatggggacggccagtcttcggtacctcagccagattcatcgttcctacaccgacggcgaaggcgaccacaacaggccgtggagacagggagtggccagggaggtgaagcaagtagggcagtgtggcatggtgaagtgccaaggcagcggtagacgatcatgacatg

SEQ ID NO: 49659 - DNA, 501 bp, Oryza sativa
ccttgcggagatgccgctcgtgaagttcaaggtgtggaattagatggggatcgaggaacccgatctgcatggtggcaatgttagttagcgaaggtgaagttgaaagagttggagagtgaggaggtggaatccaaggcattgctggagggtatgtgtcactgtcgtcgccttcgttgggattctacgttagcttgaagatatcatggagtaagcaccctgcaccccttaatgcatcctctcttatttgtctctctcgtagatctcattggaatcagacagatatagatctaatcttgtcgggtatcgcttggtaatggtgtgtgtaatatttggtaccgacgaatatcagccgataccaacctgatgccatgccaccttcacctatattttcatccacaaagcccatgaccctgccatcatcgcttgatagtacgttggtatcacttcatatcactcaactactcaagtatcaaagtcgagtgaagttgatacttacatttt

SEQ ID NO: 49660 - DNA, 1948 bp, Oryza sativa
aaattagagaacgagagcgtaaaaactgtgatgtttttgcacgtatatgcacacattgtacgtagtactactacatgtattattgagacgagtctatatgttttggcgacgcaaatcttccgtacgtcccgtcgagagatcagaatctgtcacgcaagttttggatgccccggcgccgatatctctggacgatacgctgcgtgaatcgccgtgccgggtagtagtagtagattgactgcaaagcatgttactcaccaccgtacgatgctctgggttacggtcactttttatcagtagcagcatgcagcagcattggtgctcatccttaaaactgaagatttgtctgtcgagcctctaggcactgggtagctagtactaggagtagcaaaaacacagcctgacacatgaggtgacgccaaagcagcccgaccagattccgctcgcagatagctgcattgtcgcgcgtttactggtttgctaaacacaagctacagtccaacacgcagttaattagcagctggccgcctttcttccccatttgcatgcatcagccataatcacaacagtaatcaactgaagaaacagcacctagcttgcctaccataactgaaactagcagtaagcatctgaatcaaatcaacacaggtggccttgtttaggtttagttgcctgctgagctgtttgggtttgttcatcgcaccggaacggcaccaaagatagcaaagggtgaccatgctgtccctcgctaaggttctctcacccacctataaataaccggcttctgcactcgccatggttcggagacgaaatcctttaatttgacgcttattcttcctcgcggtagcttgcgaagccgctatatatacaactcgctttaaattctagcctcaattcgccaccatctcctagctagatttctattgatacacgatatctcacgcccatactacgtaacctacatcaacatacatatatatacctgaggatttgggtgttttgtgcgatgatgttcgaggcggacatggccattagagagatgatgatgttcgaggcgcatacgaacagcggaccgatgttttcagaccagctatgcattgtaatttcttcacccttgctacctgcacttcttttatttgtagagattgttatcttgatcatttctgttctttgttaatttttatggcccctggttattagccttattattttgcttccttcatcactagttgcatagttgtgcaaataactcctagtaagaaaaatacaaactataattgattaatgattactatatcatgcaatgcttgccccttatattattctagttaaaaatctatttatgcttccttgagttaccatgttcttttgcataacattttgcatggatcaactttattttgtttctgattagcaaatctgaatggaagtccttgttaggcacagcgactattgtcatcagcgcaagaacttcaatattgtgctcccctacttagtttgaatatagtgacgcataatatttgccattcggctgaacgcctgaaccttagtaaggatagaaatgatgtccatatattgcagatccgggtttttagccttaggggacatgtgtcccaacaggagcttatcaaatgctctgcaaatagttctgggaaacattagctccattaatacagcaggcactcacaccttggtgcaaaatctcatccctaaaccaactctatatatcaataagaagagcttcagttttatttacgcctaattcgattttttttatccatatatagattattttgacttgaaattgtgaaattactctcacatcatcaaaaaaatcaagttattttgttaactatttgattggtgttgacaggtaggggcaccttttttaatgatttaataccggcaacatcataccctattttataaaatctttgtttatgcataccag

SEQ ID NO: 49661 - DNA, 509 bp, Oryza sativa
cacatcgctgatgcccatttgcgaggtatgcattgcccatccgctctctcatgttacttcctattgggtatttcgcgggcattttcaatactgtggtgaccattaaaccatactactagttctcagcaagtttaatagtatagtaaactattggcttcaaatcatctatagccaatttaatagctaatctatacaatatctataaatatatactacattattaatatctggtcctacatgtcatatacacattacgtcttaaagtccgtgctgtaactggctgtaaatatgtagcctgctgctcacctatctctttttttatcttctcgatatatatttatagctggtttatagtttactattgtacttgctcttatgctcagacatcttgatttggtggtgctacagtgtcatgagacactgtctcaataggagaaatcattaattagttgtagccccgtttattgtgttggtcatagatgtgtctccgacagcaatgcatactcaca

SEQ ID NO: 49662 - DNA, 1661 bp, Oryza sativa
acatatatatatatctatctagattcattgacattactatgaatgtgggaaatgctataaatgatttacattctgaaacgaagcgagtactagttacacgctttgtatgttctcccagctgggtggaatttggggccgcccattcgttctaggtccattattagggctttaagttacactgtaaagctaattcacattgcaacattacgattccacttagacgtcatgttatatatctacttcatacagagcaactttatttaatctagaagcttgaaattttactaattaaggcatgtcttctgtgagccatattcggtaggaaatatatagctgtcatgcagctttaagtctatagtaaggcttatcgtgcttaattttcgttaattagtagggggccagacttaacgtacagtttgatgttaacgtgcaattccacgggtgtgaaatgctgtgttgtcttactctacatttctacaagtcaatgcacgagacactgtgggccccgatatgtatggattagaagaagcatgtgtcatcacaatgattggaaactttttattaacacttaggttcaacaaaagttcttattattgagcacggtctactttcaatatagataaattagatacaacttttctatcgaaataaattatggaaaatggggaatcggcaattgtgccttgtgtgaatggcctccaagcccagcacatccctagcaatatatacacatacactagttaagagagatagctataggtatcatatttatagtgcgaaatttaataattgaggttaatagagttaacaagagatactaaattttgtagtaataaatatagtatcaccccgatggactcactgttagaaaaatgcctacacatgtggatgagtcaagatttaacaagtatcaatcaaggtgttaatttcttcagtattatatatactattgtgaaatggcacgtcacgtataaataaagacgtgtgtattacgatctgattatcgtgtatcctccgctaccatttctttctgtaatgtcaaaatcgcgctacttctatctggtttttaaaatttgacaccataagcttttagacgtgtgtgtgactattcgttatatttggatctttttggtaattttcacctattttgttatgactatgcttatagtacatttaataataaaataaatcacaacacaataaaaaataattatgtttttttaataagaaggatgattaaagtttttttaacaagataacggagaggagagattcccatctgaatatattgctcaaatcgtcattgacacatagggagtacaaccgatattagcaattactccctccgttccgtaatatagcaatctagtaccggatgagacatctcatagtataatgaatctggacagatcttatagtacaatgaatctggacactacgatatgtcccatccggtactagattgctatattatggaatggagggagtagtaattacaaagcagaagagaagatgtacaaggatgattaaagttaacgatgtaaagcatggtagtatggctaccaatttgtgcaaaatcacatgctactggagatgataagttgaacgctgatgcaggggatgtgtttgctgacgctggccgtgaccattccgtcgctgaa

SEQ ID NO: 49663 - DNA, 645 bp, Oryza sativa
ggtttgcaaatagtattagctacttgtcaagttgtttgcatagacttactgactggaaattggttgatatctcagtaagaacacatcaacaagatcatgactgtaactggcactacaggatggcatctttatccaatgtgcatgcagagatgcgaagtgccgcaataggcgtctaaaagaaaacgtgctgccccaaaagaagggagctcgcactacggagtacctatttgggcaccgttcttttgccaggttcgggctaggtactcttctagatatttgcgaccatattttttaaattgttaaatattttttcgagataacgtgttatatagaagtgcctttatcaaataaaatgagctcattttccaactctccaatattaaaacataattaatcatgcttaatagtccacatcgttttgcgtgtaaccaattaactcagctaaacatcataaacaaacgggtttaaaatatcttgacaacattggcctggcgtttgaaagcaagaatttggagcacattcaagaggataaatggtataattttaggaattctaagatgccgcacatgaaaaatgaaagattccttcaatagataactttgcaatggttgttcagagaaaaattctgcaaacgataccgctgtc

SEQ ID NO: 49664 - DNA, 533 bp, Oryza sativa
tgaaatttagtaagcccctaagagaattatcacgtcgccaatagccggattcctgctatattcggttaaggaaattaatatgttaaaaggaatcttatctacaagtgatcgagttcaaggaggatgcggcatggcagtttatctattaattaggcagtatttgttagtttcgttttatctttaggaaagtgtgtttagtgtcctataaggactttatgttctcatttttatcttttaggaaagtttatttcttatcctacgaggactagtatctccacatgggtataaatatgtatatccgtggtcattgtaaaatatatccacgatcaatacaattcggcgcatcgccaccttttaccttttctacctttttatttatcatccggcgggacttagcacctgacgcggggctgcatcggcgttcgatctccggcgaaggggtaagtccaatgttccgttggtccaagcaattgtctcattacgtcggcatcgttcagggctacatcaatacattcgacctcttggattgctcc

SEQ ID NO: 49665 - DNA, 750 bp, Oryza sativa
  unsure (1)..(750): unsure at all n locations
ctgtgcttaatttatatttcttatttcccaatttccttgtaaatcagatgatatatttgcttggagatatcattggtttttccttgtaaatctttttactaattcatatcattggtttttcctgactgcaaatcacagttcaggtcctctcatgttgtgatttaatgttcagaaggctattatggtttatgggtacttgctctaatataaattttgtcaaaatatatgtcgaagttaccataatattgcagattactctttcatctaatccctgaattttagattggtgcacagtgattagttaggttattttctgactaatgctgataaaatcgacgtgtacactcttgtatgaaatgaacagtttctactattctatacggacaaccatatatctttgagaatattgattttatccgcacgcggccgcccttcactncggcttgcttggcatctcccccccgcttgctggacgccggctcgctcgttttcttccaaacgccgctgctcgcgaccacaggagaaggaaccccgtgcacaacgctcttcccggacgccgcgtaggcctttcttctcagaccttaccggagaaagcggcgttggagcctgagatcaagcggtccttctagattcagtccttctcctttctcgtctccaagcagcatgtcctcccttgacctcggattctcactcggcaccctttgtgttagtgagcttctcgatctcgcctactcaacttcagcttgtttt

SEQ ID NO: 49666 - DNA, 5157 bp, Oryza sativa
atcattattaagagtgcatcaaaacctttaaagaacatcaaggctaaattgaaattaattgctcaatctgggttttctaatacatctatataaggattttatgcaatatcctcgatactaatattagaattttgaactttgctaatccaaacagttagcatgagtatgcaatttatcactagcccactgtaccgcccaaaaattatgcttttcttcacaattttcattcatggtccaaaattctcgtggttattttggcgaattcaaagttataatagacagatacttgcactcaagtggacaagcactacgccactacctactattgcatcatccccctgaaaagtcatgtgttgccttttcatttatcttagatatctactatgaactaaggggcaaacatccattcttgatgcaaagaaactggcaggtgcattattcctaactatcgtcctttccttatttacatccaactctgcaaccatatctcacctatcatgaacaaatatctcatctttcatgaagctcctaagttcccaggtcctaaccccctacacggagacacaacagcaaatgctgtttcttgttgctgccaaagcagagaacactacaccctgattaccaactaagcaatagtcatccaatcagattgcagcagagagtcaccacccccttccacaaagcttcgatgtggcatatgaacaattgaaacaggatgcattcctcatccacaggaagggagatgatttgagcatgttaagctccacagcttagaaggttgtgagcataaaaatcaaaacacatttgatgcagtgatttataaggtaaccaatttacatatatgtaaggaaatggagatcagagttgcttaaaaagaacaaattaactagtcgaaatagcgtgaaggcaataacacaagagaagtaactagtatataccttgctcaataacaaatgagccccacatgaaggatcattagagaaaggaagtacacgattagagttttgaactgcatcgatcaaaagtaatacaactgcccaagcatttcaggaaagtggctgaggtaccttctgaatgctcatggtatcaacagaaagataaacagcagagcaagtaaaaatagcaaaggccagcatctatgctcttctccttataattatcatgggcagagtgattaagtcagattttagaccaacaaaaatgctataccctcaaggtcaaacttaataaattaagaagttggatccaaggtgcaatcaagatttgctatcagtagaatctgtcactgccaacgacatcagaaagacacggacaccagagcttctgacgactatacaagccaaaaactaaatggacgtgtcggaaggaacttagaacacatgagataaatttgacctaatgaattaatataataaaaagggacacaaaggtttgagctccaaacacgaaataggagaagtgcaccttcgtgaagcaagcaacagctaaaacctatcctgtgaaattgcatggtcagaatagccatagcccaccacaattgacaattctacagaataattcttttgccatggcacggtaagaatatattcaagcacttggaaagcacaagcagagcgggagaaaagatcatcctgttgcaaaataccaacaccagaagccacctaacagacagaaccaccaggaagcaaaattggaataaagcatcaaccaaatccacttgaaggcgagtgtttttatataaaaaataagagcaattctacggtccttgaggaccatgagatactaaaattttagtgtaaaatttggtatctcatggtaccttatagtacctaggtaccaagaggtaccaaatttacaatagaaaaaaggtacctcatggtatctcttcaaggaccgtaaaattgctcataaaataaacaaagagaaattttggataagaatagagctgcgcgatccttgtatccaagaatgaaaaacagtgtggcttttagcgaagaaacacacaagacaactattcttcgaaccaagaacccatcaaaatcataccggaaataagctttgcacattgtgaatgggaaagtgcatattttccctacaaggcccactaccacatcatgctacaaattgctcgagctagaaggggttgctccaattgctaatagcatcaaagaaaagctaaggttcttacttgctaccactgaatttgaaggaattgttctgctgtgccaccaccaccacctagaccaagggaggacacatggtaggaactaaaacaagcagacagattgccgtggaacttgaccaacggaagaaacatggctggcactaaatcaaacagtcagattgccttggaacttggaggcaatgccacacgtcatttttttaccgaaatttcagagcaaaagcggggaagctttagaccgagtaaactcccggcgcgaccaactgaacacacaccctacaagtcaaattcgatcgagttcacacccttcaaccactcaatcgcatcgaattctcgtgaaaaaaaaggccagaagaatccatgaaaatggcagagacgtgagcttccacccatcgtacagcctgtcaattgatcaacccggaatccgagaaacacgcgagggttaacagcatcaccagttcaccaccacacaactgacacgaggcgggcaggtgtgaacacgaacctcgttcctgagctgggcgtcgggcggcggcggcgagttgcgcgcagggacgcggatggcggcggggagcgcgaaggggcccgggaccacctcgagcccaccgtcgccgccagggtggcgcgccagggaagacgagcgcaagggctgataggcggaggcggtgcggccgcggcggcggcggagccatctgcggacgccgtcgacgacccctcccccggccatggtggtggcgctgctccggcgacgccaagcggcattgcggaggcggcggcggctgctcctcccccggggttttgtacgccgccgcggcggggaggaccgcgccggcgtctcgcgccctcgtcgtcgtgagaatcgactgattgactgacgagtcgtcgctgcggaaaaaatcggacggttttgggcgagtattaggctcatggacggatgcgattgacggagatgcctttctattatttttcttttttttaagaattatacggtataacgagacactcataacacacgcacactcgttcctatgaacgcacgcatgtaaactctaccactatgagtatctacgaatactagaccggtaaatccttaagattaacgaagtaaccacagacacttgctagatcaaagaaaaaaacatatttctaaaattaaacacaatttatgaatatagacatgcaaatgtgcaattgcaagcatgaaagacgtataatgatgtcatttacttctacatagataaataaatagacaacataatagcatctacttctgcacacaacgaacggacatacaaaatcctctggttaaacgaacagacaacggttagacgatcatcaatttgataatacctcaaaaatctcaagggataatcaaattggaatggagggaatttttttttctccatcacacaaaagaggtatggcacacttaccactagacatataacaccgcaccctttttttaaccaagcatgcaacattattagtttttattttgtatatgaaaagaaaatgattccctcgtttttatacgaagttaaatatttttgttttcaccaccaacttttagaaatttgtgcattaaaaaacatttcttatggccttatgatattaaactatatgattttctaaaatggatagtcaaatatataaatatttgacacgaaacaaatttagaatgacaagtaatttatagcaaggggaagtacatttttacttttttcttttacattcttattatgatccgcacaagttttaaatttgataggttatcttcgtaaacaaaaggttgtcaaatcttgagttagacttgatctaaagacaaatatcatccactgaaacttgattagcagacacaccactcagtaattctccataacaaatcgcattcaagcagactagcacgcacaaatccaaaggaaaataagccacgactaggagtcgggcgtgcatagaacggcagatgcccccatccttcaatcacaaactcagaacacgccaaaaacgtcaggggagccaaagccacttgggcacttggcttgacaatatccataacttacaaacattgctcgaattcctggcaaagaaatcgaatcaatgcttggtgttcatattgcctatacaaaatcagatcagggcaaaagcactagtgcacggaatctgcctatctggagacaagtagttcacccttggggagtttctcttggtggatgtacaaaattggcagcagctgattgggttgacacagcttcacgctgccgggatctgatgggtgcagcggtctatttcttcgctggggccttgtgaagcttatcaaagatgggatgtctcaggacttctttcgcagatggccgcctcactggatcaggatccatcatggactgaagacaagcagaaagagaatgttaagttgcatgtcggattgcctgttataggagagcagatgcttctgagaaacattatttgaatttgcaccttcagcctaccagctagtagctcatgtactcaaaggttggtacctcagtacgcaagatatttttgcataaaatgcatatgagagcacattatgcttaaatgcttagttgaaccaaaataacagttagtatcacacatgctacgagtgtgactagacgtgttgggaaaaagaacatgataacaaaacagaaagatttaaccaaagataaagttaactggaactaaaaggcagaacaaagtagtgacagaaatgataatcatacccaacaaaagaacatttcttgtcttaaccaactatatgctaaaaatagcaaattgtactagagcagattcagcaaatgactatttaggtgttgttgattttagaaagagatacagaaaggccaaaacaggccactaccatattctatagaaatcactttagtgtatcaaaagtgaccaattaatacttcctccgtttcataatgtaagtcattctagcattgcccacattcatatgg

SEQ ID NO: 49667 - DNA, 701 bp, Oryza sativa
caatatatgccaatattggcattgattgacaaaagttagccgcgcgaatcatgaagagagttttggtcacgaatgcacccaatacactccaatatgtccaaaaatcatgttttggtgctttttgaactttttcattccggtcaaaaacatcgcacccgtgcggtccaatatatgccaatgttggaattagttgacaaaagttcgccgcgcgaatcacgaagtgagttttggccacgaatacacccaatacacacctatatgtcccaaaatcatgttttgttgctttttgaactatttcattccggtcaaaaacatcgcacccgcgtgggccaatatatgccaatattggcactgattgacaaaagttcgccggacgaatcacgaagtgagtttttgccacgaatgcacccaatacactccaatatgtccgaaaatcgtgtttttgcgttttttgaacttttttattccggtcaaaaacatcgcacccgtgtgggccaatattggcattaatggacaaaagttcgccgtgcgaattacgaagtgagtttttggcacgaacgcacctaatacaccccaatatgtccaaaaaatcatgttttggcgttttttgaactttttcattccggtcaaaaacatcgcacccgtgtgggccaagattggcattaatggacaaaagttctccgcgcgaatcaagaagtgag

SEQ ID NO: 49668 - DNA, 1253 bp, Oryza sativa
  unsure (1)..(1253): unsure at all n locations
gcgcgaatcacgaagtgagtttntgccacgnacgcacccaattcatcccaatatgtccaaaaatcatgttttggtgctttttgaactttttcattccggtcaaaaacatcgcacccgtgtgggccaatattggcattaatggacaaaagttcgccgcgcgaatcacgaagtgagtttttgccacgaacgcacccaatacaatccaatatgtccaaaaatcatgttttggtgctttttgaactttttcattccggtcaaaaacatcgcacccgtgtgggccaatattggcattaatggacaaaagttcgccgcgcgaatcacgaagtgagtttttgccacgaacgcacccaatacactccaatatgtctaaaaatcatgttttggtgctttttgaactttttcattccggtcaaaaacatcgcacccgtgtgggccaatattggcattaatggacaaaagttcgccgcgcgaatcacgaagtgagtttttgccacgaacgcacccaatacactccaatatgtccaaaaatcatgttttggtgctttttgaactttttcattccggtcaaaaacatcgcacccgtgtgggccaagattggcattaatggacaaaagttcgccgcgcgaatcacgaagtgagtttttgccacgaacgcacccaatacaatccaatatgtccaaaaatcatgttttggtgctttttgaactttttcattccggtcaaaaacatcgcacccgtgtgggccaatattggcattaatggacaaaagttcgccgcgcgaatcacgaagtgagtttttgccacgaacgcacccaatacattccaatatgtccaaaaatcatgttttggtgctttttgaactttttcattccggtcaaaaacatcgcacccgtgtgggccaatattggcattaatggacaaaagttcgccgcgcgaatcacgaagtgagtttttgccacggacgcacccaattcaatccaatatgtccaaaaatcatgttttggtgctttttgaactttttcattccggtcaaaaacatcgcacccgtgtgggccaatattggcattaatggacaaaagttcgccgcgcgaatcacgaagtgagtttttgccacgaacgcacccaatacaattcaatatgttcaaaaatcatgttttggtgctttttgaactttttcattccggtcaaaaacatcgcacccgtgtgggccaatatttgcattaatggacaaaagttgctgcgcgaatcacgaa

SEQ ID NO: 49669 - DNA, 791 bp, Oryza sativa
ccatgccgagacggtataaaccacttagattgaaatatatattagcaacaagattatatatgttcatagcataaccgatcagatagatctagcatgtatcggctaatactccgataccagtttatactaagatattaaagcaagtaaaatatatcaaacagtagtgtaatatacctagatgcaacaagattttaatataaagggcaaatctagcatgtcgattaagcacatgaaatataaggcaaaattaggtaaggtcggctgaaaccccgagactactctcatcaacaaccaagaagcaggctagagactgagattctaatcatgacttataaggtcaaactcaattgatgcagctataagtatgaaaagaagaacaatatctagacaatcaagccgttggatgtttcatagagtggtggatatcctgtacaatctaagtcaacatagatatttgacttaatcggctgccttccaataatagacatttagccgattgaagactagataacgatattgtcgaagattatacagaatatatgataactcgacgaattacataaacaagattagagtatcataaagatggaagcactaatcccgagaacgcaagccgccataattagttttacctctagttgaagatcaaaaccgatgcagctcaacccgaaagcaagaactcgtcgaaacaaaacgaaagtaaagggtggcgatgcgccgagattatattgaacgtgtgttagattcattacatggggctcggggtctaattatacccgagattacaaaat

SEQ ID NO: 49670 - DNA, 686 bp, Oryza sativa
cgcacatcctcaaatacaaagcacttccctagttagatgtaggttagacttcccgttcgagaaactctaccttctacctgccctcaatttatgcacgattaatgaatgccacctgggtggaagcgagaggtggaaatggaaggtcttagttcggaggtgggatctctacctgatagttgcattgccattcatgatgatcccctggcattcgtgcattcagccattcaccattcacccattcaactggaattttggttgaatgccggaattgtgtccacaaattgtggatggatagttggttggctggctggatggctggctggatggctggctggatggatggtgaatggctggcggcggttcggttgctttgaagcatttgctgctatctaaattccatttaaggtcgtaccttatcgccaagcatcatcttattctctatttgtattccctccatctttcagatacggatgtagccttggatgtgcccgtgcccaatgaagaggaagagcgcaacatgaaacgtaagtacaaaagtaccggacacccacccagatcccaatagaatccgcaaaatcgtgcgggaaattgtaatcccattcaccagctcctacatttaattaacaagagaactattgtatttatctaacacctggattatctccacctttcatttgatccctatt

SEQ ID NO: 49671 - DNA, 1415 bp, Oryza sativa
ccctttgtagtgccgtggtggtacttcggggcatggcaacatgtgtgaaatcgtgtcttgtgggtacagtggtactcctctggccagagtaaaactcttcgaatagccgtacccgcggtcatgggcgggtctaacaatgtctttcatgattagtctcacacctctcatcataataaaagatgctttaattggtaataatttggttagctcctggtttggaatggtatattcctggtttggagatagaactgtacagccgggatggttgttcagtatggttgggcctatgcaacagggtatgttgtatagcgttggattaatattgtttaattattacttaactattttattaaattctgagatatttattaaatgctgtttatgcaaatgaaaccctactatgccatcctttgttatcctgtgcacttgcatatttgctgcgtggcttgctgagtatgtcatatactcaccttgcaatcattcatcagaggaagagttctacaatgatgctgatggtgtggaggattagatgtagccctggtcaagctgcctgtggagtggagttgtctgcgccgtttatcttattttccgctgcttagatctttattgattgagaggaactatctacctctgtaatgacattttattcgcttattaattagagtaataatggtactctattatcaatttgttattgtgtgcctcggctgattcctggacgagggtttacacacatgtaagcgttcggaattttggatagaaattccgggcgtgacaatgtattttaggacatagtaataaattttgaggtgtttcatctaatctactggacatagcaatctatttctttctaaatagagtgaggtgattattcatgtatagagacatatgacgggttaaacagtgagtggacgtggtcgctcgcagatcgctcgcgcttggcaagctggtgacaccatgctggtgtgtgtgcccttgaggcaacaccatgtcaaggcgcgtgccccacagcttggtctcacctctcctcgtggcgatgacagtgtgccagcaaggtatctcccattctcccaggtgagtcatctatatctctgtgattttttttaaaaaaaaggtatattcacatgtaatcgttcgacaaaaagtatatttatatttttttaaggcaaagcacatacacagaaaaacgatatcttccactgctcgactattcacgtaatcacatgggacccaaaaagcccaatggcgatcgatccctcctccacttggtttcccttttttttttcaccgtattactttcctattctagtaaatttatgcacctaaagtttctacacctcaagtttatacatctaaaatttatacacgtaaagtttagagacccaaagtttataagccaaaagtttatatatccg

SEQ ID NO: 49672 - DNA, 1310 bp, Oryza sativa
taagccgtgctccaggtgctttacatctcgatgctccctggctagcaatgaggttatatcttcaatcttaattagcaaacctatcacacctcagcatgtcgccatttttattccatgctcgacggtaactacctgctgctgttgcgcatgtcggcggcacacagcgtccatttgtacaagtttttgttgtgcttggctgagtcctatgtatggtcaccagcttgtggtatttgaattgtggacatgacacatgcttttttatggtcaccaacttataaattcaacatgacagaaaattatcatctatcgcacggtcacatgtttttttatggaaatttgaatgacatgtaaaatgttggagtatggtgtgcagctatgattttatgtcatgttgaatttataattttttatttccttccacaccatcgatctaatttatacttgtaaatgtttacaatgataaatttattttcaatttcttacaatgttccactgatatttggttggcatgcaaagaatagggttctactctttcccttttttaatatatcgctccgttgaccttttgatatatgtttgaccattcttcttattaaaaatttatttaattatcatttattttgtatgacttaatttatcgtcaaattttcttcaagcataacttcaattttttatatttacacaaaaaaatttaaataaaatgaatggtcaaacatttataaaaaagtcaacagtatcatacactatctcggtcccaaaataagtgcagccgtgggtctccaacgtttgaccgttcatcatagtcacacataaagtattattcatgttttatcatctaataacattgaaaatactaatcataaaaaaaattcaaataagacgaatggtcaaacgttggatatgaaccgtgcaaagcagcacttattttgggatggacggagtattaaaaaacggaggtattatgtccaaatgacatatttccatatatagcatatattatcagtaatattgatattatagtgtttcgttgtatttgattatcatgcaaagaataggtgttatccaggtgacgtatttttgtatttatcataatatgagtaatattgatcccatattattggtttaataataaatttaataatagttccaataaattcgaaaacggagatattgcttaaaagttatggcagtagaactatctaattctacacatgtaacactggtggagaaaccctttgtagtcctggttcgtaaccctcctttagtcccggtttccaaaccgggagtaccaatccgggactaaagatcga

SEQ ID NO: 49673 - DNA, 710 bp, Oryza sativa
tctatctccaaaccaggaatgtaccattccaaaccaggagctaatcaaattattaccagtttaagcatcttttacaatgatgagaggtgtgagactaatcacgaaagacattgttagacccgcccataaccgcgggcacggctattcgaatagttttactctgatcagaggtgtaccactgtacccacaagacacaaccccacatcatgtcaccatgtgcctcaataccaccacggtatctcggaaaggagttgtgacaatacccctcgcataacacaatccaccgcagcgcaccttcctagatcataatcacccccttataaacaaggcatggactccccagcgacccccgtgggcttatctccgccacttctcagtctggtgccccgcaatgaaccatgctatacaaaagataaagccgttgcccatgctggcttgtggttggcacggttaatgtttcacaaccgaaactcgtgaaccggtccttaattgtcatgagcacgaccaacaaaaccatgtgctcacaacccaccattaccaggttttagttggcacattaattaattaactaatcacgattgaccatcgtgaactatcatgaaaccatcattaaataatagtgagtcattagttatcccgaatgtgtactaatgtttctaagcagggctaagcaattatatctaatatctagttgaaccaatataaataaa

SEQ ID NO: 49674 - DNA, 713 bp, Oryza sativa
  unsure (1)..(713): unsure at all n locations
attttttttctttttgcttttggtaaatgtagccaaaagatcattgatacaggagaatattatatttatcttaacgatcttgcgaactctgtcaaacctatgggctcactggacaataacacatgtgaattggcattaattggtctgtctactgatatcaaggacaattcgaagagaatttttcctgccagaataggagtgagtatataaaatttacaaattaaaatctctttttaatgtactattactatcattgcaacaccttatgtttttttttccacatggtgcagggatatttgttggattcgcagttggacaggaatgagctcaagaaacacttcgatcaaacgagagcgaaccatcttgaccataaagaattagtaagaaaatatatattccagctgtcaatgatatgtaaagttactttttcctgtctgcttgtagaagtaacttaaatgtctttgcaaattaactcagcatgtttgtggaagtaactttttctgttatattgacaggaaattgtattttgaatcactttttattatccttttatacttactaaatcatgattatatttactgaaaaaccttctttccactcccctccctcttttcacttgaatgcaggcattntttcccattctccaagaattgggtaatgggaatgataaggctagtcactatttcgtggtgtgccttaatctgaaagctgaa

SEQ ID NO: 49675 - DNA, 743 bp, Oryza sativa
cgaagagacggtgacaactcggcagaggggaggcagcagctccatgaagggtaggaggggtggcgtcggctcagtgacgaggaggactgccgacgatggcgaatgggaggcggtggctgtggaggggtggcagcaaccacagatatggtaggaggagcggaggcagagggatggtgtcggctcagtgatgaggaggataggcggtgacggtgaaggggcggcggcacggtgacgaggaggaccattggcgcccacgcacatctccgccattagcttgctaataaggtcaaataagtaagggtagaagtggtatttggggcttttgttaactccgattaatgctcttaagagaagaaggtcagagtgtagcttcggttttgaaaagaagggtcaaatgagcaaagtgaccaaaacatggtcaaatcggtagttagatatgcaaatagggtcaaatgtgcaattgctccattttatattatagattatatcattttgtatcattttataaacatacaaagccaaagacacgggtgatttacttaatctatctaaaaaaacatgtctacggtaataagaatcatagatactgaaaagacagaaaaactcaagagcatataccctaataatacctaatagtaaataaaaattatcaatggctaatccctaggacatataaaattataaagtattattttactagtttattaaatgccctaaagaaccctcctacaacgtctattaaa

SEQ ID NO: 49676 - DNA, 1127 bp, Oryza sativa
cgaatggaggaggggagtgcgcgcgccgcgtggctccatttcgccgatcagaggaagaccgaagctgtggtgcctgagctgctcgttgatctgaattacctgcgtcgggcctcggcaggcagggagaggaggaactcctcatcgccatctctcagcagtgagcgagtggaggaacacagcggcctcctcttcagctccttgatgctgcgtctaggagtgttgctttgttgcttgtctgaccaaaccgaatggcattctgaagatactgaatgttcagttataagaatgatagattgttctttacacgggcagcagaagcagaccacttgttctgaaaaatggggttgcatgtgttctgtaatttgtatagaaagcagaaaaactctataaattgtttgcaatgagaatgacttgtccaacagaatgatgaaatggccatttgtaacttatcactgcaatgaaattatgttccaattctgggcatatggcttgttcaagagaaccaacggttttttttttccaaaatgcacaaacatatatgcatgacccaacctttccatctgatttccttttgtttgagtacctttctctaacctcgaaacctttctgaccaccatagctaacccaaaacatccaagcctcatcaacagtattgaattccatgccaacttcaggtaacaaactaggtagcacacccactctacaggaacaaaaaaaatgatttggtggtcatcgaacaagtaaaatctacccgatcatggggaaaaaagtaacaaccatagcttacagacctgttttcttccatctcaaatatgtagattttgctggaggcttctttgatgaattccaacagtctaatggaggaggtggaagacaatcaaataatttgctaaaaaaaaggaagagaagaggccagaacttcacctgtgcttgatcaatggttgaatccgtggttcgctgtcccagcatgttgtcagatgatcgcctggggcatggcctcgtttggcgccaaaaaggcgagcgcgaccgccaaaacgcgtttgttcgcagtaaaaaagataggagcgatggcgcctggaccgaggcttgttgggacagccttggcccagactcacgacgcggctgac

SEQ ID NO: 49677 - DNA, 1012 bp, Oryza sativa
taggccatccccaaccaataaactattagtttccatacttgtcatgtcatatagacactatatgtagacactatgtattcaatggatggtgtatctatctatcttctatctatctatcttctatctatctattatctattatatactaaaagtccattaaacttcctacaaacgctctaaagccgccacgtggcactcctacaaatattcctaagtcgccgcatggcactatctaatcttaccgttgattttcacttaaatttgtggacccgttattttacaccattagattagatctattattaaaaaaataataacttccacatgtttataacatacaaacgctagctgctactgtccgtatgtatgagattgtacgatacaaacgctactgatgttctttccgtaacatacaaacgtacatgattgaaaataaaatgatcaagctttcttaaccttcgctggaagaaaaaaaaaaccatacacttgtacataaaaaagacagaaacaacatacatccataaaaatcaaccgtttttaaaatatgattttctacaatataaagataaaatatattacttcacatgtataaatatatttagttaaattaagatctataataaatatccaatcaatgttctttaaaccatcttctaaatctatctattatatactaaaattacattaaactttgtacaaactcttttactctgctatgtggctctcaaataaattagagaaatcctagaaatctattatatacttaaaagtctattaaacgtactgcaaatgcttctacattgtcacgtggcgctttaataaaattacagaaatcctagaaattcagaataaaaaaagaaaagcatccaaccttcagttttcacttaaattagtggacccattattttaaacaatggattagagctcttaaaaataccatgatgctaatctctatcctggaaaaaacataatgcgcttacgtcatacgatcgtctccctcccggaaaaaaaa

SEQ ID NO: 49678 - DNA, 730 bp, Oryza sativa
ttaccacaattatttatgatattctagcaccttattcatgaatcaattggcattcatttgcaagattaactacagaatttccaaaactgagatcaatgggtcagcgagggaagcggtactaggaaaaatgtcatgctgaataaaggctatcaagttaacgaggacaacagtatgacaccttacttgcttttctactgttatttttcatacatgctatgttcataaacacatagtacataattttgggtaattttattggtgtatatttttcattttccagtaatgtttagtggccttcaattttgtttattaatacttgctctatccggtcaacagccatatatttgagttgtaattctgttagttgcattggccaaccactgctacctggggagatactccatcatgtaatatttagttataattaccactgtatatactccatcaattatatggtaataagtagttttttcttttttcttctcaaatgttatgcacatattgcatgtttgaaagttatttattatgtccgcagcaacgcgcggggtattatctagtagtcaagaaatattatgtcattccagttatatcagtattatgtgcaatcggtttagcattccataatgaatgattaaatgggacttaacaaactaataagctcaaaatgattctcctatcgatgaccatatgcacctcttcaattaaaaaaaaagaagaaagaccatatatg

SEQ ID NO: 49679 - DNA, 733 bp, Oryza sativa
tcagtgatagaacccttcctactgtaggatggataattttgagcaaattggatacatggttacatgcggcatctatgccttctattattgatttgattttctttgacatatctactcgattgaatgtcaacttgccaacatggtcaccggcaccatctcgtgtagaagaagaagaaaagcatgaaaggcagttaccaacggtacggtgaagaacatggtggccatggagtgcctggccacgtatgctgctgtctaccaccggggtggcctcatgggtgccatgaatttggtcctggatgatgaagtactggagctcatccagcgtgtcctcagcctcgtcagccttcttgctgagaatctccaaaagcccaggcaggccagggttgctcacgtccctcctcatctgagcctcgtggagcagcccttgcgtgaacatgagatcgctcttgatctgctccatgttgaggccaagctcggtgctggccacgtaggccttcaccaagctatcggacagctgcgtcaccaccttgccgacgagccagctcgccgcaccaacggccacctccatcgatgattgatctcagccggccaagccagatggagcttgcctgccaagggcaggggttgcttaggattggctctaagctgcccaggagtggatggctctaaagctgggatgagtttctctacaagagaaactatataatgacttggctctaggcttttcctattt

SEQ ID NO: 49680 - DNA, 1643 bp, Oryza sativa
aagttatgaattattttttgatataaagtttttagaccgtcctgtgtagggaccggggtgactcaactgaacaagttggaggatctaaatgactgatctgcaagtttagggaccgggatgacacagttgaataagtttaagaacctaatcgatcgatttgcgagtttagggaccggaatgacacagcggtacaagtttagatggactttactcttttttttattacccccagatccgtctatgtgaggaaccaccggcactgtcgtcttctgaccgcgccgtggattcctcaccctcctgaagctcgagacgacgttgttgttccctccacagcaaggtcaaggtcatgcatgcgcactatataaatttgtacgtactatatgattgacgtgctcgcttatcgcctgtataccatgtggaactatgttttcttatatacaatagttcaattttcataatgcaaaaacgtgcagtcaaaaggagatttcacataggtaatatgaaattgtttgttatagtgttagtaaatagcaaatcattttatcactgtatcaacaaatactaaataatttggagatgaaacattttaaatataccacatttactaaagttaatataactacaacataaatcattttcccaagcggccggaacatattttcgcagaagggcaaaacaacttcaggtgcataggtgtatatgaaaatcattattttcctatgcaggtagtgcaactgcttgcaaaaattgtatttttgcacgtgggtgcgttaagcctcccgtcgaaaaaaagttggcaaaaaattaaaaatttcaaaaaccaaaaatccaaaaaccctagatccattcatagggaaaaaaatatcgccaacacagtctgcgccatcaatgtcgtgccgaagctgcctctgtcatcacgtcaggatccgcagacgttgtcgctcgaatccattgtgtcgtcatcgctcgaagccaccgccgccgctgtcatcgtcgcagctcaaagtcagcggctgtagcggatccgtaggtgagtacggtggagtggcggcaggatccacaagggaggggcacaaatctctagatctgctcctcccgtcaccaccactggcagatccatgtgcatgggggttataggcgacaggattcacataggagagggagagggtacgagatccgcccatcccgtggccgccactgacggatccaagtgcaaggacgtaaaggtggtgggatccacatggtttgaggcggtcgctgctcccactattgtcgtcgctagcccgagtgagaagggctgatgggagtgggatggagagagagtaggggaggaggggataagtgggaggagaggagagggtggaggaaaaggagtgaggagacaagaagaaaaaaaggattgaagacgaaatggaaatggaaatgattacggcgattaccttttttatattatggtaataccgcatttctcatactatttctttatttgattaagagtttataggcccatcgacttctcaattagacatcttacttgagtacaaggttaaaaggagacattttataatttacatagtgtaacttgaatttccttatgtaaagttaaccgtgcgattttatcgttcaatgtttcttatatgttt

SEQ ID NO: 49681 - DNA, 5586 bp, Oryza sativa
cacttgattcccctatagagcctcgcagagcaaataggcatggtacacaatgctattccaggattcccagcattacccctgagtcctgatacacgggttataaataaaaatatgcagctcatcaacgcagcccatccccaacctaaccccatagcctcgcaggtcgcagttgcctctccttccaaaaactttaacttctcgcaagtcgcagcagtagggatcgacgcagacgggaggccggcgagtgcttcaacaccaccggatctgaaggagcagcagggactcagtgactttatagtgggaatcttggaacagcttcgacggtatggattgtgggtgtaggtgtgcacgggtgcagatttgcttttctatatatataggagttggataatatgaaccaaggtacatatgcacctacatggatagtttgactcgtgtacataattcccttcatggtggctgcaaggtttggtacatgttacaatttttgtggtcaaaaatacccttcaagtagtactagagtagtttgaacaaatattttttttacttcatgaacagattagttgttactagttcaatatttgtgggtttccttttttttaagtactgttatacatttatttaatatgttgataaaaatatatattatatttctcaaaaatatatgatgtagatttagtacaacatattatgagatgatatatgtaaattgatattttattcaagaataataaatttccatccccccccccaacggttgtactaactttctatgggtggattttgtgttctctttgttttgcatttgcactttttttttctcatgattgtctagtcaatttatttggtatcagtctttcaaatgtcatgcaagttatgagtttagataaaaattattatctaaatgctatttagagatgtgtcatttgcatgttccattttaagagaaatgtcattagtatgaactttgggagaccatttgcacatttatttagatatataaatcattttctacatgctatttagagatatgtcattaagaaatcatctgcaaattttatatttcatagaaagaaagatatatgatatatcattacaaacatgttcaacaaatctaaatatatatcactcaactataaagtgaagagagataaaaaaaataccaatgtttatctgtaccagtacaagatagaaatttgctttgaatcaatgaatgcttgtgctgtgacatactaatagaaaagggcaattagggaagaactcaaaatgtgacagtgccattgtgtctctcccctatatagtaaaccatcatcttgtcatggcatggtacgtttcactagcacaaatctcaagacccttcaatgttgtagattgttggtgcatacgaaagttaattcacataccagccatatgaagatgtgaagatcgagtgggattaatttgcacagtgaatttgttagcttgtaatgaagtaggagtactcacaacatagttacagatggataattatatattggagttataagtatagaccattgccatgaggttatactacaggacatgcaatctttgcgacggtgaaatcatcgttggttatcctagaaaactgttgggaatgctatggccgatagtttacagtcggggatttgtcaactcgcttatggtgattctatataccgttggccattacatttccaacggaatattgccgaccgtaagcccgtcgggctttcatggatttccactatgtcctctataacagataccatgattccctacaggataatttggattaccgatagattgtaaactattggcaatatttgttagagaaatagtgaataatcgatgacattattagcggtttacatagtataaacccaatattagccacaattatacattgagaagcatttttcggcaatttcccaccacttcatcagtatgataaaattgagcaaatatttggcttgatgcaatagttttcttaatgaaattgaagctaatagttagaatgcatgttaagaatatggcttcatctaagcacaacatccccatgatcatcaccatagtaagtgtgtaataaactatgaacatcttcgagttacctcttgcaatagatctattgcgctctatcctgctgactcgttggttctgaaaggaaattaattatagttagctaaaccatgataggaaataaataaataaataatcagctaagccaccaccctcaggttcaaatccttttgtccataaatttacacacccacaaggttaagaattcgcagctattaattttctctttaagcaagttaagtgacacattcacgggtgtatgtgaatgtgtctcccttgtaatcatgtaaaataaacagacactctgattgcataatatatgagaattttcattcatttgttatgctgattttctttttctgtatctctttttctttcaatcagttaggctcatctccacaatcctgcaagaggagtcagggacgccgaagccgaaggccaaacaaattaatcgaggatgcaagcctgaaaataaacatgcacaactgttgtcagtgtctctacgacagtagatgtgttttcagttacacatatatgggcaaataaactatagttgagatgatggctcatgggagaaacctccatgggttccaatcgccgccgattgagacgaagagcgaccgggctggggcgtggtcgactggagtccgattcgctgccaatcgggatgaactgcgaaccggagcagcccgtcattggcgaattaagtcaatctgatcatgtgccctgttcctcttctgttggcgtccgcatctgttctcttcataacgaaggtagcgagatcgtttccatttgttctgttcttaggaagatatgatcgagaggccatctgaagaaaaaagagattggactgctcgttgagaaaaaaaaacacgtacggtctggttgttgagaaaaaaagcgtaataggggctttataataagcccatgaggttaaattttttatagacagtaatgatagtacgatctaaataatcaatggctaaatctttttaattaatgtgcttgtagaaagtgtccaatttttaaaaattgcccgattattataggtatagatatagatataaatagatatcccgatactttccattcaaattttaatttcttttatttcctttaggcataaagactgaatgtccagatatcccgatactttccattcaaattttaatttcttttatttcctttaggcataaagactgaatgtccggtactttgattgtgtttaagcagaaatataggacaaacgaataaaacgatgagaagaatagcatctaccctatagttcagcaagttgttttactcattactcatttgtcatgtcacacaaccaatgatcatccaacgtcccagatcagcgcgcgtgtcccacgcctccctccgcatcctctcccgcacctccctctgaccctctctgccgcaatcgccgcgcctcctccgcatccgcgtgaccgcgcgcctctcacgagtagagcacctcccgatccgatccagagttccagacggatcacctcccctcccctcggcaaatcacagcgccctccaccccggatccctcgcctccgcgtcgccggtctgccttcgcgccgcccccggtcagcgcctgcgaggaggaacgcctcgccggtcgcctctccagtctcccaccctcctcccagtcgcgcagctcgcgctcgacctccgacgattgcctgtcgccgccgcctcagctggcatcgccgctgtctcctcagcctccgcctcaaccggcatcgcctcgcatcgccgtcgccttgccctcaccgtcgcgccgcattgccgatttcttcccgcctgtttgcatcacctccacggtgagtccgtcgccgaccccacggccgcgttcgccggggtcaccggttccacgcctcaaagcccggtcgcaaaaccttccctgcatcgacgcctcaatggctggcccacgcgtcgtcgaagccaggggagtcgggcgcctgaacggtcgcagatcatctccaactgcctctccgattgatgaagccgcaccctctgattggtgagttcaaccatcggcagcaccatcagccgcccgcgctctctgattggacgaggtcagcatcattggcagcaatatcaccttaaactttgcttgcattatgtgatttcagcatttcccttctcttcagaactaagattattacttcatgttgagttttcatatgaagtattctttatattgcaggttcaaaggcacagagaatccaccattacaagaacattacaagggggtttgtttttcagcacaaaaggtagaagcttgtgacataataagatatatgtggaacaattgtatagtgtataggcaccaagtacagggcttgcgatgctttaatttgattccgttgttatagatcagaagcagcctgctatagattaaaagcagtcctactgtccacaaggatcactagaagataatatgccctttgaatgctaaaacggtcacagtgtgacaacatgctttgaatgatggctttcaaggctaaacatttctttttcagattttcagggcaatggtggtcactggattgaagacaatggaattgtattctgatctgtgaatgcaactgaggtaccacacttcttatgcagcaaaagtatggtgtgattcgtgaaccttccatgaacggctgaactcgcaggtctaaacttcatttgtcctgaacctgaagttctgaacttctacttaagtcaagtagtactgaacttcttaatgaccgcttgttttttaagaaaaaaaacttggtttaatctgtaaactaaccgtacttgtatggttattttgatgattgcagggaggtcaggatcttcaatctctctggtttcaggttagcagagcatatgttttgagttttattaaatatcgatcttcttgtgatatatatatgtactctgtatgcctaattttttcaggaatattatggattcagtttggcaatctgttcttcacatctggtacatcggcaggtactccttaatttcatttcattgagcttttgtacaatggttctcagaattttttttggttatattccttaatggcttcactcaaatgcttcttgcaggggaagaagagttatatgcagcccatttaatttctatgatttttgtagacagcatcagatagtactgtttgttgtttgccatggaggtgcgacagcagggcaggtacgatcacatgtatactccattccaaacttataacttcactaggccatgcaaacttggataaaataagttaagtattggatcgatggaagttgcttctatctatactataaaaaaacccttgcagctgattcggtgtggattgttgtgccccttgaaggtacacttggcagccaccgtgtattgatccgatccatgtgtgaccctcttgatcccaggcactaaaaatttatagcggtgacttttttcggtggattaatttgttaaatcaaataccacatttattaaggtaaggtcaggaaggctgtg

SEQ ID NO: 49682 - DNA, 614 bp, Oryza sativa
tgggactcagggtcgggttgcagttcggtctgaatcatcgtaggccttgggttaaggcaggttcgtgtgggttcacggccttgattaataatattgtatagctctagaatcgtgtttgcaaaatagctttgagcaactaagtgtcttttaatgctgtttactgcaaaccctaatcctttatattataactcccttgtactcccttacatttatcctgcacttgtgggtgtgtcttgttgagtacggtggttgtactcagtcttgctcaattttttcccaaacccagaagaggagcccctggaagatgaaggctttggtgtatagctcgtgcctaccgtcaagcgcctgtggtcgtcgccctagtcttccactgtttcccgtttgtctttgtgtgtgctgggccttcgccgcccatgtaataaattaactatttacgcttccgcttgttaaactctgaactgtatcaacttttggtgtaccttgcctcctggaacaaggaataatgcacgcacgtaaggaacgcccgttgggttatttccggtcgtgacaaccttaacgcgcgcgtgtggctttccgattcctacctcatccggtcaacagggagcctccaataa

SEQ ID NO: 49683 - DNA, 4136 bp, Oryza sativa
  unsure (1)..(4136): unsure at all n locations
tttcttgttcagttttttggcctgatgaaagctgtaatcttatatcccaaactgttcatgatgaggctttagccgagtaagttatttcagttttcccccgcaaaaaaaaaaacacaaaaaaattaaatcaattcgtgttacatcccaaatacatgaattgaaaaatggcaaacgaaggaaaaaaacaatcgaacaaaaatctagccaccggacctcaccggaaacacgagtggtacgagtttgccaccgtggagctcgaagccaccgtcgtcgccttcgagctactgccactgcctcccaaggccagatctggtgaggaggaggcacggagtggccgccggtggtggcttggttgagttgtcactgccgcccgccaccgtctcccaaggttagatccggtgagcctcaagcctgatttggcgaggagcgggtagcgttggcaccccgacgaggaggaaaggggctaattgtggggagagggagagcgccggtgaggggatggcgagggggagcagtgccgcccgtgaggaaaggggagggagggggagaggcgccgccagtggagagagatggcccacggcataaagagagcggtgacgccaataggaggggacagggaagggaagcaccaaagggggagatgcggcccgtcatgagggtaggggaggggaaaaagtgaatctaggttatggttttttgcgcatcggcggttttgatggattcgggaccgattcaagccgtccatcaaaatgaacgactcgattgatcccgtgtcaggccgatctccatccccgggccgtagtgggctgtgcgcgtgaatgccctagcaagccgatggggtccaacggggtctttttctaaaaaactttttatttcttcaggaatatattttcttaaagcgctcgtatcataaataaactataccctaatatctaatatttttatatatttattataattttagttttcacgttgcaacacacgggtattttttctagtagattaaaaaatctagccctcgattttcatttaaataggtgggtccttttttcaaactgttagattagattgattgaagaatttagtgcctttgtgtcctctctctctctctcacgtacgtacgtacgtctcccactccacacgtatgaacgtagcactcaccaattttcctttccatttacccctttattttttttatttgagatacccctatctatatctatatatacctaattaaaaaataggtaaagcttcagaaacggaaaaaaaaagagagaaagctagcaagcagcccaaccaaagcagcagcaggccggcccaacaaaaagcaaacgcagcctagcagtcagcccacatagcaaagcagcagcccagtacagtactgtgcgatactgtagcaaccaggaaaaagttcactttagatcccttaatttatcatcgaatatgaaatccatccctaaatcaaaataccatgtatacctcatcctttaacttacaataccgtcaatttcaattcctcggtagtatcgtagctagttttaactgacgtggcaagtgagccccacatgggtcatatgtcagtgcacaaataataccaccttttgcctagcttgggcagcactagcttaaatagaaggcttgcccgaggctactacaccaaaaaaggttggatccacgtctaccaggaatcagataaaaataaggagcaattttattaatttaaaaaataaaaaatcacatgtattttttttaaaaaaaacatgtgatcaccaacaaaatgaattatttactacaaaataaattatttttagaaaatagaaaacaatcacatgtcttttttttaaaaaaaaatgtaatcaccaacaaaatgaatcgtgtttacatccaattttttttctattcattgtatgatttccgtcaaattttttgagtgaaaactattatgcgattggagtgcagtgaggttgatctgatagatagcgagaaacatttcttatactattgctactctttacaatatgtcaaaaaaagatggttatcaatatcaagtaccaaaaaataaccatgcattgcaaccaactcataataatacatcacaaaagtcaatactttttgggttacaaactttagtctataatacataattttattttaaagtggtattaatagttttcctataatcatccatgtcaatggatttagatcaacaaataattatgtcatgttagcgtcttacttgcaccggaaagattcgatttgctcctacacacccattactattgttcttttatgcttcacccaatgcaacgcatgggcattttgctagtataatatatgtatattacctttatttttatgttattgaattttgaatatattttttatcatttgtctgactaaacatacgtagttataacttattttgttgtgattttacattgatgacttaggttggttatgttttagtgcaaaatacattgcaatggatgacgttgacatgtaataaataattccatantatcttattaaaaataattcgcatcatatttatggtttcaaatattacttaggaaatataaaacactaattttaatctacgtatgtaaaaatgcaaacaatataattagtcgggtgatttctaaagtagatatggcataaattttaatttgggtgagattaagattcacaaatagattcctacgaatgcttctaggccgccacgtgtcccactaataaattagaaaaaatcataaaaattttaggaaaaaatacaaacatctatctaaatattttcattttaaaatcggtaggtgtaacaccctgaaaattttggttttaaatttgcaaaattaaaattcaggttaatcaaaaaagtcttttccaaaatccgtcgtgctggattttattggatttcacttcccattttctattgcgcttagaccacgaggatgaaaatctagggacaaaatttattttagattcaaatattatttgttaaaagaaccatgattatggaaaatattaattaagaaaatatttgtaaataccatttgtctttctaaaaacccttttctatgaattagaacctatttgtggtatttgttttataaagaaaaactagagtaaatttactagcaaaacgctatttatgaactaaaatcttaaaagagtttatctcaaaaattcacggaaaagtctagttttcctccttggaaggcctagcccatcccacataatgggattggtgttaattgtgtgcatttatgcgtgcccaagatcttggttaatccatccatacttgtgaatctcgactcttgtcgtatttcctccggattcaaattccgttgttcgatcctccccaatcgaacccctcccaaaccgattgttccagtgtctggaattactcgaacccagtagttcttctagaatcgcctatgagggtaaaatcccttctaggttctctcaaccctcctatacaattgctatacccccgtcctttccttgaaccgttgggataccatagttaaatcgatccacctaacatatgtcttgatccacctaaaggatgtcctcccatggacatccttcctcgtcccctctcctttctgacagttttgtcaagcgctttgatgctaagcaaatcgaagtccccaaaacccctttattttgttgcaatatcgtttctttcctcaaactcgttgaacactaaggatgaatccaaacccgcttcgtcttttcgactcggcctccctcggattcccttctcccctttttccctctactcaaaactctcgagtttggcctttagcttgaaaccttaaaaccgtttgacatatttatctgtcgtacataaattcaaatatccaccgttctctatttctacctttgaacctcaccccgttgaatggtgttgtattcaacagtgttgtatgccatacactgctcctaaacctatcgtctatagcacccctacctctgaaaccctaccgcaaccaatggattcgtatgccaagcgtcgtttcgagaaatcgtcgatatggtcgtcttttcgtccaagcggtcgcaaagaaatcttgagtcgaattcttaggtggctaaggtagtgtttggttgctgggatgggatgggatgggatg

SEQ ID NO: 49684 - DNA, 1143 bp, Oryza sativa
attctcccgtcagttataaagcggtaattttaataaagagaatgcaatagtttaaaacaatataattttcgcaataatcgggttcaaaatgttcgagaagagcatgacttgtcttgctcaaagaaaaggtattcctaagcttcactgacaaactcaaattgcacaacgagaacctccgaagcaacaacaactacacgaacaacaaaataaggctaaaactcttaacaacgaaacgataacagcacataaaaacaacatatgatggttcttttaagttataacatcaacttgtagctcatagaaccgatatatgactattcgaaatttaactgcatttcaaatagagattttttaattgtttaatgcaacatcgctcgagaagagaaatgatcgagcgactggcagctgagaccccacaggacaaacggctatttcaccgtggaccgggttcaccgagacagtctaccggaaaagtaaagcgagacccacttgtaagtcttggagaagagaccgacaagtggatcccataggacaccacgcaagcagccacatacgcgaacagacagctacccgtgggagggataagacaatcgtcactggcggcaacacagggaggacgagcagaggacagcgaggggagggttctcaccacggacacaacaaggcgagggaacagcggcccttgcaaccaatcagtggtggatccagaaaatcagtttgttggtgtcataacgtgtctatcggtgtcatagtatgctaattatacttagaacatagtgttatagtatatggataaacagttttgttatacgttttgccgaaagtcgtcagtgtcgcctaacaccgacgtttatactgtagatccgcccctgcaaccgatgacgagtttggcacaacagcgggattgagatccagaggaacttgatccacaacagcgacgaacggaggagggcaacggagacaaatatgtcgacgacgaggggacggctccggcgatcttcaagcttggcgaagaggtggatgaggaagggctcgacgctgcgaacttgtcgacgatgatagggttgaccttcgggtcgacggtggggatggagcttctgagtcttcacttgacgaggcggcatgcatggccgaggaagaaga

SEQ ID NO: 49685 - DNA, 1011 bp, Oryza sativa
aggccctcgcgtgtacacaccgtgtacaccaactaaaaattatcacaaaaaattctaggaaaattcatacatgtactttcaatagtattacatctacgtgcaaagtcgcatcttcaaattcattctacatagagaataacaaaaaagataaaattctgacaaaattacaaccttaaaactgtcagattttttgttttttttgttacggctaaaatataatgaatttgacgttaagattttaaccctaggtataatacaattgaaagtatgggtatgattttttctatattttttggtgatattttttagttggtgtacatgtgtgtacacgtgagggcctgtgtgcataggatatgttgccaagttactcatagtcatatctaagctagtggtgtccttatcgatagtacagttggaaagatcgagatcttatcatgtttataaagatgaagataaaatcaatgcatacaaaatgagaaagccattagtgcatgattaatgaagtttcaagtattacaagattgaaaagtaaatttatttgttattttaaggtaacttatatataaaaagttctataagaaacataccgtttagtagtttgaaaaattatgcaaacgaaaaccgaggtaaaatccacatcttaaaaaactttatataagatttgtagtacattgtatgaattaaagtctataacattgattttgataaatttgatcgattttttttaaaaaaataagtagaggtaaaatccacatcttaaaaatctttatataagatttgtaatacattgtatgaattaaagtctataacattgattttgataaatttgatcgatttttttaaaaaaaaataagtagaggtaaaatccacatcttaaaaatctttatataagatttgtaatacattgtatgaattaaagtctataacattgattttgataaatttgattgagtttttttaaaaaattaagtagacttatttacattattttaaatccaccttaatttaaaa

SEQ ID NO: 49686 - DNA, 6484 bp, Oryza sativa
attttgtgatgtgatgtattatgatctgtgatgcatttcttttcaatatgtgatgtatttctttccagatctatgatgcactttgatttggggatgatttgggaatatgatcggggatatttagggagcaaatcgattttaaaaaaaaattaaccgggattgctcctaccatctttagtcccggttggtaacaccaaccggggctaaagatggatttttagtcctggttatttcacccgggactaaagatacccatctttagtcccggattcgtagtctcggttgtataaccgggactacaggggtccccaaccggaagtaaagcctctttctccaccagtggatccctactcaaccaccttccttcctaacttctccaccaacgttgggtggctgggaggagatggagttgagggaggagggaggggggagggggtgcgcgaggggtggcgctgccatcatggtccatgtaccctaagatcggcgaccgacatggccacatgaggttggaggggctggatccggaagttgcagatccttgacctccagtgcgtcggacgaggagcggcttgccttggcctcctctccgccgttgtggtgttgccttgatttatttattttaaagcggagtaagtatcaatatagtggtgccaattatatgaattataaaatgtgtactagctcgatactaaaataagttaatctagtattgaatgcttcacatcttagtattatgaatctgttcaaatttatagtattaggatgtgttatatccgatactaaattaacttattatggaacggaggaggtataaggtacttaacaaatattcagtagctagtgacatactcatgctactactatacacatattataggatgaggatattgtggcgatgtgtcatgcaattgacatagccaagccaagagggctgtgtggccagcgtgtcagcaacaacaacatcgctttttggctgagtaaaggccgtgtgttttcgcacaacttgcagctgttccctgttcccatcccacaaactcgtagggcctctgcccactcattgatcagtcagcgagtcagataacgacatgtcaaccctgtaattaattaccctaccctgccggccgtgatcaagtagatggatcaccggtttctcggttagtagtgtaccccgtactctccctatctcgtaaaaaacgaatcttagtactatgacgtgttgtatctgatactagtttgattttttatgggacggagagagtaactcgttttaatggattacgtaccctgcccgggtcatgtcaacaacatgctcaagaatacggtaaaaggacaatacagtataggcaagtcgatttcgcagcagtacatgcgagttaggagtatgattaacaatgacgcacacacaaagcaatgagtagtcaacgcatatcaaaattcgcgtgaagctgtagtatacgtactcccgagtgaaaaaactgaaaatggacagtgagtgcaaaatactactactacgtatcctaggaaccaactaatcatacacgaatatcacacgcaaacaaccaaatccagttgcattaaactgccaatctgaagtggggtaacaccagagatcgtcgactagtcgtaagctgaaaccgccagaacgaatacaggtaggtaaccaatcggttgtcccatcaatcaaagtatcaaacagcttcatctatcgccatgggtgcagcgcaacgccatggcccatggggcaatgggtgcagcgcaaagtggccacttgaccagttctcatgtgcctggaaactcgccaattcgtcaatcgccatgggtgccgctggtagaatagaaagagagagaactaggtcatgcacatccatcaggtggggtgcacgtacgtgctgggcacgtacgtgctgggctgcccaaacctgaaactgccaatgtgtttgttaggcctaccgtactagttgggtctatttcgttcttttttcttctcagcgagcggttaggcctatttctgtaggaataagttcactttaggcccctctatatttaatttgtcgccaagtttaaaattcatccatgaaccgcatgtgacatgtcccttagcttctaaaatcagtgcaaataagatataagacggtttaaaacagtggtttcgcttgacgtgttgtcttcattgtgttgacgtgacacttaaaaaccgtgggacccaaatagcactgaatgtttggtttaaaataaaaaaaattacagtgggatccacatgttttggggtctgccacgatgacctggcgacgggctacctgctcaatgagttcaccgacgactgccatgcaaatgtgtggatacatagatgaaaagttttagcgtttcacatcggatatacagacacatatttaaagcaataaacatagactaatattaaaacaaattacagattccgcctgtaaattgcgagacaaatttattaagattaattaatccgtcattagcaaatggttactgtagcatcacatgtcaaatcatagagcaattaggtttaaaagattcgtctcacaatttacacgtaatatatgtaattagttttttttttgtctatatttaatacttcttgcctatgtccaaacattcgatgagacatgatgaaaagtttttacgtagtaactaaacagagccctaccaaacactccacaaggggttcaactgtaatgtggagaagaagacaagatagcaccattgtgagcatagatgccgtgccatattgcgacactcgagccaatcgaggtcacccaaatagtgctatacatctttttttttttggtaaaacacactacaaatgtagttgaccataacacgcgcacgcttatccttatgaatgcatacatgcactctctactattatgagcacctccggaaggtgaccataactcatgcacattcatccctataaacacacacaacacacactttatcactatgggcaactccagaaaattaggccggcatatcttgagaatgatgaagtcaccacgaatgccacactcgcctaccaataaaagaataattataaatgcgtattacatgtcaaatctaagatttgaatctgggtgggttgttttcatcataataaatctagctagttactcacttcttagataattatatacgtctgcatatgtacatgagtaggctggtatatacaacaagagaccactactccgaaagtatcaaaaggactaagagtgaaaattaattctgattagttcccgcaaccccagttaccccacctctaaacttgcaacaccctttctaaaagttacgaacacagaacactctataaggggttcggttgtaacctgaagaagacgagattgcgagcatagatgccgttccgtgttgcggcactcgcgccagtcaaggttactcggatggtgctatgtatctatctagctatacaatggagtagaatggtacacacccatactttgtatcgtcattttcacgttcccgcaaccgaactgatatgatggaggacctcaagcatacgacggcaggttgcagcgttaacgctcaccatcatgcccatgacatgaggccaggatcgactacaccagaatcacatcatgtcattagcagcggagtcttcacgtgctacggtgctaggatgctgctatctactggagtctggagtaggatggtaatatctccgccctaaaataattttacttttagctattaagatttaaattgacaattaaaaaacaatgtgatcaattttaataataagaaaatagtacgagaaggttcgtaaaaagtaccgaatgaataaaacttctcggtactagttaaagggatagaagtgaacttattttaagataactagcacaatatcaatgcgttgtaacggatattataaaagaaaaaaggtaaaatttacaagtttttagcacagtaaatccatttggcatataatgcctacctggtgttaagatttaatgatgcaatacaatcaatgtattgataggcataaacttcgagacaactaaaagagctgatttaatggggtgtcaaacctatgggcccatacgtcaagaagggggtagtgctagcaaattcaatgccactaccattgctctcttttaaaatggtatggacttatactaccatcatcacattctattatgatgttggtttattttggtgtggtgggagtacacgcgaggcgtgctctctaaacgcactagaaattattaaagaaatagaaaaagtagcctccacgttcgctctcatggcctataaattcctacattaatcggagaaaaagaaaaagcagagtccatataaaaatacaatttagaaatagctgaaattcagaattaaaaaaaaaggaatattagattatgagactagagtccatatagaaatacaatttacaaatagttgaaattcggaattaaaaaataagaaatattagaagaggagtatagagtccatatagaaatacaattaggaaataactgaaattcgaaattaaaaataagaaatattagaagtagagtatagagtacatatagaaatacaattagaaaataactaaaattcggtattaaaaataagcaatattagaagtagagtatagagtccatatagaaatacaattaggaaataataaaaatatggaattaaaaataaggaatattagaagtagagtatagagttcatatataaatacaattaagaaaaaaaaatagaaattcggaattaaaaaataaggaatattggaagtagattatagagtccatataggatttttaaaactaattaaaatttgaaataaacataataaaattaaaagtagagtttagagtccgtataaaaatacaatttacaaataactaattaagaaaaacatgggaagaagagtttaaagtcaatataggaatacaatttagaagtaactgaaattcgaaatttaaaattaaagaatattgaaagatgagtttagagtccacgtagaaatacaattagaaataataaaaattcagaaataaaaataaataatataggaagaagagcatagagtctatatagaaatacaatttacataaaattcagaattaaataaaaaagaatattaaaagacgagtctagagtccatataggaatatatataatttacaaataaataaaatttgatattaaaaataattaataactaacacgtatataaaatacaatatgaatactacacattagtagtcttgtaaagttattgcaaaatttaaaattgtgttgtcattttaatatatttgaataatataatgagaaaacatatattctattatttgagaaagaatataatgatgctagccgcgtaatctgcgcggactatcatgctagttatattattaaaggaatagaaaaaggagcatccatgttcgctctcatggcctagaaattctctcattaatcggagaaaaagaaaaagtagagtacatatagaaatacaatttagaaatagctgaaattcgaaattaagaaataagaaatattagaagaggagactagtgtccatatagaaatacaatttagaaacaattgaaattcagaattaaaaaataagaaatattagaagaggagaccagattccatatagaaatataattaggaaataacagaaattcggaattaaaaataaggaatatcagaagtagagtatagagtccatatagaaatataattaagaaaaaaaatagaaattcagaattaaaaaataaggaatatcagaagtagagtatagagtccatgtagaaatttaaaactaactaaaattcacaataaacataataaaattaaaagtagagttttcagtccatataaaaatacaatttacaaataactaaaattcgaaattaaaaaaaacatgggaagaagagtttaaaggctgtgttctttgctccatgttcccaacccctctccctcatattccgcgcgcacgtttttcaaactaaacggtgtgtttttcaaactaaacgaaagttgtttaaaaaaaatcaaattaatccatttttttaaaaaaattgttaatacttaattaatcatgcgctaatggaccgttccattttccgtgcggggagatgggttctaaaccatgacatgcgaacacacccaaagtcaatataggaatacaatttagaagtaactgaaattcgaaattaaaaattaaagaatattgaaagatgagtttagagttcacatagaaatacaattagaaataataaaaattcagaaataaaaataaataatattgaaaaaagagcctagagtatatatagaaatacaatttacagaaaattcggaattaaaaaaagaaatattaaagacgagtctagagtccatataggaatatatataatttacaaataacttaaatttgatataaaaataactaataactaacacgtatataaatacaatatgaatattacac

SEQ ID NO: 49687 - DNA, 3489 bp, Oryza sativa
ccaccgctattgtgcggccggcccatcggcccgagggaaaagggcgcagggggcgagggggtgttacggttagaaccctaaccgttcccctcgcggtgtgcgccgccgccgccaccgattggccgcgcgtcctccacctcttctgccgccgccgccatttcgcggcctcctcctccaccactttggccgccgtttccaccgccgcctttctcatccaccgccgatcccatttccgccgccaccttctccccctgaaacgccgccaccgctgcctccatttccgccgccgcccaccaccgcctgcatccaccgccgtctctaccgcccgccgccgccatccaccgtccgccgccgccgcatcccccatgtcggccggcggtttgccggctagagttaggccgacggccccaactcctcatcggagtcggagaccggtcgagcccttacaccgttccccatcccgccatttgagagcgtgcgggagccatggggaacggcgagccatgtggagcggaggccgggacggcgagcagtggcttcaccggcatgacggcgagacgacgatgggttgaagtaggccggctcccccgtgcgcgctgccatggtttcgttccggccggactccggtgccacgggagtgggggagcggcgttggcgtggcgtcggcgacgtcgtggcgcgggtgatggcggggttggagtagcagcaatggtgatgcggcgccgagggttgtggcggcggccactaaccctaggcccgcgcctggcatggtgatggtggcagtggtggcgactcctcgttgtacgatggaggaggtggtgcagatggcgggctcggtcatggcgaggaataccaagaacggcgtcgatcggccaagaacggcgtcgataagtaactgaaggtagacatctcgtacctttcctgttgattctttcgcttttccttgagatcaaaagcgatgtagtttcttctttcacttcgcgatctccttcgcgagagcgaaagtgctgataacatgttgaaagtgaataagattgattgagcgagagggattgagcgagagagaattgcacacaagaatgtagggaatgaatgagcggtatctttattgatcgatgcggtataatatatagatagggaaggggtggcaaccggagacgcgatggttgggaaccatcacgtccgttgccaaggagcgcctagggaaggcgcggttgccttcggttgcgatccatccttttatatggatgagatcaccctgttgtttcataacatgatcaatggatctgacaggaaccgaaaaggagaggatggtcatctggtcaagcgatgcaacaaaatttataactccgtatttttgttactgttctggtatggttcacagttggcagcgttaccggaagcttttgttggtggctatcctcgtggatccacatttggcttcaggatcagcgtctaaagtttaataaatattagtattaggatcgttacatattaaatttgtgaatatgaaccttaaggttaaccaattttgtggtttttatcttcggtataatttcatgagctattatagccttcgacgaaaattgatgagtattgaccatttgaaaaaaaaacattaaagctgagttcttatctccacttctctaacccacatctctcgttttccgcgcgcacgcttttcaaactgctaaacagtgtattttttacaaaaaaaatttatatatgaaagttactttaaaaaattatattaatccattttccaaatttattttagctaatacattgaacacagcctaatagtgttctcctgcccaacattttgtgagtactagtattgggatcattgcacaagaaattcatgaatattaacattaggaaaacagaattcataacttttataaaaaacatgaatatttttctcatgcacaaaatttggtgagcattaaaattggaatcgccatgcacaaaattcatgaatattaacgttatggaaaaaaactcatgatttttattctttagcctgtaatttcgtgagttatagcctttggccaaaatttataagtaataaactttggaaaaaaaacatgtgtggttatttatttctcacccaaaattttacgactatttgccttgggcccatacgaaacaaaattcatgaataataaccttagggcaaagaaatacatgatttttagccccctgcgtattatttcatgagttatagctcatgaattataaaaatcatcgatcatatttttaatgctcgtgaaaattttaatattaaccttttaaaaaacacggaattattttaggcctatggaaaataatattaacgctacaacatcaaattttatgatttttttatccttcaccttataatttcatgagttatatccctcaagcaaaatttattagtataaacctttgaaaaaaaatacatgaatatttatttatgacccaaaatttcttgatatttatctcaggcccatttcttgaatattaaccttattataaaaaaaattccatgaattttagtcggcctataatttcgtgaattatagaatttagcaaaaattgacgagtattaaccttttgggaaaaaagaaacgcatgaatattgctctctgttccaaaatttcacaagtattatcattagggtcgtcgcactaaggagtaaaattttcatgatttctagcctttgcactataactttgtgagttatagccttctactcaaattaaagagtattaaccttttggggaaaccatacgcatatttatctccagcgcaaaatttcatgagtatttgccttgggtcagttcaaaaaagtttcattaatatgaacgtcatgacaaaaaaatcaagatttttatccatcggcatatagttttatgagttatagccttgggagaatatatggcacggatatttattcccggccaaaaatttcttgagtatttgccttgggcccaatcgaaacaaaaaaattcatgaatactaacatttatcccgaactgacccaaggcaaatactcatgaaattttgggctggagataaataccggaggttatagcctccagtatataatttcggtagttatagcctttagctaagactgatgggtattatccttgggggggaggggggatgaatcaattttttttccaaccaaaattttcatggtattagcattgtagtcactgcacacaaaattcgtgaacattaaccttttgagcaaaaggtttgtgatttttagcggtcatccaataattttgtgagttatagccgaaatagtttcgaagaaaaatatgtgagtattattaaccttttggaaaataaatgcatgaatatttttttctcaatccaaaattttatcagtacaactattgggatcgttcgacacaaaattcatgaatattattgttaggaccaaacatttcatgattttcatcgttcgatctataatttcatgacttatagccttcg

SEQ ID NO: 49688 - DNA, 695 bp, Oryza sativa
catcctcaaatacaaagcacttccctagttagatgtaggttagacttcccgttcgagaaactctaccttctacctgccctcaatttatgcacgattaatgaatgccacctgggtggaagcgagaggtggaaatggaaggtcttagttcgaggtgggatctctacctgatagttgcattgccattcatgatgatcccctggcattcgtccattcagccattcaccattcacccattcaactggaattttggttgaatgccggaattgtgtccacaaattgtggatggatagttggttggctggctggatggctggctggatggctggctggatggatggtgaatggctggcggcggttcggttgctttgaagcatttgttgctatctaaattccatttaaggtcgtaccttatcgcccagcatcatcttattctctatttgtattccctccatctttcacatactgatgtaaccttggatgtgcccgtgcccaatgaagaggaacaccgcaacattaaacgtaagtacaaaagtaccggacacccacccagatcccaataaaatccggcaaaatctgccggaaatttgtaatcccattcaccagctcctacatttaattaacaagagaactattgtatttatgtaacacctgaattatctccacctttcatttgatccctatttatagattacgct

SEQ ID NO: 49689 - DNA, 635 bp, Oryza sativa
attccaaaatggtgtatctttcgatggacacatatgtaggctgaaggaatgcaaggttggcagcatgtattggcatgtcattagctttgtattataaagctgatgcatctcattaatgcctggattatactgattagagtatggcatgaggtatgcagtatggggggctcgagacagggaggtcaagctcaggtagggcttcttttatcagaccccagccttgtctctttgctggtcacggagctggccatctctctggattatgtgtatttatgtatggacatgtcaactaaaatagtcgtcagcagccaacagcgttactgttgattgtccgtttggtcatcactaatccatttcctggctgcttcccttgtgctttagaatagagtattaagcgagaaactaaactaaactaagaaatcgaacgaattgtttggtgttgattgacgccagtgttgattgattcgcaacggcctcgcgcatgtaagtaggacgaggggggtttactcgaacggtagtcgcatagtacatggagagttgttcggtgtgagacgagcacgtacgcacgctgtcatgggtggatgggagcacgcacggttgccgttgcagttgcaggcgtgtgatgagctactgta

SEQ ID NO: 49690 - DNA, 3841 bp, Oryza sativa
agatgagacgcataagggagccgcctatgccgcggtcctgtatgatagccttgatgacgtgcgacctgacgatgtcctcgacgccgctgcatttgttgtcgtagtagcccactttcagctcgccgtcgccggcctccgccgacgacggggcggcggcgagaagcgcggtcgccatggcacagacaattgctaccgtgagcttcatgcttcacaaacctatctaggagaccaaaagcaacacaaagctcagcgaaagctaatttgctttgttagacagctataactgagttagcgatgcttgagcggcgaggctacatgatgcctaagctcaaggcaagggtatatataaatataaaattgccgggttcggccgaaaaatttcagggccatatgctaattaactgtactgagagtaatattacagatatatttacggcgttgacagtcatatgaaagattggattaatggtacacactttccatatacttcttttgtttcaaaatattttgagtattcaaaaatttatgccacaatataagtatttatgggacactcagtccagtgcacaaaaatcgttctgtacattttcatccgatgcttgaaagggatatataaacaatttaaaatttaaccactaaaagatatttttttcactctgccttagttttgttaataatcatataaatacttatattttaaatcatcttacaaaactattttaaattcttttttcaacttagtgtaccctccaatagcgaacacaaaattattcagctagtactcagaaaaaggacactgaaagtaccaaaatagcaaatctaatgtacagacgatatatacatactccctccgttctaaaacgtcaacggtggaaaagaaagaaatagtatacgacaatagtacagtggcacttgatgtaggggctgttccttagagattgtactgtagcgaaagtagtgctttgaacaaaaattgcatgaatactgatattgatttttttttgaaagaaatataccggttgaaatttgtttggaagaaatattccatcggtatcgcggggtaggagtgcaataccggtataccgaggttagcacgcggctacgcgaaactgccacggtatcgcttattgttgacggtcattaagtgtaaactttaccgtcaactcctgtataaagaatataaaatattatatcaaaacttgatggtaggagtttattgctaaccattttcactagttttgataaatatatttatgcaggtcatttatgaataaaaatacatatgtcatgccataaaatgaacctccggtcaatcatacgtgagtaaaaagattggagggctcacatgacagttgaaaccgatctaaagtagggccaaaccaacctcagtcaccatagaggcctacctgtcattcactggatgaagtcgatggctagaggcggtgggagccgaaccagacttaccgtcccccagctttccctttgcacatggcagcgccctattagatggtgatcacggttacagatgaaccgactgaaaaccaccttacaaccatcatatctaaacatttttttaaaaaaattcatactcatttaaattgaatatatgtactcaatttaaatcttggtgcctggacaccatagtgccccagttaattttacaatatatataaaggaatgtgggagtagttgaaataaaaagatgcaacatcatcatcctctaacaatatgctacatcatcattcaataataattattacatttaaacattatgaagcatgctatattatttgtaattttatgatttattgaattttagagtttttaaaatgtaagcatgttaaatcatcatcccacataattcaaatattatttcaatttatctcttcatccttttttataatattctatatatagttcattctcacttagttaatgttatttctctcttctctcattaagccatatcacatcaattatttttagtcttagataatctatggtccaaaatatctctctccttttcttctctcataaagccatatcacctttacttttacatttaaatcatcattctatacactatttaaatttaatttatcatttaaatcatcattctatacactatttaattttaatttatcataaatcacatgcatcaatttatgtaagcttgtattgtctagctagctatcttacacattgttttcacttgttattatgctaactcagtagcaacacgcggagttttacatagtatatataaatgccagccgcccagccggtacactctaggagaaaatgcatgcgtactaacgtcattttcagttcggtgcaaatctacatcatcaaggtacgtatgtacaacacctaaattcttatatatactggttgtggcaaactgcaagctaattaattaactatatggccgtccaaatttgattcttagcgccttcttttttattcgtgggagattcttagagcctttgcttcttataaaatgaaaccttgaatatacaatataggacatgtacttttttaaattaggatgtacgtacatatacaattaattaacatttgatacattttctcttcgagtgaaagtctgaagtactcaaatgctcacgtgtttttccatggcacatatactatttcgtacgaaaaggcataacatgctcgacgaaatattattagatatgtatgtatttgttatttttatacaataatgtattttctacgagacactttcatggtagttttctaaaatgaccataattttaatattttaacatttttcagctcaactactagatagatacaattacagagatgacgttttaaattacctcatgccaagttggatgttcagcctggttttatcttttactaaattgcagaaaatctccaaacattttggaggtgattgatagaatttttctaaaaaatatcgggcaaagaattgaaatttggatagtgttttggtaaacttaaacattttatgaattaaaaacgatccaaattgcaaaaataaagaaaatgtttacggggtccatggaaaactaaaatacttaaatagttaagaatatattttgatttttttcagatttcaatttttttttctaattaaagatgtccttttaggaagtaaggcgctgaaattccaaaattttcaatttgcgaaagggcgtaaaagcacctttttaaattttatctgcccaaatgagtaaaatgttgaaataatgatcatgaaatgttttggcaaattaccaagtaatcgaagtgtcctggcaaagacacgttctatagtgctataccgcaggtatagttaaatatgttacatatatgagacttctactacaaattttggcatgaaacatatttggattagttttctaatatataaaacttgactatcagggttaattttctaatatgtctctaaatcttcttctactaagactcttagaatttttctttatatatctcttgtaaacctcacaagaagtatcgcaccacccaatgtattctatacgtttgtacccaactcctctatattaatcattgccgatctatgcatgtaggcttttctggtaagagtttttcacataaaagtcatatattagtcgtgcatctatttttataataaatggtattagaactttagagatggatatactaagggtctatttggcacaatttcagctccacctctactagagttagagcctaactaaacagtttcatctccacctaaaataaaaacgaaactgagtaaaataatttcacaaaataaactagaaagaaagatagagttggatttaaattgctctacggctttatc

SEQ ID NO: 49691 - DNA, 636 bp, Oryza sativa
tattaatgtttaatcaactctataaaaaatatatttgcctttgacttataatgtttctttttccatcaatctgtaagactgtagctagatatcatttgagtttgatatatatatttgtgtatgcatcacttcactaagatcttacgtactactagctaaatgcttaatgcttgtacgtttcaacgagaataaaaaaacctaccatacactttaaagcctcatgatcgccgatgccaaattttgaatttaaaactaaattttgaagttgattttgagattttcttatcacagtttatttttcagcattgtctttgaaatatataaaaggttttacccacaatttctttttgcttataacttgtacgggggtatatagatgatccaattttaatttattcataaacacatttaagatgccactgcaaattaaagccagcctaattatatcttgtttcttttctttttcctctaagtttgtaagttgcaactatcattaaatggtaccgtgtgcacatcacacgcacagttctcgtacttaacttataaccaactccggcatgcttgtaaatcgttgcttaggtaggggccttacgcacctaataacagtatatttcatgatgcacacatatgtgacgc

SEQ ID NO: 49692 - DNA, 3840 bp, Oryza sativa
ctcgggttccatcaatggcgccggcgggattaggggagggtttccaaacgaatccaagggagagagggagggaaaaatggggggaaagggagaggggatcacggggaatatttccccccgctttattgcacgcggggacgacgggaggcggcgggattcgcggcggcggcggcgctagggcgcgggcgaggtggcgggagcggcgggaggaaggggatgacgggtgggccccacccgtcagtgagggtggcgggcgggcccgcccgtcagcggcgctcgcgcggggagaggccggatgggccgcggggagagaagagagagaggggagggaggagagatgggccgggccggcccaagggagggaagggggactttttagggtttttttttctttttataaaacctttttaacttcgtttattccttaacaattattatttgtgctctgaaaatttcactaaaatttatttacgtattttaggcttttaggaaatatacaaaaatcctctaagccttaattgacttttaactttgcacattttaattgttggaggctttcacacggattttaattattctaggcataatttagaggatatattttaggatcgttttgggacgtgacatagaataacggtcgaaaaacagcagagtgcgaaacttgctcggagtcggtacacggcaaatccggaacattatcaaatatcccggacttggggggcatgtgttaacgaccaaatttggtaatatcaacatcggaaaagcagattagatcgaggtggagtcgaaggcggagattgatccgagaacagagcaagaatcggctgaagtctagatcggctacgattaggatcggctgggtctgagtcggactaggtaagccgatgcagccgattccgacagtataatttggtgtatgacatcgggttgaattgaggtgcttcaagatgattgccgcacatggatagagtcctgagaaggcaattgtatctattaattaggatgttttatgtaacttccttagagatatgtttgggcaaaagtctgccgcaaagacttatggtatcttagagtttgttagagatggtggtcgtgtccggtatggacatatcttgtaatcctcgggtataaatagaccccgaaccctatgtaatttttaacacacacgttcaatacaatttcggcgcatcgccacctttttgctttagttttgtttcgacgagttcttgctttcgggttgagctgcatcggtttcaatcttcaacaagaggtaaaacttgttatgacgacttgtgttctcgagattagtgcttccatctttatgacactctaatcttgtctatataattcgtcgagttatcatatatcttacataatctttggcaatatcgtcatctaacctacaatcggctaacatctgttaatagaaggcagccgattaggttaaatagagacgttgtcctatattatataagatatctaccactttatgaaacatccagcggcttgattgtatagatattgttcttcttttcatacttaatgctgtatcagttgagtttgatctattaagtcgtacttagaatatcaatctttagcctgtcctctggttgtcgattagggtagtatcggagtttcagccgatcttatctgatttaaccatattcgatctatatgcttcagtgacatgtaaaatctgccctttatttcaagatcttattgtatttaagtatattaagcttttgtttggtatattatacttgttttgatatctttatatagagtagtatcggggtattagccgatacatgctagatctatctgatcggctatgctataaacatatataatcctattattaatatatatttcgatctaagtgatttatattgtctcggcatgctgatcgatctatcccaatcacttgatttaagtatatattaatataagaactatatatcgttaatatctacagccgatcgaatagatttagttccttactgtctatttataaccgcgatcgattcatatatggcatcggctcaaagataaatgatatgtcatcggcacctagcagatcggctatcatttatagatttaaccacgaattctttgtctctatttcttgttgattacaggatcaaatcaactgtcacgctcatacattcgaagacgagctttggacctgcactggagttaagcagatctcccaggcctcgtgttttctgtcaacagctaccttgtgaccttgtgagtacccttccctcaccatgctcgccctaccttgctcgtggtgtgggtttccattttcgatgagggggaaccgccccagctgccatcatgcacactaaaacctagcggagtaggcaaccaacgatggtggtatggtggaatagcaagttggcgtgctcagctaggcgagaaacaacttgattatgtatgtgaaaggcaggatttttgagagatatatgtttttttttacaagcgggcatataacggggtatgtgaaattcactcatcatcataagtttgaacaaaaaaaaatcaatgaaaacaaattatttgcaaaaacaacattccataagaaatatttacaaaaacacaaaaatagttctcacaagaaataaaaatagttgaccatatattgatatatagcagccatgtgagctgtgacatgttgtaagagcaaaagagactagtatatatatacacacacacgccaactaaccggtattaatttattaacttatggccacgcaaatatctaaaaacgttaacattcagctagatatatatatagacacataaatagcagagaaaaatccaagaccacatgtacacaaatactacctccatcccaaaatgtttaacgccgttgacttttttaaaaatgtttgaccgttcgtcttattcaaaaaatttaagtaattgttaattctttttctttaaatatacttttatgtatacatatagttttacacatatcacaaaagtttttgaataaaacgtacggtcaaacatgtttaaaaaagtcaacgatgtcaaacattcagagaaggagggagtatataatatgctcctctattcctgcatgcaatttgtttctattcagtgatgacacagtgggtcaaacaagttgcacggcaactagagagccccatgcccagataccggaagaacaccctgaattccaagcacacagttttgttgtttttgcatactgtatcatgatgagtaatacttcctctgtccactgtcccactgaataagacgcatcggcaatttaatatttatcactttaaatatttgaccaataattattttattacaagttaaattttatttgatgaaaataatatcattgaattagcatttgaatgtcctttcctataattatgattttgttgcaacaagcattgtgatatatttttttagatattggaataaaataacatctcggcctttactcaaaagagttatagccaattattacaaactagcactttgtaaaaaaggaaaccaaactagacaaaataacattatttcagtatattggtaaatatccatccatgattggtaaacagttgcataaccgtcgtttcaagcttacgacatgcaacaattaggaaatctccatcttcatcacatttttataactgtgcccatagacgaagcaaatatgttgccttgaaaatgacctacatataagtaactgtaggtgatttgtcaaaaccctatcattcctactcaaccataaagcccaacacaaggcaaaagctccaacaagtatcagttggctctttttatttacgactctctgacgccaatcataaaaaatat

SEQ ID NO: 49693 - DNA, 1390 bp, Oryza sativa
gtagagtatagagtccatatagaaatcaattaggaaatacctgaaattcagatttaaaataagaaatattagaagtagagtatagtctatatagaaatccaattagtaataatagaatttggaattaaaaataaggaatattagaagtagagtatagagtctatatataaatccaattaagaaaaaaatagaaatttggaattaaaaaataaggaatattagaagtagagtatagagtccatataggaatttaaaactaactaaaatttggaataaacataataaaattaaaagtagagtttagagtccgtataaaaatacattttacaaataactaaaattcaaaattaagaaaaacatttgaagaagagtttaaagtcaatataggaatacaatttagaagtaactgaaattcaaaattaaaaattagtttagagtccacatagaaatccaattagaaataataaaaattctgaaataaaaataaataatattggaagaagagcatagagtctatatagaaatacaatttacagaaaattcggaaattaaaaaagaaatattaaaaaacgagtcaatatatatatatatttacaaataactaaaatttgatattaaaaataattaaaaatacaatttacaaataactaaaattcgaaattaagaaaaatatgggaaaaagagtttaaagtcaatataggaatacaatttataagtaactgaaattcgaaattaaaaattagtttagagtccacatagaaatacaattagaaataataaaaattctgaaataaaaataaataatattggaagaagagcatagagtctatatagaaatacaatttacagaaaattcggaattaaaaaaatatattaaaaaatgagtcaatatatataatttacaaataactaaaatttgatattaaaaataattaataactaacacgtatataaaatacaatatggatattacatattagtagttttgtaaagttattgcaaaatttaaaattaagttgtcattttaatatatttgaataatataatgagaaaacatactattgtcagggttatggataccacatacctaatagtagttgactaaatctcggcaggacccaccacataccatgtcttatacggaaactgacttcagttatggagagagttccggataaggaaagacaacaaaagttttacatggaaacgacaaggactactcggattgtatccatattggtttccctatttctacttggacaatgggacacctatgggtataaatacaagccccctaggaggacagggggacacccaccatgacaggatcaacacagtcaccacgatcgacacagacgaccacctcaatcaacaaccaccacaatatacg

SEQ ID NO: 49694 - DNA, 1709 bp, Oryza sativa
tcagagtaatctatcgaaaagccgagccctcggatatgggcaagccgagcaatgtacccaagtcagtgttctaattcttaaaatttgctcaaacaactaaaatgtggaatggttggcctgggttggcttgggacgagctggaacccaggtcgggttgccagttcggtccaaatcatcgtaggccttgggttaaggcaggttcgtgagggttcacggccttgtttaataatactgtgtagctctaggatcgtctttacaaaatggctttgagcaactaagtgacttttaaatgctgtttactgcaaaactgaacccctgtattattatctccttgtactcccttgcattaatcatgcattctccggtgtgtcttgctgagtactgtggttgtactcattcttgctctatctttctccccccttcagtaagagaagctttggagaagatgtcttaggtggagtcctggcttataccccaattgagcgcctgtgaagatggagccgtaggcccgctagtccgctgctgtttatttttgattgtcaggccttaagtgcctttgtaataatgtaaatattatcgatgtaataaagatgtgtcttttatatcatgtttgtatggtgtaccccggcttttcctgggacggggattaatacactagcgttcgggaaaaggcaattttcccggtcgcgacaagctggtatctgagccatctcgactgtaggataagccaagtggatataacctaaggacctattttataaataaaactatttgtgaaagttccttttttctcctttcccctgtgctatctgcaaaaggtttactcccttcttccttcttcggatttcaactagtactagatggtcaggtcagtgaagaagaagacatcgtcagttgtttgtcgaaattccagaaggctgcaggatccgctagtaaagtgaaggaagcagtgaagatcttggagaacccgtcgcagaacctaagccaccctctagggtagtgtcgttagtcgtgtgtttcttgcttgtgtgtgtagcgcgtggtttgcatcggtgggttgtgatgtaaccatgctaggttgtttgcttaatcaacttgcagaataagcaaaacaaacaacacatcaacaagaagagttagttcctttaaggtcctatctctagttctggtctattctttcctagcttgtttcctctctcacctcaattcctgtaacagatgtttaacagagaaaaaggaaagaatgtcagcgggtatgtctccagtaactcaagttttcaactcaatccaccactggcctcaagagagttaaccagggcacacccttggtccattccaagcatgccgcttagttcacagctaccattggttggaagtcaagaccaaaatcagtatgtgtttgatcgagcatttgccacccaggtcaatgaacttccaatgccagaagaggatgtccccttttgtcacgattgtagagaacaaggacactatgccctgaattgtccatgggtatatgccagagaagccccttcatttggtttaacagggcagacatcgctaaaccagcctcctcgcaccaagtcaagcttgcagcctagtgtgcaaagtagagagcccaatggagagaatccattgaatcccgggaagtgctttcaacatagcctttcgtaccacgtggggtcacgtactaagcaagccaaaggcaagaa

SEQ ID NO: 49695 - DNA, 919 bp, Oryza sativa
ttgtaggagagcatcagacaatggattcatagggaagatacctcattattttggcagcatgactaatttagaagatatgtaagattaattatgtatattaacttgttaacatatcattcgctctatcctaatcagagacaaatgaaattttgcaacataaattttctgcatatatgattttcccattcgaatttgaacaatataatagcaaacatttccactcaacaaaattgcacacatctctatcacactaaatttatccagggggcatgttactacatcgagattttatgaaataaaaaaggaaaaaaaaactgttgatacacatacagcttactttaaccttactttaaataaatggtggcatgtattctttctaaagtatgagctttagtggtttcgaaggaaactcatttgaaggaccaattccagaaaatctgtctaatctgaccagattagaaaacttgtaagtatacttttttgtggtattgatctctcttgaagattgacaatgccaacgctgatgagttatttctgaaaaatacatgtgagcagacggattggagatatagtaagtggggcctcttcattggcatttatcagtaatctgacatctctgtaccaactgtatgtgatgtttttgcttcaaattaagtttacagtgtataggcaaatttgcaagttacaaaagttggatttcgttcttacacaggatattaagaaactgtaagatatcgggtgatctcagagcattagatttttccaagtttcgaacactaatatcgctgtaagtctcccaaccaccggctatggtgtcacatttcctcatgtagtgaaccatatgtactccaagtaatttatactatactgttgtggcacagggacctaagttttaacaatatcacagcccaacttcctt

SEQ ID NO: 49696 - DNA, 3305 bp, Oryza sativa
gagagagaggacgacggtgcgggcttgattccgacggggagagagagcggcgagcggcggaaacggaggagagaggctcggggagcgattatatagcgtcgggagggggagagagcggccggagaggaaggaaaccggcgcggcgatctcggctccattgatgcgccggcgaagattgcgggagtaaatccgagcgaatccgagggagagagagagggaaaagagggggaaaagagggagggaatcacggggagtgatttccccctctttatggcgcgcggggacggcgggatgcggcggattcggcggcggcggcggcgctagggcacgggcgggcggcgggcgcggcgcgaggtaggggatgacgggtgggccccacccgtcagcgagggtggcgggcgggcccgcccgtcagcggcgcgcgcgcggggaggaggccgatgggccgcgggggagaggagagagagggagggagttggaccgagccggcccaagagaggaaggggggggaaaaggacttcttttagggtttttctttttataaaacctttttaactttgtttatttcttctcaattattatttgtgctctgaaaattccactaaaatttatttacgcattttaggcttttaggaaatatacaaaaatcctccaagccttatttgacttttatatttgcacattttaattgttggaggctttcacacgaattttaattattctcggcacaatttcgaggatgtattttagagtcgttttgggacgcgacactcggtccttaactgaccagggacagcactagccttttccggacaccacccaagtaccctagccgccccggtcgaaaacagtgtttaattttgtttctcttttcacaattcatgttatccttgtcatggcaatgtggtgtccacgcctccacatgccgcatctcaactaccttccctaaggtagttgcccaagcatatagcacttgataaatatgagaatgcatgattctaattagcatgactaagcatttgttcaatatcgactaagtacacacgttagcacggtttgcaatggtcatatggataatcaatatcaaggcatggcatatttaacaagtagggcattcatattcacatatgtatagcatgcaattttatttaaatcaacataattttcgcaataggttcaacatgctcaaagattagtgatgacttgccttgatcgcagtcttgctgacccagatcttcgattaactcagcaactccttcggaatctaaatttacgtgcgaaagattgatttgaattcaattagaattcatattaaatcaccaaaaattcaacagtacaaaaataaatagcaaaagtggttccatcagaaagatcttgattttagatgaatttaggttcaagtttcattcaaatccgagctaaaatgaatgagttatgcttgtttaaagattcaaatttgaattaattcaaacaattgtgaaatggcactgtgcagccgagaggggcattattacagtggctgacatgtgggccatcccccaattttatttccggtttttttttattattattttttttaaaggaaatcctattgtgtcattgacaggtgggtccggccccctgttgactgaggtcaagccggccttttaatccccggtgcgacccgcatgtcattgagacatttacttaaaacctaatttaattagatttctaagcatccgggcctacatgtcataggttcataataatactattagtttggggattactgtgcgctaatgaaatggggtccacatgtcataacccctccctctctcgtgtcttctctctctcccgtcgtcttcaacctcgcgcgcgcggccgaacagaggagcagtgcgcggcggcgcgacggcccgagccggaacagctcggcgcacggcgaggcgagcggcggcgcatcaccggatgcccgccggtggcggcggcgaagcgcggcgaccgttcggcgcgcggcacgacggcgcgcgtcggcgccgagatcccaaactcggcggcggcacgatgaggaccaatgtgagcgcaaccggctacgattcaaccatctagggtccacatggagtatatataagcaaaatctagcctaggttgtattggaacgaagtccccccacggcgagctcaaccatggcgcagtggcggccggtgccggcacggttacggcggcgcacaccccaaatcgagggggccgggggtttctaggtgactaggcgggactactggcgcgagggcttaccacgaagtggcggaacggcgaagttcgacggcgagtggcgcggcgcggtcgaaatagggacggacggcggtcggcgacgggcgcaggtgttcgacgctcgacctccctcgcgtaacggctcccggctccctccaatagcagcaacggcaacgggcacacctcctcaacacaccccgccacccacactggccgagaagccctgtggcggcggcgcagccggcgcccaccaggtgttcgacacccggcgacggcgtgatcctgcccctcttcggtggagcaaaagttttagagagaggaagagttaatggaatgttgagttcggataagaacgagccaaggacaagcctatataagcgagagggagagcgattccttaatggataagggtgatcgatgacgcggctctgtttcgattcctcctaggttcgattcaatgccctgggccggcatgattgcctacgcggtagtatgcaggagaggtctcgctagctggagaaaggggcaccgcattacccagcggtcgcaaccgggggtgacaagatggagacgcgacggggacgtgatggcgacaagagcgacggcgatgggcagtggtaacggcttggatagggggcgccgggctatgccctagggtgacgcgggcacccgtggtggccattatcactccatcccgagggcgacgcgcgaggggacgggatgacgcgggcacccgtggcggcgcagcctttggcgcgggcttttggccgcttggtcggcggcgggcccacacagcttggcatgacgcggtgcggcgcacgggcacgactagtgtggcgcacgagtcggaaggcaggcgcgtggcacggcagcgattggcgagggtggcgccgggtgttcggttgggttaggcacagatcgaacacctggcgcgcaatgaacagtagcgccaggaaaagaaaaaggaagagaagagaaaggataagggaaaaaggaagagctaaattgcaaaatggcttggaattgagttgtaactctacatattttgaattcaa

SEQ ID NO: 49697 - DNA, 1268 bp, Oryza sativa
tttttcttttatttttcctcatacaccatttccactatataccacacacattatgcacgatcttgatcttgagtatgtttagttatctgcattagtctaagttttttacttagtaacaaatgtgaatgcaactatgccatgtttgatccctaccgagctccacatataaaccttagagtaggaatcaacaaggcaacatttggtgaagaattcatgttgatacacttagagagactgagtgaatcacttgaggaacttggttttcttttccaaaatcatttgaaaacttccagaacaagagttgaataaagattgggtgaattggtactctaattgctattctgtctttcaactgcccaagacaaggagaagcagtgtctcgtgggaaccaggggtaagggtaagccaccgtgccaaagattatttaatccgagagagagtacatataccttgcacctgtatctttgagatatgcagcatagtagcaactcctgatcaacaaccaagtctttgtttcctttcgtccttcattcgggacgagcaaaggttcaagcttggggggttttgttgatggtcgttatcgatcagtttcgaccgtcaatattaccaaaatagaggagaactagtgatgcttgcaatgcataaatatgttagaataattatattccactaatattggctctactaaccttttgcacagaatgacaataaaatgaaggagaatcgacatcaacttaaacgataaatcaatcagatgatgtcgaagaccagacttatgtatgaatgggccaagaactcagaattgacacgacgaatcaggccaaaattcacaagtctacgaagtgaagcagcagaggaggccaccagccaaaatgtgggctggttgggccggccctaggtttggccgatggatgcagggttttgagggaacggtggagattcacaaccaatggcggttggagggtattaccgacctttccaaccgccataaccgtcattacctgcctatttaagaagctcactctcttcacttcaacacgcacctcaagcaagagctctctcattcctctcaagtttagtttagtattatctagctggtggaatagaattagaataggaatcaggagtccggaagccttcagaagagttcgggtttggctctagtagctttcctttctcttttgtaagctttgtacttttattacaatactcttctaatacattaatggtatggaatacttttcgagtatatagtacctacttacatt

SEQ ID NO: 49698 - DNA, 915 bp, Oryza sativa
ccggcgcgcgcgggcggctcaagccgacccggggtcatggcgtggtggcggcgcggcaccggcggcgaccggcggacggcggcggcgattcagcggacgccggtaaagcggctaagcggcggcgctaccacgggaaagagaggaggaagaaggaaggggaaatgtcctcaccgaaggggcctgaccagcgaggagagagacgacggcgaccggcgacgaggaccgacggagggagatcgacaagcggcggacggggtccgggacgacctaaggaacgaaaaggagaggattagagagggagagagggaccatagagggcgggaatgccggccgaaggcggtggccatggcggctcttacaggcgcacggcggggatggggctccggcggctaacctcgacggaggaggggtggacgaggtggacctcggccacgcaaacccaacggcggtgacggcgcggtgcggcggcgaccctagcggcggctagaggcggccggagtagcgggagaggtggcggcgggtgggtgcacggtgcgggagcgatggagagctcgggagagaccggcggaaaaaggaaaagtgaagaggaggatgcggggatggattttataggggcggagaggtcgggaactgtcacaccctgaagttctcctcctaagcataaaattgaatttataaatcaccctaagaaaataccggtgcaaatcaagagaaaaccttaataaattaatgcaaataataatcggaattggcatgtggaatttttcttgagttctacatgtcgaaataccctaacaagatttttagtggaattttcagagctctcgaaataattttaaccaattaaaattgagcacatgcaattttaaatcccagggaaaatcttttcctccttttctttttcttttccctcct

SEQ ID NO: 49699 - DNA, 723 bp, Oryza sativa
aagtaaaatttgagggctccttttagaccaaggagaatttaacaaaaattctccgggccacattcgaatttttcttgtacgtattttagtgtttgccaatttcttttcgaattttaattaattctattattccttttagagaatgatttttaattcgggatgaatttatcaggacgtgacaccgcgccattcctagccaccttccatggccaccggccgccaatcctgccgccgttccccgctcctcccgtggccggctcgttcccctccgctataaaatggaatccccttcctctgttctttcgttttagcctcctcccgtttctccccgtggccgcaccacctctccccgtcgccctcgtctctctcctgtgccgccggccacctccagccatctttgccgcctcgcccgtgtgccggtaggccattccatcgccatcctcggcgtcgtagccgcctcctcttccccggcgtgtcctccgtttcgcgcggagaccaccggatgtgcatccccgccagcgtccagtggcattgccgccactgcactgcctccagccgccccggttgccatgccagagcatcggccgatgtcgccaccacctccctcggctctgcgacgtcgtcctcatctctggcctcacctcctcctcacccgaagctcgccggagtggtctcctcgtcggcgtccagtaccttcccttctccgggtggctactgttcctc

SEQ ID NO: 49700 - DNA, 707 bp, Oryza sativa
tgcacccggagcccaggcctaaaccattttgggatttttaatagaaagaacgggtgtgaagcaatttccacaattaccaaccattccatagtatccagatgatatgaatatttcccaaggtctatagttgaaaacccacctaatgttacctaattaaattgcgaagcatctacctaaaactaaactagtggtgccatgagtagagtgtccactagttgaggttttgtttattctagggtgaacaaggtaataataccaataccaataataataaggtcataccaaaggtaaataggcatggctaaataaaacagtgataacgcgggaatttaaataaagcgataatgcaataatttgaatcaacataattttataaactgggattcaatatgctcaaagatgatgtgacttgccttgctcgctttcccaaacgtcggcttcaacttccacgaagagcggatcttccgaagctgcagcgtctacacgaccaacggaaaagaaaaggcttttactctaataaactccatataacagcagaaacaaagcataaaaatgggctcttgacttcttaaggaaaaattagagacttgaacggtccaattccgagttcaaatggccaagttatggccgtttgaagtttatatgctctttaaatggatatttgcgaatttcttcatttaaattttaatttaaaaactcatttattg

SEQ ID NO: 49701 - DNA, 974 bp, Oryza sativa
tagcatgtgtctcacactctgcactcattgtgaagaagaccatccaccaggggagtgtctcacccgcaaggtcacatgttttctgtgcgaaggtacaaaccatgtgcccaaggattgccaactcagtgtgttgttgaccaagaccgtagaaatccaacgaacaaccctacgattgtctcatcagctagtcagctccaacagcaacatcgacgatatcatccacagcaccaatgctcctcctgctgcacctgactctgcagtaaatcatagcgataataccttcagcaccaaccattctctgcaccgacagcctcagcaaagaattgtcgtcgatggaagaagttgtgtctctccccgacctactccaggccaagcaaagggcaatcaacctcaggagggcgataccaagcagaaaaccgtcatccacttcaaacagcaatcagaaggaagcttctcctgtgaatgatagcaatacgcagtcctaccacatcatcacagaaccaatcaaggatgcagtcactagaacaatgcgagctatatctctccagaatcaaaatgagcagccacgtttgtgattttcagttcgctacttatcattgtgtaatcgggagtttgcagcaatcatgtaataaataaatacattcatgattataaacaatgagtttgttatgtttatggaagattcatgtggaggatgcaatgtaccgatgttaagcaccttccctttttgtttaaggccaggccttgcattcatgtaataagggagacatgtgtaataaaaacaagtgctatgaggattatttcggaagatgctgatatgggattatgtgtataattgtttactgacaagggagacctagggtctcatatccgtaagctcataatctatgataaatcaagtaacctagttgttgatagaaaagaaagtgaagcgacctgtgttagattaaaaagccaaagagacttttgtttgg

SEQ ID NO: 49702 - DNA, 1282 bp, Oryza sativa
ctttggtgtctagctcgtgcctgccgtcaagcgcctgtggtcatcgccctagtcttccgctgtttctcgtttgtctctgtgtgtgctgggccttcgctgcccatgtaataagttaactatttacgcttccgcttgttaaactctgaattgtatcaacttttggtgtaccttgcctcctgggacaaggaataatgcacgcacgtcaggaacgcccgttgggttatttccggtcgtgacaccgagccatgaagttaagcatgaaatgaccctcgtacaaccgtacttctcgtatgggtatagacctagcggagtacacagccaagcgaagccagtatccctgcatagtggttattcttagtgtgtgtgggtcagggcctacggtggggcagccattggtggggtcgcgagggcgagtgcctacaatggtgtcgccatcggtaggactgccatgtgtaaactggacttaactaaaacttaatgcatgtgtgagtcttcccttcccgggagcgccagaactcctctcactgttagaaacttataacgcctagagtgcatgaggatgcaagttcatggagcgggtactgtcaacgtgaggttattgaaaggctttgccgtggcaagtctcattcgttgggacgtaggctcatgtgttgggcaagtcgcggagtacgggtaaagtgtacatccactgcagtgtgagtaaaaccaatctattcgaatagccgtgctcgcggatattgagcatcgggacatgtattacacttggctagactctaaattcttaaattgattaggatgggatatgcatgatgattttcttctggcggatcacctcctctagagaagaaaaggagtaaaccccagaaaaccattacggccggtaacgggaagccatctttgggaagataaaggggtggcgaacagaaccgttgctgtgtaataaacactggaattaaaactggactagtctatactagataataggcttgtgaaaagaattgtgaaattagctttatgcaaataaaccaatggccgtaccttgaatatctctatcatatgcactgttgttatgatggcttgctgagtacggttggtactcactcttgctattacaaaatttaatcagtggatggcaatgaagtcgaggaggatccctatgcttatcttcaggaggatgcggaggaggacggcgctccgtaggtcttagttatggtcgttgcctgtggcaatggcatagccgctgcctatattctgctgccttatctatttctgttattgcttg

SEQ ID NO: 49703 - DNA, 1290 bp, Oryza sativa
tatgcgcacttgatatctcagtaatgtaatcgtgagtaccagactacttgatccagggaaatggtactattaacacgagtgattcctgttataaaaacgggggtctacacaagatcacttgtttcttgtgtgaaggaattgatcatgtaccaaaagattgtcaactcagttttctgctgacgaagaagatggccaaccaacatgcccgttctaatggagagaagcatcaaggcaacacaaatcctcgccaagattacagtttcagcctaactccagtgccaggacagaggaatcaaaatgagaaaagaaaatgccgagtccggaaagatatctgttgcttcagttgtcaagaaatgggtcatttcgctgacaagtgcccaaaaccgagaaacatggctgccagcacgtcagtccacgcaactccccgcaatcagaagcttgctcctcagcgaattgtcatccatgcatcccgaagcagtcctatagcacgcgttgcaacagctccaactccaacgagtgcactaccacaaggtgtcaatgcaccatttcagtcccatccacctgctgacgagacagaggccagtatctgcgttgtacctttggatgttccaatacagcagctgataaatcaagtacaagatgaagaacccgagtgtaagaaagttattgtttgttacaactgtagtgaagaagggcattactcgagggactgtcctcaaccaaggcaaaatcggcccccacattttcgccaatttacaggaagcaaacatgccaatcgccaagtggtcactggagcaaatgcagtacctgttaagcctagtgctagtcaatagcaaccataatactcttatatcggtgttcaagtacttttgttttatagctgttccctgtcaatcatgtaataacagaggaacatgagataatgaatgagtttgacaagtttatgaaagatccatgttaagattgcaagtactgtgagttgtgtacattttgttgttgattaaggagacctagggtctcatttccgtaagctcataatctgttcaaaacaacctacgattgatggcgaagaaaatcaagtgatcaaccaaagagacatttgtttggactaagagtttcagatgtgtcttattcggatcaaaggcaacaatcgtcagtctagcttttgacgaactacttcaagggttctctgaaagacagcacgcccaaggacctcatcgccccagaagtatcctcaacacccggagtgaagagtacctggttgagaaaggtcgaaaggtgattaatgga

SEQ ID NO: 49704 - DNA, 716 bp, Oryza sativa
atgaaacagggcccaaaatgagtagttttagcctttttctttaatttcttgaatacatatacgaggtatagagtacatatacttattttttttgtctaaaaatcttgggtatacgtctgaatacccttgaatcaatagtgggcccgcccctgttatgatccaattgccagggcatcatcttcaacctcaggattaggggaagcatcttcaacctcgggatgagggggaagggagagagggtagctcaccggagggacgtcgacttattattccaccggcggggaactctccctcctctttggcgccggtgacgacagccatagatttaccgaaccaaaacaaaaacctagatttgggttcgggggcggcgaggcggcggtggacggagccgcggggttggaggagggaggtgagagggttctgcggcgtaggttcctagaggagtgagtagaaggcggcgatgccggtggcgtctccggtggcaggaggaagcccagaaagccgcgagcaaagcttcgatggcggatgccgcgacgcgaggaagaaagaagacgactaatggtttgcctgcacgaatcaaagaccctactggtatttggttgatttgtatacgcctagaaacttatagtcacattaaatttacacctctgtgctataaaaatattatatcctaactgcgaatcttgatgcatgcatgtcgaggttcatacccagaa

SEQ ID NO: 49705 - DNA, 552 bp, Oryza sativa
ttaaaatgaaagagaaaagaatgcgtaatagcctaaggccgttttggcccactgcttccaaccttgggaaggtgtatagtcggcaatataaggtttgttttttttttggttgggagagatatcgggactcgggaggtatatatgttttttccattatctgttaactaacccttaaataccaatgagagtcaaaaatcttcaatcctatttcctcttgtagaattagtttcggtacctcctccataagaaggtacagattgtatcttccaagttgtgaggagctatattggtattacccgaatttgtggccactttggctgatttttacaacattagagataaccacacaagcaatacatccctgttaaaagaaagaaagtaaatgggtagaataccttcaacaaggtgttgagcctggttttatccatgttaatgcgctcttcaagtctaaaccggacaaaatgttagttccaataataatagcaaaatttataaggataacagatgactggaaaggtaccttgcggggtaaagatgctgcgtgtaagttgg

SEQ ID NO: 49706 - DNA, 804 bp, Oryza sativa
aatatatatcaccagagatcgtcgggactgcaaatatttcttccaaatatatatagctggagttcgccgatggaatgcaaatatttcttgcaaatatatagtggcggagatcgctggcaattccgctgataatggcggcgagccggcataatatagcagtatcttatctcagacgccgccgacattatcgtgcgaaggcgtggaactatcgagcagttagatcaccgaatcgcgtgcaaaaaaaatgcatctatggaatctccgaacccccatttgaacctttttctttttcttttagtttccttttctcatcaggttggatcgaacgtgaggtgattttagacccagcagtgtgcaacgtccaaaatccactcggtgctatcaggccgtatccacagtggaaccgaccaggcctagaaattaggctagattaaaagcctataatttacgcggacacggaagttttggcccatgttaatgagtaaggtggaatcgaacccttttgaattatttttcttggttttgaaattaggagggtttggagattatggggctgtttggatgctatactaagtttgtcaccattcaccatacatttataccacacttgcctaagttgtggctttaaaaaagaaatccacactttgttgagttgatgacgtgtagggtcataatatatgagaaggagttttgccacaagtatggctatgaaccaaataatagactaactttgtcaaacttgcctaatataaagtgtggcaacctatggcaaactttgggagcaaaccaaacaacccctaaaac

SEQ ID NO: 49707 - DNA, 729 bp, Oryza sativa
gatcgacgccatcgacaacgaccggtgcccgtacaccgccgccgagctctccgacaagatccgcgagctccgggaggacagggtgaccgtcatcctccccgcgcaggctgtcatcaagacgatgatcgactcggtgcgagcagctacgcccgccgccggcggcgatggtggtactcgtcgtcgtggcgccgacgacaactccggtgccattggctgtggcccaactcaccagtcgcggacgatcagccggtagagtatgtaattaggatatatgtaacccatcgctgtcgatttaatttagccaggagtagtttcttttttcaattacatactctaccatgcaatgaagggtgtgtttagttcacaccaatatcgaaattttggttgaaattgaaatgatgtgatggaaagctgaaagtttacgtgtgtaagaaagttttgatgtgatgggaaagttggaagtttgaagaaaaagtttggaactaaacaagaccgaaatgtggcattgttgattattgatcgtgctcgatatatcaattaaacgtacggtccatgttggaatataaagtaaattgcccgtctttactcatcagcttaagcttttgggttaaactggtcgatgcatgcaacttaatatagtatcagagctaaatgtctcgagttcgaattctggctggcgtgcaattaaataaaaatttcagcatacttttattccacgctagagacttg

SEQ ID NO: 49708 - DNA, 712 bp, Oryza sativa
tgcttcttttattttcatgtccagaccatctgtcagctccttttcagtctaagaaatagtgttagattaagggcagtcttacatgcattgcacatactttaaatataaatagttcacttgtactgctgtattgtatcatacaaataaacaatagacaactccattgccattaaatcatgacaacggcttcagtatgctggtttctagatgagttatccctgttgattttagataatttatgaatattgaacggcttgtgagttgtagtgcctgtaattaacttgtctttaatttcttgtttgatcattgcaaattcagctgctgatggtctgacgagatagaagtcacagaactacaatagcagaacctctgacatcatctcttcagtaattttcgtatcttcagatcaaatgacagagattggatgtcttcttgttgttcttttttgttgatataggcttagaaagggaaaccataaactcttctttgctctgaagtttacagaactgttgtaaacaccaagtactagaatgtatgcatgaacaactgtgcgttctggcatttgctgtagtttcctactttccttggatatctgtatataatatgattgatcataaatttgcggtgtggaatgttatgctctatttttgacaactgaaatgttatgatcaagtctgaatacaaggcaactctttcataacctgttcctgta

SEQ ID NO: 49709 - DNA, 793 bp, Oryza sativa
ggaggttggatgccccttggtccgccgctcgctcgatcagatacgcagggacactgaggcgctactagcggcggcggcggccctcgagcctcgaccatgataatggcggcggcggcggtgatgaaggcatcggcctccggcagcagcagaacgctgctcaacctcagccacgcttgtaaccaactactgaagggattgatttttttttgggttcagttttgatgtaaaatttactagcttagtcctatgtacttatgttgggacaaatagagggaaaaaagtatacaggcagtgcctgatgaattgatttacgattggacaaatagagtgaaaaaagtatacgaccatgaataatggcagcagcaggggcggcggcggcggcgacgaagccatcagtattcggctggagcagcacaatactactcaatttcagccacgcatataatcgatttctgaaggaattaaactaggttagtagtcctatgtaggaataattagagtgaataaaaagtatacaggcaatgcctgatattgtgatatgtatttgcaactggagaattgagcatatgtatatttcatttctaaactgtgtggatgatcagtcgcatcatttatcatacacacaataaccgtggaaactacagcaaattaatttcagaacacaaaattgttcaggcgcacattctacgtagttggaaatttcagcagtttgtaaacttcacggcataatggccaacacatagtaacaggaaaacaaaaaagttgacggctttctttttggcttctgagcatg

SEQ ID NO: 49710 - DNA, 684 bp, Oryza sativa
atggataactcatataaaaacatcataagctgggtcttgatttaacgtcagcagcgttgtgtattatacatttgtagatgaaaaccagcatgcaagattatcttaaaacaaataacctgtttcttagactgaaaagatattactgagattacctgggcttaaatccttcaacactactaccaggacataaacattctcaaccaaggattgggatataaacccagtattttcgataccagggcaaaccattattcccaattactaaactaccttcaggccatattttagcacatgtacacagattgaaaatccacaaggacggggcatgagtatgtatggcaaccaacaaaccattatttccaacagttttcaggtaagtctctccaaaccagacatgctatacagtttcctagaggacaaatggatataactttattaagaacagtaccaagctctgttagaaagaaatcgatgcagaagtttgtcacaaaagatgcaggacaaaatacaaactgaagactaaaggattatcacaagtgaatgactattaatgcatagaaactgtgtcagggaaaaaaaaagatgaccagccatacatggggtaaaatggaaaccttaccatgagaggttctgctcctgtatctgtcttcctcttatacagtcagataagtctccagtaaatgg

SEQ ID NO: 49711 - DNA, 739 bp, Oryza sativa
tatgggctctacatttaaatatgacctacaaaagctcataggcgactcttaacatttattaaatgatattttgttgcacgggatagagaaaaggaaagaagagtaatatatttttttggggggaatcttagcatttattaaatgatattttgttgcacgggatagagaaaaggaaagaagagtaatatatttttggggggaattaatgattaagaagttttgttgtctcaacatttttaaaaaatttaattgttgtctcaactattattataggagaatagtcactaagtgagtactccctatatcctataatacaaggtatagtcaaacttgacacggtctacaaaactaatttttatcttataatttctcatatataataaagtttgtagtaacaaaattataaccatatgaaaataaatttaaatgtcaattcaatgatataattttttagtaagtaaaattcaattcatattgtactaaatgttagtcaaaatattatgaagatgaaatcttgaaatgcatgggcgccttatattatgggatggatgaagtatttattaactaagagctcatatcagactatctcttagtcaacagctaggaaaaaaaatgaagtaacagctagcaaccgtaaagaagataactaaataacgaattctcactagatgtcagaaagaaaaaaacattctgatcgagccaccgaggtcggcggaccaaaagtccatcggatgatcgg

SEQ ID NO: 49712 - DNA, 560 bp, Oryza sativa
ggggggtttttggattttttttttttggctaaaaaatatctttgcatgcggtgggctatgtggaccgcatgcgaaaatcccctttttgcatgcggttgtgttgcccgcatggagaaatagcgatttttacagaccttttgttccatgcgggcaggctagccgcatggaaagatccatttcgcccgtatgaaaaaagctcttctgtactagtgccacccatgcctcatgtcacgcccagaaattcacgaaccataatttctaagctgaatgtgtattaaacccctgtccaggaccagccagggtacacaaacgacaattgttgacatacaaatccacgtcttacaaaaacataaaggattacaaatgcagcggaaaaggtaaaagcgagctaagcctgaagacttgactcctgcagcgggcgattccattccacaggcaacccttgacggcagcgacgaaacccacctcttcaagacatctccaactgagaagaacttcaactctggtgtgggggaaaagagagcaagactaagtactacccactgtactcagcaagtcat

SEQ ID NO: 49713 - DNA, 1009 bp, Oryza sativa
ttcttgtgtcaccgtgagatcgctggggaaatgcaaatagttcttgcaaatgtatatcatcggagattgccgggaatgcaaatatatatcgccgggggaatgcaaatatttcttgcaaatatataacggcagagatcgtcggcaatgccgccgatgattgcggcgagccggcgtaatatagtagtatcttatctcagacgtcaccgacactatcgtgtaaagacatggaagtatcgagcagttagatacttagatcgtcggatctcatgcaaaaaaaagcatctgcggggttcggagataaaaactccgacccccgtttggacccctttttttcttttaatttcctttttctcatcaggttggatcggcagtgcggtgattttagtcccagtgtgcaacgtccaaaatccactcggtgctatcaggccgtatccatagtggaaccgaccaagcctagaaattgggctagattaaaagcccatagtttacacagacacgaaagttttggcccatgttgatgactaaggtggaatcgaaccctttcgaattatttttcttggttttcaaattaggagggttcggagattaaaacatcgatgctcttcagtatttttttctaccttttgccatcacggcctaataactttgggacaactttggttaatcggctcgaatattacggacgcaacaatcgttttaatatatcagcaggcttatacttgaaaaaaatcagcaattgcaagcacatacgtaattaagctcgtattaattggcttgtaatttacaaattttcccttgttttcctcaagttttgcccttttttgctgtcatcgtaatttacaagtattacgccttggcaatgcacatgaacgaatgaatgggtcgacgaattttacaagttattaattgatgattgttgtttgattaaattcaccacgcttctttgtagtggcgacaatagcggcgacggaggctgtgacgaccgacgacgcgacgatgatggtagtgt

SEQ ID NO: 49714 - DNA, 718 bp, Oryza sativa
aagatgcacacggcaatatggacttccatgatagttaagtaggtatagtttttttttttaaatcgaagccaggcaaagttggagttatattaaggaaaatagaaagtatttacaatatcaccaggaaaggtgaaagagacagaacaggggaaataaagaagaaaagcaacaaggaaaacctaaaagggagacctaagtggatattctcgtgatgttttttttgccccacacatactccaaagtttgatttcgtcttgtattttggcgagtagttgcggcatggttttctcttgattttgaaaaaccctcctgttccgttcacaccatacttcccataccaccaacatgtggattgatttgagtgctttggccttgcttttgcctccttctgatccaccattccaacagtacttcgttttcatcgtattggtgttctatatcgttgcagttcagtatactcaggaccctctcccagatatggcacacaaaagcgcaatctttaaaaagatgttgggcggtttcaaggttcctatagcatagttggcagaaatagttgtttggccattgtctgatttgtagcctatctattgtccaaactctattttgcaatagaagccatgtaaagtgtttgcatttggaaggtgcccattgcttccaaatcagttttacagctgcagagcttattctaccattaaactgcgctatgtagaatgacttt

SEQ ID NO: 49715 - DNA, 2037 bp, Oryza sativa
agtacaacgaatctagacatgcttcctgtccagattcgttgtactattaagtgttccatccggtcctaagtttctatactatgagacggaaggagtagcatttcccctttagagccatagcgggaaaaacgacactccattgccctgcctcttttcttcgatggctacacgctctaaccctccctcatctattccccacccccaaagccatcgatatattccgcgaggctgtccgctgtcctcactcaggtgaatcctctgccacctctgttggtggtttcattgtggtcatccacgtcttcagcgaggttaccgctctcaggtgagtcctctgccgcttccaccaatcatgagtcatctcatcatcaggtatcgtctcccatcttgcgtgttgctatccacgacattctcgttggtgtgttgagccaccttaatcctcaattttttttgcatctccatatatattaattttttcgcgaacgcgtaaaagcattacacatcaatatattagatctatatatatacaataaacttgtcatttttttattttctagtagggagtgtgtcatcaaccgtcaacaagaacgagaactcatcgcgtttagacttttggaccgagggagtagttcactacagtctactagactactacggatcagaagaactctgggaaaaaaaagacactgaatgaaatagacttgccggcagtttgacaccatgagttcgcaggccgtgtttagttgcaaagtttgaaaaaaaatcacatcgaacttttctacacacacaaactttcaacttttccgtcatattattttaattttctttaaacttttaattttaacgtggaactaaacacacctgcagtttcagacttcttcaggtccggatagaaatatcacggaaaatgctggctcattatcattggaccgttgggtccatgcaacgtcaagcagatactcctgtaaaaaaaataacttttgggtcactcgtgtaatactagcacaaatcaaagtttgcaatgtgaaatgaattagacgaggatttggattttggcacgcttaattaagcttagctgctttttatttttagttagcacgcttttcaagcagttaaacgatatatttcttataaagacataaaaagatgcttttaaataaacaaatttattttcatttttttataatttataattaattaatcgtacgctaataatgtttgtggttgtgcttgcagctaatcatccaacacttattgaccgaaaagaacacgccagaaattgtattgtcatgcagagagcagagaggacctcaagattatctgcattcttctttttttttcactttttttttagatgtccacgacgactaaatggttggaatgattggtatcttggtcgttttcatgtttccattggccttattcaaagccattgtggggttgagtatttgtttcttgcttttcttgtcactttctttaggtttcttatatattacttttcgagaaatacgtaggaatcaatcgttcttggtcgcctttaatggatttctttttgcacgatgaaatgacgtgtaaatctccatcataaatattctcagacagggaaggattcaggcctagggcagccctaggtctaggttcttgacttcatgtaaatttcatttgaatttctaaattttgtatgaatgagtggaacatcagaacaagtaatgcaaatgagactgtgttcggaactctgttttccaaactctcccctctcgtttttcgcgcacacgctttttaaattggtaaacggtacattttttaaaaaaagtttatatacaaaaattgcttcaaaaaaatcatattgatctatttttttaaaaaaatagctcatacttaattaatcacgtactaatgaatcgctctgttttctgtgcatggaagatgggttcccaacacacacctccgaacacagtcttacttgttcttagaaagaaagaaagaaagagacttcgcacattcaagcctcctttgaaacacggcaatttttactgatcc

SEQ ID NO: 49716 - DNA, 733 bp, Oryza sativa
ttcccccaataatccaagctccaaatgagacaatgtttctttggcataccaagttaggttgaaaaaaaactttgggatggatcccggtagtttgagaaacgtcagggttttctggctagctccataaagtggtggactagctagcttaggtttaaagcctcactcattctaattatttgatattaggtcttatatatagatttatagaatgaataatatgatgattatttaaaaaaatatataagatgatcaattgggaatgaagagattaagaccatttgatttgtatgaaaaatatagaaatttaggaggattttatttctatgaaaaaaaaatctacgaaaacatttgaaacaaaggatcaaatcatatcctatatttaaaattcctatctaatgggtaattctataggtactttggaggctctagattatctgtgagagcgctctaaccagtttcactctaaaatcgatttggttgggctttgactctatagaggtggaactagagttggagctttgtcaaacgaaaagtattagattagatggatagtatgaaaagtattagattagatggatagtattgtattatatccgatttgttatgttatggtaggataagattaattttcatctctatctctaaagttacttaaaatctaatccatatatatactgacattcaatacttacaacgtgtcagatgttcccagtaatcctttccctctactatc

SEQ ID NO: 49717 - DNA, 1114 bp, Oryza sativa
tatttagatttattaatatcaatatgaatgtgaaaatgctataatgacttatattgtgaaacgaaggaagtagtacggactatctatccagattcatatctaaagtagtgaaaaaactaaagtttttcatcatctcagtgcgccacatcatcaattaaatacagaccatccgatggaagaaagattcattttgaaccgttggatctggagtgtgtctgaggctcagtaaaattctattgtcgcttccatctcacgttcaagcaaagaagcacaggcttcaggaagcttcgcccatcttcctgtcactcccgtacttgccatatgtgatcagtgatcggttggttaagcagacaaggatgagtctcctctgatgtaaagtcagaggaactttgtcactgacatgtgggagtgacaaagtccctctgactttacgtcagaggagcgcgatccagcagacaaatagtctacttatatgatgtgtgttaatatgcatatgtaaaagtgtagcaagtcttcttttaagcatttttgttaagtactttctctgtcctatattaagattatttttagctcatcccatttatctcaaaataaattgatttttagtaataattatatcaaagtttataaaagtaaagaataattgcattggaagtagataaagtgataaatagttatattaggatgagataaagtagggatattttagtcttttgatgtttgtattggtatgtgtaggatgagtgaacaataaacttattttggaacatctgtattactaatatgcatttgtactaatttttttaccaggtatgcatatgtacaaattactccctttattttaaaatgtattgagatatatataaatataattaccttctcaaacaaactttccaatattatacttttaactactactgttttctttcgtttattatcaatacctacaaaatcgacgccatataaaaatagtcaaataaaaatctaacaatactactttattatataatgatataaaaatcaaataaaaagtcataacattaatcacatatccaaacctgtacttttaatccattcattagacaagtttttatgttttgatttttctcaaaat

SEQ ID NO: 49718 - DNA, 582 bp, Oryza sativa
ttcattcatgtattcctttcctttttatatgtatatctattgagttctttttccgtgttctgtcaggagttccaaacgaggtttaaggcccgtgaaaataaaatattccatgcgtacgttttcaaataatcggcagtgttcactttaaccaccgataacttttaaacggttaaaatatgatgctgaaattttttatgcttatattttaagctgcaatctactccatttcgatactatacattgacaatttttaatagtgtttatagtttctctaaaaaaaaggaagatggccggtccacgtctgaagatgaatacacattgttgattagtaattaatggagggaacacatgaataactctcctactacgtatgttctagtcaaagaacgcacgtgacaatttggttatcaacgtcaaatatttaaattggtggtggagctgatgacaacggtttttagagcacctgcaatagtaaagtaaggtgctctctatataaaacatgtacatctcagcaatagactcgattaatagtaaaccaccttaatagtatgtctatattggtatctatagctctctcatgca

SEQ ID NO: 49719 - DNA, 749 bp, Oryza sativa
tttctatataagatgtactccctccatataaaaagtctaagacatatttcattctttgtttttttaaaagtctaagtcttatttgtagtcactatgtggtaattaaattgttgattggaaccgaagtcattttatattagtacttattggtttcatgctcattggttttatcacatggtgaataaattaattggtcattggtcttgataaaaaagaaatatgccttagacttttcaatgatggagtatttggtcaaaaattttcctaaatgggttattatatctttttaaaagatttgtttcccataatgggacataatttgatttaatttgtgcgggcccatctattttatgtgcatttagctgaatatcttcgaattcgtacgagatatgttacatcgtgtatgtcttctcagactcatgacgttttccgccctacttctacaattactcgtgcttgtctatttgtccactcgtgacggacctatgtttttttttcttttgtcctgggtgtgctcacatagtcccaatcagagttattcatatacacgaaacacactaaaagatcttaatttatcaaaagtacattaattacaaatagtgcaaataaagtcttacacacataacgtataaacaatgaaaacaaaatatatttgtgtatgctttttatagcaaatatggcttgattacatcatgattagtgattcatttctaatcttaggaaaagctatatgaaggtgctaatcttta

SEQ ID NO: 49720 - DNA, 732 bp, Oryza sativa
tgtttgtccgttgtacagttggcgcgatctgacggttttccctttctgtcccagtaatgtttaattctttatataggatcttacctggggttcacttcttgtagagggagattcacttagttaatatgggccgcatcagtaaactaattgggatgggcatacgtgtgaaacatttcattcaggcagttaggtggctttctaaattgtatggagttctttttttctaccaactttagttaccaggttatccacgataaaactatgttatcctttctatatgtccttgtcctttctgtcattgaattgtgatattgccaaacttactagttgttgccattccttttctttttggaggtcgcttgcaaggtgattttatctgtacttctttagtttgagtcacccttccatgtcatcttgaatatttaacacaaagggttatcacattgttagtttttctaactggtaaatgtctcagcaccttcttagattatgattcctttatcaatcagtaaggtggcttgtatatagtggcagtggaaatgtgaattggatcgtctggattatcataaattgctatggagaatagaataaacaaatagaagtcatgatgccatgtcaatatgtttgttcatcattcgggtcatcaccttatgaacctgaagtctccttttcattgccttgtcatcagctaacactgcaatcaacatatttccctttgtacaatttattatg

SEQ ID NO: 49721 - DNA, 600 bp, Oryza sativa
tcccatgatccctctctgtattcagcggcatgtataaagcattttcagttgtttcataaccctcttcatcacggctgtgccgaatggcataaagaagaaggataagggctccaggtagcaaaagaacatctaaacaagctttaatggtgatctccttctctccaaccatgtagacaactgaacagcaacagatgaatgctgcacatatggtaagcaaaagcgaccagaatcgaacaaatgtagctccaagaaatcgaggtctgatgctaaaactgaaactagtaaggatcaaactgaatccttgagccaagatcacaagccaccaatgcggccggtaaatggaggtttcctgattgaagctaatccccaccatccacagtcctaggccaagattaagcaaacccaagcagccagtgaacactacagcagccaactgcagcagtgaattgaatgcgacaagctgccgcgcagatgctctactctttggaattttcatgagcaactgatgtacaagcgcaacagtgagcactgcaacaatggaaatcaccaccagatgattcacgcaagtcgaagaatccaatgtttccttcatagcacatg

SEQ ID NO: 49722 - DNA, 1255 bp, Oryza sativa
aattttgacgatttgagtatgccaatcaaactaatactcaccaacgagcttgattcccaattccacgtaaagttctttaggtgattatatatgtatatagatcgaccgagttcatgattagtactagtgtttagtaaataaatttactaagggcatgttcaaattgttttcaaaataaaccttattaaattttagcaagttgacatattactaaaataggatttttttcatgcatttaccaaaattggcaacaagctaaacgtagacatttttttaacaacttttttaaaaaatggtataattaaaaatggtatcattctgaacaacccctaacgttacttcataaatagaactctcttgatcaaccaccactactccataagtagaactctcttgatcaaccaccacatgtcataccatatactccctccgtcccataaaaaacgaatatatagaactgaatatgatatatcatagtacaataaatctggacatatatatgtctaaattcgtagtattggttttttataggacctaaaaagagtagccactggtgcgactgcagagcagagaggcagagtggtcaccggcgcaacgccgtgcattcatcagcgccactagtgcgagtgtgcgactgcaaagagccagagcgatgatgatggtgattggccttcaatagtcccaagatgagaccgttttaaagtttccggatccatctcaagatcctagtatttagtgtatgaattaaatgaatcgtaatagcacatgacctcactgctgccttcacccaaattatttgtttgcaattactcctacttgcaaggagtggtggaacgtatacatctatgtttctattcggaacaaatacgaattactccctccgtttcaaaatggttggtatcgttgacgttttagcacatgtttgactgttcgtcttaataaaaaaaatttgcgaaatatgtaaaactatatgtgtacataaaagtatatttaacaatgaatcaaatgatataaaaagaataaatagttacttaatttttttaataagacgaatggttaaacacgtactaaaaagtcaacggtgtcaaatattttgaaacggatggagtacctctctaaactatcacggttgctcgatttacccccctcccctaactataaaaccagacattttacaccctcaattgtttatattggacaaataacccccctaaacactgttttgagcggttttaactggagcgtgcacatgtga

SEQ ID NO: 49723 - DNA, 523 bp, Oryza sativa
aataaataataatttcaaaaaattttgaataagacgagtggtcaaacgttacaagcaaaaacttaaaaaacttaaaatcctctcttatattatgggacggagggagtactatcaaaagcgccaagaaatcggttttttacattgacatgctacacgttaattgagaacaagggtcagcaaaagatagcgccttctctttcataacaagtaaattcaaaactttgcttccttccagtaatatcctcattcaaatggcatagacacacgaagaaggaagcaaacacatctcttggatctcgataacagtaatatcctcatgaggttggtacaaaactttgaagtggttacaattagcacagctcactacagcatttgtttcaaaaggctactacagcagtattcttggccagcaagttgaacagtgaaacattccccattttttatgtccgtgccgatcagattcttggtgctgcattacatatcgaaatgtgcctcaggttaaaggtaggagatgattaacata

SEQ ID NO: 49724 - DNA, 578 bp, Oryza sativa
atcactggactcacatgtcataggcaccatatgccatagaaaatgagtggtaaatttattatcattacatcttaaaagtgacaaatagttaaatgattagttatgagccgcatgtagtttaatcaatactaaaatgattttgtttagttgtttattaaaaattttataaattgtggaaagcgaaaatatagttcgcctgcacaagggcttattaagccatgaagacgctcacactaaaagacagttatgtgggtaatgtgaatttcattattatttgccctgagagcgtaaggacctgaagcacgcataacctagataactactctctcagattaaggtgtcaccaaactgtggattatggagtaggcttttccgtaccaacatcaaactaaggtcttgttcggcttggaaaaaaaatgagagagaataattttatatcacaataaatgttgaataaatcttcaactgaatagcaacttcctgtccatcaagttcacctgacgtcccttaactttacatcgaatctatttgaatagccatattttttttccttctcacttacatgtgggccccataac

SEQ ID NO: 49725 - DNA, 630 bp, Oryza sativa
atttagtaccaatttgcttactcccagccaccaaagcagaatcttcattgaaaccaacattcccttgtcatatgataatactttttgacattcttttccctattcgaaagtatgggatgttgcaagctattaaatacacccataaatcaaaggtatctatctgaattatttgaatgagggtgtttggtttgtgcaggcattcaaaaaatcgagttctagccaagtcgaaaaacttacgatgcagcgcgatgtcgtcactgtggagcttaagtcagccaaggagcgtaacgctaatctagaactgcaactctcagaacagataggccgtattgaacggcttctgtcgatccaaaacagtgaacctccacatttcatctgtcctatatctcaggtgagcggaaaacgatatttcaattttcttggttcatgctggtaatactttttttccccctgaaaaacactggctactgtaagagtataatctttgtaccattgtccaatgactgaccataacattacttacatacgtggtcaaaattccaggaagtcatgaatgatcctcactttgcagcggatggacacacctatgaagctgagcatatcaggaaatggctcaacgatggacatgac

SEQ ID NO: 49726 - DNA, 7272 bp, Oryza sativa
tgcagcccgccactcgcctctccaccgccgcccgcttcgctcgcctctccgctgccgctcgtctcgcccgcctcgtccgcgcctccgacgccttgtccgcctgtccgccgccgctcgcctcccctgccttgtccgcctgtccgccgcctcccgcctcttcgccgccgctcgcctcgcccgcctcgtacgcctgtccgccgccgcccgcctgcctctacgtcttgtcgatgccgtcgatctcgccacgggacgcgcggagtggtatgcggcgaggcacctcgtcgcccgcccccatgcgcgttgccgcgacgccgccgtccgccgcccgccccccgtgcgccatgcccgcagccgtcttcgctcacttcgccgcgacgccgccgtccgcccccgtgcgccggctttcgccgctcgccgccgctcctccgtgcctcccgccgcgccgatagagtgaagaagtgaagagtgagagagagaagagaggaagagtgagagagaggggaaagtgaagactatgacatgcgtgtcccacaattttttttattagaaaacgctgactgggatgccacgtagaccaaaaccaccgcggattggatcgagggggggtaattcgtccggtttgcatagtttggggtgaagaatgtctggttttgtggtttaggggggtaattcggatgaccgcgatagttcggggggggggggtaattcgtactttttccttgtaggtgtcggttaattaaaaaccgacacatactatatattataggtgccagtttatttttttaaaaaaccgatatctatgtgaatcaagccgagatggcatcggatgagccgaccggtggcccccacacgacgagacgagcatcggataaggttcgacgtcttgctctcatcgtctattcgtctcattccctctctctctctccctccctctctctctctcgttcgctctcttctccctcgtctcgctctcttctctctcctgcacgctgccggcggttggttggcggaggcggcagcggcgaccgcgtcctcccctcggccagatccgacgggaggggaggcggcggcatgaggggaggcggcggcaagtggcgtggctcacagccatcggcggcggcggcggcgacctcccctccgccagatccggcaacgacaaccatctcctttgcttgcggcaacgatggcggtgggctccccacgggcgacggtgagccccccaaccatctccttcgcttgcggctgcttgattctaatgtttgatgtgagatgaatgttgccaaattttgttgtgagatgaatattgcttgattcaaatgtttgattcagtgattcaaatgtgattcagtgatttattttgtgagatgaatgttgccaaattttctttcttgtggatgtgggaggagcgactgctcggctcgatgcgtcggctcaatcgagccggcttttttttattcctcgaacctaaaaggtgccggttctaaggatctggcacctttttgatttgcaatctgtgccgcctctcttgtgccggttgggaaaactggcatcgaagatggtttcccaaccggcactattccccttttctgtagtagtgatgtatccctaatcactaaaatcataaatgtttcaccacagacaacatagccaataaagtatgttttatttcgctatggtttgtgtaagtattactccctctgtcctaaattataaggcctatatttttcttacgcggtcttcaatgacatactatgacaagtattttattttatgttatgttctcaataaatatgaaattagcatcataagaaattacttcaaaatattaatctagtgatataacatgcataatacttagtttagatatatagttagtatgattattagtaaaaaaaaatacaagttcaatttttgttagaaggggaggtcttataatttgggacggagagagtatatattgtgtgtttttgtttgcgtaatcgaaataaaaggttcaccacgttaccgtcacaatttctgttgtactactcaccactgccactgcccatgttcgttaactgtaaagatcaatagaatggaggagattacaatatcattcacattcgctttctactactctgttcgtttcaaaatggaggagtttcagctggacgacacatatactaatattacaaatatatctgtttagattgatagtaatagaatatatcctattcaactaaaactttttatattttagaacgaatggagtaacattaaacactaatatcctgtttggagaactagcacaaagttattttgagagctattttttaacataaggaaatagccctcaaataaaatagtaggcctatattgtttagattcaaaggttattttgagagttatttgatatttaatacacgaaaaagcctctcaatgctgctgtgggaggggcaccgcccgcaacttctcccaattaacctacgcacgcacgcacgcgcgcgggaacccacccacccctccagtctcagccaagccggccccacaccccggcaatccgacgtgggccaggtcaatcggatgacgctggctaggtggagcggtggtacccaaaaaaaaaaaggaaacagagaagaagaagaagaaaaagagaagacagcctcggtggacgtgcgtgatatgcgagtgcgcttctcactcgcaagcgttctcgcgtggcgcccgcgtccccgctgccgcagccagccgccactggtgtcgggcgcgaggcgccctggcggtgggacccacacacggtggtggtggtggcccccactggacagtgacagtgacctggctctctcgctcgatgcgacgcgacacgacggtggcgatgcggaagctttttttttttttttcactttttcaccgccccacgtcgccgcacgaggtggtcggtctcggccggggactgagcaagcatctggttgttttattatgggggcgtttttgcctgtattttttctttttttacagtgatccgacgacggcgacgcggtggcggaattcggcgggatcgggtttggacgtttgctcgccggagtttattcgcgcggcggcggtgggtggttaacgtcccggattcgtacgtgtcggggcttacgtatatagatgatcgaacatctactaagctatatactactatggtactactacttcaacggtcttaagaaaaggttgtggatcttctgtcatgcacgatcaacgctgatagagaaacaaattaatagtatagcacactactagatctaaattatctattgtcaatataatagccagttcacacaatacttgcttactatactattaatacctggtctcacctgtcatacacacattatgtatgagagtccgtgctatagctggctacagatctgtagtccgctgctcttctctcttcctttatctctttaaaatatgtttatagctggcttatagcctgctattatacctgttctaataagatacaccctccgtaaaaataaaaactgttcctatctacgaagatacgaagattcatggctaagttgaaacttttttttgacggaagcccccatcgtttcgtttattcgtggaataagctaaaggacacatttgtaaacgaaaaataatttgtgaataaaacttttatgttcatgttcttagtgatctaaaagcaaaggccgaaaaaattcgataaaagaaatctcaaaatcagctctaaatttaaggttgaaaatttaaaatatggctgataagcataagcataaacgaaaagacgagattcaaagtatactccataaaaaaaagaaacatgaagtccgatattctgtatgatcttcaatatgtgtgaaaaattcattctgcggtagtgtacctgtagaattagtataaggccctgtttagtacacaccaaattttctctaaacttctaactttccatcacatcacatctaaaacttttctactcacataaactttcaactttttttttctagactactccctccgtccaaaaaaaaacctaatcctgggtttgaatcaagattgagttttttgggacggaggaagtaccaactttccctaaacttctctccaatttcagaaactaaacacagcctaagtgtacctgtagagtagtgcccatttcaattctagattgatttattttgggatgtaatgagtatattacattatattacactataaacaaaaggatatgcaaattgtcttttcttttaaatgccaaaataaaaaaagatcgggattggttagtgcatcaacatcttcacgtagcattcgtttcctatttagtgccaccgaattttggcacttttgcatggacaacttcattttccaagcaattatctctacacctttcttctccaactaatgtatatagtattaaaaaaaataatatcttcatatatatatatatatatatatatatatatatatatacatcagaaaaatcacaattataccatgatatcagtggagctttgtagatataaagcttttgatatgatattctacacaactctaccaacaaggagtcaccaaaataccaatttgtagatataaagcttttgatatgatattctacacaactctaccaacaaggagtcaccaaaataccaaagcatatctcttccggccattgacaatgaatattgattaggttccatctccttctgatgtgacctaatttggtcctacctccaatatttgttttcatgtgcccttgctagggtgaccatcctactttggttcaatgttggccgacccaccaaggtcagatgtgaccaagcattgcgtgtgcctaggtcacatacctgtatgtttattagtaatatttttttaggctttagaacgtccaagttttatgtacgtatatctcaatgtactgattaatgtagtgccataacaaacacattgttgagtgtttgccattttcttctatttttgttattgctagttgatttgtaacatactaccaatttagagtgacatataactataatagtataatgttattaaaagaaacacttctagttcagctcgtttgtgcggaaaaagggatattttgggtaaaacaagagaacatggaatcatgttaggcatagaaaaatttaggacgtactactttagaacaccgaagaactctatttcttctaatatattgacgtgcaatttttttgcgtattaaaaaaaaactttagaacacaaaagaatggtttttacgttctgcgaggatcaaactgattcatgtaaaatttacactccagattgccttgatatgcaaagtgcttatacaatttaggattattgtcacggattatgtgcaccatatcttgaaaaatatatttatctgaaaaaactttcttctactgcattgattaaattacttgttttgaactatttgataagtttatttttataatatttattctatctctataattaagttgaaattcgtggcaataatcaagtgaaaaatttgtttcatggccttaccttaccttacagtgtacagtgctatcacaatttttttaagaagggtctccaatcttgagaaccactgactttgggtgcgaaatttgtctgcatccactggctgtgccaactgccaagtaagcctcaatgtcttaaatgtgcacacgttttctatagtcaggttgctgcacattttggtcatcagtcatcacatcttcatgtacgtaatgcatactacaaaatagatttatttagtagtgcccctttctagtgctcatgatgattagcagatgaaggtagtatccggcctcacctacatctggggcagaacagtgtaaagcaatcttaaattaagtactccgacttaatttaatgaacatcaactaatcatcaaagaatgaggacaaaggtgtttgcctcaaagcatggcccaaaaaagttctccctttgaataaaacagtggaaaacgatgcaaaatccaaatggcatatattcttggttaattcaaatgcatgggtgagatgccttagttctcaaacaatataaagatactgacacacttggttacaaatacattaaagagggtatttctattcagagatgtcatgactttgtatttgcccatactccatagcgaggcttctattctttgggctgtgtgcatactaagttggtgcagaagttatttcattacttgatgaaatatccattatattaaaaataggattatcatttttaatttcatgtttttttttgaaagtagccctgagatttgatagagatgttctttcaaaccactgcttgttaacagttggatctgtcaatgtttttctcaaggacacatcataagatacctacaaacaaccgatgaaggatacatcaactgacttagaggcatcacccctttggaatatatggcactcttgattcgcatttttttcatgtcccttagctaatggaattgagtgcagtgtatcaggcggatgagaaatgcgttgatctgttcttgcacagctggggtgaacatttttctaactgcgatctgatagtagtcttctagaggatcaagcccaggtgaacaatgttttatgatgtttgattgcgacaatatttgtaaaaaataattcagagcaatacaaatggacaaaaagaaaactattacttaatgggaactgtccatgcatctacctaatttcctgcaccatctaactaatttaagtggctatttccactatttaattaggcccctttagaacacacaggaaaagtaaaagaaaggaataggaacaatacattattttgatagaaatatatatgaaaaaaaagaattacataccattttgaaacctgcaggagaaacatagaaatttaatgagagatagactcaaagaaattttttctaaaaaattatagctcttgttaattttcctctgaaatctatacgcattgagcgtaaggggtttcatatgatttggaaagctcaataatcctttgtttcaaagtgataaataggaaaattttctataggattagaatgctacaaaatttttgcataaattctttgtttcaaaggaggccttaacttcaacggcctaaatacatttttcactatttccacagagattttaattcctacaagaacaataaaagggaagaaataaagaacatcatattttcttttgaggaatacgcaaaaggtattcgtatcattgcatcaagacttattctgctactatatttatttatttagcatagcagttggcaatgcaggtgcag

SEQ ID NO: 49727 - DNA, 597 bp, Oryza sativa
tccatatcagtacattcatttatacataaaagatatagtaatgaaaatcttatagtatgatattattctacataagatgtttcattctatttaagcatgtcgatgcttggcagaggaacaaaactaatatttcgtcctacttttgaaatggagaaaggtagtataaaaattgcgatgctttatgtttatcttgttagtgtgataataggcggttgtttcacctatattaatgaggtaaaatgatattgacttaatttgttaagctcaatgcgttaaattctatgataataatggaaattgagtgaaacatggcgtacaagcatgtctagtttatattggtgtgtagaaaatatagattggatgaacattagcgacggtttcgtgttaattaattagcgcaacaatgcgcgagagtacatatatatgcgtatagaaacagatcacccgggatcctaaatacaaggaataacaacttatctctaatctaccgggaatccataaccatatgcataagataagattacaattagttgtagtttctaacactccccctcaatctaaacttcggatgttgagattgtgcttgaactcttcaaa

SEQ ID NO: 49728 - DNA, 1005 bp, Oryza sativa
  unsure (1)..(1005): unsure at all n locations
cctggtacctgggttgctactaggcaccagacactggtaccaatatttgtgagggctgatactggtgcctgggtttagacatgatacctaggacaagtctggtacctagtaccagttactgccaggtactagacttggtacctggtacctggtacttggggttacaggcctggtacctgggttgctgccaaacactgataggcatcagacactgtatcagggtggcatatctatgtggagtaaaaaaaaatgtgtcacagaacattgcatccacacaaaccaagtatctttgaaatgaacacataaaagtgcatgattttataactgcgacagctgctgtcattacatcatgaagatttttcacattactgttaaaaaacaaaaacacaaaaaaagctatcaccacatggtcgcccccctaggtgcagtgaacaaaagcgtcaaatacgtgcttttgacaacgctggtactacatagttaactatagtggactntacatagttaaaaagcaaccatcgctcattttgcacgatgtggatgtaggtcattgaagcgatgctatatcaacctgtgacatagctgcttgcgataggttggaatgcctttctgaggaaaaaaggaaacaatatgagaatccaatgaggtttatctctgtatgaataaaaaaacccaaaaacagaaaaaaaaatggatttaggtaccaagaccacttacagaagtgtatccaacaagacttcggccattgtgacactcgagcattctcagaacgcagaacccgcaatcatgactaggtagagaaaataaaaaaaatgtaaaacttataaatgtgtacaggaaaaactatggtgtaagttagttaaatagaacaaaattgttgatacttacagttctacttggtaaggggtttcagggtactcgactgtggataagtcaccaaatccaaatgggctactattcgttcccgtgtcaagagcaacttggaggttgctacactgtaagaaaaaa

SEQ ID NO: 49729 - DNA, 611 bp, Oryza sativa
atcagggggctgctaactacgcgcgtaagggcgtgatggaagaagacggtgacttggggagtctgtctccccctttttgaagagtaggatttcagcctccttgtactccttaatcaattgcgcttgtaaaactttcgtaggttcaaactgcttttgtgtatgcagtcatcaccttcgttttctttagcatgttgattttgagtactttgttgtcgtcgtagagatgtcgacgtcgaggatgtccagcagcgcgggcagcctgagtcgccggtagtcgtttcggcacttgcgctcgagccatatgtgctgcaggactacgtagatcagaacttgtccatggaagcgagcatggcgacgacttccttaggtttgttctttggtcttcatctcctttgctctttttgttcggatcgacttaatttgccgtgttctcggaagaggggcacgacttgacttagtcatttccctgttgagcagacctcgagagtgcgttggccgaccgagatcgtcggatccaatattggaggacaaagttcgaggtggctgaactcgagaggactatggtagaagttaagaaggaccgagccgtagaagcactccgaggtcgcgag

SEQ ID NO: 49730 - DNA, 532 bp, Oryza sativa
ttttctgaccgttactgccgtgctttaaatactaaccgtcaccctcgagaaacctcacaccgtgacttctgttttctctttcttctccggcgactcctccggcgcaaaggcgatttctaggcgacttcctcctcgacgagatctccgcccgcaacaatgtcgtcttccgccagcccatctggtgcgccatcagccgaatatgctgaggtaagttctcatcggctaaatccccttctttagcagcagatcgatcttctcttatctcatattgctctcttcctctgaatctctttggatttgtagcacctctccaacctagttgcaattcccaacctgtcgcatgaaaaccactactttctcggcccagtcggcaatccagaccccgccgagttcactattggtgaaaccaataggatccccttcagattaaccaacccagatctaggtcactagaagaataccttcaagtcctggccgtctctagagaaagttccaccagaaaagagctggactacatggttcaaacgtgtat

SEQ ID NO: 49731 - DNA, 698 bp, Oryza sativa
ctgataatttccacattcaaggaaaataattaaaatgatccaactttaattagtatcaactgaatgtttgtagacttggagttctttggaacatctgttactgtagaacattgcataatgtaattcatcattcatttatcctttttgattttttcaggagttttcaattgttcatcatttatcttttctatactaatattttccttttgagtttcagtttaaaagttttttttcttccgaattctacttatttagaaattttctatctttgtttttccttttttcttcaattatagatttttcccttctgttgttttttcccataaaatggtttttctttgtcgagtttggtttcaaaaggcagggagagtggtgcaccgatgccgcaacgatgagcttatttggtttgtaaccatggaaaaatatttgcaatatgggtaagtttatgtcaatgccaacattttgacaatatttatgtggtattggtaagtattgttagcaaatcttaattgcatccatgccattgtaactttcacaattttgatatataccattactgtccggggattcctaacgctggcccatcgttaacatgtgattagcactaatgatgattttgaagtcaaaatttgaaatctttcaactcaaactttaaaaaatttcaactggaaatttaaatttgcaagataaattttgaa

SEQ ID NO: 49732 - DNA, 678 bp, Oryza sativa
ccaaatgggagcttcttgattatcttcactggagaggcgggtggctggaattcaatacctccggttgggaagattggcaacgggctgagacgaaacgatcgtgactcggagtcgtcatcatcggtacggaatgaacacaactcggagctcttcgcggacacaaaagtctccatgtcactctgaccaccacctctgttgtcaatgacagcattgctattggcagcttcagaacgtgatctgaagaacaccttagagatgtggtgtttctgccccagcgatgacagaagcttctttatcctcctcttgatctccttcctcgatgcacaaacttatagtccaaatgtttagatgttttaccagtgaaagtcaatacttcattctaaaatcaaaagcatgacagaaaacccaccatatacactggcctgctccttcagtatggaagatcgttgtcctccacccgcctgcagcgcagccccctcacatccttcctccaaaatacatcttcatcgtctccatcaccatcaccgtcaccatagtcgctgctctccttaccttcccttacatgtccatccctgcctcgtcgctcgccgcctccaaatcttcccttgagagcacgtaacactttcttaatgatcatcttcgactttgacttatcaaccaacctatgcatcaactttt

SEQ ID NO: 49733 - DNA, 744 bp, Oryza sativa
aactccataccaacagtagggactgcaggttgagattggaccccctcgtctttagtctctccatcttcacgtccaaagtcatcttgtatttcaaacccatcacctgtatcaatctgatcaatgctcatggcacctgtaaacagcccagtttcaagcagtacttccctcaacatatcatcatcatgacttgcttccctcaacacatcatcatcatgacttgatacttgctccatctctctttcaacacaaacatcatccttgtcactctgttgctctttcatacttctttcaccaaggacatcactcccctcatttggtacctcttccataattcttccagcagatccaactgaggaattcattctgcaggtaagaagaagggtcagtaccatattctgactgaagaccgaagatgcatcatttctataattctgttttctgtggacagtgtatgtcctacataactcagttgagaaaattgagatagttttagatagtgtgatttcagttgccaattcacatgattaatacatggtaagaagcatttgtttcttttttggcaccatgaatcctgctagtacaaccatgatatacttgctagaatgtgaaatgtacctcggtttttatttttgaaccagtttttatacatacattcagcatttcatttcatgttcaaaccaacaaattgccgctaatgatgaatgcacaacatggtacacagtggttgcatgatggcactgcatt

SEQ ID NO: 49734 - DNA, 1066 bp, Oryza sativa
tttcaaacatttgtattcaggtaaatatcggttttgtggtaatatatgagtaaattggacatttcaaccagcctaatgaaagatggctaacagttttgtaatggcaatggtacaaaaggaagaaaaaacaagtttctcgatggtatatagaagaatggggtgttcatctatgtatatcattggcttctttctctcataaaatttggcaaattttaaaagggagtatgattcactgttaaaaaggaatacaaagtatggtaaagtaaaggaagaacaagcaagagaaaccagcagatactatttttttaatagcaatgacaatttaaataagtgatacaaaataaaatgttacaataaatgtcaaaatatcaagtacaatgtccatagcaattctaatataaatcaaaaatattgttgttgtaaaatttgtatatactataatctacagcgtcactattagttaagtcgagctgccttctaaaatagaacattaactagtttaaattcagctatatctggataaagtgttcgatatctcattgctacattgtcttgctactaccaacctttacaagaaatacgcatgagaaatataactaatatatacagtttaagaacaaatatgttgaccatttttttcctacatactggacaatgttggagaaatctacacttgaactacatgctagtcagtttaaacctactgatttactacaaatcacaggctcattgtgcgtctccctaattatgcgtatgaagtagaatttcagctatcccagatcttacagagaaactcattagtggagcgtgcagaatcgagttactggaagtacgagaaatgtgcatactggaaacaaaacgccaataaacctctgaaatcgctcgctccaatcaattaatttcctaccaggacaacaatgccaatggaacactgatcgcgttgcggctaagctatttcacccagcggaatgacaatgacgagcagcgagatctcgcgccgaggagcaggagcgacgggcaacaagcggttagatgaaaagctcacctcgccgtgggcaccgagcgg

SEQ ID NO: 49735 - DNA, 938 bp, Oryza sativa
gtccttatattttagggcggaggagtatatctcaaatgtgtgtaacagttagcatccgactaattgctaattcatttcctctgtttacctcaaagtatggctaatccatgtttttagcaataatcacattacttgatgtggtacagagttttttttggcaattattgataacaaaaaataatcatcaatgagaaatcattctgctaaactattacatttcaaacatcaccatttttagggctgtgctttgttaagatatacttcattggccaatatttcccaatctttttatactatttcagggctcagccgttttattgccaaaattaatattagcctttgttgtttatcttgtcattcattcttgtatatctcaccatttattgtttccatatcaaacaagaactcaaacatatctgccaagataatatctattaatagcctaaaaaaattttctatttcccttggctttatcctcatcgtttcctccacctacatgtacatctcaccatattctccccaatttccacaaaacaatttagagagaaaaatacagatcagaagaatgcttcaagttcaaggctctcttcgtgtccacactttctcctctgctgccatcgtccatgccgttgaaacctctgatgaagattctgatccatcccacttctgcgccgtgccgcagaacggtaagaaggcatcgaggaaggagatcaagaggaggataaagaagcttctgtcatcgctggggcagaaacaccacatctctaaggtgttcttcagatcacgttctgaagctgccaatagcaatgctgtcattgacaacagaggtggtggtcagagtgacatggagacttttgtgtccgcgaagagctccgagttgtgttcattccgtaccgatgatgacgactccgagtcacgatcgtttcgtctaagcccgt

SEQ ID NO: 49736 - DNA, 580 bp, Oryza sativa
cgatgcttcaccgcactgagcaaggaatcggctgatgtgctcataagtcgacacgccctcttgtcccgaaaacttagagaaatctggaactttaaaccgattggggagagggactctttcaaaccactcaggataaggctgccgatacaagtttccattctcttttagtttaagcccaaattgttctctcattacatcagcaatcacatcggcccacggtcgttgctgagctgctccttgtggctgttgttgcataggctcgaactgaccatattgagatgcgaactggggctgagccaatccccctaattaatatggggcttgcggggaaggaggctgatattgatagctcaagttactgtcacaccctaaaaatcctaaatatataaattgttgtttaattggaattattagaatttattttaaaagtctagaagagaagatctaatttttaattaataaattccaatataaaatggggccagataaaatttcattaaatactttgcttaattctataattcctagatttttctgggatttatttgagctaaggaagtatttttaataaatgaaattg

SEQ ID NO: 49737 - DNA, 565 bp, Oryza sativa
cttaattatacttctcagagtgcttcccaatttttttttgtatgcatatctaagctgcatttactcatgtctattgagtctagcgctctgctggcggagtacgcaagtgctgttcttggagttctctcagctgctttatatggaaggaaagttaacatatggaagaaggtaaattgttggtattctatgagaaactagtattgtacatttgtttttgctatttttatttactgaaatttatcacttattaggaactaagaactgatttgtacaaaaatgcactttggcattgagtatcgtctaagcactggtatgataaaccctttttgtgataaaatatatggagatgactgagtttgtatgtaagcacaagttctagcactttgttatatgccacttggccattaagggtgcatttgcctggctgaaggagcgagtctgtccctactgatgcaaaaatgaggcacatgcgtagctcagcagaaatgattctcaattaagtttcattgaaacctgaccagggcgagtgtgcatttgcccacatgggactgcaatgcatgagctt

SEQ ID NO: 49738 - DNA, 1600 bp, Oryza sativa
atgtgtagcaactattgaattttttctgtgagttttttctgaatttctcaaaacattgctcctatactgatataaaaaatgaagtagcaagtcagcaaccagtaagttcttcattagatgatttttcacatctgtttttcctggctttgtagattggtgggctcgctgctatgctggtagcatactatctcttaggaaatggatgggctacaagaacacattcaccactatgtatcctattttgcagatctgattctgaaataacacgctgcaaaattctatcttttttgtcaattaagacttccatccaaatttcttatgaactcaagtaaatgatgttgaaaatccctcactttgtatagatagctttggaagtgaatcactggagaagggaacacaagttattggaatgaaagaaatggtggtcccacttactgctggaattttatctgctttgaggagagtattagctcggcgggtgtcccttaaggtactcttgatttcattaactttatcaataatgataaagtgttaattattttccttaagaaatactatagttacaggcagtatccatagtaaccaggatagtcattctacagaaggtaattagcatgcaacgagacagatcattttctgcagagtataaaacattgtggaacatgaacatcgatgaaatttctatcgattcaatatgcaaccacatctgatatgcactttttgcaatgtttaaagttctccctctggcacctacttactctgttgatgatatcgtggaatttgaagtattgcggcaactgtttctcaatatcagaatctacaacttaagtgtacttaaagtatggggcaaatcctccatacatctttatactatcaacttattttgagtcgtaagcatagtacaaaaactcggaccggagctcaacccggtcaaagctttcagttcaccggtacggcggtgaaaccggccggtctgccggttcatgtgctgaaccgtcagtcaataaagtgatgcgtgtttttgttctaactccctgtctgcgtgcgctattgtgttttttttgtgtaaatagcacatctgagatggtaatgggccttgatttggcccaataaggaatgtacagcccaaaatttcttgtgctgttggtcgcgacaggtgccagtttaatcccgattcatggtaaaaccgtgcatttcaggcagttcagacttcagagtaggtcaattgcatatccggtcttcccatagaaccaaaccatgggcaacactggttccctttttttccggttggatcgccggtccgatctggtttttacgctatggtcctaagttacaatatagaatttatatgtgaaattaagggaaaaagtctattttacccccctaaactttttcgctggagcacttaatcccctaaacaatttctcggctcattttactcaccgaactattgaaaatgttgtcttactccctcacgatatttatcttttttgtttatctctatataggtcaaattttgcaatgaaatttggtgggattgatatatgcattataactaagtctcaacaatttattggcatttttaatcgctgtttacggg

SEQ ID NO: 49739 - DNA, 520 bp, Oryza sativa
tacagatttatggtgggtgtgggaagaacggatggacgaaacttcctcttcttaaatggctgagaacaaattaaaagcaatgtgattatgcatattgtgttccactttcaccattgtatgataatgttttggtaggatgttagacataatcaggggcagagatacagtgtattcatcgtggtcatatgacctcgatgacctctagagaaatctattgataaattgctaagccaatgaagataaaactatgtattaagtgagattggcatatgatgacaccaatgataccgatgaactggatctgtccttgcacttaactattaccaatcgtagcaacttagttacagagatcacttcaataaaaaaaatgtaggaagaagactacttacaatctaataaaattaagaacacaaataactaccacgattaatataaatcgtttagagtgactgaatactcaacaatgaaagctgggaaatttaactatttgccactattaggttcggtaattattcaaatg

SEQ ID NO: 49740 - DNA, 539 bp, Oryza sativa
ctgcagcccctcaagaagagtttaaacgccgagcatattgtaaatggcatgattctcattctcattctactaatgattgcaatgtgtttcgacgacaggttcaatcggccatagatgaaggacgattgaagttcactgatggctccaagatgaagcttgatcatgatcctttttcggtgaatacaattaatttcaatgataaaaaggtgttaattcggccggagcaagcagaatctactaaaggaaaaggagtggtcattggcgagccaaggcctaagatgatagtgacaaagaaaccggaagttagtgtttggaaggagaataagagtggcgcttcaacttctaaagcccctaggaagaccaaagtgacttttggtatgcttttggagaagtatgagaagcaaggtggtgagagggttcacaacaaggggaaaagaccaagatcacctcctagggagcgatttggtcattcaccaagacggtcgcattcacctccatatcattatccacaagacatgtcatggggttcttatcgaatg

SEQ ID NO: 49741 - DNA, 526 bp, Oryza sativa
cccgatttcgccggccgacgtggggaggtggaggtggagagagaggtgggatttgaatttcgaatcccggccgtctcgggtgcgggcacgggcgagagggatggggagtgggtgcgggagacgcggcgcatgcgcgggcgtggccgacgtggcccggaggaggcgggagcgtggatgcggcggcggttgcgggcgcggtggcggtggctggaggttgggggaggacccgacaggtaggccccacctgtcagtgaccccgggagagagagggaggccgccggctcagctgggcctcggcctgtcggccggcccagcgggagaaaggggtgggaagagagaatgggccggcgacctattccgaaaagaaaaaggagggaaaaagaaagaaaaaggaggaaaagaattttccagggaattaaatattgcatgtgctcaattttaattggtaaaattatttctagggctctgaaaattcaactaaaaatcttgttagcaaatttcgacatgtagaactcaagaaaaattc

SEQ ID NO: 49742 - DNA, 635 bp, Oryza sativa
agccacctggagcttgtttcacttctccatctttggaagaaccagtcccaggactatcagcaaccacttttattttatacttctgaacaagtgtccccttgcgggtctgcatgaatgagttcagaaactgatcccgtgcctgctgcagcgttgcttcaaactcctccttctgctcaggtgtgaatttctctggatcgatcggcatgacgttgtcatcaatgatgtcagtcaatcccagcttcaacgccttgcctttaacggagcctgggctagatggtggtggtggctgtttctcggccatgaggaagaactgacgtctgacttcttagaggtcccaccaggcgtgccaaaagcgtgttgacagaaaacacgtggcctgggagatctgcttaactctagtgcaggtccaaagctcgccttcggatatgttagcgtgccagttgatttgatcctgtaatcaacaagaaatagaagcaaagaaaccgtggttaaatctataaatgatagctgatcagctagatgccgatgacatatcatttatctttgagccgatgtcatctgtgtatcgatcggccgccatgaataagtaaagaagaactaaatctattcgatcggctgtagatattaacgatata

SEQ ID NO: 49743 - DNA, 1115 bp, Oryza sativa
ttaactcatgagtgatattagtcttctccgcggacgacgactcgatgatcagaaaagtgacaccaattagacccaaaaccctcccaattccccccaatccgactgagactgaaccacaacgattcatttttcagaacacttgatggttgtgtcaggcattgactgaaacaaaatgactcgcgtatggtttggtttagtttcgctcgtactgttcgatttgtttgcgaaatcggtttcgttcgtactgtttgttttggtttctactttgtgaaatcactcgtttgctaaatttttggtctcgaaatcgtttccctcgtccggatttgtttactttcgcccgaacgtgtttgtttctcttgtacggtttggttcctgtgcgaaatttctcgttggttgcgaaatcccatattacggatttgatctgaattgattaggggttttaaaatttgatccacaggaatggccgatgtcatcgacgagcccatggtcgaggcgttcgcccgactcgccctgaaggcttccctcgctcacccgagggtgacatgggggagggcaccccgcaagtattttgggaggaatcgactctggcctcgcccccagaatccgcctggagctcgtagactgagacccttctcccgctaccccttcacttacatacccgctgtgagtttatctagtgtgatttgtgctgtgagtttttactactgtgatttgtttgttatgcagatatttgggatttattgatttggttttacatttgatggcaatatttaattgatattctgatttcagtctagttatgtttgacattgatatctctagttcaaagtaatatagacagattacaaactatttcattgttttttttgtccaggtttcagttttaatattctcttacagcgcactgtaacttacaataaaaatcaacaacaattcagtttatataacatgagtttataaaaatcaatagttattgagtttacagggcatgaaagctgactggtatcacaaatgtactaaaaatgaaaagtttatataacaaattaactaaaaatgggtatatgtgagtttatttataaatatgtttgtgatttagcctttggttctatgtgatt

SEQ ID NO: 49744 - DNA, 1133 bp, Oryza sativa
aagtaagtgtgcctgacgtagtgtttattgacatttgggaatctgtacaaattgtgttgttttgggcttaagaacaatgggtagatacttcacattataatcatacttcacatttactaatcaaacggttcaatgtaaaagttactcatgctcaccaatttcataataagttgattactgaaatgttgatttcttctaatattttaatgttatttaaaattggcagaagaatgaattttaactctttccccttgtgcattgttcgtacttttgatctgcttttgctcctgaatttgatctttgaagttttcttgtacctgcaactttatcactcttctccatctccatctttttcttcttgaatagatttgttgcagagaagcttctttcttcggtggatctgagatttcctctaagataattgattctaaatagatctggattttgatctgcttgcgtttttttatctccatctttctcactcttctccatgtccatgcttttttctcgatctggatgctgtattttgttgttaattggtttttctagagcaagtcacgcgattgtctcctcttcttggtagccaaattctctatctttgttagtgttttgggttttgtatctgttgttagttaagctgatgggctaaatttgagtcacttctatattgttttgggcctttaaattgactttaatcttaatctcggctttcatttgatgtaaattttttatttgggctcaatctgggccatttgattgggtcgggttgtgtatgggccctttgaaaatgggcttccaaacctatttgtgtttgtttttttttttagttgtcaaataatattacctttgtatattgttttgtttttatagttcaatgagtacttcttttcagtgccacaggtgacggaatgcttaaagctggatgctctcaataaactcttttatcgcaaattaaatgaggttttttttgttattttaaaccaataattaattaaatgtttattattggaagtgttttattttattttttctaaaattgttttctgcttgtagatcggaatgttgagaaaaatcatttatatgcgcaaggcatatattcctaaaccagctaagaaagaagcattcctcagacg

SEQ ID NO: 49745 - DNA, 655 bp, Oryza sativa
agtgatgtctagtgtaatgagttaatattattaatgctgttattaattgaagcattgtgcatatgtgtttcctcttgtattgcctccatatgattgctgtgaagctaccaagatttgtgtttgtcatgaagccgccattatgtatagtataatgcctcctttggttacacagttttcgctctcttataactgcgtacatatcaatttcatcttttatttctgtactcagtaatgaatatctgtggttgattcagtgtagttgatgataggaatgctggaatagtgcagtacattgtacagatgcaaatgcctgtgcattgtatagtgtcctcttctattacctgatcaaaagcaggaactttgagctctcttgctttgtttggatgtggtgagtgattgagtgccacttatttgtttttctgggactgaacacagatttttggtaagagtactaatctcaatgccttgtagcatgtttgtgttgccttcagcactgcgaatcgattactagtatatgaattttgagctgacacctgatgattttcatttttggcatgtaggcgctcattctctttagacaatcatcatgcaagaatcaagaattcaggatggatatttggaaaaaaggtatgatcttgagtcaatacttcaaaga

SEQ ID NO: 49746 - DNA, 630 bp, Oryza sativa
cctctctagtctctcccctatatataaggggaagtgaatgactgaatgtacaagggggacaccttacattgtacagggctatttttatgagttctgtcactactgttggaatgattgccaccaatcttttcaggacaatgaagaaaaaaagggaaatagtgtatatacttctaatattatcttttttttatttgggtttttctagaagtaaactttgcatgcatcttaggcattcctagaacccagagatcaaatcgtatgagatcttgtcatgcaatgcactttgacaaaaccaaccatgtatgtgccattgccagccaatgcatgaacatagtttccagtgttagatatgcatatcttaaggtgaagcctccatagtggtccttggtttgcgactttcatgagtacattcaaccaatcacttctctgttttctggaaggaggggcgaatcagctagctagtctatcaatggtatatactgataatgctttcatacccattaattctacagaacatgttacgatgttaatcataattttttttttctatttgggcaacaatagcatggatctaagtatgcatctctacgaacactgttttgtaatgactaatgaagagagcaagagaca

SEQ ID NO: 49747 - DNA, 1029 bp, Oryza sativa
tacaggtaccaggaagtaaaatattttctaatataaaatttagtacctcctggcattaggtatatggagatataccaaaatttttaatgtaaaattttaagtacatttttttcatgtactagctacctccgtcccaaaagaaaaactcacttcaaggcttaaatctggatatatgcaaaccctaaagtgtttttttaagcaaaattcatgcgaaattcctgggaaccattgagccacttctgagcacacggcgacacatgtaggttatatacagtggtgacaaatgattagagcactctactcggttgaactttctatactcatcatcatccaagttatccatggatggataaagcgcacaaaaagcactacactacaagaggccaacgagttgcatgaagaagatatagatatctaattatctatcagcatcaccaatgattaatcatgcaagagaccatatacagttgcaccgtctagtcacgatcgattagtatcatagtacgtacacctccattcctaatataagtatctataacttatttctacaattttaaaattgaagatatttttgcctgtagtttggtacgtcattcgtgtataaattggtttttaagtttgttcacttttaaaaatacatattcgtatttgagtcgggttataagttcgttcgtttttagaaatacagaaggagttgcataagaaatttatttaaaaaaactcacatactaacttaagatgattggacttctaattgtagctcatgattttctagacaaatatatatccaaacaaattctcatagtgaatttcatcttaactaaaccgtataacaataataggattaaaatagtctttacccgttgcaatgcacgggttttttttatagcttagtaaaacataaaagtataaagaagcaatatctctcggtcatctcattggttaaatctcaaattttaaattgtttagatttcggtcttatgtacttgattgactgaaaagatgtttagattgtgtgcactggaatca

SEQ ID NO: 49748 - DNA, 664 bp, Oryza sativa
agcctttctctcgtttaaccgctggtctcccagcctccgcctcccaccgactcctcgccgccagccgccacagccgcggaagctcatctccgccgcaatctaacgccagcgccgtcgtcccttgaccaccgccgtgccgccgccggcggccgtcggtgtcgtgctgcatctactggctactgctaaagcaagtggagatccgacggatgcaaccacgggcacacgccatgtgaggggacatgaggtgggcacgtgagcgaggggcacatctgtctgtatcttctccctcctcctactcccacaaaaaaaaaagccgttcttgatggcgccatggagatcttgggccccctcccaatggcggaatcttctcggcaagcggcaattgatggctgtacttgggtgaaccgcgtcgcgaccagctcggctgcgaactgttcctcgactactactactacagtctctacttgcccttgctgctgcaatggtggtggtccatgtgaggtgaattgatgagctaaccttgtaataatgtttctctgaagatctgaagacttcttgcaaaagcaatataatgtggagttggaactctgaacttgaagtcatgggtgttcttggcttgcacggcgagagatttaccgctgcaaacctgtcaaaggggaaaatg

SEQ ID NO: 49749 - DNA, 503 bp, Oryza sativa
atagatcctgaacagcatcgcccttttggctgtcagaatctttttttttcttcttattaatatcgatccggagaaggaatggaattatgagaactgctcgtctgtacactgccgggtccatgtctccatgacaatcatggatcggttgggccgatcagaataataaccgtgtgaactgtagtgtgcgtgatctgtgccccatctttcttatactggattagctgttgtctctttctccatgtccctgaattcagtgagtaaattaatttaccctaaaaatttgtcctttgtttgcagatcagtctgacattcgttagactgtcaaagactgatcgaatcaacgcggaatgaccgacgatataataattaaacatactcgaaaacaatgcatgcatccatggagactattccattggattgcggtggggttagcggtcggcatgccgccaaagaagcgcacatgtgttggttctctgactgtccatctacatatatctgaaatc

SEQ ID NO: 49750 - DNA, 536 bp, Oryza sativa
ccctcttccctcatcgccgccgccgtcctccctgatcagcaccgtcgtcttcctgccccatcgcagtcgtcgtcttcctccctcgtcgtctccaccgtctcccccccccaccatcaccacggtccgcccgtcgcaggctgcccccatgcactcgccgcccatcgccgccgagcatgagcgccatccggctcaacctccccctctctttcctcttcctctctatccacagccataggtattttggtcttaaaatcccccaaagtggcaaagtatcctaaaagtaacctattaagtggcattttatcctttacaatacatgtattgggtggcatttcgtcgaaaccccccaatggagtggcatatcgtcctttttctcgtgtagtatgccctatctgctgagaaaataatggattatctgtttttttatactagctatgtgaggatataaacaaataaattaactactataaaatttttaaaaaaaagtttttgcaaaaatcttatatagataaaaacttccgtacgttaaacttata

SEQ ID NO: 49751 - DNA, 500 bp, Oryza sativa
ggaattagtgctgtggacacacatgcatctttatatcttaatctactgtttcctccctcttaaacaaccttttaagtttaaaattggtttgatcaacttcataatctcaatctaaccattcacatttaaattttacttctctcatctccttaattccaatgaataattatgaaagcgtttatatttcagagatggaagagtactttaactacactgcatgtctgcatatatgtgtagtggatatcttcaattactgcaacaagaacgtacacgtgcgtactgctagatgggcaagctagctgatgccagcccaacattcgaacagtgttttgcagatggagagatcgatggagtgccgtgtgtaaatgtaagtctacgtacaatgcgtgcgtttaattgtgcgtgtgatgcatgcaatgcatctcgattggattgttcaactagtgcattctactccagcttgcgcttgctagccaatcgatccagtacgcatacacact

SEQ ID NO: 49752 - DNA, 560 bp, Oryza sativa
gggtggggtttaggagtaaggtagctagggttgcacccctactcttgaatctaaatatacattagaactgtaaaaacttcaaaaagtagagaattaaaggcaaaactatgtcaattacattagttgagccttagacttggaagaatcctggttctgctacacgtactgtataggtcacactgctccactcgatctctgtagccggccttaccgtatacgtacgtaggcataagtatgacatgtacagggatgggctctatatctcctgatgcgtcacttgtcatgcatggacacacacatcaccagctagctactgtacgtcactccactctctccatgagtcttctcgatccggtcttctctactgctctcctctacgacgaccttcgtacgtgcaaacattttccattggggcacgctcacctgatacagtccctgcttttatatctgaaccctgtactcttttttttgttcataccatacaccaaaaaccatcatacatcaatttggccggctatctcgtcgtcttctcccgccgcaccaccctgaacgggtcgtcc

SEQ ID NO: 49753 - DNA, 750 bp, Oryza sativa
taagatccattgctgaaggataagattcttcatattcaaagggatataaaaattgttggtgattcttgtttagatttgtcaacaatttttgagcttcaggaataatagaaagcatgtgtgtggaaagaagattcagttttatgcactgtttcgttgagaccagtgtaactattttttgttcaaaagaagcctagatacaagctcgcggaggtataaattgttttaatcctccaataaatttataaaaatataaaattaatctttaggacaaatatagtacactaatgtataatatccttgcttggttatttgtattttaagatagtttaacatttattttgccaaagtatatattttataattatataatttgcattactaaatatcgccgtagcgttagcacgtgcatattactagtatatagtaatagtagtacgcgtttactagctagaacggattaatttcctatcctaatactacgggaagaaatacactaataggatacggagtaatacggaaagaaataagaaaagtctaattttaaccgtgccatatttagagctcgttcactttgctaccattttcaaccttactaagttttggcattgccaaattttggtaattggcaagatttcttatgtatttactaaaatttagcaacaaactaaatatagctacttttttttaataactttgtcaaaaaaaatgtaaggttgaaaatgatagcaaagtgaacaagcccttatatat

SEQ ID NO: 49754 - DNA, 514 bp, Oryza sativa
acatcgttctaatttcaaccaaatttttaattttagcgtgaactaaacaagccctcatgctagcagccgtaagaaaatttttacaggagaatacaaaggctgtgtttagttcagcgcaaagtttggattttggttaaaattgaaaatgatgtgactgaaaagttgtgtttatatgacaggttgatgtgatgaaaggattgaagtttagatctaaactttggatctaaacacaaagcaaagttcggaggccgaatgcatgcatgttgcatgacatggtagcctggtcgagtattttggaggcgtgctactctagcggtggccatgagtgagttcaattctgctttttcatcttttacaaaaaagcaagtactgtagcagatcggtcggtgcttaagagcaatattgtcagagccatgtggtaccaagtgtgtacttggccctctctaaccgatgaaattatcgaggagagaaagctatactaggagcaggtcatgaaggattacgtctccgatgt

SEQ ID NO: 49755 - DNA, 562 bp, Oryza sativa
aatttcaaatcttatcatttccatgtttctaattttatattttttattaaaagtcacaccagttgctatctgttacttctgttatatccttctttatttgcttgtccgatctggcactgtttctattcattctatttggagcctttcaaaattagatcttatggtttttagagtttattgtcccgttgggtttcgattttataatttttagaagtcccgtcaaacgctaccattatactcctatacggctcatccactacctcttcttttttattgtcgttgttattttcaaaatagaacataattatcgcttgggttcattttttactttctaagaagttccgccaaaacgtcagcagctttgtcaatgtgctcctctatggctcgcccgttgccttccttctttattgtcattgagattttaaaatcaaacatgaatatcattgaagtttttttttactttttagaagaccgaacttttaaagttggaccttatagtttttataatttattgtctcgttagaattcattttttataattttttgaaatcacgtcaaacga

SEQ ID NO: 49756 - DNA, 1360 bp, Oryza sativa
acgagtacatgttcatttgaacaacgattgatcaaaccattatttaaaaaaaccaaaaacaaatcatgaataaaacttttatatttatgttactagcggtttcaaagctaatgctagaaagtggactagcataaatttaattttggttactactgataagctaacaaacggacaaaggcagtggcgttcctagagtatactatctggggttctaggcaaggtttaatttctcgttttcggtgtttctatcgggcggtgccgatatagcgaaatttcagaaatttcaatccgaaatttctaaaatttgaatattaccaaaattcatgaaaaaataaaaaaattgaaaattttgatcaaaataatattgtatcggaggggtcagagaaatttcagtccgaaatgtcaaaccctggtcctaggatctcggctagaattttaatatttagttgttttaacctatatgaactatattattaggtaattaaaaattattgtattatatgtgttatgatatgtatagaatcgccggtaaattttgtcctaggttggccactagacaaaggctaagaactaccaaaataatttacatcagagatatggtagtacagtaaaatcattcaaatatgacatttctttgtaatatttaaaggtcgatacataaaacctctagtcaagagtagagcagctagggctgaagccctattcctaactcaaaataaaaataaatattgcaactgcactatagaattttaaaacttaaaacataaaaaataaaattatgtaaattatactaattgagcttttgtcttggaaacgtaacgtacgttctggttccgtcactgcgtgagcaaattaaatacagtgaatgcaataaggaggacaaaaaaaacgtgtccgtggcaacgtcacgtgtgtagagcaaaacatacatacatgggcgttcttttccctttttcccgtaatcccgtgtagcacccgtgcacggctgcatcatcatgcatgcatatccggtggccgggtttgccatataatgccccctaccctgcgcgcacgccgtgtggcccacggctcgacggatatcgcggcctcgatcggcagggccacgcgagcgcaacggtggcgcgaggagggcggtgtacgtcctcctcctcgcctcccgctccgtcgtcccctgcgtggtagcgcgaagcggacggataacgatcggtaaccgcgcgcgcgagcgccccgcgggcggccatgtgacccggccgacgacgtcttacgatcgatcgagtgagtagtagcgcgcgtgcgcgtgtgtgctgtacgcaaatactatcgctgaacggaacgaacgatagacaagaaaatctgagat

SEQ ID NO: 49757 - DNA, 1933 bp, Oryza sativa
catattgtagaacatgataaagtcagtagcaaatcgtagacgtgtgataaagtcagtggtaaataatggattctctctagaaagatagtagagatgaaaagtgtaaaatatgtaagttaactaatttaaagtgaaatgtttaaaaaaaactaatttaaagtgaaagattagtcaaagggtggtacaaagtgaaacttcagcactaaaagacacgttaacgtatcaattatgaaaagaaagctgaatgaaaaaacaaaatataagtttaaaagttaatataagagaatgtcagcctttacgtgacgtgttgaatcgtccagattgtagagaaaggaggtaactcacatgctgtcgacgatttagatcacaactatggtatttgtatgatatgagaatcgttgatatcaggacatatacgagattgaaataaaagagacagagacaaggatttttatacaggttcggaccccttattcatcagaatcaggtaatagccctactcttgttggacgaaactggtgttgctcttattcattaaaatcacacaaatacaataattgagataacctatctagtcgtcgtcgacttggcggcatggaaaaccaatacgtagtcgatgacggggtagttttcctcctcaaatacatactcggcgagatcagagatagcgctagatcccacttgacggcctccgatggcaccagattgggtatgtcgacgctaatctccgatgtcgatgtttagcggtgtgtattgatgtctattctgactgttctgtgtcctctcttcctctttctcttaggaggtcttatatttatacccatagatgtccacttgtctaagtagaattagggacacaaatatgaatacaatctgagtagtctttatagtttcaatatagaactctacttgtccttccttattcggaactccttttccatatgaggtatgattccatataagacttggtatatggtggaccccgccgtgcttagtcgactactgttgggtatgtattatccataaccctgacacatgctatgatctcttagcgttggtagacacaacgatgagctcttattctcgagtgacagcgaaatggcggtggtgagttagagtttcgtttttaggtggggtcaaggtgggataggagtaggaaagaggggaagagggggatttcctcgagcttagagggatgattgttggtgatgacggataggtgacaacacagaggggaggggttgccttagtttggaggacacacggagagggagaagcctagttggctgggctcaccgcattgacaagctcgagggacttaggagatgacgggagagggaagccgcatgtcatggagtggggaaggagaagagattaggggagagagtaagggtctacacgaatcttgatgcagttctagcattcaaaaagttgaataaaactttaaaataactgaaaagtagaccatcctaatttcttaaattcaaaaaatgttttggattttaatacaacgaagagccaaaggactttaattaagggagctattagccatcctataaataataaatatgttatgtcaatctatgtctacgtaaaatagagaaaaaaaagagcgaaatatagattacacccttccttttaccaatgttcagtaaaaggggtccaaaataaaggaaaaggtacgataaaacttctgtaaaatcttctctaagatagttaagacaactgatacgacaaggatcaatttgatcacatccaagcaagacacttatttttgtttctctatttcttaattgtgctctatatctgtcggagatatggacccgggggtatgtgaagtagaggggaattactttccctccggccacgtgactttgcaagttagccccattcacgcgtcacgcgagtcgttgaagcgggggggggggggagg

SEQ ID NO: 49758 - DNA, 505 bp, Oryza sativa
aagttcttttttttaaccaaatgaataaagttcagactggtgttcaaacccgccgtagttttcctcaaaaaaagtttgtcataaaaatatcaaatcacatcttcatgtttagtgcacaggggcggagctaaacgaaatggagggggtgccacttgtttaatttactctactttatatcgagtttaagttgatacgggtgcctaaatttatattgaggatggtgcacacatggtgaaaataggtaaagtttagttacatatttttttcaccgggttcctggaacccctaatgactttagctccacccctgttactacctgaaatggagggagtaattaataaaacatatgcatcaactggaggatatatttttttctattattgttaatcccttgtagagaacgcatgacttttggtatgcatggtaacttgttaagacgaacgtaacacacttaaaaaaaaggtgctttaacggtttatattgtccactactacaaaaaccatat

SEQ ID NO: 49759 - DNA, 1730 bp, Oryza sativa
agatataccttgtgcacactggcgcagctagggggtgaaggtgccaacacccccctatccaaacaccaccaccactacatattctgtttttactttatattaaggctaactaagataagtatttatttagtttatttgggtagtttgaaagtattatcagattagttaattagcaagtctaaaaacattagcaacaaacatgatctacaaaattaatttttgatttctcatctttttcaaaggaaaatagataaaacttatttgtgagattattcaatagtttacattgaaagaatttagcaataaagactagttttaaactttcaatgatattattaaagaggtaaaatttaagttttttttaaatgactagtttatgtattgattgttattaacggtaactatttgaccctctttgctatcagtattagttattcggtctcatggcttatcctcacttcacaccccctaattttaaatcctggctctgcccctgcttgtgcatgggtgagatggtccatcagcccgttggaactaatgtgctctaggtcgttttgtgcaggataagttacttaatcctaaacggaaagatggaacaaacggtgatcaaaagtgaaactctgaccaacaacagtggcctaaattgcatttcataattattttagggtgaatagctaaagtggtccttcaaattttatagtttaatccttaatgttttaatctgttcatactagtttttcaagttttggttttagttcaaacttactcttgaacccacttagaaaccatatggctaaatataaccaacaactctcttgataaataacagttatatcccctcattcacatatataagagaaaaatttacgtgtaatgaatttttttaataaataatgcatagtaatttatataaaacgaaaataagttatgtacttgcaagtgtatatcatagctattaggcttaagttttatgtgcacacgttgaaattatgtgaagtatatatgtaatgttgtttattcatcctggttttctcttttctagtgtatagttgtatataaattaagggcaaaaatgacattttctaacataaatgctgactagaaatagtcttatggtatattaaatctgtccaaggatgattttatgtaaaaacaaataattagataatctatatggacaaaataaaatctgaaggaacaaattaagcctttgataaaatttgagagattaaattagctattcacccattattttactttttttaaaaaaatcaaacttcaatattcaaatttacagggtaaaatgtcaaaggaaaccgacatttctttagtttaacggagggtatatccgtggttgttttggttgttgcgcctaaaaatcctgtgggggaacctcgccggcgatccctccaaagcccagaagcgacgccgccgccgccgccgccagccgccacgttatccatgaggcctctcctcgcccgcctcttcgccccgacttacattgccatgggtttctcctcctccgcgtcaccaccgtcccggcggcttgcccacctcacacgccacctcctcctcagctccggcgagctctcctcctcggtgggcgcccccgccgccgccgcccggccggcctaccttgccgcccccaagggctacgccaccgtgctggtctgcctcttcgaggacccccacggcggcgacccccgcgtcatcctcaccaagcgcgccgc

SEQ ID NO: 49760 - DNA, 572 bp, Oryza sativa
tattccaacgatgcacatagatgatccatatatataccacatatatatatgattaattagattatcaccaagatcagattcgtctttcgatgcttccatggtactatttgattcagaaatagcaatttgcaatacaaaatgtgtggctacgctggctgtacatgttagcctacatacgagaatctgaaagtacatacatgatcagaacataaacattaattactactgctgctaattaatttggttggacttagcagtactgaattttcacacctgtggtactgtgtgagaatagacccagagatcatctgttgtaatgtggatgaacaatatagctacaacctacaaggaaaataagtttacaacagtgtttgaatgcgctttgctgtagcaaattcagtgcagcaacaatgaccaattctaaggcacatcgaaaatattgaggccttcaatattagatctatactaacattcaatctcaatctttacagctaacaaagtgaaattaatgaacattgatcactaactaagtattaaccaaacctagcaactctcgtgagtctgcaggatga

SEQ ID NO: 49761 - DNA, 7318 bp, Oryza sativa
  unsure (1)..(7318): unsure at all n locations
atgattgtcgcctaagaaagtaagaaacgtatggctgtcgtataatacacatacggtgttccaagagttcgacattaattaattaatttgtacgaaagtgcatggtaggcaactaggcataaaggacagatggccgtcgagatcatcccacatgcaggaaatgtcactgttgtattcatgatactcgtatgagtaacatcgcccttatatcacatatatatcggctataagttaaccaataaaaacatgctaagtaaagtaccgtcggtcactaaacttattcatttgtatcatttaagtctctaaactgatcactaaatgtattttttttccttgaacttgttaaaatactgtcactccggtcctaaattaccacgatccctctaggaacctacatgacactcacgtgacatgtggcgttgattgatttttttaatgttttttctcctctaattnttctattcttgatcctgttggtgtggaagagagtgagcgaaaaaaaagaaagaagtgcagaagggaagaaaaagaaaatacgggatcggaatgttcatgtggcataccactttagttttcatgtgacatgtcacgtaagcgctacataggatcctgtaggggtcgtggtaatttaggatctaaataatatactttaacaaatttgagaatctgaaaatgtattttgagagttcgagaacctatatgacacaaacaaaaagtctaaggaccaacaatgcattccactcgaaccagcagcaaaaatatgttttcacatgtatgcatcgatcctcagtgtgatttcttgagagagagagagagagatgcttcacgggcgatattattattcagacggcgcaagcaatttgccacatgttacacgtgatatcatattcataagtgacagttattccactgtgcgacgctactgaggttggcatgggcaaaaggaggaatagataacacataattttgacaggcagacaagttcaaaataaagaattagaaaacacatgaacatataagaatagttggttaaataaattagaggagaaccacgggaacacacaaatggtcggatgaagatattggagctcttgttgacttttcttcaatagcaagatcatccatttcatattaatttcaaagataataacataatttaataatctattacaaatgcttttctatttttttcaataggatcaaaatcctttaaaagttttcggaaatgccttatatttgaatatatacgaagtcaagttactccctccattccaaattgatcatcagatacatgggtgcattaagacaaaaaatataataactcacttatactatatttattatggcaacaaactcgatgtatgcatattccccactattttttagccaatagcaaatcaaaacactttgtgcatggatgcatgcatcaatgttcatttacttcaatgtataaataataaataaatttaatgaatgaacacaaatacgatgatcatttgaaatattctcaaaaagattatatgatcaatttgaaatggagggaggaatatagaagatttttattttatagtattattgatagagactgataagaaatgttgtaaaagtacccgtgtatgaaataaaagccagcggacgaagtgaacgatgttaactgggtaggtttcttttgacggaaccagttcactcgatgacacatgtactcacatttacggctaatttttttttactagtacgtacgtgacgtacgcacggttagttctgactttattaatttaaatatatactccatccgtcctaaaataagtgcagttttgcactattcacgttcaacgtttgatcgttcgtcttatttaaaaaatttttatgattagtatttttattgctattagataataaaacatgaatagtactttatgtgtgactaaatttttttatttttttataaatttttcaaataagacgaacggtcaaatgttgaacacggatatccacagctgcacttattttgggacggaggtagtatcaacctactttttcggagatgactcatagtggtcagtgtgtatgtggtacgcgcttactccagtacgcgcttgtactgtgcttcttgaataaaaaaccggcgggcccctctgtggtcgggtggctgatgattagcggccggccatgaatgattccactgattcggtccctttctgcaacaccgcacaccccatttctttacgatatcctcgctgccgcgcgcgccccctggtggctgctgctggtgcactgcagcactggcacgcccagacagccaccgccaccgcgcgcgtcgtccccccctcgccgcgtgtcgcccgctcctcccgccgtggccccgcccgcgcgcccatcccgtacgtacacccgcgccgcgcgcgcgccggaccaccaccaccaccaccacaccgttgccgccgaggccgacgtacgtacgcgacgcggtgggcaaagtttgctgcggctgcacgtcgactcgcgatcgcgcgcggggcaccatgaccaacgtaccgtctcgcggtcagtcccaggtgcgcgctcggttggccgggggcccccgcggtgaccgcgtcgcgtggtgcgtgggtggggtgattggattgcgaggctttccgttcccggggggacgcgtgggggggaagggaccgacacgtgcggagctgcatgcatatgcgtatgctgcgcgggtgcccgggcgggggctccagcggcagccgcgcgtccagctagcgcaccacccagcgacgcgatgggatgggtgtttctgattctgtgtgcgcactgacgtaactccagtacgggtggtcgggcagggctgggtcgtactactagtgctgcggtttgacacaccgccgtcagatctgtatagagatgcacggctgagatcatcgtattaggatctgttagttggcttatagatctgttgagagatgcacggctgaattagagcaagtttaatagtgtagccaactactagctttaattcatctataactaatttaatagcttattcatataatagttagttataaatatatactacactattaatatatagttctatatttcatacacacacaatgtattgaagtctgtgctgcagctggttataaatttgtagcgtgtttgttttctcactcttctcttctcttctccacatatgcttatagcttatttatagcttcctactgtactcgctcttatttgtctccggcagccaccgcacctcgtgctgatcttttttctctttgaggttaagataagtgttgtgcttgtttcatgtggctcggcaggcaatggatgctttcatggacagattcaaagatgaataatatgatctcgatacgaccctgtcgttttgaacacatgtggttgaggcaatatctccataaaaaaagtgtgctaagtcacataacatataatgcagaaaaggagaaaaacatacgaacaacggcaatgggcgagaaatatcaaatcaatgtaatttaagaggggtatttacaatgaattatttggggaaatatcaaactcaagatgatatttgggatggtttttatgattttcccttatgtcatcttcttcttttgtgagactgatgctctatacatgtgccgagttgtctataccacaaattatctagtgctaaattttgatttcgtcaaatttgatttgaaaattcatggagaaagtccgtaattcctttctcatttgtagctatggacgaaaacggctcagaagtagacggagaccaattctatcctttttgtttttataactttttttttagaattggaattgaaatcgaaaaacttagatatgaaaaggaaatcaaatattattaaatacagatacgaagcgaatgcaaatcggcgtgaatatggtaatgaatattcatcagaatatgaaaacaaatctaactacactcaaatcatcgaagagatgtagctcattatttttctaaaacaataaatagacactttaattgtttatctactttaattttcaggagaactacaattagcaagagctacaatcatttaactctaattcgtcggcaaattttactacaaaacaccaagacctgtgtaatttgtttatacacatcgaaaaagcgtgtcatgtctaaaagacatcctagaaaacctggtaatttgctagacgacactttcgactcaattggatagttagatttttaagaaatacaagatgcccctgtgaccacgagtttcaaacatgacattagagtaaaaatttagaaattatacaactctaaatttgcaatcaccccaagtacattattagcatacatcatattccttcttcactctagcctcagatcaaaaacttttgaccctagggatacttttttataagaatttatctttccaattgaaccgaaagtattctccagcaaattaccagtatttttagtgtcttttagtcgtgacactttttattatgtctatcaataaattacatgaactttgagagtgttgtagtaattttttcctaattcgtatggcatggcctaataaaaaaagctcattaagcacataaagctcaacatgcaagcatatagtatttatatctataatttatttcattctaaaaccaaacatacacatgctaaataatcattctcaaatcattttcataatatttcgatccaaatcatttcatcgtttctccaatatataacaaatatcccacaacaaagtgtggggcatcatcttttgtgagacatagcagaccatacatggctttggtctggacaactgtcggtgaacaactttgaagagctgcaatgccgaccaatggaccaaagagaggccacaccgacacatagtagtgtacaacgagggatttgcatactttgtcgctccacgaaatagattttgattatttatcatacttatccacatctttgacgcgcttcaacatggggccactgctacaaaatcctaatgggtgtcagttggaaacccacataagtgtcgaattcttcaaccagcatctcgcaagcagcactgatgatgaggaaccaaatgtgtggtttaaaaacgacacctttatggttccactaataaaaaaccaactcgatacgtcggctcaattagctcctcatcacccctgagatccatcaacaaccaagaacacagaatcaacattcaagaacaaaatcaatgtccacatatcaacaataaaaatccaagaacatagagaggaggctatctaaggagagaaggccactgtcgccgctgctcaccatgggctaagtccgatgttgagcgtcccgtgaggagagggcatcatcgcttgtcgagggacccacctccgtcatctagcaggtcaccctcgatccgtcgtgccaaggttagttggcaagctagatggcggtagctcgccatcgcgccagctacatcggagataagaagcgatagggacagtggagaccagggatggctgctgctgaggaggtgaggagtgatggagaggaggaaggaggacgagtacagcggagttgaggggtggtggcagcagcagagatgaggggccgcgatggtgagcaagagagggagcgcggagaagctgatagaggtgagcaagagagataggctggactttagacgcgaggtcatccatatataaaaattaaccgggccggctcgatcgattgtcaactgactaactgaagagagtgtcggtttttttgtagaactgacatctattaccctctcataagtgctagtttattaaaaagaatagcacatattattgtggtgtcaatatttttaataaaccaacacatataaggggttatatatgttggtttttatttgtagacccatatcagatgttggaaaggtgagaaaaatcttatatatgcccattttttatgtacatatgagggcgtcagtttcggtcttccaacacctctatgtgcttttctcgccatatgaggcttgctcattcacgtcttactctttcattcgcggatagtggggaaccgatctggtagtgtctctcatcttgtctcacagcaacagtggacgtgttcgtccgacggctagcgtgttcatccgatgcatgctaggtgtttcccgctaggttgccgttggttgttccttgcgttctgcggctatatttgggcgagtgactgatttacaattcagtttttctcttgcgctttgagaagcggctacatttggacgagtgactgatttacaattcagtttttctcttgcgctttgagaaacgtctaggggtttttcggctagcttcataacatggtgagctagccggcttgagtttaaggtttcacccctttaatttatttgttatcaggtctcccctagtgttcgcgttttgcattcgcgaaaaagcgttctctgacgctttcttccgttttggctcaaagtcagttgccaacggttatgtgcgtaagttttgattagcaaaaagatcgtccattagtttcggggagtctgtttttggtttgaggacaaagactacatgcaacatgtaggcagctgctcaaaatcaatggttatgcagatttttttgccaaacatgaataagatatagtctcgatctaaagttctaaactcctactaattaccattacctttactaatattagcatcaattcccttatataaactcccaatcattttttcctcaagttaccaaacaaaccatatggatttccattaatacggtcacatttgccaagctcctaaatattatattttttttaaaaaaaattctcttaacatgctataagaactttttaatccacttaataactctctaatatttaatttgggggtttgtcttaaatactccctccgtttcacaatataagactttctagcattacctatattcatatagatgctaatgaatctagacattattatatatatagattcattagcatctatatgaatgtggacaatgctaaaaagttttacattgtgaaacagaggaaataattactatattttcatccatcatctattgaaaatgcagagtgacacatcgattatttttggtaccacatatcccctccacagctgtacccagagcccaaagacgctttcaacgcctctgcttttgtccagatgtaggacgcattagggcatttacaatgggtcaccacattttgccgttgttcccatgccacatagactaggaacagtgtaagccatatgctccacaatgcaagttacagctacacaatacaagctacacgtagtagtgggtgccagcactctatatctcccttttactt

SEQ ID NO: 49762 - DNA, 1788 bp, Oryza sativa
tagtgcaccacattcaacacgatgcaatgcaaggattcgatttccatccatcgattaattaccagctattataattataaatatcttaagtgcgggccctgtatgcatgcatccaaaaatcaattagatttggccaggttgttgttggagctggagtactgtttctgggttataaacaagatggacctaggtcaacccggaaattaaaaacaatcgatcgttcactcaatctggttagccatatatattgattaattgatatatacgttgccccaacactatcatacatgagtctgtaaaatccccacagctggataaaacgcatgcacgtacgtccccacccagggacgaaggtacaatcaattaccggggtcagtagaccccgatgattttattttaacctctcgtatcctctttattttaccagctatgaccccggtgaaaacaaatattagaccccggtgacattaatattgattggtgtgtaaaattccaattgacaactagaaacgatactagcaacagccaatagaaaattacctagcatttatgattatacgtgagccgaatatgcatatactttgagtttttgagatttgagaccatgcataaggccaacggctcgtaacttttcaaattccctagaaaaataatttctataggaaattgttttaaaaaccatattaatctattgtctttcaagttttttataagctaataatgcttaattaatcatatggtaatctcactctattttgcgtgctgggagggaagggttcagatcccgtagctaggtctgaacacacccagattgtatcagggttcaccaattcgatttaaaattagattccaaatatagcaatatggcttttttttaccaaaatttgatgtttttttattaatttggtttaattttacaatttcaaatttgaattcttgaaaaactattctaaatttcactcaaaatctacttttgtcccaagttggaacatcgaaattgcgttgttttcaatccgttttggttgaaaacatagaccctggttagtaatgaccccgacaatcatttatcctggattcgcccctgtccacacctatctttgcaaatttaaaatttttcggggaggggctaaaatattgatctgaaatttcggtgattttgaaccaccccttaaaagaaattattttggcttttcacaattaatattgaacctttggctatgaattggtcgatctatgaagaaacaaacaatgatgaatatacatatatacgacgtgggtgcacgcccatgctgctctatcggtttgcagcgaaactgcatgcatcccgggcctgcggaagtgcagagcatgcagagaaaaaggaagaaatcgaatcgatcgagcaacctgcagctgcatagctgcatcatatcgatcgcgcagggacagggacagggcagcggccacactcgcacaacaggcagctaaccctaacatatactgtagtggggtagcacaaacaccatgcgcacaaggatttgttccaatcgtagcaagcactacttgcgcacaaggggcggcgcggtaattaattagggtatgtttggttcttgcctgatattaccccaactcaatttgtcattagggtggcatatgccacgtaaagttgttggccacagatatgataatgtttagcttaaaaaaaataagtgtatgacatgtagacccatcaagtaagaaagtgtgacttgctacaattgaaataaacaaataattaataaattgcggcggccctcctcaccccccacc

SEQ ID NO: 49763 - DNA, 649 bp, Oryza sativa
gaaaggggtgaaaaaatcgaatatctcaatcgatcagttggtgagtagggccgggcgccgttgctgacttgccgtgatacagaaatattcctgctttacttttttccgaagggaaagaaagccaagaatcaaatggccaaatgaaccagcttgctataacaccctatatctcgtttgaagcctataattgttatggtgttggcccatatatataatgcagttgtcatgcaatggtggtgatttagtacaacattggaaatttaagaggatgatcagggtctctgcttataaatcaaaggatgattatatgataatctaaagcgttaagtcaccattcaaaaatgattatatgaccactactagaaaaacgatttttcatggcgttggtctatgattttcgctggcagaaaaatgccaaaaccacaagcaaggtcgtaatgagggaggtggggggcaccgaccgccagcgaaaatagatcttcgctggcagccacgttataccagccgccagcaaagatatgttcattttcactggcggtcacttaggtgcgccaccaactaaaatagatcatttttgctggcgcttgggttatatagtcccgtagggaagatacaattatttttggtgacggcccacttaagtaaccgc

SEQ ID NO: 49764 - DNA, 822 bp, Oryza sativa
ctcaggtttgacccctgcattgcacagacaggctagctctcaacgctggcggctcgcacctcacctcttcacacattagcttttcccaaatccaagctgttctaggctagctagctctggctacttcttctcttcccatgaaattattaacgactttgacacatgcatgtgcgtactatatacctctaattaaacaattcataacattgtatatatatctgctcacatatatatggagattcgatcatgataacagtcgttttccagggacctattttaaactctccggagcatctcgattgttaaatgtgatttcaaatagttaattaataaaaaaatctggaaaattaggtaatgtgggttatagtgacatataagtatgcaaggttaaatacgatctatacgccttttttttatccaaattgcttgtgtttagtttgaatttgacctggcatgtttttacctgttagaggcacatgtgacaatatataatatgcctagtctagctagtttttttttaaaaaaaaatttacataaatgtttagagagactatatatacaaaaaaaacaagggcatatggacttgagggtttaaaatccacttcctttaccaccttttgggctcaaatatgctatgattatcgagcgtgcaccagtgaaaccaagtgtcgatggcgattctgtgtttgccttcatagctttgtttgcgcgcaattttttcagacattgactgtgcttatggtgggacgatgcacacaggactggacaaggagacatgcaaagtctttgacacataagtaattttggtgtcttggaatcttg

SEQ ID NO: 49765 - DNA, 554 bp, Oryza sativa
atcacccatcacaagttgcagttattgagccgctgagggagttaaaaaatagtgttaaccctgtcgcaaaacaaaaaattgaaagttgttatctcttggtgggcactgcagagcattagcagctgctttgtctgcttctaccaaccggaatctccaacccagagatgcagagcacgctccctggccctatccactacaccatcaccttttgttcagccaacaaatcaataattaactaacaattaacaacagtaattaaagagacgtgtagtcttcagagaaacaatattcagagacataaaattgttcacatgatcatttttagtcccggttctttttaagtaccagaactattgtggttttgggttgaccgaacaaagatagttttccagtagtgtgatgtagttcatttgaagaaataatttaggaacttcagagagactgaatttgtggatgtgcacaggtaggtataggaaggcgttagttcgcatggcagtagttagtactcgattacacgatcggagatacgttagttgtgggcatgaatcggatcg

SEQ ID NO: 49766 - DNA, 857 bp, Oryza sativa
cactctcgtgccctccccagcagatttactccaaaatttctaccccatttgatcagctcttatgggtttgattgtttgagaagatgactatggatggcaagatgggctcctgtgtcttctagctcgggattggaggagctataggttgtggcctgtggctagagaagatgatgagcggtaggtggatgccaataaatgagaatatctgcttgtgtactactgtgcagcttggatatggagcgtcatccgagcccgcgcaagagtttaaatttcacgcctacgttttggctcttgtcaatggcgtgacctattgttttgcataggccagccaatatttggatccaaaccaaaattatactttgtactgttaatgtggcccaaacattggtaaggccattttaggctatgaaccaaaccggccctaaataataggatccaatgtgttttttgaactgtcatataagggcaagtacaaaggtagagaccggtgtagtctctacgttaattagagactatcacgttacaatagttaatacaatatggtctctaaccattaatgcaccaaaatactttcttactagtcatctttcctttattactcaatgcaacaaaaaaaattcctaataaatgctaagagtcgactctatgccgctgtcatacgtagcaaccatctttctctttccttcttcctctctcttctacatcactaaatatgctcgcatgacaataaagagagaccgctaataaagaccattgtacattccctaatagcaatgtttgtcaatcaaggaagaagtacctgataggtgggatttcattctttgtaagaactgtcacataccacctaccgtgaacct

SEQ ID NO: 49767 - DNA, 1300 bp, Oryza sativa
aaagcttttccaaaattcatgatttagccttacaccagcacgatacgtgttactccatcataagccatactcgatatatgacctagaatcgttaagtggcgggcccacgccttaaacttaacgccgtggtggcggacacaacgggaacccaccacgtggcacagtaccgttgtattggacacgcttagtcacctaaactaccacgtcggggtaaataggaagctcctctgaattatacgaactcatacacaccggcctaccagaatgtaagactaaaccataaataatttactaagcttgggctatcccatactagcacatgtggttgtactgtatacgaaatgaactgacattgagtgaagtcgttaagtcggtttgggcgcacactcctcctatcgatacataactaatcaccatatgtgcaccacttgaggcccaaacctaaaatcgatgttttccaccattttatttatcaaaatcacaagtattaaagttctatctagattatttaaaaatcaattttcatgtttgtaatgagcccataataacaaggaagaccattctaagcatggctaagcattatagtaacctagtgtcaccaaaactcatatataaaatggtatagtcatattgttcctaaggttagaaatgagggatatggatatatgtggagttaaggtgataatgcaagtagtaggagtttatctaacaagtttaacaaaattttaatttattagtgtacaatcgacatgcaagatttgcaaatattttcaataacctccaaaacataggttcaaagtgatcaaagagagggaggtgggacttgccttgtaactggaaaaagtcagcaactaaatcacttcttcaccgtttaggcaatcatctatacaatgtacacgttatgcaattaaaacaccgaaatatgcgaaaaatccaaaatgctctaaaatgcatgatttgtgcacattggataggtactggtctaaaatgaatttatgtgaaagaatttctattttatctcatttcatttgagagttatgaattttagaagtttcgtcggtatagtgtaggatttacttaggtactattgtgaactgctgtcgtaaggtgattcttattaagttcatgtttgttggggtgaatatatgtgttgtctaagactaacacatttgatttcataatttcataatttcataagttttaacgtgttctagtcatatagtccctatacgtacatggctttggagattgaggtccagaacttgctctaacttgctattgttgtataaaatgagtattt

SEQ ID NO: 49768 - DNA, 941 bp, Oryza sativa
aaaccaacacagcgtcggccggtcagaccgcgggcctggccggtctgaccgcacacatatctccggtctgactggcagctccacccggtcggaccagtcacataaaataagagtgaatccgatcatcagctgaaaattgattatctccaaaaccacttcaacgataatctccaaatatcaaaaccaataatcacagatgccaattgttcatcacagaataagaatcaaaacacacattgatcttacatgatcatgaatatctagcgcccattcttgattctagaatttattggcgatcaatttacctattcattatacaatgtgtcagttcactacccttttcttccatttcctttttgtaagattttttttgacaacactaaactagattagtggcatgtttatatatctcaccttgtaatttattataagaactcatataaaattatctcactatgactctgaacttgccttcatatatatattctaggatgaaattttttcataaagatcttaagtgttgtgctattgtacctaagaaagattcatatcatccctggaacatcgcttatcctgccatgaaattgagaaaagcaatagttacataattttgtttcagaggataatcaatatgtaatatatagtactttaagatggtagggaagaaagtgcttagtttttaagatgttgcagaaagtatttagaattttatataagacagaggggataaaaatgacattgcgatttatagatagagactgtaggtcaatcatattccaatttaaggagactacttagagataaagaaatccttaatacatgtagtagaaatgtatgtaattcataacctaatattgtcgaggagaccacatgattgcttgaggatcctcgtcaatccttaatattaattcgaggagaccaaaggtgcctcttctgatctt

SEQ ID NO: 49769 - DNA, 2451 bp, Oryza sativa
aaacctccctaatcgtcaagctaacattgccacttgtaaggataaaaattaagtctgagaatcagagttccaaagccaataaacatgcccaaaaacctaccaaatggccagcttggtagtataacctgaaacatgtcaaaactctccatctcatattcagattgccatagttaagatataacaccagaatagaacaaactgaagtaaatgaagtcctgctagatagatgccatatcacactgcgatgagcaaaagcatgctaagacctaaacatatggggtcctagcaattaaaaaatatagaaagcttcagccatggtagtattcacatgctgggataaattggtatagaatatgttcacacatactgcaatttcatgctagctataatgtacacagcaacctaatatacgtagtagttaacacataggtttcgatccatttcctacagcatggatgtaatttcataagcaaatttacatgacacaaatatggctatatgattgtataatgtacagagatgatcatagagactcaccagtcaaaagtagtgatacattgagtgaactacttcgatttctgcttagagtccttgtctccttgacttatgagcagagccaacaacatcacttctaatttacagaaagatcaactaaatcaaatattgtcacaaataataatgtgtgcaatcgatcatacgcactaatgcgacgggggaactttagtaaaaaaatcctttgtttagcttgaccatcttatactttttttctcatcaacgtggttcacatggaatagataatcaaagttgcatctaacagccaatgaaaatttcattagcatattttacagacataagaaaaaccattatattgtctgagatcacataaagtttaactcatgagctttcaaacctaggaaattaactattttattttcatatatcacaccttatattgccacggaaagccagtgctggaaacaatgtacgcatgttgaaagccactgagacacatcatgctgattttgtttgatatcacagaatgattaagaggaaaaacttcagcatgtcagttcagaactacaatagagtcaattatttgaaggtaatataccctaaagatatgaccatctagcccagttagaactgtaaaatagctagcaattgtgtgtcatttttttgacacaattttgttacaaacaaatacaattataacaagaaaataatattctaaattgtgctgcgcaaaagctggctgaagacttgatttccaagccaatgtgtcgctggtaaacagagtagaatgacagcaaccctttcaattggaccaactcaactaaaccacactaactttgtcaagcaatagaaccaagtgaaaatttcaagtgcccatattattctgccaatattctaattgcaaatagaaaactctgatactggcagttgtttcaaagataaaatgcattgtagatcctggaaagcaaatatcatgataattcaaatatggttgaaatttaattgaaaccatggatgtctgcataacaaaaactataatatatcatattgggcgtgtgagggcactgataagcaaaacatgacaaatatagatgaaaatattaatttaaaccaaattgtatataaagaaatattgcaatggaaggaatgttgtgaatataagcaactaatagagttgggatcaacttatcgtttggggtaaaaagaattgttttacttaagtgtatagatcgatttctagaaagacaaaaggcccagcttcccatgaatacattcaacatctcctggggctggggatacctcatcattaaaataaaagaaaacattagaaaataagagggaaaatttcatgagcagcacataagacaaaatatacgttatgcgttagtaacacaatgaaattacaaatatgtaaatttttcaataagacaaatggtcaaccgtgtgtctacaagttaacggcatcatgtattaaaaaacagaggtagtatgaattgtttctgtgccaaaaaacatagaaatactatggtagttagcaacttcgtattaatgtttagggccaagatcattttagttacaatagaaacaaaacaatcttaatctttaacaaagatggcttctcattgtcatatcttgagtcgaatcaggggccgaggtcaattatcagtggcatgtggcgattgagaattagtaaatgtgagttgacgttgaggcataccttgtaggtcggcgttagaaggatcagcagtgatgacttcatcagctccagtcagggatgcctgctgcccttgtagatgctattcccagttgcagctcaaaagtcgccaccttgccctccccttcttccaacaccacaagtggcatgggatggatcagacgagagtcctccccctcctgatcactctattcaacagatgtggtgggtggagggaggaggtt

SEQ ID NO: 49770 - DNA, 1550 bp, Oryza sativa
aatggaaccagcaaattcagtatattttttatttttaaatgaacgataattgtcaggatattctcttttccaatcagtagtacactataatcaaaattcatttgaaagtgaaactgacctctatggtactgatgtatgctatagtaggaaggaggaaaactaaacagcaagtatatattcattttattttcaattttctctctagttcagtcactttcgaacagatgcataatagctgttgacaatctagtactgggatatgcacacacacatatacacatataagagacatggaacttgttagaatgtgattgtgtttatctgtttcccttctttccttatcccctccgatattgttctataaatcggttgcggtagatatggaaggtttgggcctatatgtaatctgtcatatcgataatgcaatccattgtgtcgtgccaatcacactttcatggtatcaaactaggtttctttcctcgcttccgcctcttctccaccctagccgccggccggcgaatcctaccgctgccatggccgctccttcctctctcactggggactccatccacgacgacaccatcaaggtcatcaccgacgctgttcgctcctccttccaacaccctcccgggtttgatgacgcccaggccaccgctgtcgctggcgacgctgccgaacgcgcgcgaccgcggctcgcaccgccctcgcccctgtgttcctcggcatcttccagccggccccatgtaacatacctgaattctaggattaaggaatttccatcaaaactagttgaaagggaagttcttcaattttgtaaaccaaaaatttccattttaaacctaggtgaagttgatccaactcttgcatgaataaaatttgagagcaaattaaaactttttcatctttaacctaggacttggatgcaacccaagtgaaagcatgcatactcgcataaatcatattttgacttgagtccttcatatgcatttggattttcgatttgcatttcataataggtctcatgaatataattgcaatccagacaaacaactaaaccattagggcctagtgctaactaatggaaaataatacataggaaccataatacaccttaaaatatatcaacaagaacaatgtcaagccctacaaaactaatttggtcatccatctgaagactagtcatgaacatggaagtgaacaaataaattaactcatatagggtatattccaccttaattacctttataagcattctcttaatttaatactagagtaaacttatgcataaatagttaaggagcttatgaaatgaggtaaactaaaattctaacatatcaacatcacctcaggttaagaagagtctaaatataaaagttttaaaaacatttacatacatttaggaaaggaaaataagtcttgctaattatctaaaataatctgtgcaagataaaatcattggaaaattcatgtaggctctaattaacatatacaacacacagtaatttcggtacaatttaataactaaatttgatacctcaaataaatcagtt

SEQ ID NO: 49771 - DNA, 1005 bp, Oryza sativa
taaagaccgatctttaatcccggttggtattaccaaccgggagtatagatccgggagtatagatcaatcgatctttaatcccggttggtaccaccaaccgggactaaagtggtaaccgggactaaagatcctcgaccccctggacatacatctgacaggggatgaaccgggactaaaaatcatctttagtcctggccggttagtgttaccaaccgggactaaagatcaaaattttttaaaccgggactaaaaatcgtttttagtcccggtttttaatggaaccgggactattgtaaaatttggtcgaccgattaaagatggtttctccatcagtgggggtggataatgtggatattcgggtatctcaccatcgcactgaataaggctatgggtcggtgcaaaagacatcgacaccgtggctttggacctcaacgccaactattctggcctaaggcagggtccaaatctagaatatgtttttttaaaatgggggtctaattgtgaaacaaagtttttataaagggctacaatataaaagatctagtaaaatccaagccccttgaatctaatataaaagaaacatactctctatcgagatggtagttaattgctaaaaggggtgaattcaacattggtgctaaaggggggcattgagagaaggaggagagggaagaggactaaaagtaggggtgctgaaagagaaagaaggagatgagccccccctcctcctctgattgcttcgtagatccaccctcggttcaacctcggtagaggaaacctgaacatgtgtaaattgagagaatcctaacagttggtccgaatcattgaacagattgaaccgataaaaaagactaggatgggaaaaaaaacattcaacggaattctagcaattcctgcatggttcactactatcatcttgattgatagatggtccaactccatcaaactatccaagtgtcacgaacccacgatatgccggtgtcacgccaagactagattgggagc

SEQ ID NO: 49772 - DNA, 588 bp, Oryza sativa
ggtcaaaaacatcgcaccctcgtgtgccaatattggcattaattgacaaaagttcgccgcgcgaatcacgaagtgactttttgccacaaacgcacccaatacactccaatatgtccaaaaatcttgttgtggtgctttttgaactttttcattccggtcaaaaacatcgcacctgtgtgggccaatattggcattaattgacaaaagttcaccgtgcgaatcacgaagggttgtggtgctttttgaactttttcgttctggtcaaaaacatcgcacctatgtgggccaatatacaccaatattggcattaattgacaaaagttcgtcgcgcgaaccacgaagtgagtttttgacacgaacgcacccaatacactccaatatgtccaaacatcatgttttggcttttttgaacttttttattccggtcaaaaacatcgcaccctcgtgtgccaacattggcattaattgacaaaagttcaccgcgcgaatcacgaagtgagtttttgccacgaacgcacccaatacactctaatatgtccaaaaatcttgttgtggtgctttttgaactttttcattccggtcaaaaac

SEQ ID NO: 49773 - DNA, 2814 bp, Oryza sativa
cccccacctccacctccaccaccccacacctccggtgcttcctcgaggtcagcctccccttaccccttcacccccaatcccttcctaaaaaatcagggaagtgttcaagagcctctaagcaaggtaaaattgtttggtgcttttctctattatagtatagttatgtataatgtggtagcaggagggaaaaaaacaaactatttactaatttcttttgcatggaacaatgtacagttatatgggtattgaatgattgaagaccacgggtgttcgcatgcagcaagacaacatcatttgaaaggaagacatcaagaattgtaagttagtgttcaatttctcaattttgctgtgatggctgtttgtccaaatagagtcctgtgtggaatggcgatctgtgtatgctgtgatgttcttttgtgaaatagagccatgtgtgaaatgactatatgtgcatgctggcagaacaatattaaataaaatcttgcagcgacgttgtgaatttggttatattatgcaatatgtaacatataacaacttctttgatatgcagttgtagttgtatttttttggtactttttaataattgtctctctccttgcaaggtttatctagacagggaaggtatttaccctattggtagtttgaattggctgaagaggatgagcaccttaacttatttcaacaggctatctagcatctgcatttgatagctatcattggctccctttctaattgctctcacgcaggactttggctgtttgtagagcccaccatgtgaagaacaagaacttgctattgggagtcatgatagtgatattgaggctgactgtgctcatttgcaagaagtgcttttcaattacaatgaaaacattgtgcacagaagagttgtacaaaggggaacttcacgatgtgtttctgtcactccaagaggccgcacaacctcttgcaatgaagatgaaagccttgtaatgtctacatccttctctatgcttatcttaggtatataattacttgtgttatattcccttttctgaactatactgtgttttaggttggcaaggatgttatactctatgctgtcacaagaaatgatgtcccagtagccaaggcaacaattgtctcaacgaacccaataacaacagtgggaggtcaagctcttggagtccaatactatgaggtggttgtgaatgtggtgttaaagagggacaccgtgcttccttgtccatttcgtattaaaactatggctgatgcgtaaatgctgtctattgcatggccaaataacaaagtaagaactgcagtatatttttgttgttttggttctcatgtatcaccttaagatactaactaatgctaatattgacagatcagggcaaacaagaggccaggtatctcccaatgcggaggtattttacatataaactttactttttttcttgcactaaaatatgatttatagaaccgctgaattctaaatattgaatattctagtgttgagttctctctgcgacgtatttagatgtgaactttactaccatgcactaaattatgatatgttcaagttcactccaacaatatcctgctgcaacatattgatgtagccctcaaagttagaagttacttaacctgtcaattcaatataacaatctgatcagaaagttcatttgaattagaaaaagccttgtatatggactccatgcttttgtttcaatctgaactggccttgtttatgctggtaacaattagtatacatactgcctatggttcagctgaaagaaacctgaaggatttatcatgtaaatttatatggtgagataaggggagttataaaagtagtattcctagttctttaatatccttgaacttagtgattgttgagtattactacttcatgattcaggttgacatgttaggtggtctaaaatatatcatttggaaaatgtagaaagtacaggttactggaggcatgtattttgcccaagtgatgggaggcaacaacagtactagcatgttttgtaattttttagttaactacattttcttaaaagtaatttgtttaactggaacataatacctttttctgtaggtggaggttctggaaggacatagaggtggaccttgtcttatgttgacaacaagctatggaggatgaccttgttttgggggcaagacaaggtcatccttttgtaatggagtttgctacagaggcgaacttgttgggaaatgccaacatactgcatgtaatggagtttgcttcaggatagatatggtggaacttggatgaaatgtaaatcttttggacacctgttgtatctatgccacatgcgtactgcatgcatgtatgcttgaattaatctgtgaatgaattaaagttagtcactattttgatttgaagtgttgtcttcagtccaatataatgaatctatggagactaatttggtgagaatattggtttgtcatttctaattgtgatgaacaagtatataatttgatatggatacattaatatgaaactggaattgtgatgttcgactgacagtgggtcagcaattctcatatctgcggcaaatagtcggtcgggaattgttgtgggtggggataaatatgttggtcggtataaataaggtcggtcggcaaatctaaccaaccaccgtctgatagtcggtcggtaaaaatatgttggtcgggaaatctctttgccaaccagacttattccgactgtgcaagttggtcgggaaaacatttaccgactgatggttggtctctaaatgtggccttcacctaccgatcctctgttggggattttgtgtcatggtg

SEQ ID NO: 49774 - DNA, 553 bp, Oryza sativa
ccaagtgaaagggggcatatgagtttcttcgcttgatatgtgctggatggtagtgagttaggcctcgggagcattttatgcagaagttctaaaagactgtcgaaactggtatcagaccatccatgtctcgcctttaacctcataagttcaagaactgaccgtaatgttgtgaactcactgtcacagcccttcgactcatcgtacagaacttccttagctgccttctataaagcttcaaagtttatttaaacctctagccgatcccatcagcacctcgggttctgcatgacgtaacatttcctctagatcgattttgtcctcaacagaaccatctagggatggcaattttacccatgggtccggatatccgcggatacccgacccgatggacatggacatgggtgtgactttttacccatgtgcactgcccgcccgagacctgaagatgttatgggtaataggcgagtttcattttttacaagtgggtaacccatgcccgacccgatacatatgtattatctaattctgactcattccttaattcttataccat

SEQ ID NO: 49775 - DNA, 1070 bp, Oryza sativa
tgttgtggtgctttttggaacttttcattccggtcaaaaacatcgcacctgtgtgggccatataccaatattggcattaattgacaaaagttcaccgcgcgaatcacgatgtgagttttttccacgaacgcaccaaatacactccaatatgtccaaaaatcatgttgtggtgctttttgaactttttcattccggtcaaaaacatcgcaccctcgtgtgccaacattggcattaattgacaaaagttcgccgcgcgaatcacgaagtgagtttttgacacgaacgcacccaatacactccaatatgtccaaaaatcatgttttggcttttttgaacttttttattccggtcaaaaacatcgcaccctcgtgtgccaatattggcattaattgacaaaagttcgccgcgcgaatcacgaagtgagtttttgacacgaacgcaccaaatacactccaatatgtccaaaaatcatgttgtggcgctttttgaactttttcatttcggtcaaaaacatcgcaccctcgtgtgccaacattggcattaattgacaaaagttcgccgcgcgaatcacgaagtgagttttttccacgaacgcacccaatacactccaatatgtccaaaaatcatgttgtggtgctttttgaactttttcattccggtcaaaaacatcgcacctgtgtgggccaatatataccaatattggcattaattgacaaaagttcgccgcgcgaaccacgaagtgagtttttgacacgaacgcacccaatacactccaatatgtccaaaaatcatgttttggcttttttgaacttttttattccggtcaaaaacatcgcacccttgtgtgccaacattggcattaattgacaaaagttcgccgcgcgaatcacgaagtgagtttttgccacgaacgcacccaatacactccaatatgtccaaaaatcatattttggccttttttgaacttttcatatctagcaaaaacatcgtacctgtgtgggccaatatagactaatattgggattaattgacaaaagctcgccggacgaaccactaagcgagttgttgac

SEQ ID NO: 49776 - DNA, 3136 bp, Oryza sativa
acgaatgaatggtttgttggaaggaaacgtggtgggaggaaaccaaggcgatatttgggccacctgctaagctctaacatgccgaaattaactatactactctctccattttaaaatatactactatcagttacggagtatatacacacttatggacgaaattgcaaagggcggaccacggacgggccaaatataccagcatttacgagttgaatataacaaacgatatgggacaaattgtattgcccctgtggccgaactatttaccgcatactaggtgataccttgcactttgctgcgatattcataaatgattatatgttaaatattgtcgaaatgatgaaaagttgaaatattgagaaaataatgtgaggaagattatttgacatatgcttattgatgatgtgtcatgcttgcatgggatttaaaataggctagaacagtaattgctagtgagtgaagatgttgcatgatgcttgcataggattttaaatgggctagaataataattgctagtgggtgatgatgtggcatatgcttgcatgttgagccttagcttctaataattgttagtgggtaccaactatatagaaagtatagatgggctacaaaaattagggaaatattcatattacatccctcaactataggacgccaactgtaaaacgagagagaagccctccttcaacttataggggaaccaatcaaaattgtcatgggtagcggttctaaattgatacaccaattttttacgagtgctaaaaaattcatttttttccaagaatactaccagtatagttatatatatattagaaaaaaagtagttatttacaatatcaaaaggataaagcatgaaaaggagaaaaagaagagaaaaaaaaaaggacagcgagctagcagcccagcagcagcagcagcagccagcaggcctggccttggggccttggccggtccatacaagcaagacagcagcagcagcagtaaagtgcagtagaagcactgcggcagcagcagcgctacagtaccatcgcggtactgtagctagaagataccctatgtatctacctaacatgtgaccttacctagtactatgaatctggacgggaggatgtctagattcgtagtactagataacgtcacatctaatactaggtagctatattttaggacgaaggaagtagggagcaacttaaataggaaaggttgctcgattcccagaattttggtgttaaagcgaagacggaaaacgtagtgagttactccctcactacgagatatacctttgaccttatttttctattataatatatacaataaataaatgcatgtttacttttattatagtgttttgaaagacaaatgtatatatatttttctaggttctttaaactaaatatttttaaagttattaatggtcaaagttataaaagtttaacctcaatcttgtccaaaaggtcaattaatatagaaccagagaaagtatagtgttagatgtggtccaactgaatgagatggacctaatacagttttcggaccgtgggcgtcacaaggaattacaaaagatcgtaaccagtcaaaaacaaggattgtaactctcattcatcctattttaccaatatatggtcacacctctactcttatactctctccgtccccaaaataaaaaaaaacccacttttgggtagtggggttttttttttacggaaggagtagctcacaagatttagaaactggtacacccttttttatttgaaaaagtctgaattatgctcttaaactattgagtgagtacgaattatccccccccccggcgcaaatacctgaaaacttgatttctttcacactcaactatcaataccggatttctttcacactatcaaaactagatttctttcacactcaactatccaaccggagaggttttggtcttacctggcagtccagtcacaaattcctttttctaattggcgggccttacctataagcctctcaccctctctatctctttcccctctgctctctatctctctctttcccaaatacccctctctctctctcttctccctcccctcatctatatctctctttcccaaatcctctgtcaatttctcaacacgagagggagagccggatgacggtgggcgggggttggagtggaggcagctcggggcggcggcgagtgaggccagaggcagcttggggtggcgggacagcgatgtgcagagaaggagggacggcggtgggattgaggcgggtgagggcgacgggacggttgtgggcgagggtggcaggactacggtggacgcagggcgtgggaccggggggaggggggtagatgcagctcgggcgcggaggacagcgacgggcgggggtgggggcatctcgtcttggatcaggtagaggccctatgtctcgccgccaacgaccactgtctcaacggcactacagtagctcgccgaagacaaccaccgtctcaacacggccaatgctctcctcgatctggatgtgcagcaccttccatgttggccaccgtctgcttcgtgttgcgggcaatgagcgtgcgagagagagagaggggtgagaggggaagagagagatgaaagagatctaacaggtgcgccctattgatttttttaataaaagaattgttcactggattgccgcgtaggacctaaaccgcttgtaaactgctcgggggagggagggggcactggtggagaaatcatctttggtcggttgcccaaaaacaacaatagttccggatgcttaaaaaaccgggactaaaaagcatttttagtcccggtttaaaagtgcaatgatctttagtcccggttagtgttaccaaccgggactaaagatcatcttttgtcccggtttatttattggcacgacgtggcaggtttcctaatatttttagtcccggttgtttataccaaccgggactacaaatcagtttcccacgtatctctctcttccctcgttctctccgcgcgcagagtagttagtactcaatcctcacccttatctcttcctcccctccactctttatctctcccttacgccttatctctttctcaccttcctctttcactctcatctcttactatgcacttcctctttcacacatctgagcgag

SEQ ID NO: 49777 - DNA, 1395 bp, Oryza sativa
acacaaaccaaatcaagaatgcttgttgtgtatgctttgacttggtactgctgctgtactatcaaataaaacaaagttgcttttccaaaatatattatctatgtttatccgttatttggtaatacctataaaaatattgtagcaatcggacagtaaagagataaatttaatattaatggagaaaggaaacaatagaaatagttatttttattatttcattaattacatagctgtgtgtacacatggcatccatgcatgttagcataatatatcaaatggagtataagttctattttttctgaaggtatcattggaggaacaacaagagtgttccgacggataatgttagaaatgcattaaatttccacaaaccaataaatacacccaaacttaagtaaatgatagacaaaattataatttaagttgtgcaaacaatatgttgctaacagaagtattattttcaagtttcaataaaaaaaaacctgatcacatcttcagtcaataatgaattcatcagcagccaaaatattgaattgctatagtcaaagaatgatccatgattatgatgataatgcaacacttaagaaagttgccattaagaattccatagccacgcgaataaaatatctttgatcttttgaagctatctaatcctcgatgcgtgcaacaaattcttgtatgcctatagaaatgttgtctttggcttcattttcactacagtttaatatgtctatgagaaccccagtccgcagtttattttcatcctttacacattaattttgatcattttcaaaattcattaactttgataactaaggctgtgttcggttactggggttgggaacccatctccctgcaaaaaaacagagtggtccattagcgcgtgattaattaaatattagttatttttttcaaaaatgaattaatttgaatttttaaagccactttcgtatagaaactttttgcaaaaaaaaacgcatgaaaagcgtgcgcgcggaaaacgagggagaggccggggttgggagtgggctgaaacgaacacagcctaagtagtagtagtaattaaatactggtactaacagtgcaaatagatgttaattttgcaccctcccatgagcacataaagttgaggacacataagctcgtcacttccctacaccggaaaataaaatgttacatttatctagggaaaagcaaactaattattgtgtttaggttgtaagcaactaccagtttttcgtttttggaataactcttggtatttttcgattccgtagataaatgtcatcatttcatgttggattggcttcttccatagagcgcataacattgatggctatattataaatctaatgaatatcaagtctgtgcaaacggttccaatataaagatagt

SEQ ID NO: 49778 - DNA, 1175 bp, Oryza sativa
acccggaattgctgatccatgtagtggattgtattatctagaaacaacagaagtgggttgcatgtaagaatcaaaacagccatgttgaagcagtttttgtccatcgacttatttacatctagaatatcctgaagatttatgagacttcaagaaattggatatggcttcatgctctaaatccattctttcctataaaaatcaaataactaattagctaaagcgagataatatgtaatagatatctcctatgcatataaatatgagtggaaaacttatgtactctaaagattcagccaataatcgattgacatgatatatttgcaaagtgcacccaacaactcttttctatttgttaatgttgttccaggggctagaatacatagatgtatctgattcacttggttctgccaattgattgagcagtacataattttagggtgaaataataaaatcagaataactattataaacaatcctttattgatacctaactgacatgtcagtgaggaatcatgttgacatacataaatcgaacataatatcatttgaatgacaatgtgagaataaaaataaaataaatagaaggtgtggagataattgttctatcattaacaaccatcctcttcgatatgaaataatcagttcggaggtacgttgatttaaaggtaaggaggttgagcggagaaaattgaaaagcatagcaagacataatgttgtaaataacagaaattagcattgatcatggactgaacacgcatgaaacaaacatattttgtgagtgataaaaaatatcagaagtgaaaaggatacctactgcaaagacaactcctccttgaagtttgtttttgacatgaatctatattcaagaagtgaaaggccttagcccataatattgcctaggtgaaggcatttacagattgacattggctaggtgaagcaggctatgaattttttttattgaaagcagactatgaattttggcagagttgctatattcaatttgatcttaattagcatataaatcataaaaaatctaattgatttcagcaattgcggtattcaaatgtttgaataaatatgtgcatcttgatggtactgacaacccattcgatatgatcatggaggcacagcttgtagaccatggacgtaactaatacattacatataggtagggg

SEQ ID NO: 49779 - DNA, 2987 bp, Oryza sativa
agatcaacgtggatcttttcttaatacttttatatatagaagagagatagaaaaaaagaaaattgataggggttgaatagaaagcggctccctctgaccgtctaggagtcttctagaactgatgcattgtcttaggctgtgtttagatttaaagtttggatccaaacttcagtactttttcatcacatcaacctgtcatatacacgcaacttttcagtcacatcatctccaatttcaaccaaaatttaaattttgaattcaactaaacacagcattatttttccttgtttgatcggacggtctaatgctgcttcgtttttctcttttggtttttttttccccatttgcatccagcggtgcattttctcttcatgacgtggcccattccagtgctatctttggtttcacctttcactagtaaaaatgtaaaagtctagagcgccccttaatttcaggtcattcaagctaatgtaaaagtctagagcacatggacctctttttttttttagaatggcacatggacctttcctggaacgcagatgcgcatgcttgacctgcttggtgcttgcggatgtcacgcgccgcgttgcctgaccgccttgccttctagttctatgcggacctccatgcatggtctctctgctgagctttgactgtgacgacggtcgacgatgcacatgcccgcgttgaagggaaaattaggggagtggaagacaggtgtggtactacagactacggagtactactccgttcagaaaaaaaaaagtaaatttttagatacgaacctgaacgtatacgtccaaattcgtaacttaggattgaattctttttaaacggagaggtaagagacaagctagtgcaaaaaaagaactactacggtgcatgtatcacatgataaattcacacagctactttatgcaataactgctagcaataaatattactccctctatcccataagagcggttacaatagcaagctataagccagctgtaaacatattttaagaagataaatgaggagagagaagagcagcgggctatagatttgtagccagctgtagcacggactctaagacgtaatgtgtgtatgacaggtgggactatatattaataatgtagtatgtaactattgtatgaatgagctattagattggctatagatgaattggagctagtagttggctatactattaaacttgctctaataagcatagttgtgagttttagtgtccaatgtttgacctccattttatttgagattttttcatgattaacatttttattgatattagatgatatgcgtgacttaatttttattttttttataagttttcaaataaaacggacagtcaaacgttggacacgaaaatttatggttgcacttaaaatagacggagggagtagtatataagtactacccatcctaaaataaatttatttttaacctgtccatacatattaatacaaaatcgaaaaaactataatactcttactttatcaaatctcaaatctcaatgcatttctcttttcatatactcccagtatatttattctctaatttcacaaacacaaattgcagtgacttagaaataaatttgttttgggacaaacgaaagagataaaaatgatcttcatctgagatagaggaagtatattacatatagttgaaatagcctcgtctgtagtaccgtcagtatgtcacaaacggtttctactgttttacttcctttattttaaaatatagctatttttacctataaatttagagttaaaaataagtacattttgagatggagacagtacaatgtggactttcaatgtagatgtgggccttatgacttttaaagcttattttaaagtataattgtttgtgagaagctatgtgagaggttctgctgggtcttgtttgtagcgagaaaattgacatttagcttggggtttcgccagaatgccaacgccgaatgtggtttcgttataatgccatctttaaacgcccccatcttgctacactgctattttaaccaaatttggttatttgcaaatgctttccaatgttttgcttatttggtttgacccaaatgcccttgcctcagccactccacgcaccggccaagctccttccgccgtggcgcccgctcgccgggagcatcttccacctccgtccgccaccatccaaatcggcttaactccgtggtggatttcgaagcccctcttcaatggcgagctccaccatgaccggtgtcgatctccgtccccggcgcccttctccctcccctctagcctataaaagggaggagatcaatagacatattagtgctgctgctgttgcccaatccccacgtccctggctgccagtggagtgcagtcgcactggggagatctaggtttggcggcggcagtgtcgagaagaagacgacgactggatgaggatcgaaatagtcatacaggcaaaaaagtcagataacagtggaaaaatatttgcaaataacctaatttggttgaaatggcagtatggcaaaatgggggcgtttgaaggtggcacattataatgaagccgcattcgacgatggcattctggtgaaagcccaacctgagaatggctgaatatcaattttctcgtttgtagcatgcaaccgcggtagtttctatcggaatcttcaacttttcaaaatagttcagattcttgctcagattcatagaatttgtagctatataaaatacaggaaatgaactagaagctcactgtaaaaaaagatttttttttcccaacttcacgatttatttttccctgcagactataaaatcactgtttgcaaaaacagctacagatatcataaatctagtcccgtatgtgaaaatcaattttcttttttttcttcaagcagacctctttaacaccacgcctgtgaaaataaattttcgcaagcggaatatgaagttgtcggggaatttaactatttgccccttttagattgggaagttatc

SEQ ID NO: 49780 - DNA, 520 bp, Oryza sativa
ctctagataggtgagattctgcagctctgaaggtattggaccaacacatccaacttagtcacccctcctgcataaataaacaagtattactgataagttaaaggaacacattttagcttttgaaatgcgccagggatattccaatttttaactcaaacagtttggttttcccccaagaagacgaaactcctagcatgtagcaatttaggatggactggtatggctgtcggtctaggaataatatctaaccataaatgtggaaaacatatgagataaatattggctagtaattgtggagaaaacatcctgattgaaaggggaaaaggtatctctgctactgctatctatgtggagaaaacatcctgattctgagaagcagctggttgatagccaacttctgagaatctggaaaagcttttccaacttctggcttctagtttattttcttgattctacaactacagtttctcagaatctagatgaaaaacaggaccgtttaggggagcttctgattctggaa

SEQ ID NO: 49781 - DNA, 509 bp, Oryza sativa
tatgctttgacatctattactagatttgatagtactcacagagaatgatgagtaaagaaaatagaaactaaacaaccaaaatactcaaactaagctctatggttcatgtttatggtatgatgggttcatcaaagataacagacatgaccaggtggacatgagaagcttcaaatttatctcctgaagtcaccatgatgaaaaatccacttcatatcaatttactaatatacagtgaaatagctacatctatttatgtaagtaggtgcatcaatgagggatgagcgatagtcatatgatcaaatagatcaaatgtctcgtcatgtcaactggtgttgaccatgtttcagttgaaaatcacaagcaattgaagttctaaaagacttgactcgttacatgtatgcaaatgaagcatgacagcaatgaggaacaatattaaatacactttttataatatgcaatctaatgctgcagccagcactcacaaatagcaccgacctattagtagctgt

SEQ ID NO: 49782 - DNA, 774 bp, Oryza sativa
tccgatatctggatatccagttcataacaactgtcgtccatatatttcacataatatcgggctagaagcaatagaaaatgaagctaagacattgaagtttatacacttcttgcatagatagattttttttagacggaaggccagtggcccggcttttaattgaaagccaaaacggcagagttcagctggggttgccagcgtactgcatagatagatgccacctccagtcatcctaatcaagtaaaagtataatttgcatttgacaagatcacaagatagtcacaaaccttgtgcctacgatacctaatggactcgagcatgtgtatttgctttaacttaatctaactagccatgagttctcaagttatcttaaatgacaatagaagacgttgagcaagagtatagtttaattatgacaacatgttagatcgcttctatcttatcggaatgggttctgcaccacaaaacattgatccaagtaagatctcaactttgtagccttatttggttcttgagtagagaaattttatggtccttgaaaaggtatctcgatgtacctaaattttacactaaaaattttagcatctcgaggaacctagtagcatttccctattggttcttgtgattgttcatgtttggctatgttgattgttcctgcctaccttgtaccttgaaatgcgaccctcctattacctttggctttgctgtatcaattttgtcagtttggagctaactctctagttcaaaatttaggtgaaaccttcatattcttca

SEQ ID NO: 49783 - DNA, 546 bp, Oryza sativa
cctgatctctttaaatttctattgaaagcctatctgtatgtgcgtaatattcacgagcaccagaatttaaaccttggtaggtaaagtcaatcatcaatgacttcatcacttcacagcaggtgttttccaagctttgctctagttaggacgcaattgaacatgagaacctgaaccttggcttggtcgcaaactccattcaatttgccacttgtttgggtattctcccaatttcaccaatcttgtggttttatagctaaagcctgaaaaagaaaaatactccctccgtttctgaatataaaaacactgttgaatttttaaataatcattcgtcttattccaaaatttttatgaaatatgttaaactatatgtatacataaaagtatatttaaccatgaatcaaatgataggaaaagaattaataattacttaaatttttaaacaaaacgaacagtcaaacatgtttataaaaataacggcgtcaaatatttagaaacggaggggtacaaaataggatgtacaattgcacaactcgaaaaaaaaaaaaa

SEQ ID NO: 49784 - DNA, 2081 bp, Oryza sativa
aaatgtgtgcacgtatacttaacaaaatttggctgtggaactagacactgccactgcgaaaattctgacaggacattgaaccaaaccgacccacccatggctttgtgtgtctgaacaggtttggaaccgaggaaaattagagaagagtggttccaatcaacccctacctttccctttttcctgaaccccgtttttatcttatccccactcatcaatctctctcctccacacgtgtaccgaatcgacagatcatgcgatgagctccagctcaagcgggcacggcagcggctgcaagctcgattttgaatcgaattcccgtatcgaaatcatcttgtttcgatctactagtaactcttttggcatgcatcgggcaagaaagacactgtagcaaccaagattggtactagctcctgccatagatggaggaggaaaccaaagaagacgcaaatgcatccatgggagggcatacgagcgtgattgcggagcttaccttcggttggatcggttcttggtgccgcctgagcctgagctgcagcgatccgccatgagcacacaagcaccagccacaatagctgccagcaactgcaacgccgcatctctctgactctctctctctctctctctctctctctctctcccctctgtcagctcgcgttcgtccaaaacaacaccgattgagagagcgagggagttgttaaatagctgtcctttgtacttggaacagagaatggctcaccagctgacacgagaacatggaaataggcgtacttcttcgttagtttgactttaagttgccaaactttgaccgacaatctgtactgggaaatctaattatttactatctacgtctcggaataattatatttcttgaagattagctgcacgtttactgcatgcatacaatccatacgtaaacttgattaaaataaagattatgagatggggatggaaagatgagaaactagaagagctgtgttcggcagcaagttttcccaactctctgaattgttccgctttcaaactgctaaatggtatattttttaaaaatgtttctatacaaaaattgattaaaacaatcatatgatccactttttttaaaaaaaagttattacttaattaatcacgtgctaatggactgctccgttttccgtgttatcctggttcccaaccggtcctaacaaactcagcctatatcttatctaattaatttgttactccctccgtcctaaaatataacaacttttagctctcgatatttgtcccaaaatataacaacttatcgaccaatattctctttccaaccaatcacaatccttcaccattcatttttcccacctatctccactactcaaccaatcacaaccctccatcattcacttctacctattttcttaattaccacatccaactttaaaaatgcttatattctaggacggatggaggtagtacttcactagaatataatttttctggcataaaatttgaatgccataaatataattatgttgggggaggtagtaccataatagttagtatataccatcattagatttttaaacgaatctactttattattacatttgcctcatgatatataagagttttttaggttgacacggttattaaaaatgtactttctccatcccaaaatataagtatttttagcatagtgccaagtcaaccatttttaactttgactattaatagcaataaaataaaaagatcaatcatgtaaaattgatgttactagatttatcattaatcaaactattataatatgcaactctttttatttaaaacattttatttttatagatatttttggtcaaagtagcatctcgaagactgtgacgaggtccaaaaatacttatattttgggatggagggagtaggagttatcttcatcctcacaatatagcagcttagcatacgatgggacatatgctagtattaggattcatcccatccaaactatagttttgattattggagtacattttaatggggaatgttgtgattggttaagcaatggaggtaattggacaaattgaatgatgggctattgtgattggctaggaata

SEQ ID NO: 49785 - DNA, 509 bp, Oryza sativa
cggaaccctcaatgccatccaatccagtcgctggcacaaccaaacaaaacaaacaccccggaagcaaattcagaagcaagcaagcatgcgggaagccccccccccccccaacccaagacacgattcgaagagaagaagaagaaaccagcgcgtacgtgccgcaccttcgcagccgccgccggcggggaggggagggctccgcggaggcggcgcaagggcggcggcgagtcggagtcggggtcggagtcggagtcggtgcgaggcccaagccgaactaggtaaagagatttattggacggccaggatatgcacaggggcgttgatccgacggctcgaacgcctcgtcagggctaataatattgcctctcgcgagagagaagccaagccagttgagtcgaactgttgaggaatcgctcgctcgctcgctcgctcgccggcggcgcggacgaggagggggcgagatgttctccacatcgtgctggagcggaacatgcagctgcacccgcggc

SEQ ID NO: 49786 - DNA, 624 bp, Oryza sativa
cccccatcacatctttcctgccacactgtcactgatccccaccacacataacgttgcacaaattacctatatattttctaaaccctttattaaaggaattggttttattttttttcacagaaaatgtttcacctagtgtactcacaatgttcactatgtataaatctaatgtacaggaaataaaaatattctttgcacaaatcacccacatattttgaaaactctctattaagggaatttggtttacttctttttccaccaaaaatgtttcacctaatgtactcacaatgtttcactatgtatagatctaatgtagcagtgaagtgaaattttcttttgcattctttcgctatttgctgaaacattctttttatataaggtgaaacaacatccgatttaaacgagtgaaacattttcgatcaacttagtgaaacaattccgatatatctagtggaacatcgtgcaacatttaaaaataattcaataataagctaaaaaaatttcgtcggaatatatccatgtgtggtcttgttttgaagatttaattgcaacgaaattaatgttgcagtcaaattatgatttggataagtaatttaagagaaaaatcagtttaacgtagatttg

SEQ ID NO: 49787 - DNA, 1128 bp, Oryza sativa
gatcgtaggggtggatccagcacgggggcggcgtgatcttgagcccccactactagcgtgaagactatgagattaccatatatagatgaaagggggactgtaattctatctagtttgctcagactctaatgctatttctttttgaatccgtcacttcatagcgcataagttcatattctgtgcaaacgtgagtacctcagttttggtgctcggaaacctgcagaagatgtagtcgccattaatgttagccaccataatttgaccaagaggattgattttaattatccgactcgtgtggacaatgtaaatgtcagcgctaagctagcctcacataactttagtggctagtgtcttcgggaaggcatgcaggcatgcacatgctgctgacccgccgtagtaagtcgagacgaggatgacggcgcggccgcccgagctgcgggagccggtggcgtagcactccaggccgccgtagccgtggacgacgtcgccggcctccccgcccgtgttctccgtcatgttcggcgggttctccaggcacgggtgcttctgcggcgacggcgccggcgagtacacttgccatctcccacggccgccgttattctccttggccaaggcgaggcgcccagcggcggcggccacgacggcggcgagggcgacgacgaggaggcagcggactagcatcctcgtgaatccggcggcggcgcgtcgcccgtggcgaattcagacgtgttcggtgatcggtgtgtgtgtgtgttaacgcttgagcccgttgattaatttgctgatgtgatccaggcactcgagatggagatatatataggtagcgggacggagggagctagcgagcggtgctgtgtgcacggaactccagaaccatagagcctgtttgatgtcattttcaaccataatatatttgtttcgcaaagttaaaaaacaatatctacgtttagtttattaccaaatttagtcaatacataagaaatcttgccattgccaaaattttagcattgacaaaacttgttaatgtttattttagttacaatctaaacatgcccatacatatatatttaacttttttttctattatgaagtcgcatcatttcggctatttttagcttttaatgattc

SEQ ID NO: 49788 - DNA, 924 bp, Oryza sativa
agaagacctgttttttttttaaaaaaaattggaggggagtctctggtcaagacctacatatttgtgaaattcgattttcagaaacgaacgcttaagccacttgcgacaacattttcacagacgggcgatttaagtcactcacatttggaaataaaatttgaaaaacacgtatctatacttagtttttcatataaagtttgatgaaggacaactttataataaaattgtagattttgataagatctgcaactttgtagctaggtgacaacctttcattatagagattgtttagagacccaaatattcgttacaagatctcaaatttattattataaaatctcaaatctatattgaaacgatctccaaggctccaatgaagacatactctacactatacgacccccccctactactgagtaatctaagagggattacataattttagtaaaagtgaatacatgagatatgtggagggggaattaaatttgaaaatatactgttgatttgttttttttctcaaaaatattcaggatgtaaattgtttagcagaaatatactatcagtctcgcacatccattgcgcgagagtgacgtaggcgtgtgtcacgccccgaactagccccgagtggaactagcccgtgacgctccgaattaacctgttaatcgataccagtcccaggaaacagtgctggtatcacaggaagacagaatatcacagcagcagaggtctctttattatagagtaggagtacagtcatgttgggctgcgatcagatcccgagctcacatctgcattacaaaagggaaacggaagccaagacttagaccaaacatcacaggcgtgacttgggaagtaggccgaaacctaaaactcatcgtagccgacttgctcctggaagaactcctcgtcagcgggatccgcttc

SEQ ID NO: 49789 - DNA, 521 bp, Oryza sativa
tcataaaaaaaaatgtgaactaagttatcttgtgcacatgaaaaatctgtagaatgaaaacaaactcaaattccatttcactggtaaattaaattcttgggtgttgggcaagccagaatttttaatgcaattgtgcatgaaatgtttataaactatgctggttcattatatccgctccccttggatgatttaattggtgcatcaatgccattatttcgtgaaataaattttaagcctcttcaatcatgaaaaagacaacttaaattgaaccacatcaagaggtgctaaaaaggaagggtaaactatacaaagtctaaccacgtttactattgttgcacgccgttgcctcccaccatgtaccataacagagttccatgatgcactagctaaagccgctcgacacgaaatcacaccttgaactgcagaagtagaacaaaaaacaaatcacctcacatgtacaacattatgataacagcaatgcagtatatcatatcgtagtaaacaacggcaactttttaatt

SEQ ID NO: 49790 - DNA, 748 bp, Oryza sativa
atgttgctgttcctatctgcttgctcaaggatgctaaagttgatatatcggagaaatgtttagtagcaggcttaagccatgccaaattcaatcgttattcgttagtactacacaagtaaataacgacgtcaaagagggaggtacatgaaattctttatctacctacaaagtaaaaaaccacatgagagagacaagtgtgtgaattcatatctatcatacaaagagatctaggttgcatttcttcatatagatcctgtctcatcctgggtagttgtaacgcaaactttccaacgaatcaaaccagagcacggctcgatctggctgatgcatgtgtgacatcgaatccccggaaacaaagacgatcgtttttactactgttctatctcttcatctagtttaattaatgccctgtatattcgatcgtgcatccatgtatcagtgggctcagttaaacaaagcagacgcaggcatgcaggagatgaaaacgagcaacgcaccctcgtgctgcccgaaagacagtgtactctccacactggcatgactcatttctacgggtgaaaacagagcggattcagacgaataatggtcataccatatcctaaaccaggattcaaagtgggtgcggataggatacggatgcgcatgcggagcggattatttcggatgtcggaaatagtgcggaatcagttcgaaaaaaattaaattatcggatattacatgtgtatacaatcaatacaatattaagtta

SEQ ID NO: 49791 - DNA, 631 bp, Oryza sativa
ttctagccgtcgtatccttgtgcctcgccgcgtcccttgccggagaagcaagatggggcctgccggagaaaaacgccgcatccattggatccatctgaaagcaacaacagagacgaggaacattgagtttgccactgttgccaggtttgccaggtccaccaggtataagtgtatagcttgaatgcttgagcatgatttttttacatgtacagatgaatgtggaacgcctgagccttgatgtgtttgagcacgattttctgttgatgtgcaagcatgattttagtagatgtacaacttttaagccttgagtattttttagacataccacagttaaatatgggatgataccccaggtcactgtttcccacgtgaattttacatctgaacaatattgggagattaccgttccgacggttccgtttccgatatactgacgttaccgatatcgttaccgtttccgagtataccgttccgattccattttcgagaaaataaaatgaaaatggaaatggtagagggtttttccgaccgtttccgaccgttttcatccctacgtgtaatatttttgtcaaattcaatgtaaaatggttgtaaaaatactttaaaaaaaacaacataagtacactaacat

SEQ ID NO: 49792 - DNA, 658 bp, Oryza sativa
tacagtacctcatcacatttctttatatattttattttgggaaacataagcataatggttaaggcggaaatgataagggtagcgctattgttgggatttcaaagataaggggatgtttagatcgagtggtgtcggatattatatatggtgtcgcatgaaatattcgaacactaataaaaaactaattacagaatccttcagtaaaccgcgaggggcactaataaaaaaactaattacaacgtttcttcagtaaaactatttttgaaatagcaagtcatgtactactacctccgtcccaaaataagtgtagccatagatatccgtgtttagcattttgaccgtccgtcttatttgaaaaatttatgaaaaaattaaaaagaattagccacacataaagtactactcatgttttatcatgtaatagcaataaaaatgctaattatatttttttttcaaataagacaaatggtcaaacgttagtgtggagattatggataccccatatctacatgacagttataatttagtcggatatacggtaccaaatatagatagaatatctctataaggactcgggttagattctaaacttgtatgtcaaagaaatacccgggatcttaatccgttacgaatgtattttatctataatcctatattc

SEQ ID NO: 49793 - DNA, 539 bp, Oryza sativa
aagattttacctatcagagggccagaaataaggttcacaagatgctaaacccaggccgcgtgtatcataacttcaaaggtgacttctaacagttttctggctttctgcttgaaaaaaaaggtgattatgcaactcaacagattatatttaaggatactcaaacgaaactatgttcacaagtaatcagcagaagaaagtacaccagagcaaaaccaaatacaggtatgaattgtccgatccttgagagcaagaagttttgcatgcacccaataatctgcagcaaatatgcacattcttatacatcatattagcacgccatagaagaagttttgcattcacaggcattaagcattaacggaatccagtctaatttcccccaccttatgatgaaaaaaatatcactccaatcaacaaggcaaacagctaaaaaaattaatgacattatgcagaccaacattagggaaaaggaacaactaaaaatggagagacagttcaggcttaccatctacagcttcttgactaatccctccgttccatct

SEQ ID NO: 49794 - DNA, 750 bp, Oryza sativa
  unsure (1)..(750): unsure at all n locations
tttgacaatgacagctacatgttgcaacctgcaagtatgctgtgtctgaatttcctcttccgttctatctaatgttgctttgaaggagacctactccctccgtcccaaaatataagaacctagtaccagatggaacggagggattagtcaagaagctgtagatggtaagcctgaactgtctctccatttttagttgttccttttccctaatgttggtctgcataatgtcattaatttttttagctgtttgccttgttgattggagtgatatttttttcatcataaggtgggggaaattagactggattccgttaatgcttaatgcctgtgaatgcaaaacttcttctatggcgtgctaatatgatgtataagaatgtgcatatttgctgcagattattgggtgcatgcaaaacttcttgctctcaaggatcggacaattcatacctgtatttggttttgctctggtgtactttcttctgctgattacttgtgaacatagtttcgtttgagtatccttaaatataatctgttgagttgcataatcaccttttttttcaagcagaaagccagaaaactgtttgaagtcacctttgagttatgatacacgcggcctgcgtttagcatcttgtgaaccttatttctgccctttgatagggcaaaatctggtccccggagcacaactcgagaatcactgagccactgggacgctacaatgccaatntgatttggtatcctatgcatgcgctgaca

SEQ ID NO: 49795 - DNA, 607 bp, Oryza sativa
ctgaatcgggctctttttttctttttaccaggccgcctgttcagcccatgcttgtacacattcagggatgtatcagcaggcacctcagcttgacctcaaaagaaagaaattttggttcttttgattttttttattggcattaacaaatatcgctataatgttagacagatatattactagtttataaaatacatgaagtaagtcggaaactaaacatctctccttcaaagagggtgtgagagggatcaagagtatcctaattatcgcaattaggaatggatccaattctgttgagtctgactcattgtggtcatttctcttttaacaaaccttagttataaaaggattgaacttggatccatttatggatccaattctatttagtctgactcattgtggtcatttctctttaacgaaccttggttataaaaggcttgaacaatcgggatccaattacttattacttatgatacctagttgatattaatagctcgagatttacgtcttggtcaagcgtgtgtgtgtgtgtgtgtgtgtgtgtgtgtgtatatatatatatatatatatatatatatatatatatatatatacacacacacacacacac

SEQ ID NO: 49796 - DNA, 1089 bp, Oryza sativa
  unsure (1)..(1089): unsure at all n locations
ggctaggaaagacgatgaacaatgcctgttgggtgctattgcttctttgtccaacctaaccatgctcctgaatcactcacataatattgaaaccatagtaatatgaatataataggaaaattctaatttatgttaatgaaacgggcacccgttcggaattaatggatcaaattttcatctatgagttaaagtaagctttttcaatttctagctaatttcatttgttttttcatttacaattttagttttagcactatttgatccactaaaaattatttttaacttataatttttctctgtattgaattatttatagctaaatgaaaaaaggggatttagttatataattgttttaatattaaattatcattccgaccaaacttatttgtggtttcatgtcgntatttttttattatatttctttcatcatttatgccgaattatgatatatgattttaatttatgtcaatgaaagttatctagaatctattacaatacacaaacgttatgctagtacatataaatattatatgtacgtatatgcaattttgctgtatatttatcaacaaattttctcctaaaaatttgacggatgtaattacagtacaatcgtaatgtaactagtatgtaactacaatgcaacttgtatgtaacttttacataattttgaaccgttagatttgtttcaagatttgtgcaactaaaggaggaaaaatgtcattgcgcgcatatatgcaagaggattcgttcccacgacctcttcaccgaaatagcatgttacgaagaaatttttgaaagtgatatacaagttacatataagatacggtgtaattagatcatgattatactataattatatttgtcaaatttttagaaaatttgacgaacaatgccccacgacacgcggtgtccgcgtcatcttccggaacggcaaaaatatagtcctatcacttttccggcggcaaccccaatttggcaactcccgagtctccgacacaatgccaaattgcttaatttcccttgcccggccggctgctcccacactcccacactcccacctcaccaacccacgccaccctgctacgccca

SEQ ID NO: 49797 - DNA, 665 bp, Oryza sativa
ttaagggagtgtgctgacatgattgttatggcttctctttacgattattcatctccccaacttggagcttgcggctccactcaaccaatatgctgctgatactagtagatgtctagaagaaagcagcagcatcctgtatgcaaaagctttgcatctgcttgccttctctggtttttcatttgaggcaagttgatagccccctcgtgcactcacattattaaccccagtttgcaccaaaggagaaacatggctgattagattagttttgtagggttctctaaagatgtactgataggttgctacctgctagtaactttttatgagataggagatattggtgtccccagccaagtataaaaataatcctcctactatcagatgtaagacattttagagatgagcatatgagtcaagaagaaaattgaatccattttactccctcaaacttatactatcggagcacttaacattctaaacaatttttcggctcagttttataccttaaactattcacctcactcctggtatttctctctttcgctataagtcgtattttacactaaaattatgataatgcattataacactaagaccaatttaaacatcgaggttttaccaagcatataatcataaaaaaaatactcactctatcctaaattggaggg

SEQ ID NO: 49798 - DNA, 803 bp, Oryza sativa
  unsure (1)..(803): unsure at all n locations
ataagttgcacatgagctccgcgtatgtttgtattctcaagcgtgtcttcttgccagcttgccgctggtctgacgcnctggtatcaacgattctgctggtttggtaaataaatctctcggtttccctcaaaaaaaaaacgcctgcatatttcattcctcacttttcagagaagccacaaccacaaaccagcagcgtgaataatgtttattacggagtaatcactatttccatcagctgacaactttcgatactgaattactgatactcgttcagtctcctgcatacacattacagataagtactgtagtatttttgcatctatgtcatttctcaattactcctagtgccctccattgctgagcggtggaaccttttttttttttttagagaactctgagcggccaatctatccatcgttgtcctctgcgccagatttgggtgccactcgacttttgggtggtggatctatcacgaacagtagtaaccttctgatttgccttccttgaacctctgccagcttcaacttaattatttgtttctttccaaaccagcctccctatagatcagtagctgcaataaaattgtaaacattagccatgtgaaaagtatatcagaaaatttatcttcatatgtagcttcataatattgtataaatttacaatatccaccaacataaaattgtagaaattaatcaaaattactggtaccaggatggcatgtatgtgtaaacagtgtaattttcatttctattatttatacaagctctagttgaataatacaggtgatgaactactgtaccatc

SEQ ID NO: 49799 - DNA, 736 bp, Oryza sativa
  unsure (1)..(736): unsure at all n locations
ttgagacaagacatgcaatgattggctggacagagacgactgccaccgatggtggcgacggggacgtccggcggaggagggagaggagatgggcacggcgaggccacactactacagaaagcgtttttgcatacgggcggaatcgatcttcacatgcggatggccggcccgcatgcgcgaaatggtctgcaaagatcaccatttgtgcatgcagccggcccagccgcatgcgaagatcgatcttcgcatgcggtcacttaagacggncgcatgcgaaaatagatctttatggtccatttaagaagccgcatgcgaagatatattttcccatgcggtcgacttaacaagaccgcatgcgaagatctattttcgcatgcggccgtcttaagtagaccggatgcgaaagcgaattttcgaatagcctaaataataattattctaccctttgagggacgtgccgctcgcaataaaattaaatgattgagggatatagtatcatacattcgtggtagtaagacaagtggcgcagtaacaaacatgtaatacataaccataaattcatcgtaatttacatacgaaatatataatacaggtgccacagttttttcatcatatgtataagtagtgtacatgtcattgcatatgttctttctcccactctctgagaggtttaaatttgttgtccattgcgagttcactctggttgtcatagaagagacctcttgtattgcagaca

SEQ ID NO: 49800 - DNA, 526 bp, Oryza sativa
caatgcagcgctgggacgatcggttcgggcagacgtccatcctgcagctccgtccgtgctactgtggctgcgtctcccggcaggttgaccggatcgccaagtcgtcggccactgtgccggcggcggtgaagacggccgtcgtggacacgctaaggacgaaccaaggaaacctgggaaacggcgtgctctcgttgcagcggaacggcgtcgccgacaagctcgcctgggcgtgccaccacgccggcgacgagagaagcgtctccgagcagatcctggtatggcatgtggcgaccaggcttctcgagatcatgcgatcagaaggcgctcacggagacacgacgacggagacggcgacggcggcggagacagcgacacggtggtcgtcgcgacacggctgtcgcggtactgcgcctacctggtggcgctgaagccggagctcctgccggaccacccggcctggacggaggagctgtacaagggcgtggtggaggaggtgtcgagggtgctcgcgcggttcgcaggggcg

SEQ ID NO: 49801 - DNA, 736 bp, Oryza sativa
acagttggcttgcacggtatcatgctggatttttgtaagttcattttctgcatcgttccaattagtgatcctaatcgtttccagattacttctatttggctgcttctccatcaatttggggcagaatatgtgatatccgcatattcgatatgttatctacatagctgttgttaggacatagaacgcaatccatgtggtccccggatattagctgcatctaatgctattgggcaatgcaatccttcaaatggagagttttggacaagcaacatcattttgcatacgattttcattgttctgttttcagttttcaattgttgttggtgaactaaaagatataacaaattttgcagcctagcccaaagcaaccgcatacgcctgatcgttgtaattattataaagcgcttcttgaaggtaggacaggaagtaagcctcttggcaacgacatcattcaggaggtattatttgttcgtgaatcagtacaatttgtcaccttccatgctgtttggtttgattaatgaaatgcttgtgaaccattattaggtgggagcttactctccatcccctcgaattgaaatggaggtggcaacaaagtgggaccgtcggggcctcaacaatttgaggggtactgatggtgctttgtgtgaccgttatccggtatctgccgatgcagaaatctctgcgttaaaggcagagcttttgcaggcccacaaccggatccatgagcttgaagctg

SEQ ID NO: 49802 - DNA, 706 bp, Oryza sativa
aaaacaaaaacaaaaaaaaaaaaaaaaaaaaagaaataaaaaaaaaaaaaaaaaagaaaagaaaaaaaaaaaaaaaaaaaaaaaaaaaaaaaaaaaaaaaaaaaaaaaaaaaaaaaaaaaaaaaaagaaaaaaaaaaaaaaaaaaaaaaaaaaaaaaaaaaaaaaaaaaaaaaaaaaaaaaaaaaaaaaaagaaaaaaaaaaaaaaaaaaaaaaaaaaaaaaaaaaaaaaaaaaaaaaaaaaaaaaaaaaaaaaaaaaaaaaaaaaaaaaaaaaaaaaaaaaaaaaaaaaaaaaaaaaaaaaaaaaaaaaaaaaaaaaaaaaaaaaaaaaaaagaaaaaaaaaaaaaaaaaaaaaaaaaaaaaaaaaaaaaaaaaaaaaaaaaaaaaaaaaaaaaaaaaaaaaaaaaaaaaaaaaaaaaaaaaaaaaaaaaaaaaaaaaaaaaaaaaaaaaaaaaaaaaaaaaaaaaaaaaaaaaaaaaaaaaaaaaaaaaaaaaaaaaaaaaaaaaaaaaaaaaaaaaaaaaaaaaaaaaaaaaaaaaaaaaaaaaaaaaaaaaaaaaaaaaaaaaaaaaaaaaaaaaaaaaaaaaaaaaaaaaaaaaaaaaaaaaaaaaaaaaaaaaaaaaaaaaaaaaaaaaaaaaaaaaaaaaaaaaaaaaaaaaaaaaaaaaaaaaaaaaaaaaaaaaaaaaaaaaaaaaaaaaagaacaa

SEQ ID NO: 49803 - DNA, 567 bp, Oryza sativa
agatagcggtcgcggggcgagcacgccgcgttagagcatggttaattaatagtatagtcagccagctataacaaactctattttattttacagctaatactaaagccaattagcataatagataggctcctgtgttgattgtatcttattaaccaaataatcaattcctccatacgcatattaatcaaaagtgtgttctattcttgtggctattttatggtgtgatatgaatatgagtagtttgtccatatagtactacgtataaaaagtctttgtcctctcgtcgtctgaatttttcaccaacgagcactgtccgtagatgtacatgctgtccggatgctcgaacatcacaaaaatcataaaagcttcactctatcttagccctgatcatgcccaaaatatccacgctatgcttaatgatctgacaataagaatcgacttaagaatcttaacatagtattgccaaaacaacaaataacaattaatcataaaccaattggaagagggactccgtccagaaagcatatgcatcaacagaggggaattgctggaatcaaaccccaaacc

SEQ ID NO: 49804 - DNA, 551 bp, Oryza sativa
cgctttttatttttccacctcaaatttcaatttccataggtcatatgtacagttgggcctgtcattgacccacgagccgtaacagtagtcgtgctgtgatggcccagcacaacacggtgtcttcttgagctattcttgggccgtggccttggcacataggccgacatagcatagcctgctacaggtgtcgtgcctaacgaattgtactaaagcgggttgtgttgccagtggactcatgccgcattgggccaggccacctgtttggccagctatcggttctcatatgtactccttagagttaaaaggtaaaagaagagagtaacaagaatagcttttgtttgaagcaaataaaagtgggtagttacataaatgtattatttgattctagaataaatctaagagctttttgggcaattctaatttttcaatctcttttcatgattattaagatcagctaaaagtctacctacggttattgttaaaagtcaaagtacaaaattattatatatcgtcgcaatatatagtaatgcagccatatacccatgttaagt

SEQ ID NO: 49805 - DNA, 546 bp, Oryza sativa
ttatgtttatatgtctccgtatggataacaaaatataaaaagcagtttattacataacaccaattcaattgagtaattcatatataagattacatccattcatctagccaccacattgcttagttaattatggaccaaataatgtaaaacctgttagccagggtggctagctatctggtttgtttgcgtctatcaactcttagactgtcaattggtcgacatctacgcttatcatttctccctctactattgctgacgccaccaacgcccatgtgaacaccgaagaaggagaaagcgatggcttagcatgtagggcgccgcactgccggagttggtgtcgtggttggggaaaagggataaatgaagggaggaggaggagaagagaagacgctagtatgtaggacatatgtctcttttttattttatttagtgatggggctaccacgtggacaccacgtcagcaaatactgccaatactgctctgagagtctttttaaccggtgtcaagaattggagttgttattatatccggttttgtggttgagg

SEQ ID NO: 49806 - DNA, 1577 bp, Oryza sativa
aacagacctacctaaaacataaacaaagacaattaaataataatttacatttaaaacttttataattgtgtctattattaaatttgagttacaatgaggccctaatacttaaacccttttacgtacatgggacatgtgaactgatatgtctcatgtgcgacttctctttacggttacgcttatagaatacatatgatggtattcagttcgtcagttttttttattgagttcagctcatcgctactttttttctcagcatagtagtgcaagagttacttgaaaacttctaccaaactcttgctaagattagtaagggcctttacaatgcggtgagctgttattcagttcggtcttttcacgtcagagattcggtgtcaatctttgccacgtttgtgggcaggcctaccaaattaaagcccgcatgatcttctttgatcacctgttcttggcgaggggagataaggctacagacgcgttaggagggcgaggcttcgttccactatttctacatgcaccatggacctttgtggcttttctaggtcttaaatcttgatggcctcttgcgccaatcctatacgtgacctgtattgtaaaggccctaccaatccagatacatggtgtatggcctcgcagtgaacacgtaagaaaacggcgtacacgtctatgtgagtcgaattcccagttggttgtccggcccttcacagggatgacctgcacctcgcctgcgtccaagatcagatgtccacgcgacacgactccacgcccgtattagatgcgtgatctcatcatatgcctttttaactctatgctcatctgaagctatagacattcgcttgccgctatgcgctgtaggaggtgtagccataattatttgctctttgcatatttgacacataaatacacgcatctaagtagcttgcaatgccctaacaagatctcggtcattcgattcaaccagttggtggttatgaaaaatcaagacgccgtcatagtgtgctactttactttttctaaagtgggataaaattaacaatccttttatctttggtggcaaattaataaatataaagctaaggaaattgcttaaaaaaactatcacaaagttttttttataaaaactttcaaatgtaactatatcaaagtaatagtgaaagtaatagtgtaacttagtaactacattgtaattacgcattgttacattttaacgacactgatagtataattacaatgtaacaatattagtaaactatataacttacgtataaaattggttaaatcatgttttaatcctatatatctataaagttcattcccctaaatgtagttaatgctaattctctcttctctcatgaagccacatcatctcaattgtttttagcctttggatgattcatcaagggtgtaaattccttcttttcacattacctcaatttattttagtatttggatgattcatcaagggtgcaaattgcatctctttcccccaaaaggcacaccatacaacccaatcatttataacttttggataattgataaaggtacaaaaatatataaaaacatgaaaaaaattataaagt

SEQ ID NO: 49807 - DNA, 814 bp, Oryza sativa
acaatcactcaatgaatcatccaaatctatcaacataccttttcaaaagaaaacatatcaattcgtgagttgaattaaaaaaaaaaaaactcgactggcgggggaatgacttcccatggcttttcattaagaagaagcctcaaccaaaccggtcgagaaaagccacgaaccctggccccccacacgcggactcaccccctatggatcagtccgtaacctgtgctttgaggcccctgctccctatacgagggcccgccataggtcaattcttaacacgtgtttttatgagaggccagtgagtgactttttttaactaggcctgaaattcgcttcatggggagtgaaacccaggacctacacgtgctacttgagcattattcattaggctacaggtccttccgtgagttgaataaaaaaaaactgtggaaggcatatgatgcaagtactcatttaatcaaaacattggatagctttctagaatattgatgttgtttctgtttattttatgtggtactgagaatttaatagttagtcaaagattaattgtgtcatgtgctctctttgggacagaataaatgcctccgctccagataacttgtttatatctagtcttgacatggctttaggtttcaaaccatggttatgctatgaatagcatgcgtacatggactccacttggagaacaaatattccatgttctaggcaacatatgctatgtggtcactcttttggatatgcaactgtcattagtgtgtgtattaaaattaacgtgaaatgtacagatttcaacttcaaattcactatcccctccgtc

SEQ ID NO: 49808 - DNA, 618 bp, Oryza sativa
gtgagatcaattattcagattaatttcggattatagctcttcatgtacagttttaaatattctttttgggtttattttgattgttcattgatcaggtgtgtggttcatgcattgccattttgatcgtcacgtggtgtgggggatggacactatgttcatcgtgaaggatggcaagacgccgcaggctcagatgctacctcgtcctccaaacatgccagagtgctaacgaccgtggttcaaggaaaatgcaaacacaagcaggcggaaatttgtttattttgttcattgatttagtggtttagtttattttatttccttgtttggctgaaaaggaagaaggcattttgtcatcttgtaattgttagtcatttcgttctatcatgtaagtttggaatttttgttattcaatttacgaatataactaaataatgttttttttcagtggatcgggtattacgacgtctttctttataaacacacacccttgctatcttggctattttaattcccagcgctatacattgtgttacactggattaatttttcacggttaagatgtccttcgcttattcttatacattggtggagaaatcgtttttactcctggtttgtaacccc

SEQ ID NO: 49809 - DNA, 513 bp, Oryza sativa
tatgtctgcaatgaccacaaatgaaatacatcacaaattatacatctcacatctatgcaatgatcacaaatcaaatacatcacagattatacatctcagatctatgcgatgaatcacaaattctcaaaaacgaaattatacatctcaatccatacaatgaatcacaaatccttcatctcaatccatacaatgaatcacaaattcttcaaaaaaaagaaaagaaaggacaaaagtccctgcaggagagggcgctaccggccgccggccgccgccgccctcccatccaccagctcgccctcctctcgtgcccacggcaggctcagccgctgccgactccactcctgcccggtcgccgcccgcaccggaccgccctcctcctacgatcgctcttcctgtgaagtgaagggaggaaagagataagctaagagtaagagcatctccaacagtccctctaaatctcactctccccattcgctcaccgacgacgctcgggctccgtccgacggtgcccct

SEQ ID NO: 49810 - DNA, 684 bp, Oryza sativa
atatatgcctaatgaatccaataagccatgattttttttggggcatattaaatgctctagatcacacattgttccatcagttgaaagtaaaatgaatagctcgatactcttttcaagtacacaagtcattttatgatagaccttcataattggtatggatctttatgagttctgcagccacaacttcacgagtgctatcttaccatgtcttaatctttgttgggaagatgaaagatgtgccaaggataaaatactattaagcatggaacattttgagggcgtaaaaatagcttaaacatcagaagagactgaaccatgtaggattagtaacagaagtcacaggaattaggagaatctcaactaatatgatttggcaatggtgacaatagaaatgagagtagcaggaatttggagaatctcaattactataacatggcaatggtgacaataaaatgaaagtagacatccaaaatcattaagataaatcaagctctgattctgacaagtctggagtacggtgagtcccatgtcactacctaaacaaatctaattcttagtaagaattatagattgattcttgctactttcttcaacttcatttttcacactcaaaccaagttatgtgaacgattttattttacatttctagtatatatatattcaagtaagaaacatttgctttag

SEQ ID NO: 49811 - DNA, 1754 bp, Oryza sativa
atgtcgccaagaagcgcaacctgcaaatggggagcaagagctcatcggacgatagggaaacagatgaagaagggagcaggagaaggctcgccggcgcgtaccggagatccgcgagacgtcgccggagatcccctttccgagtcgccgtcgccgccgccgccggcggatatgggtgctggggttttagagggggagggcaaacatgcagcgaacaccctgtgtttcgtggaaataacaagatgtttctacattctttttttttataaaattagtttttctttcgtttcaaaatatcaagataaagttttattttccagtcgacctaagctactccctcctgtgatctgtcaaaggattctatgatatttctacatttcttgtagaataccccttcgtatttgatttttttcaactcattgtttttaagttcgatcaaatttatagaaaaacataactacattttcaacacaaagaaaaatatataaaatttggtgttgtagatgttggtaatttttttaataaatctgatcaaacttaaaaagaatttgatcagaaaaaaaagtcaaaataatttatatagaaaatgaatggagtatcatgtagaggaatatgctgtgttcagcaaaacagtttgggaactaatccttgcgcatgcagagtgactcattagcacatggttataactactagcttaataaacttaaaaaatagattaatatattttttcaagcaacctttctgcgtatatatatattttttaaaaaaaacacacgtttaatagtttaggaaacgtgtgcgcagaaaatgagacgtggaagttgggaaatgggataaaaggactcgcctcaagtgaatacagttttttttttttgaaaggaaaggtggatacagtttagccgtgtattttttcaaactaagtcgttagtagcatactctttgttggttgttaattctatagcttacaaacaaagttaggtgttatattgtgattaatgtgacagtttgttaatattcacagtttgttaatattgcctctcttaacgtgcataagcgaattcatttttgagaattttgaaatttttagcttggttttccgccacatattcttagaaaaaatgttcttgatacataaatggatccattgtttgagggtttgaggctggttgggacgtactctgatttgtagattgtaccaatttgttcacacgtttttgttgatgtgttaagagcaggtacaatagcagactcaggctattagtcagctataaatatattttaatgagataaacgatgagagagaagaacatcgggctacagatctatagttagctgcagcacagactacaaaacacaatgtgtgtatgacaggtgagaccatatattaatagtatagtaagcagccattgtatgaattggctattagattggctatagatgaattggagctagtagtaggctatactattaaacttgctctaatacctgcaaattaaaatggagaaagcaatatttgagtttcaaaaaaaatgaattgatattttttgttgatgtttttttactagcaccggcaattgaccaaggttcctacaaattttcatgcaatgtatgtttccttttagcctacaacttgcatgcagactgtaattgctcaaatgacggcctggtgtataatgtctgaagtttccatcagtgattgatccagaatatcatttcagcagatgaaagcctaactagattttctcctattgagtcgg

SEQ ID NO: 49812 - DNA, 2217 bp, Oryza sativa
tttaatgctgttactgcaaaccctaaccccctatattatggctcccttgtactcccttgcatttattctgcacttgtgggtgtgtcttgttgagtacggtggttgtactcagtcttgctcaatttttcccaaacccagaagaggagcccctggatgatgaaggctttggtgtctagctcgtgcctgccgtcaagcgcctgtggtcgtcgccctagtcttccgctgtttttcgtttgtcttcttgtgtgctgggtcttcgccgcccatgtaataaattaattacgcttccgcttgttaaactctgaattgtatcaacttttggtgtaccttgcctcctgggacaatgagtaatgcacgcacgtaaggaatgcccgttgggttatttccggtcgtgacagatatgagcaagactcccaaaatgaaacttgtgtatgattacatgaagtatctccaggatttattgcatattttttggagctcatttccacaagttttatgttgcttcaagaacttgcttagttgtatcttattggttaaacttcaaattttaaaagtgtgtttcatttagttgaaaatttgagttgatggcttaataaaagttgtttcaagaagtgagctctatgttatgtcaatgttaaatcaattttgacctcttttggatttgttccttgcatgaactcctcttgctttcaaacacccattatttgagccaacctaaactcaaatggaattttcattgtcaacctacacattccatttattttgcttctgaaattcaagttgatccttgtctccattgctaactaccatttcctgattccaaattcacacttgcatacactgtgtatggtgttcatataaaatagtattatcctttgatcatcttgaactcggtaattgcctatcattatcactcctttgttgagattacacacttgaccaagaagctctcaagtatcattgaccaaaatcttctcattgagaaaatacttgataggtatatttcgagggaaagttcaagtgcccataatcactccctcctacaaatgaaatccattataattctccttgtctaagtgacaagactccgagagtaagggggagcatttcttaaatggatcatttctcaaattttttctttgagctttcatctatttttttttggtcttgtgaatgtttgttcttgttttgcttgagcaaaattgtttctcttcccgtccattcaaatctttttgtgattaatgccaaaagggggagaatatttgaggatcccacatttgatatgatcattaatataaaggggaaaatattctaggatcccacatttggtgcatgtcttgaaatgaagcatatcatctcttatcaaagcatccaacatgcaccatatgcacaagcatcacatgcatagatataaatcaattgtcaatttctcatatcatgtttatttatatcattactttcacgcttcatatccaaatgtgattattattaatggatttgtcatcaatcaccaaaaagggggagattgaaagttcaagtgccattaatttggttttgatgattaatgacaaatccaattatgtgagacgaatgtattttttatgagcatttctttgcctagtctcatgtggatataaaagtggagtgtgtgagaggtgattcctggacttcttatgagttgagatagaaacattcattgatggtgaacataaatcacaaggatgaaattcgtggagatcaagctgcatgtatcactctttctctccatgtacatattgatatgttcatatataatattttcatgtgaataacaatatacatgtgagactaatgttttgtttaagtcttttctcctgtttagtctcttacattgagaacatgaagatgatgaaggtatacatttattttaatgcctatatttgataaatgccttctattcttgttgtcacgtcccaaaacgactctaaaatacatcctctaaattatgcctagaataattaaaatccgtgtgaaagcctccaacaattaaaatgtgcaaagttaaaagtcaaataaggcttggaggatttttgtatatttcctaaaagcctaaaatgcgtaaataaattttagtggaattttcagagcacaaataacaattattaagaaataaacaaagttaaaatggttttataaaaagaaaaactctaaaaagtcccctttccctccctctccctc

SEQ ID NO: 49813 - DNA, 1012 bp, Oryza sativa
gtaaaatacataaagaattcatattaactccaaaaattatgaaaacaaatgtgttagtcttagaaaacacttctctatatctctgtggagtcaaacttaataaacatcactttataaaaatattttataacactacctaggtaaatgctatcctataccgagcaaacttctaaaattcataactcacaaataataaaaagagataaaatataaattccttcacctaaattcatattagactagtacatatccactgtgcacaaatcatgcattttagagcattttggatttttcgcataattcggtgtttaattgcataacgtgtactttatatagataattgcttaaacggtgaagaagtgaattaggtgctgacattttgcagtttcaaggcaagtcctacctccctctatctttgatcactttgaatctatattttggaggttattgaaaatgaggttattgaaaatgtttgcaaatcttgcatgtcgattgtacactaataaactaaaattttgttaaacttgttagacaaactcctattatttgcattatcaccttaaccccacatatatccatatccctcattcataaccttaggaatcatatcatgttactacttggaatatgagttacattatcactagtttatagccaatttttcctttactatattgcttagccaagcttagaatggttttacttatcacttgggctcatattaacatgaaaaatgattttattaatattctggacagagatgaataaatgaataatttgacaaataaaatggtggaaaacttggattttaggtttgggcctcaagtggtgcacatatggtgattagttgtgtactgatagcactacaacaaaacaaacataaaaagacgtttatctagaggcgagactttagtcgtctctgtttttggaaccctccagagaataaagacgttttaagagacgttctagatggcgtcttagattgacatttattctaattttctttttacta

SEQ ID NO: 49814 - DNA, 830 bp, Oryza sativa
aacattatgcttcttcatcctctgtttatgggatcatcaagagcatgttgagttaggaagtcactgctccccatcttagctctagcagagaagtgctcaacattgtggtgcgctatcataacgattgtagtttattatatagggacaacagaggcacgccctaagtggaaaaataagtgaaactagcggataagatcacttgattatttgtgtgatcgattagggataaaagttacaaaaccagaaggttaatttggtgcaattttcgtatcttaacaacttaatttgcttgatggcccgcttaagcgggccaccagtgataatggaacttcgcaggtggacgcccatcggaccatcggacccccaaccataactatgcagctgggtcatcgcggccaaaaataatacgatttgcctgtgaaatttatggtctcgtagtgaaaaatcgtttttaagtacatagcgaatgccatgaaccattacatctactgttcaattttcatttacacccttggaaatggcctaagccctaaggtgagtcaaccaaggtttagttgggcacgtgcgtattgttcttcgtgatgataagctcgtaggcatacagctaggcatggtgacgtgcgtccatgctgtcacatatgtaggcagatcggacgagcgtcttgtagctgtaccccaccgagattaagcgagatgcacgctaaaactatcgatcataaatgatactcatccgtccctcattgactttttttaaatagtttgaccgtacatcttattcaaaaaatttaaataattattaatttttttctattatttgattcattattaaa

SEQ ID NO: 49815 - DNA, 657 bp, Oryza sativa
accacgcgctacacacacaagcgaggaaacacacgacttatgactctaccctagagggtggcttaggttctgcgacgggttctccaagatcttcactcctgcttcacagctggcttcactgcttcctccacttcactagcagatcctgcagtcttctggagcttcggcaaacaactgacgatgtcttcttcttcactgacctgaccatctagtactagttgaaatccgaacaaggaagaagggagtaaaccttttgcaaatagcattaggggaaggagaaaggaactttcgcaaatagttttatttataaaatatgtccttaggttttatccacttggcttatcctacagtcgagatggctctgataccagcttgtcgcgaccgggaaaatttccttttcccgaacgctagtgtattaatccccggcccaggaaaagccggggtacaccacacaaacatgatacgaaaggcacatctttattatatcgataatatttacattattacaaaggcacttaaggcctgacaatcaaaaataacagcagcggactagcgggcctacggctccatctttacaggcgctcaactggtgtataagccaggactccacctaagacatctttttcaaagcttctcttacttgagaggggaaggatt

SEQ ID NO: 49816 - DNA, 5850 bp, Oryza sativa
tcagtttgtgacggatgcgaggctgtggttggtgttaaggtctactcttcggaagtcggagaatggaattacagtgagtggaattacggaaccagatcctctgacgtgaactgctccctgacatggtcactaacaggtggcctgagagcggtggggcccacatatcagtcgtcacgtccctctgacttcacctcagaggatcccaatcctgaaattacagggaaagcgaatggccccacagtaatatagtatatgataatcaaagtgtctttctcaatggcattgctgcatttagtcattcgtcagcctcttgtggagttgtggtagtggcagtggatgtgaagggggagatatggaggatcttgcctgtgccggagatggactatgcggaagaaacatatggttgtgttgtaatcagttctatcggtcaatccaaagggaaattgtaccacctcagtaaacacaataacaatgtcgttttaaacttgtcaatataggttcttgaggactattctaaggatgaatggacactgaagcataaggtgactattgaactgctgtctgggaagataagttgcaagtaccaaaccatgttctaccgtggggttgcagttcatctagactgcaacttagtttactacattgctgattacatactgatgtcgtatgacatggatcgtaaggaaccacgtgttattcaagatcttgggtcagattgtatgatggagtatcttccctatgttccactctacgcaaaaacattgtctagcggccgctaggtctatttctttgtcatgttgcttggcatttgatcccatgaaatgatagttagaccttctaagtatctaggccttttgtgaggatcagcatgagtgcttttctagttgtcatttgtaacatgttggtctgccacttattatatcgaatgattaatgtttatgtttattagcttatgactgtaggaatgtaacaattcaggatgtaaaaacattgttattctttcttagtgtttgagttgtgtcagttctggaaaagaattagttcgcttgtgctgttgtacaatatcaggtctagggatggcaattgtgcccgtttacccgcgggtaaaaaccctattagggttgggtttgttctctattttatacccatgggtatcttattgagtcaaaagctatgcccgatgggtaaatgggcatgggtataggtaatcactacccatgcccgctttgcccgtttacccgcgaaatctaacttacatgtagactaggagcaaaatccactagaatacataagccacgttctttgttttctacggtttcccttttatttcccttattatttctctcctcttactctatcgccgccagaggagagacacgacaccgaggcggagaatatttgatgttttaagttcgattcgaacttagtagcttgtagactttttgttccactgcttttgttgtggcgggtaaacgagcacgcccgcgggcataaggcgcctgcgggcaatgggcatgggcaaccatccttacccgtcatgtagtaatgggtatacccacgggcacaaataatctcatgggcatgggtattggtaggcactacccgtgcccgtcgcgcccgattgccatccctaatcaggtctgatgcttgccaaaatcaggtcaatatcggagaaaaataggtgagttctcatatcaaagaattcagtaagtggcagtatgcttaggtgatcatctgatgaaaatgcttgagttcttatattgaagaagtttaagaaaattccatgtgaatacctttaggttatctcctggttgtccaggaagcataaacgtggtgggctggtagctctatcatcttgtgaggccagagtaagtatatcgcatcagcagctgtactttgagaaatgccaatgtctctcctgtcttcttgttgagctgaagaatgcgatggcaaggattgcatctcgttgatagtaggtggtcaactgacatttgtctaaaaattgaatctatttcttggcttaaatttgtggttaggttgtctaatgaataaccgaacagagtagtttgatgctaaaccctgttttcaccaaatacgttattactagttttcattacatatacccgtccctgagtacaacaaacttcaactttctcatttacaaaattttctatatagaagttatttaaagaattaaaataaatctatttttaagttttataattattaatactaaattaatcatgtgctaatgagttttctcgttttgcattcactaaaaatccctcttccaaagaggagatctaatgcagccttagagcatccccaggagctcatccatatttaatcctccatatacccatatgaatggccatccaaaaacgattcatcattcatatccctcctcactataatagatcatccatatcccaccctcccatattttactaatatcttccaactaacatagctgtgcatggatttacctagcaagaaaaatcacatcaacataaataaaatggacataaaagctcatttctactccattcctcattttctacagcaaaaatatagcaacataaatctactaagtttctactctactcctcattttctacattcttttctctgctcttctctacttttctccactcttttgctataggggctggggtggcaggcagcgcacggatctgcctaggcagccagcgggtgcggaggctcggcgacggccggtgggcgaggagcagcggcgggcgggcggatgaggggcggcgatgggcgggcaaggggcgtggataggcggagttgccatacggcgggcaagcgcagggcgacggtggtgggcgcagacgtgcggaggtcgcatggctatcgctgccggcgctctccttctatatctggtatgcctctccccctccaggctcactccacagctacaccctctctctctccaccctccgtttcaaaaaaataaaaaataaaaaagggcatggcgtactctccttcgccagccgacgacgacgacgatggaggggaggtcgtggaacttcagatggaggtgggagctcgatccacatgatccttgtgacatggcttaaggagagagacatactatatttgtctttcctctctccgtgtgtggcacatccgctactttaggatgaccggatggggcatccgttgaaggtgggtttttgtgctgttaaattccggatggagtatcggtagcatatttcctgaagatgatcttagtagaaatggactttatagatatatataaattagaaaatattgaataatgaacttttttttaaggatatagcaatagcatagcattgttcagtcgattccgtatcaatcttctcccaatcctctaaaccctcttccaaaaaaaaaaagaaaagaaaaaagaaatctctaaaccctactacctcgtggaagaacgaatcccccacgctcgccgcgatgcgaacgccgccgcctcttcccccgtcgccggcgccgcctcccttcctccaagccctagatccgcggcagcaggtacaccccattcactcctctcgccgccgccgccgctagtgtggaggaagaagtgcatgcggcggagaacatttacggttctctgccttctctccctgcaagatccgccgccacttccttctccgtccggccacctcgtgtcttccggatccaggtacatatacttttcgactgagatttcttgtctagtttcatggatgtacatggatatatcttttcacctcctgctgttacaacttacttgtgtggttaagtttgctgcattttgattttcttgattctttcgtttttcagagcgtagcgttttttagttcatctgttgctaagttaagacctttcaagtctggtcaaaggaaaaagctcagaaaatggtagatatcatagaactccaagttgttagttcgttgtttcactttcaatgagaatgtcattgttcatgtaaaattattcatatcttttgaatatggcttcctgatggcaagcagtgcatgtaattcagaaggtgaaatttcgtccccagtgttgctgtttggatcgtagaatagttctctccttccaaagctttgctccagtttgttcggaattatcgtactttgcaagagactgttcttttactcaatgtccacatcactctgctcagaccatgtttcaggctatggctgcagatgtagaatgaaacattttgtactagtaggtatattagctgtccaaaaattcctcgaaatttgcacatagttttgcagaaaatctaacgagttaaagctctgaatcctaaaatatcccccaaaaaacatcctctgaattctgaagagtgaaatatctgaatctgtagatgtaaagtcatatatgtagcagttatgcacgcagactagcagtctaccagttttaggtttagttgccaataaaacaaattttttgatgtactgattggtgcacttatctcctgatattttaagttttaccttttttcggcatctttgcaaggatcactcttttcctcactatatattgatgttatcattccattaatcatgttgcctttcataaatatcaatataactcttcatgtacaatctggtttttaatgtttggaggcatttactctgtgaaacagattccctgtttagattactcttttcccattatatattgatgttgccttctatctgaatgatccctgttatgcactacctagtttttttttttttttttagtttggttgatcaatcaatgcaataatattctgtagtgtaaagcacatgttcaagggaaaagggatactcgaatcaagaagcgggaagaagatgatgacaatattatgatattatgattcgtttcctttttcccgctttgcatcttttgggtactggtggtgggggacagaggaaacatgaatctatagctcaagttagaaggctatgtgacaaatttagtgcctctgttcaaaattgtgttattggtataatttggatttcactagtttattttgaagattgtgctttacttaatgttctttctactgtgagttatttctacttttgaaaattatctggaaacctgacctttcttgtttgttgttttgattagatctgaggactgaagactactgccagtttcagggaggatttctactcagtggaagcttgtgttgtagctggtcttttgatgaatctattggtctcaaatacattgtagaatagtatttgttggttcgttgaactcaatgggttctttgccgtccaaagccactggtgaggatgccctagttctatgcaaggagcgaatgcgccatatcaagcgagctattgattcaagagatgcactgtcggcatcccacctatcatatactcagtccctccgtagtgtgggtactgcattgcggcgttatgcggagtctgagatctcaacagaatcatcactgtccatttcagaagcagataagtcaccatcacattcctctatggcttctccatcgccttctcaagcattagagagcactggttccccagtacatcgaggtagtcagctgactcctccctcaacaaagatccattacatgaaagcagcaggaacaaaacctttaacaatcactattgatccatctgctgctgactttgtggggcaagaatccccagtctctacctttgtgccgccaccaccaccattgccccctgaattatgtacctcatgggatttcttcgattccaattatgcttctggtagtgccacctcaaataatgagaatggagtgacattaaattttagtagattgaagggtctgagagattcaagggaatctgaagcagt

SEQ ID NO: 49817 - DNA, 821 bp, Oryza sativa
ctttcaaacctaattgctccatgatttgacaatgtggtgctacaataaacatttgctaatgacggattaattaggcttaataaattcgtctcgcggtttactgacatttgctaatgacggattaattaggcttaataaattcgtctcgcggtttactgacagattatgtaattagtttttttattagtgtccgaataccccatgcaacaccctatataatatccgatgtgacacgccaaaactttactccctatatctaaacaccccttaattctactttgggatgctaaaactttactccctatatctaaacaccccttaattctactttgggatgctaggaattgactttttgtgggacggaggggtacttaacaagtagttctaaagaatatataaaaatattaggactatgttatacatccctgtcaatagatttttttcctaatatttgccaaacgtaaatacattatattttttctatagaaatacattataattgtagtataattatattaaaagtcgcatgtaactctattataatttttgcatgtaattacattataaattgcacgtaacttcgaaaaaccctgtggtagcgccctgctttcgtggagcggaggttatgggattgaatccccccacctatgctcacattgtgttttttttcttcctcgcttgcacaaaatttcggagcaaatctaacggtataaaattacatagagttacacataaatatactactccctctgtttcaggtaatatgatgctttggcttttgtcaaagtcaaactgtttcaagtttgaccaagttcatataa

SEQ ID NO: 49818 - DNA, 1180 bp, Oryza sativa
tgcccgttctgttgaaaccatgcttggaattcgttgactttgatagtactcatacccttgcaatggtgcaatattcatcatctttctctaaatgaccatcaagatccatagctcatcttatttcctgaagtctttgatgcaactatccaactcaggccgttcttcatttcttggggctgcaattagaggttaaaaaaagactaatggtttttattaaatactaatgtatagtttgattcgggatgatgattggcagtagagtagggggaatttgaattggaagtgattgatatgataagtagtactacaaagtgataaatagtactctcttcttccctaaatataagagattttgattggatgtgacacatcttagtataagaaagttgtccacattcattgtactaggatatgtcacataaccaaaatatcttgtatttagagacggacaaaatatcttgtatttagagacggagggagtgtagtgtaaacattcttctttagatgcactatattatactcagtgcagtaaaaaaattgtatacttgatgtagaattgtggatacaagcatatataaggataaatatacccgagctggcaactgacgagttggcccaggagccacagtagtagtagtacaatacattgcatatgtgactattcctacgtgggcccacttgcaagagaccagtctggctttggcacgcacgggtgattagcttagtgcttaatcaccatgtactttgtgctaatcaaaagggattaaaactagcttcgattaagcacgcgcgtgaggcggggagcaccacgtccacgcggacaccgcgtagagcggcgtgcccttccaccccagccgcaccgtgccgtcgtggtctcccgccaccgtgtagcccagcccgcccggacacgccgcggccaccagctgcgcgcgcccgccgccgccgccgccggcgtgcgcgaacccgtgccgggcgagcacctaccgccagctcccgggcccctcccggccgttgctccgcgccggcccgccgacggcgagcacgttcgcgatctccctgccgagcacgccgtgctccgccagatgcctgctcgcgtcctcgccgtccggccgcgacgcgcccatggcgtctaacaccgccgagtagtggtgcagcgcggagacgaacctgtccaggaagc

SEQ ID NO: 49819 - DNA, 841 bp, Oryza sativa
agatgaaaaaagtacggccaaaagatttttctatgttatgttaataataaataaagaagtatttattggtaaaacttgttaatattgttataaaaatgtattgaagttggttgttgcgcaatttcatatgttaagtgaggtattattttgtaccttattcgacgtattagtactcggataatttatataggcatatcgcagtctaggtcatagaaacattatatggacttaaacaaggagaattatgtaacatgaagaaatagtagtacaatttgaacatgatacaactatttgcattgcagttacatagatgatattagattcgaactaggagggaggtagtgcaatagttgaacacaacgacgatgtaataatgggacaaggaagcatgacagtagaaatttcaatatgccaagttgtccgataatagctaacccctacgtgaggatccctctcctctctcaaaccgcgctttagtaaccctgtattgctctggtagttcaagctgcacaacacggctaggtggagttagaacccttctggtgtctatccattctctgtattgacatctccttggtggttcctgggaggaaagaatagatgtaaagcaagcaaagttagtaaatgttgtgagaaaataaggaatcatgtaatcaaaatattcttaccatgaaatcgtcgtcaagaatatttggacaaacaaagaaccttcgacccaatgttgtaggatttatggaacgaagaacctgacaacgatcaccacacctgtatcttggacgggcttcccatggagggagtgccgtagttagcacccgccagtcgctctgttgttcacgacatt

SEQ ID NO: 49820 - DNA, 1205 bp, Oryza sativa
gctccatttcctcaaggctgcttcggtgtttctgagcttttgacttagccgccaagtggggtgaccttcctggataggctcgttccaagcctaggttacgacgcctaggaaaccttccactctaatctagaaattttcaaatcggaacctcagtttcctctttggttcttgcattggtgctagcagcaactggcagtggtctgagcaggatgtggatagtgctagcaaggaatgcccagagaaaagaatatctccctcactattgctcagaatcctatctaatttgcttagaatcgggtttccctgctcattactccaagtgaactgcctgttttgcaatctattgtcttttagctccaaagtatttaaggttgacctgaagcgccccattagacgtctgttcaaattctggttattcttatccctagcctcgtatatgatgttgaagtcccccatgaccaaccatggcgtgtctgttggtggcttggctgcgactaattcggcgaggaaattttccttgtcacagtcttctgagggtccataaactactgtgatgatgaagctgaggttatcagttatggtcattccatcgccgaaagatggtgtgttccttgggagaaattcgccatgttaacaattgtgtcatcccagaagatggcaattcctccacgagttccattggcaggaaggaaattgaagttcgacaacctgtttcccccaatctctttgccgatccattggtctatactacttaattttgtttcttgcaagcacaggatgcctgctctggccagctcggctgcttcgaggactgcctctcttcgtgctgggttatttagtccgcgaacattccaactgagaattcttagatgttgtaacatttgggcgaagtataacacataattttttccaaaaggatcgatcccatagtgttttccaaatgaattagttcataagcagatagagggctacatattttcttccatgacctacaactacaaaccaaacatgaccatgtagaagcaatttcactatcttctagcctgtctactctgctactaaccagctgaaggccggtgtctaccgggagcgctattcgcatcaatcgactaaggagctccggcttaaggccgttgctacatgggagcgctagtcgcatcgaccatacagcgagcagcggcttaagaccgcaaagaaatgtaaag

SEQ ID NO: 49821 - DNA, 523 bp, Oryza sativa
taagacgaccttttcacgttcaccttctcctccgtggatggcctgagtctggaccgtggcctggtgttgctcctcgcagtcggcctgctgcaccagggtgggctggtctcctgtgaaagcttgggcctcgtcatcttgagtggactgagcgaggaggtccatcttgggggcctgctgcgtatctgggctgagatggcccatcttctcctggcccaacttagctgccgacgccaccttatcctctcccagtatcggttcttccccacccgtcctcttcgtctcgttctccgcctcccgtgaagacttgggagcgatctctgctaggagtggcagcatcgggtcgtggttcccctgttcgtctgagaaggggaggagaggtaaggagcataggatctggatcagagggtcggggagactcacgagagcgtcgactggctgcttgtcacgccccgaactagtcccgagcggaactagcccgtgacgctccaaattaacctgttaaccgataccagtcccaggaaat

SEQ ID NO: 49822 - DNA, 931 bp, Oryza sativa
taaaaaagttttatgttaaaatacatgatttatttaacaaatatatcaaatacttcatcatcttgaattgtattttcaattgcactttttgtgcaagttcccatatttgtactattctttccacaaccttttcccattacgtgcacaatagcatattgacattaatggacaaacatgaaaggtaacattaaatagaaagtaaaactcaatgaagtacaatgttagtttgtcttatgtagtgtctgacttttcttttagaagtactggtgtccgccatgaccatatttttattatattcttcatcaaaatcatcatcaagcgaaattggtttgtcatttgctatcttctcacaatcagtagtatatggttcctattaatacccatcaattgtatgtaacatgtcagtaatagtttgacaaatcgttttgtatatgaaagaaaagtaagaattgtaccttatttctctgagttttcatttcagaacattttcctttcttagcctatatcatagtgccatattgaaatggtaaataatttatatgaaaactaaattgagtgaatttggaaagtaaaataaatgaagtaccttgttagatgttttaaaacgtcttgtaactcttcttttagaaggattcgtctttgtactctcctgtgtaaccttttcattgtattcttcatcaaaataatcatcaagtgattcttcacaatcatcatcgattgtgattgccttttcatttgttttcccatcaaaatcggtaatgtatggttcctataaaacatcattattagtgtagtactataaataactttacgaattgttatgtaagaaagcaattatacataccttgtttgatctttttgtacatctcatgtttgatctctctttctttgtttgcgatgattgttcatttcataatcatcactactttca

SEQ ID NO: 49823 - DNA, 626 bp, Oryza sativa
atacaaaagtaatcctcaaaagttgtgttcactgttcgagctcgtttctaaggataggcgggaaaacacttctttccggcctatccccgatcttgttcgtgacctaaggtcacaacagtggcgccgtccgtggggacggaaagtctccattgaattgggctcaaacagtaaatgcgacgttctcaacgacagaagactgtgccagtacgctatacaggagcttttgcaagcgcgacagctgcactcgagagagagtgggaaaaggcagtggaagaaagtgacttggtaagagcaacggaaacacttgacaagcagtgggcagagatggccaagacatccacagcagcaggaggtaatgaaacaactcaagaagaaagaattgctggtgcggtggtggaagaaacagagaaaacacccatgagtgatgtagagcttgctgaattggtccaagcgcaaggggctgtcatggtgagtaaaggacaatatgaggaattgcaaaaagagttacaaagattgcaaaccctacacaatcagacagtaggagcaggaggatcaagtgatcagtgtgcaataccaggggctagggaaaagcaatcagatcaggcaaaaggtgatggactacttgc

SEQ ID NO: 49824 - DNA, 909 bp, Oryza sativa
aggtttgtaccgcaaaagaaaagggaggactaggaatcaaaagtttaaagactcaaaatgaagctcttcttctcaaaagacttttcaaccttttctcagataattcctcctggactaattggatttggaaagaatttgatggaagatcactattaaaatctctaccgttaggtcaacactggagtgtctttcagaaactgctgccagagcttttcaagataactacggtgcacattggggacggctcgagaacatccttttggcatgatcgctggactggcaatatgactcttgcagcacagtttgaatctctcttctcgcattcaactgacgacttagccactgttgagcaaattttatccttcggaatttacgatattctcacccctaggctttcatctgcagcgcaaaacgacctacaagaactgcaaaccattcttcagaatttttccttgacaaatgaatcggatactcggctcaacaatcgccttggcaatttaacaaccaagacaatctatgatttaaggtctccgcctggctttccttcaccaaattggaaattcatttgggactgcagaatgccattaaagatcaagctctttgcttggcttctagtcagagatcgactgtccacaaaattgaatctcttgaaaaagaaaatagtacagacagcaacctgtgacatatgcagcaccactgatgaaacagcagatcacctcagcttcaactgcccttttgctatcagtttctggcaagcacttcatatccaaccgatcatcaatgagactaagtacctggcccaactaaaggcaccagcaactatcccaacaagacattttcagagtttcttcatgctctgctcttgggtcctgtggaaccacaggcatgatgttgtattccgaggaagac

SEQ ID NO: 49825 - DNA, 1061 bp, Oryza sativa
ccttctcctctcaacattgtttatcccaactcttttctttcttctttgtagagtttgtgtgtaacttgttataccttcttaacatcaaataaacccttcctttcttcttttctttataaacgctctttatttcaattgttcaagcacccttaggtaaactacgtcctccttatctttggaagaagttacgaaatcgaaacgtactttatctcgtcacgtgcattttccgccttttgagctcgagcgaagggaaaatagagttcgagcattctttagttggtttttttggactaaggcaaaatagttcgaaaaccaccgtcctcctcacctttcgaaggagtgacgaggtcgaaacgtattttacctcgtcacgcggattctccgctttttgagctcgaacgagaatagagttcgagcattctttagttggttttttggactaaggcaaaatagttcgaaaaccgccgtcctcctcacctttcgaaggagtgacgaggtcgaaacgtattttacctcgtcacgcggattctccgctttttgagctcgaacgagaatagagttcgagcattctttagttggttttttggactaaggcaaaatagttcaaaaaccgccgtcctcctcacctttcgaaggagtgacgaggtcgaaacgtattttacctcgtcacgcggattctccgctttttgagctcgaacaagaatagagttcgagcattcctgagctcgttttagggctaaggcaaagtagttcgaaaaccgccgtcctcctcacctttcgaagaagtgacgaggtcgaaatttgctagtcgaaagtatctgactcctagcgtgaggagttatattttgtggactttgatagtcgaatgtatttgactccgagcgtgcggagttctattttgtggactttgtcagtagaatgtatttgactcagagcgtgcggagttctattttgtggactttgctagtggagagtatttaactccgagcgtgggcagttctattttgtcgaactttgctagtggagactatttgactccgagcgtgcggagttctattttg

SEQ ID NO: 49826 - DNA, 613 bp, Oryza sativa
tgagggcgactctagcgagagtactcttttattgtaacatgcagattcaatttattttcaatttttctatacatatcatgtcatgttacccttgagcgttcgctcggggggctatttcaacattgttgaagactccctgtctctacgattctataccgggatcgactaagcgagtacggcaaatgttctgagtattgatttcaggaaaatcagacatcagaacaatcaagtcagatttcaaggctttgtcgcagactctacgcctactcgattactcgagaacggttgatggggctcgacaaggaatatgaaacaaagcgatggtgtacccgccgagatggaatttcttgacttcaatccaaattctcgattacagcaaggcgggagacttagtcacatgctccatatcttctcgcttgacatcggagattaacctagacaaacctaataaagtgcctacaaagaccgatgagatctagccttatttctgaacacaccgagaacggtcaagcgagcacggcaatagttgttccaacgtcttcgatcgaaaaccttaactcgttcatttgctgatgaacccaaagttccactcgacactcaaggctgttgttgg

SEQ ID NO: 49827 - DNA, 737 bp, Oryza sativa
gtatgcagaaaatgctcaggcaagagcatgtcgatcgcttccaaatcaataatttcagaaagtaacagtctcctcacgaagacatgaagtatggaacgattatttgcatcaccatcatgcatgattgtattttgttctgaatgtttggtaaatcatgtgcagaagaactagaacaatagttttttctccatgttcattatccactttcacgaaaggatgctaattggtgcaattattctgggtattattgatcagcctgatttcactcttgacagcgggagcatagtagtctgactacaaggaattgatagacaattctcgttgctgcaagattgttaacttttctgagatgctgcaagctaagctggttttaaacaagctaattatcaggggcggatgatctatggatcagtttgtcgttaaggtaacttcaattcttcatggttcatgtcatgtctgaaatttgccatgataaattactttgatccttttatgtgttcattgagccatgtttttttttaaaaaaatatgcttgtttatctctagaagaattgagtatagtttcatgacacttgcaatttaagctcgtcatcttaggtaggtatctgtgttatcaagaatttaagatgtgtcataaaaaaaaaccggcatccgaatgtttaaactatgatggttcagctggaaatttgttgatatactttgaaattttgctaaccatgaatacaatgttcacttga

SEQ ID NO: 49828 - DNA, 951 bp, Oryza sativa
taatacattcatccttcggacccatcatttcacttattcatggaataagtcaaacggcatatttgcaaacgaaaataatttataaataaaacttatatatatatatatatatatatatatatatatatatatatgttcttagcgatctaaaagcaaaggctgaaaaataaacttctatgaaaaaaccttaaaatcagctccaaatttaatgttgaaaattcaaagtttagccgataagcataagcataagcaaaaatatgagatcttttatcagttagactcacatgtcaaccaccgctgtgggtgaaaagttacgattttctgactcaattgtttgctattgttctagttttgtgaaaatagtagcacttaacagtgaaatttggtaagcctcgaagtcatcattagtctatagtcagtatcagcttcagagtcctggaattagccgatgggaattatcaaggtgcaaatagtcggattcttaccatatctagaatagaccgagttcaagggagatgcagcatgacagtttatctattaattaggaatagtacattagtttcctgttatctttaggaaagtgtgtttagtgtctgatatgcactttatgttttccatttatccttaggaaagtttctttcttgtataaggacaagtatctatccataggtataaatatgtacatccgaggtcattgaaaattatctctcgatcaatacaactactctcggcgcatcaccaccctctttttcgaggtttttagttatcatcggcggaacatcgcacctgacgcagggctgcattggctttcgatcactacaacaaattgggcttctatgacgattacctgatgacagaacacatatctgtcataaacagaggctgtttatgacgactgttcacaggatgacaactgtttatgatcaaaccgtgtctctgtcataatcatcg

SEQ ID NO: 49829 - DNA, 869 bp, Oryza sativa
aaaatattgctgagagacgtctggtgaacggtttgagtgagtttaggggtaaacatttctggttttgtggttaagtaaccttaaaaaatctcgctgttaagttgagggacctctggtgaacttattcatttattctctattaggcccaaatttcccactcccctccccctttcatctcagcccgtactcagtttgggccgcaactcagcccatttttcctccccggctaacccaaatccccaaaccggccaaccctagacctagaggaatgagggggagaggggttggagcggggaggcgggcggcggtggccggcgattcgcggctttcacacggcgtgtggcggtggcgactgcggcgcggctcgtcggcgcgggcgtggcttggcgccagtgcggcaggaggcggcacgtcggcggcagctgcggcgtgcgcgtcggcggctggaggcggcgcgtcggcggctgcggcgtgcagttgccgacctgccgccgagatcagacaccgaccccgatcacgaccagaggtaggagcaggaccggtgggcgcgctagtccaccgaccactccttcagcatcaatgaccgcgaggagctccgtttcgtcctccttccccagctttcccacctcctctcttcctttctctcttgccaattgccaattggacataaggatctctcggtagagctaaacagaggaaacctgttgtgtggtgaaatggatctatgactgggaaggaaaacaaattgtcagggggaaattagtggccgattgacactggctaaaataataaatcttcggtttagacctcttggcatcactgtcacggacacctgtgaattgcattcttatcttcatacttgcaatgaa

SEQ ID NO: 49830 - DNA, 646 bp, Oryza sativa
gttggtgtttggtgcatgtgagtatgagttctaattaattatatgaaaaatatgtacaatacgaatccatgtgattgttactaacaaacttcttctataggatgcaatacatggatgctaagaagaaaaaagaacctatcggcttcttggatcaggctacttaaggtttaccatttggcttgtcctaaggtcaaggtggctctgataccaacttgtcacgcccggaatttctatccaaaattccaaacgcttacatgtgcattaaatcctcgtccaggaatcagctgaggcacacaataacaaattgttaatagagtactatcaaactactaattaatattcgcaaaataataaattattacagaggtggatagttcctctcaaaagaataaaattctacgcagcagaaataaacaaaagactaaacagctatggcgactccactccacaagcaacttgacccgaacaaagtctattcctcttgatcatcaccttcagtgaagtactcctcctctgatgaatgagtattgcaagaatgagcatatgacatactcaacaagcaacacagcaaatatgcaagtgcataggataacaaaggatggcatagtatagcttatgtgcataaacaacatttaataaacatttg

SEQ ID NO: 49831 - DNA, 768 bp, Oryza sativa
tctcattttaggattttaggattgaagtcatctctagtctcattttatgaatgaaaaaaaatcaaaattatggcgtttcattttatgattgaatgaaaaaactaaaaaaaaacaaactaaaatggctataagttggtttgaacctgcattactacaagaaatatgaccttctgtgaagaattcctcgtaacatcggagttatttgttattagcacattccattttatgacaattaattagtatgagatggggaggcttagtgacaaaaacatttgctttaaaaatcatggccaaaaatatttttttaatattctacgtggtctaaattattctttgaaatttttcgtgaattttcggaggtcaataactaattttaataccacaaagttcatttaacctattaaaataaatggaaaaaaattaaaattcctctctctatccttgggcctttttcggcccaagtattactctccctctctcagcccgcagactccctctccctcctcctccctctatgggccgccggcccagcccttttaatcctccctcgccgagaagtccattttagctccctcctctgaattcaaataactttttgcgtaataaatgatttcagataaaaaagttatcaacaacaaaattgtataaattatcaagatttacaacttttattttgttcattttactatataactttgtttcaataatttgaatttgaatttcaaattatgacaaattcaaacaacattttcaaatactaaatgattt

SEQ ID NO: 49832 - DNA, 762 bp, Oryza sativa
aggaaagtttctcatccttatgtgattcctgaagccattaatactgatgctttaaaaactgaatttgaaaataattgcaaagctcgtaatattcttttgagtgggatttctcgttctgaatatgatcgtgttgcacatcttgaaactgctcatgagatttggaatgctttgagaaattttcatcaaggaacaaataacattaaagagcttcgtcgagatctttttaaaaaggagtacattaaatttgagatgaaatctggaaaggctttggataactatctttctagatttaataaaattttgagtgatcttagatctgttgattcttcttatgatgttaattatccacaatctgagatttctcgtcactttttgaatggtctcgacatgtctatttgggagatgaaagttacatctattgaggagtctgttaatatgtctactttgactttggattcactttatactaaattgaaaacacatgagatgaatattctttctcgcaaagttgattctaaatcgagtgttttggtttcttcttcttcttctttgattgttgatgcttcttcatctatgccttcttttcttgctgcttttaatgccacatccgattatcaactcgaacaaatcgaggaggaggatttggctttggttgctaacagaattgctcgagctatgaataatgtcaggaacaggaaaagaggtggtccaaatcgttgctttgaatgtggttcaattgattatcttcgttcgcattgtcct

SEQ ID NO: 49833 - DNA, 575 bp, Oryza sativa
aatggctagctggttggatgacactgatcatagcttgaactttacgtatttatttttggagcagatgttcgtatggtaaaatgccttaatggtatacgatctatttgacatcagatacaactttctgatattgattccaattccattcagggaaagagccagagtgccgtacaatttgcacacagaggtgtgtccaaaagaacttttttgcagtaaaaatgtgaaatatagggagacatgaaccattaggcatttgtcacccgtgtgcctgtgtgtgtcactcttctcatgatctcatcacaccagtaaactgcatattaacgcctgaattcattggtagtgccaaattctaggtaaactccggcactatcaaaatattgtagggtaaagttatttagctaatatttggattgctaccaatataaaaccaaactcttatagtatagaggagaaacttctagaatatgaccaaataaggtaggcactaccaaatatttggtgttagtccaaactaacacacatattattcagtttgccaacaaagtggaaaggcatgttttggtatccaaccaaaa

SEQ ID NO: 49834 - DNA, 1625 bp, Oryza sativa
agaaaagcagtcctatttttcaaaaaattttgaaggctacttaaggtttaccatttggcttgtcctaaggtcaaggtggctctggtaccaacttgtcacgcccgaaatttctatccaaaattccaaacgcttacatgtgcttaaatcctcgtccaggaatcagccgaggcacacaataacaaattgataatagagtactatcaaactactaattaatattcgcaaaataataaattattacagagatggatagttcctctcaaaagaataaaattctacgcagcgaaaaaacacaataacaaattgataatagagtactatcaaactactaattaatatttgcaaaataataaattattacagaggtggatagttcctctcaaaagaataaaattctacgcagcgaaaaaaaaacaaaagactaaacagctatggcgactccactccgcaagcaacttgacccaaacaaagcctactcctcctgatcatcaccttcactgaagtactcctcctctgaagaatgaatattgcaagaatgagcatatgacatactcaacaagccacacagcaaatatgcaactgcacaggatagcaaaggatggcataataaagctcatttgcacaaacaacacttaacaaatatttgagagaatagtcaaacagttaaataattaagcaatattaaataaacactatacaacacacccgtgttgcataggcccaacctcatctgaacaaccaaccccggttgtacaaatccaacctccataccaggaatataccattccaaaccaggagtcaatttaattatcacaggttatcaccaataatgagtaatgtgagactaatcacgaaaaacattgttagacccgcccataaccgccggcacggctattcgaatagttttactctggctagagatgtaccactgtacccacaaggcacagctccacaacatgtcaccatgcgcctcaataccatcacggtacctcggaaaggaactgtgataataccccttgcacaacacaactcaccatagtgcaccatacctggatcatcatcaacccctctacaaccagaggcatggactccctagcgaccccatggacttctcgccgcttctcagtctggcaccccgtaatgaaccatgctatacaaaaggtaaagccgttgcccacgctggcttgtggttggcacggtaaatgtttcacaatagtagctcgcgaaccggtccttaattgtcatgagcacgaccatccaaaccatgtgctcacaacccacctttaatcaggttttaattatcaagtaattattgtcgcgtcccaaaacgactctaaaatacatcctcaaaattgtgccgagaataattaaaatccatgtgaaagcctccaacaattaaaatgtgcaaatttaaaagtcaaataaggcttggaggatttttgtatatttcctaaaagcctaaaatgtgtaaataaattttagtggaattttcagagcacaaataataattgagaagaaataaacaaagttaaaaaggttttataaaaagaaaaaccctaaaagtcttcttttcccccccttcccttcttgggccggctcggcccagttcttttccccccttttct

SEQ ID NO: 49835 - DNA, 1512 bp, Oryza sativa
tcgcctgcaaagcaaacaaatacagccataagcatgaaattcagctggcacactcataattttgaactataactaatctttctacttgttagataaatcaaaatatttatatcctatgagttacacatgttctacagctgaaattattatatggtccttttactaattcagagatgctcttgttcatattctaatggatgagaatgcaactcccaactcctacacatactagtatatgcatcacacaagaatcatgccaggatatgatttcaatttcattttaatctcctgattacctaccatgattttagagtggctgatatatggttactttctctggtcctgcagccgctcctctggacttagtttcaaggattctcctgatgagacagcttcagcctaaatcaatttgaatgtatcagtattttctgcagagtttttaagtactaatagagaacacgatactattttatcttagtcaatgcttacttaggttttcatatagtaatacgctacagcatacaggagcaaaccacccacacattgcaagaacaagtgtgcacaacatatgcatctgcagacccaaaaaaaattcttgtggaaccaatgtagagagaacacgatattgtttttatcttagtcaatgcttacttaggttttcatatagtaatacgctacagcatacaggagcaaaccaccctcacattgcaatcacaagtgtgcacaacatatgcatctgcagaccaaaaaaaaattttcttgtggaaccaatgcagacaaaatcagtcaatagaatcactattgaagaagcaatttttactacactaaatcccactacaaacatcactaagcaaaaataatctgcatctaaaatgttattctctattttcagaatatgcactgcatcacaaactaatcagccaccaaatctcacatcacatccattcattagcatcagatctaaacaaaaataagattcagtctctacctccacggctccacccacaagtctccatcccatctgccccatcagaaaagaacaagaacaaccaggtgcccatcccctttgcccccatctgcaaaaaaatgcacacaagaagaagaagcgttaggggaggggaggggaagaggaaggagagaggggcaagacaacctcgtacttctgcttccttgaaatctagaatcccaggtggaggttgatgtggtcagaagggatgatggcggcgttcctcaggggagctatgtgcaggacccgggttagatggctggagggctggaggtagcgtggatgtaccagtagagggctggaggcagcgtgatcgtggatgctagggaggagaataacaaggagcaggaggaggcgggggcggcgtcgatgaccgcagaagcagccacacccacccacccctcatcctcccagtcccagatctagcgcggcggcgagctgctgcgtgctggtggtggtgggcgagagcgtagccgaatccatggcggcgctagggtttaggcgac

SEQ ID NO: 49836 - DNA, 1364 bp, Oryza sativa
tagatcgctaagaacatatatatatatatatatatatatatatatatatatatataagttttatttataaattattttcgtttgcaaatatgccgtttgacttattccatgaataagtgaaatgatgggtccgaaggatgaatgtattacatgtgtgcctgataagtgggatatgacctttaaggtaaatagagtctataattctatgataaaatgaatttttgttgtagcaatttactgaaactcctacctacaaatttcagcaaaatgatagttttgatacaactgttgtagttttgtgaaatctagcctttcgccttgtttagttccaaaatatttcttcaaacttcgaacttttccatcacatcaaaacttttctacacacgtaaacttccaacttttccgtcacatcgttttaatttcaaccaaactttcaattttgacgtgaactaaacacagcctttattgaatgacacagacagctactgtattccaaagtagtaccaccagagccaaattaagaacaaaactagcattaaacaaacttgtttaggatggcttagctagccgatggatggcactgtgccggtttgatgcatctttcatcaaggccgccgacgaggaagacgtctggaattgcaatggcgccgccgccgagcaagtgggcagaatcgccgtgaccccagacgtaatggcgggcacgatcttcacgacgtaactgccgtcgccggagctgattcccggcgggcacgttagacgacaaccggagctggcgacgaccgcttcccgatggcaaccgcagcggcctctgaccgtgctcctggcggactgtggctcgagcgagaagaatgcctccgacgacaagaacgcactgcgcagccgtggacagtgtcgtcgtcgcggccgggtagaaccccatcgccggagtagttggaggctccaccaccagaggcggtggatgcaggagcactgcgtgcattccgtcgttgtggcggcatacagctgtgataaggaggcgccggcgaggaagcatcccccgcagacgccaacgcctcgccggagcggagggagaaggcgtgagagcatcgcaactacaaaactagctgtggcacgtctgttttggactacatgacttttttttttcaacctcggcattattatggatatagattaacgctcgatggtcgtgtcgacgctttttcgtggccaacacaagatcacctaactatttacggtgtaaacaatagagtcgccaaaatcgatatatcaaaatcggctagtgaaaccgatttcgagattaattcactttcgtggaatcacacgactaatttacaagcaaattagcaaagaggataaatatcgta

SEQ ID NO: 49837 - DNA, 2404 bp, Oryza sativa
gatgcattgagctggtttttttggctcgtgaaaacatattaggtgccggtttgaaaccccacaattggcacctatatttgttataggtgtcggttataaaccggcaccgatgactttggtcatcgtaccgtctgcggggtgcctgttgggaaattcggtacctatggcttgtttccaaccggcaccaatctgggtttctgtagtagtggtattttacaagttgacgtagatgacacataggtccaagtttgagaatgtgtataccattcattttactcttttgtaaagtttgataattgatactcgtgcatatactcgagaaagtagtcgttagcctatgtattaatagccttaattaggctactattagtgatatttaagataataattttctcactagtgtcagcttatcgttatggaataatgaattttctaccggccaattgactaacgcgaatacctagctagcgtgtggaaggtatcattctatccgtggatgtagttttttttttttatgttgagttaaaatagttgtttagagtagagtactgagagccaatatattcaacctgggcatcaatcactcttctaactaatgcccgctactaattaattaaacttgtgataaaaataaaataaggatcaatgtgtgctcgcaagatgctactagcatttatttgcgcgcccgtcatagtttgaaccggtgacatatggttccagtatatgatattgatcgaattgcttgcgtaacaatttcaacccaaagtcttaatcagatgtgaaatagacggccaatttatttacgtgactgaataacaacagaagtccgtgaaatatgaaattgttattaaattaacatgtgaaatagacggccaatttatttagcgtacatgtacaattgatgaggttagtgaaacactcgtgatgtttgtgtgtactctgtttttttgttttgcaacattaggatattaaagccagtaacaacctgcttactatcgagctatttgtacgaaataagacgtctcaacaacttgacaaacagcatattccattacgacgacgtagaaattttgtattctaatgcctaattaacaatcgtagttatgaatcatgataaataaagacttcatcacatgtataaataactccagtgtgcagtctgggaaaacaacatctgtataaaatagcatgtgagcatgcgtgtactccatccaatctaattagctaggaccccctgtttccatcttgtaagctacctgtagaagcagagcaggtatagaaaaaaatatggagaaacacactacgcaagcaataattgagttttgtttgtaagtttcaatgtatgagtttgcatacaaccaaatcaacacatcgaaaggttagaaaaaaatttcattgtactccccgaactattttgctggaacacacatgattgcttaaacattgtacacctccaattattaaaaagggttcaccttaccgccagcatatttctcttaatttattctctctaaatagtattttgcaccaaaatttggtaggatagatagatgcattacaacatacctattaatgtttattagaatttttcaatcactatttacataagtcgaaaagcactatgactgatttaaatactgaggtttataatttcgagcaaatagtcataaaaaaatttaaaatatcttataaatttgataatggtttcagtaatattcttaaaaaaaatcaagttaaatacaagcatacaaacagaaacaaagaataaatgactaaagtgaactattttaatactttacaggttaaaatgagcaagagaatagtttgaaggattaagcgatccaataaaatagtttgggtgtgtaaaatagacttttgtccaacagtttctagagacttctaaaatgtatttgcatgggcactttgggcgactggatctaacaaaaggaagatgtatttctatggatgggaatgtgccgccggtcgaaacataattcgattgctcgtggaaatcgttggcacatgcgacagacttgacttaacacaagaacctttcaaaatattttctaggcagttgacttatgcttctcagcttccaaaatatttttggatgcagtcacccgagatgatgaaagtagggctattttcacatgcaaacggtgacacggcacctggcgtactgcatgggttcctcataaaccacctgtatagttttaatagattgtttgagagaagggaaaacaagaagattgatcagaagctacgcaaaatgagctgagacattagctcatgattagttgagtattaattatttcaaatgtaaaaggtggataatatatatgatttttaaaacaacttccatatagaaaatttttacaaacaacgtaccgtttagtagttcggg

SEQ ID NO: 49838 - DNA, 764 bp, Oryza sativa
cggaaaaactgtgttaagtcagctgaaatggctgcttatctctgagttattcctattttatgtctggttattgctattggttctgacacgagaattttgtagagatacgagtcttttgtttgatatatctagtgctgacctttggtgaaatctatattgtacagattgggctgatgtatggaagatatattaagcaaaaaatacccctatttcttacaaaataaaatcttccacgtcagtagattagatgctcatcattgtacctctatatcaaaaaaaaaaaaaaataaatgtcgaaacaaataggtgatgacgaggtagcaagatatctgagcttattgttcatgagaggataaatgcatttgactaaacaatacaagaaaaaagtcagatatgttatcccttcataatattatttcgtgtgcaatgtatctgttggggatatgttagcagtccatagctaggaacatttgagattccttctccaatatctttgtctcgtgtgagtgcgtccttttctaacgtagaccagctaatatgtagtggcgggcccagctttttgaacttgtgtattcaaactgggaagaggtaaaaaaaatgttcatacgcctaaaagcctaaaaaatagcttgtgtagtataacacactaataattatatatatagcgtatataacataaaatttattataagttatgaaattaaacaaatatgataatttggtttaaactatgaacctatagtgcagtgtccactagaccacta

SEQ ID NO: 49839 - DNA, 640 bp, Oryza sativa
tccgggaagaggaggctgcacgccttgtgaagtccatatcaagtgatcaagcacatctagttaacctcagtaagaagcttcccgactatgctaccgacgcagctattcgcatcatcactggtactaggtttgagaatcaagaggttcgcgacaaattccagtactaccaagatgagggtgttcatcttgcggcaagcttctgcacagccaacctatgcccatctctccagattggaaccatctgagccgaactgctcgcaaagcagagatatatcgggaggggatgtttgcattcataggtgggattattgatgaacaccaggagaggagagcacaagatatgtatcataaggaagacttgatagatgtactcctaaggatccagcaggaaggctctcttgagtccccagttagcatggaaacaatcaagttcttaatttttgtaagatttttgccattagctacagcaaaactacatgagttttctcctcatttttctaacctaatgttttttttccaaattcaattttaggatattttggctgggggaagtgagacagtgacaacagtattacagtgggctatgacagaactaatgaggaatccaacagtgatgtccaaggcgcaagacgaagttagg

SEQ ID NO: 49840 - DNA, 634 bp, Oryza sativa
atgcgatgttttagaccggaatgaaaaagttcaaaaagcaacaaaacatgatttcggacatattggagtgtattggctgtgttcgtggcaaaaaatcactacgtgattcgcgcggcgaacttctgtcaattaatgctaatatttgcatatattggcacacgtgggtgcgatgttttacaccggaatgaaaaagttcaaaaagcaccaaaacatgatttttggacatatttgagtgttttgggtgcattcgtgggaaaagatcacttcgcgattcgcgcgacgaactttcatcaattactgccaatattggcacacgtgggtgcgatgttttagaccggaatgaaaaagttcaaaaagcaccaaaacaagatttttggacatattggagtgtattgggtgcgttcatggcaaaaaatcacttcgtgattcgcacggcgaaattttgtcaattactgccaatattggcacaggtgggtgcgatgtttttcaccggaattaaaaagttcaaaaagcactaaaacatgatttttggacatattcgagtgtgttgggtgcattcgtggcaaaaaatcacatcgtgattcgcgcggcgatcttttatcaattactgccaatattggcacacgtgggtgcg

SEQ ID NO: 49841 - DNA, 646 bp, Oryza sativa
ttttggtgtttaattgcataacgtgtcctttatctagataattgcataattggtgaaggagtggattaggtgctaacatttctctgatcaaggcaagttttctcctcccatcctttgaacacattgaatcccatgatttgaggaatgaaaatatttgtttgcaaagttgcatgtgaacttagattatatcagtatttaaaattgggttaaggtagttatgacctatttgccccaccttgaataattgatcttcttgctatttgaacacttagaaatggttagagtgcactctttgtgctcaaatgggtttatatatgctctatgtgcaactacttgcttagccatacttagaactatgcaaatgctcattccatctataattaaaatgtgattttcatacatgaacctttgctggaataaaatgaatatgatgggtatttgcgaactacaatgtgtaaaatgtgattttatacttgggcggcaagtggtgtgcatatggtgttagttgcataccgatagggggagtatttgcccaagtccataaggaccgaacttgtgtcacccatttaaagatattcgtacatccacatgtgctagtatgggatggcctaagctgattaatctatttaggactagccttgcattc

SEQ ID NO: 49842 - DNA, 657 bp, Oryza sativa
ttctgacctgaaagtaaagagcaagccatgtattatgctacgtactttccctgtccctcagatactcctgtgaccatacgatgaatacctcctatacatagagacatcgaacatgctgataagctgcctttttattcgtttgcaccaagcaacaacaatatcgtcctgaaagtttctgcatcagaaaagacttgactagtgcgggtcatcgtctttgtatcgaactggagtaataattagtctgaacaaaaacatcgctttatagtcgtacattcttttcaaaataaatacagatattcaaatttaaactaaaggctgcacttattttagaatagagagagcactaagtaggtggtgtctgaaactgatgaaaataaagattaagttagagtatgtgaaataagaaagctattagcatatgtatgattaaataaattataattattacaaacttgacaaatggatatatgtgatattttaaagcaacttttatatagaatgttttcgcacagacgacggaacgcaccgtttattagtttaaaaaacgtattaacgggaaaacgaggtaaaatctagatatttgtgactgactggtcgaattattaccacggattatttacacgccttgaattgcaaccacgagttggagctgaagct

SEQ ID NO: 49843 - DNA, 976 bp, Oryza sativa
caatgcaagacacgcacttctcgggtctcacttgctagctaggcctaaaactctataaggacatgagttttcacatagccatgtgatttaggagcgggggcgaccacgaccgtgaaggcatgatgtgataaggatatgacctccacaatgcaccctcacaattctcttcctgcatgtcacacgccatcgtttcgccacgggagaacgagtgtcctattttggcttcgcgttcttcaccgggggacaacagaggccgatatggcgtgaaatattacgagccggatgccacgtagatatgcagtgaagatcctaggtaaaagaagtgttatttatatacataaataaccaatcatacttaaaaaaaagttaaacaaatgaacacaatttgttcaactttaagttactctacacgtaattgtcgatcctttttgtttttttcttttgcaattatcttattttattttttttcttttagaaacaagctagtatatctatatcactatatgaatataagtcacttagtcacgtgtaactggaattatttttcatatcaatagtacatgcctatcgtcgaataattaaagaaaatcttaagacccaatcattgtggtatctaaaataaataaataaaaacgagatatatgcacaatcaattttgtttggttcaccaaaccatactaataacgatctatccatcgaaaccactatcatttggtaataataactttaaaataaacaagtcaaactaaccaaaccgtggttgcatttaaacaatcatctcactgttctaacacactttgtttacgaatttcgttgcaaaatttgttaaatttttacacccaagtggattgttctgatttccgtgggccgacaaaaccaccccaaattggcccgaaagctgcaacatttttcctcctcctaaccaccgctccggcctctccatctcccgccgctcgccgtcgccgccgccgcccgc

SEQ ID NO: 49844 - DNA, 570 bp, Oryza sativa
aaagaactgttgaaaacactgaacttaacgatgcatacaagaagaaaaatgacataaaaataagcctattcaactgaatttctactgtagctaccatctttttcagtacttctagtttgttcgagcaaagtgaataaattgttgttaactattccaaccaaaatctattacatttagggacggagggagtactctattcattctaaaatataaacatttttagatctaaatttataccataatataaacatctttggtagcactatgcacgaaaatatgtacatttttcagtcactgagatgtttgaaaagagaattgaagcaattcaaatcttaacaattgaagtaactaaaatagaatatttttctccaccttagttttagtgaagaatataaaaataaaacagagggagtagtgcttaccaccttcagttaaatttattgtcgttttggacacttaattttttccttataatttatttgtccaaaacatcaattaaataagtctggaggaagtagtagtaattgatgcagtgagctgcctaactctattaaaaaacactcgctttct

SEQ ID NO: 49845 - DNA, 972 bp, Oryza sativa
gaactagaggatcccccatcctcatcatctcatctcaccggccggcggcggcgcatgcatggcgtggcctgacgtccggccggagttgggtcgacgacgacgaaggaggatctcatctcaaaatctgacacgatctagcttgtcgatcgactaaacatgcatgcatatgcattcaccgatcgatcgatgctcaatggctgaggcgtacggctagcttaatatccatctgactagctaggctcctatcggatggcctaatcagccaaagaaaaaaaaaatcaaaatttgaatttttaaacttaattttaagattgattttaagatatttttaacgtagtttctttttcaacattggtttttaagtcaccaagaacatatttataaaatttttatctacaaatttagccgtttagccgaacgatagggaccctactctgttcatgcatgttgctggcccgacctgtacacgcacccacgaacgtatatttgggtggattgaataaattggatcgatgctacagacctgccacaaacacacctacgtactacttcaacagctcactaactttaagatctatttgggaaaacgtatgacagctacagtttcttttagaatcagaaactctttcaaactagtactttagctttttcgttcatatttaaaaagttattgtaatatataatttaaacataaattaaaaagtcaaaagctagaaaactcagctttttcatatttttagaaactaataatcaaccaatatgcttctcagaatctttaagctattaaaaaaaacttagggcttgttcagaatgtagccaaaataaaccttaccaagttttagcactgctaaaatttcagtaagatggtaatattatcaaaattttaacatgatttcctatgtattaaccaaatttggcaacaaactaaacatagatattttttagataactttaccaaaaaaatggtatggt

SEQ ID NO: 49846 - DNA, 1612 bp, Oryza sativa
tatatatttttaagatatatagttagattttgtattgatgtatattaagatagccactatataatacccaagcatggtcatggatgccatcttgtttgtaacatagattttagcgttgtttggttgtcaattgcagttttccatgcatgtatattaagactgaccaattcattatgtcttcttttgaaatgattaatcacatcatatataatatattgcagtatataactatagaacacatagagatctacaactaaccaagttgtaaaacgtacacatgcaggacgagagcacacaaaatcatggcaccttttactctagcttgttgatcatggcgcacatgttctgtgaacaagagccatccattttcatttctctctacaccagagccatccaattggtgggctaatgattacctacacaggcaacggctccgatttttttgtctaggtgaaaccagatggctactgagaatctaccatggatatcccattcaaaactggagccatgtcttcgcaatccaacaaaggcaagaggttctttttctttagtccagaaagcacaaatcttgcatagtcaaatacaagatataataaatatttatttcttttctcatacatggatggggaacaaactttcgagttccacacaattacacaaatgattgttgttggagtgatcttttagttgtaccctcatattcgtttgacccgagcagaagtactgcactcagattttaaaccccataaataaaaattctagtaatattccaccaagctgtactacatgcttccttttgcccttatataacaaaatcgatggttctgagttcaaattaattggcacaacatgaagagagcgtagttcagctggttagcttatggtgcacctacctatccgatctaattcgagtaatagacttgacaagggtgcttgtatttatggctaattattcttttaataatatatgacgtacttgtcgagtgagacgtttgtgatgacttcatcaatctaaaattaattatgccaatggtaacttcatcaatcttaaacattccagaccagcttctcagagatgctcatatggtcgattgtgtgtctgtatatttataggagtgagtctacacacatgaaaatgtgagcattgcatttgtactacgcttctaaacgaaaaatttgttggcacaacaaactgaacaaataaatattccatggagtactcgtgcttgtcactactatagaaaaggggattggtgccaattcagaactggccataggtgctagatttcccaattgacacccaacagacaatacatttgagattctaggaatgaaaaaaaaaacaaaaagtcggcattcgagccgaagcatcgagcagttgtccatcatcactaagatcaacatcatccccattaaccaaatgcaatcaaaatcatcactgacataccatcatcccatcaaccaagctcaatcacaaaattaacaaaatcgcaaacgcaaacacacagagaacgccaccgtcgccgtcatcaatccggacttctccatcgtcatggtggtgtcaatcagatggaaaggaggagtaggaaagaggggtggcggcgacacataa

SEQ ID NO: 49847 - DNA, 758 bp, Oryza sativa
cggtaccgaagcggtcccgcacttccattctgcgcgatcgagggtgcgccggcccggtcctgcggtacatagcgcacgcgcacagccatcgcgcgggaccgactcggttccgcaccttcggcctgcgcgatcgagccgatcccgcacatccagtatgcggcatcgcgttcccacgctgccacgccgcgctttcatcctgttcccgcgttcccaacgcgcggaggcggtatattttcgccaaatttccccacacatgtatataaatacaaattatgaaaaaataggtatatttttaaaatttattcaatgttagcataagcgttggttttttaaaaaatcataataatattataggcactgatttttttttatctaaaaccggcacccataagttcttaaaggtgccggtttttttaaaaaaataccccataatggtgggaaacggtcaatatgtgtcaattttaaatgaaccggcacccatgagctatcacctgttaagattttttagtagtgtgttatttttgtcgtgtaacatgtacaaacaaaaactttcgcatcctcaatagatagctggttcagatgcatggttaagtataaattcagggatattattgtgtggttaataaatcgcactaagtatggatggatttactttggaatttcttatcatccccagttggtagctggttcagaacttcagatggtcattcagagatattattgtgtggttaatacgtacatcggtacatggatggatt

SEQ ID NO: 49848 - DNA, 979 bp, Oryza sativa
ttcatttatcacaaaactacatatttattgtctaattttgtgagaatggagacactaaatctgtagttttgtgataaatgaagatattaaacctatagttttgtgaaacaagttcttacatctgtagttttgtgatatactattcaaaatacctgtagttttgtgataaatgaatacattgaatatatagttttgtgatagattatgcaaagtatatgtagttttatgaaatttactaaaaaaaattcaatatagtactggataatgaatctggacatcctaatacccttgtattttttactgtgcagggggctgcctataaaaatgctacccctcgcatacagtagaaaatagcactcctagaggactaaagggggctaccaggcagccctcccagcccttttgcaggtggccccctagagccaaaaatcgcctttgctatgtcctaaaaatcgcctacaaaatttcagcgccctcggtggcggccgttatgacagagcaaacagccgtctgccacgtcggaaaaaatgccctttggaccctcccagatgacgatgggcgactatttgtaaaatttttaaatcgaaaattatttctgtaaatattttaataaataaaatttaaaataaaaaaaatcggttgtaggcccacttatggctggttagcttgggctcagcaagccgcgacggaaaaggcgccaacgtaaccggttcagtgttctaacgggtcatgagggtggaactcaccttgtaaattgtaatttgtaataaaacagtaaatgaaccttctctcccaaccttcctatgtcccaaagaaaaaaaatataagagaaaaaaataattaggcagctgatatccatatagccttgttgtttaaaaattaaattacctaatttttcttcaagttaatagttttgttggtcgctttaacttacatgatagtttgtttggtacttataaataaactataagtaaattga

SEQ ID NO: 49849 - DNA, 645 bp, Oryza sativa
ctactacagcttagggcatcctttatggatcatctataatatgtcaatgcagccggtttatgatatggataccgaaaataaccctcacagataatctataacagatcataaccatgattcatcagagatagtatgccatctatgacgggcgtaatttgttaaatatatgtatacaagttattcaaaatatgttttgaaaaaataactttatgtaatagttatttcatttgtttctacccttaaatatcataaaaaaaatagaaaatcttatcatctattagaacattcagggcttatttggtttagagtaatatcaacccatagataaaaatagaataatagaaggaacaaaaatgcatgcacacattaataatctaggatttttaatgagatttaagtggataaaaaattttctatgcttttcgtcttacaactatataggaaacaaaaattttctatagttctcacgtacttcgttcctatatataaaccaaatgatataaaattaatactcaagaatctaaatctaaatcctttgcttttactccatctgtcctaaaatataagcatttttagtatagtgccaagtcaaataatttactttaactattaatagaaaaaataaacagatcaatcatgtaaaat

SEQ ID NO: 49850 - DNA, 580 bp, Oryza sativa
agccccatgcaccgacctgtagttgcattagtaaggccctgtttagttcataaaattttttcccaaaaacatcacattgaatatttggatacatacatgaaacatcaaatatagataaatgaaaaaaattgcacagttatggagaaaatcgcaagacgaatcttttgagtttaattaatccatgattagccataagtgctaaagtaacccatatgtgctaatgaggggttaattaggctcaaaagatccatctcgcggtttccaggcgagttctgaaattagttttttcattcgtgtccgaaaggctcttccgacaacaggtcaaattaacatccgatataacattcaaaaaattttctttttgcggagccctaaaaaccatccctggacgcgtggacggataggaatacatcgagcgaggcatatggaatggaatccattcagcagatcatcgaggcaggcaacggccacacgtgcacacatggtttcgcccaaaaaccacgtcccgccgcttctccggtgctatctacctagttcgatcgtccaccgatttcattccgcttcgtctcgcctataaatt

SEQ ID NO: 49851 - DNA, 1361 bp, Oryza sativa
tacgtcgcatttcgtttgatctgaaacggagggagtacgtacgtgtgcgacattataatattcttgactctgatggcattgcattgcatgcgtaagtttggtcaagaatgagtttgcttgtctatatcaacagtgactgagaaaaatcccaagaaagaaattaagatgcatacatagacatagaacgaaacgtcgtctcctaatagtcagcaaatgacaaatccagacacggaatgagacgtaatagtcatagccatattccatccacttgtcatacacttgtgtatgtagagtagactcttagccaccaaggaaatatatatgtgtgtataggagtatgtagtactccatccgttcttttatttttttaaaaaaataaaaagttttccaaccttcaaaatttattttaaaaaataatttatagtctctggcttatctactatcaattgacaaatcgatcgacaatcactaaagagtgttatcccttcgatatatcttatatatctgactagttagcaatactattttttttgttagcaagggtattttgattatttcttctcactactaaatttccatgaaatggcaaaaaattaagtctttttttgacacaatgagcatatgcgaactaattaattacttctttattctttattctaaaatataagacgcccataattttatacaagtcagcattaaactaataatatgtatgtctggtgttatgtatatgatacaaatactacaaaaattctgaagtattttcctttctaaaaaaatacctctaaaatgcatttctaatatctgtattaagctcctgtggttagttaggatggtactataagaatactgcagtctgcagaggtgctggaaaaccttgtagtaactttggcttacatttgcttttgctcaatccatgcatattaagtgcccaacagttaagccaagcaatctgataagcacacctatcttcttttcctagtaaaccttcaattaatctcacaggtcatacacagtaaataatgtactgcacagcccattttaaacttcagaaagaactcaatgacgcatgaatcatcttacatatatcaaacacagtagtgagcattgatgacttgattaattatctcaatatatccaaatgtcatcatcatcggcaaacaagattaggtgaaccgaagtagttggtgtaagtaaaagggagtgcatctgtttcttgactgcacactgaattaatttgtgtcctgtagtgcctgctgttctcagctctgaacctttgccaaacataaatgacgaccgtgtagaaccaaaatccaaattaatggagtataataagtacataaatgaccatatacaaatct

SEQ ID NO: 49852 - DNA, 581 bp, Oryza sativa
tgactccgtttcaaattttatttaaacactcagattagccatttatttattttgcaacacctagttttctacgaaaatattcaggttaaaaaaaagagaggagagacaaattaatcgccgtttgtttgcacgtcgctctacgttctccaaccatagttgtaatgtaatgtaaggcaaggcactttacagttgcaccttccatgcaaccacaaaatacagcaaaagagcaaagctcagagctgtcgtgctaacgacagatcatcaagggttcttccaagaaaggctcttaagaggtttccagcaatctcctctgaacaacaaatagcctgtttccaggacgattcaacagaataagaaagaaagcaatcttttaagaaggcaactttttcagacagacaattcattcaattcttgatgaagcagaagtcatttcaattattgatgaaaacgcaggaggtctgcgattcattcattcaattaataagaaaaagatggcaagaatgtacaagttaggctgttactacaatggattgcatctccacacacaaaacacctgggctaaattagtattacatcttatt

SEQ ID NO: 49853 - DNA, 622 bp, Oryza sativa
tcgaataattttttcagcgctttgaatcctgcaattgtgtttcttgcactccattagcaaaagcttgagaacattataatttctctccagaatatcatgcatccatgctagctacgttctacctagactactacaagtaggagtagctaattaactagagttattcttctacctaaccagatctctcagaccatatcatcctgaagaaaaattcaagattttgggtagaaaaggaaccaagcaaccaaaatatttagttaaatcgaatccccaaaccctgtgggtgcaccacagtttcaggctcaaatccgttggtccctgtaaagcgttgtacaaatgtacagtgctagctgctgctttctgaatgagtggagtgcactatgcagtgtgcaggttggccaccaacttccaaacgagtaaaactccggaagcagaggtccattgaacctacccggctcgtgggtttctgcacaaaaccgtggccgcgcgccaccaagttcatcccatccactcctcgatctcctcgtacgcctataaaatcatacggcttcttgctctcttggcaatgcaagccaactgaaccaactcaagaacagattcaaacaattgttgctgattcctc

SEQ ID NO: 49854 - DNA, 648 bp, Oryza sativa
cttaattagaaaaagggcccatatagctattactccctccatactcataaagaaagtcgtttaggacagcgacacggtcttcaaaacataactttgacttcttgtttctatacttttatgagaccgtgttttaggacagttgtgttttgaagaccgtgtcgctatactaaacgactttctttacgagtatggagatagtacatataatttttacatttttaaactcaccaacttgagaggttatttataatttatattctcaaggtttgacttaaacattatcctaaacgacttacttataattacggagggagtactccgagctttgatgcttattatggtaattaattaaagatcgcacgcacagtgaatatacatattattaagcggccgctttgtgtgtggtctcaaacagtgacggagaaagcctaggcttgtatcctaaacatctactaaaatttatcaacacttagtgaaaattttgaaaacacaagatatataagcaagtttagcccttagcttgtttgtttttttttgtctccggacgtctctggtctcgctaactaaacttggccagacaaattgagcgacaaggtatttcgtcattgtcgagtgtcgattgaaagcgagcaggccagtagtagttat

SEQ ID NO: 49855 - DNA, 599 bp, Oryza sativa
gcgatttgatgatcgtctgattcaaagtttatttctttcgaaatagaggtacaaactgaaggattatttgtttttttttgcaaaacacaatttgtgtgtttaaggattgttttgctttgtggtgacattgttcaatttgttcattcatgctatgttcgttcgcgagacaggggagattgagtctcgtttttcgcgcgcacgcttttcaaactactaaacgatgtattttttgtaaaaaaattctataggaaagttgctttaaaaaatcatattaatccatttttaaaatttaaaatagttaatactcaattaatcatgagctaatggctcacctcgttttacgtatctttccaatctctctaatctcctactcctcaaacacaccctcaatggtccaagcatagatcgaactgatactctgatagagagcatgcttggttgaaggcccggaaaaattatactccctacttccccaattataaggtattgcactgtttgattattcgtcttattaaaaaaattaaaattattatttattttatctgtgacttattttattatccaaagtactttaagcataacttttcgttttctatatt

SEQ ID NO: 49856 - DNA, 568 bp, Oryza sativa
ttcagaaattttgaaaattgaaacttcaatcgagtatctccagaatgttcagagagcatagatttcacatgtgtactgtaccctgataatggaacttgaatggagtactccctccgtcccaaaaaaagacaaaccctgatttccgtgcccaacgtttgaccgtccgtcttatttaaaaaaattataaaaaaaattaaaaagacaagtcacgcacaaagtattaatcatgttttatcatctaacaacaataaaaatacgaattataaaaaaatttcatataagacggacagtcaaagttgaacacgaaaatttagggtttatctttttctgggacggagggagtaactcaagaatttgaagttcacaaagattcagaattttaaggcctcatttgaatcacaggaatgtaaaaaaacggaggaatagaaaaaacacatgatttaaataggaatataaaagttaaacagaagattgaaaatacagaaatatccataggaatgatcgtttaattgaaccacaggaaaaacgtatgaatcaggtgagagagatagactcaaatgattttttt

SEQ ID NO: 49857 - DNA, 992 bp, Oryza sativa
atgatttttcattagtgtggaggtttatattattcatgatttttcacataaaaacactacctgcaaataatgtttattcgttcataatagtttgaggtgaccattaacatagatgatatatatttgacaccagtgaataaaatccactttctcaatcttgagagcaatttgtaacttcatttattgaggtattgcaacaaagttcttatacaaaaaatttctcacaaatactagatttacatcagaacctgaactgaagataccacaattcatattatgcaagggtgatacaaccgtgaccctacatcaaaggtgagtagtggtcgactgcaatcatatatgcaccggcctgcacatttctgacacatgttaatctagtagctttcgcgccatcagttgtgacaggagcaccaagacaccatgataataacaacatatatttttcaatgataaggcaaatctatcacttacaaaatcaagtgaaatttccaaccatccatggactccattccataacctggccaagcttgctttctcccaaaggtgacctaggatgcatagctatgcggtagtaggatgcccaaaattttcttgcaaatcttgataaatattttgaataatgcagagagagagtaagaacatgtacaagtggaatatcaccaactgaatgcatatataacaccaattgttggccctaattgtggtgaagatgtgatattagaggccattggcaactgttggccagcaatgcaccttcaaatagatataagtggagaaaccaaaactagcaaatgctaattcagtagtagcacaagctgatttatgtgtttcctatgtttaaatctgtgttttttttctctgactcttcacgtgtgttgtgttcttggccggctagctacctgtacatagttgtgttcttttgtaggaaaagggtagctgtcgagttatctattaataatcctagcaaaaaaaaggagttatctattaataaa

SEQ ID NO: 49858 - DNA, 901 bp, Oryza sativa
accgtgatctggatgatcgatccatggttggtggccggccatggcgaatctgccgtcagttttgggcattttttgtggggcggcggaaaactgtgtggcgctcccagttttcggctggtttttagcctcgccgacgtcactcatgctcatgcctgtcttgcactctcactctgtgggctaccacccggccttgtctgctcactagcaatgcattgctgccccactcaaagtacggatcgcttatccatttctgatgcgatctgctccatttcagtctctcccatctcaccttatcatctcctgctagatccaaccaactttgctttactgctattctactgaaaaatactccatccgctctatttataagtgcaattgttataacgcagttgtggttgtttgtgtctaatgttttaccgtttatcttatttttaaaaaatataaaaaataatcgcataaagtactatttattttttatgtaataacaataaaaatactaatcataaaacatttaaataagatggacaatcaaattttgagcacagaaacctacaactttaattaaatgtttagaatcgttatattagaatgtgtcatttaatttaatttggttttttttaacggaaagtgagtagtatgaagggttcggtactgtgcgttagttgtccatccagttgggtttgtggtgatcatcagcaggcaactggttgattagatcaatcaatcactgcccacggtatagatcagatcaccatcctcctccatgtttttcactgtatccgtggccgctgccgttaaactttttcgaacggtcgctgccgttaaacttgaacagttgatatgcatttactctctcctctctctctctctctctgcatatatttatagacggcaaaatgaa

SEQ ID NO: 49859 - DNA, 936 bp, Oryza sativa
cttgtttaacatgcggaaaccaactaatactttggtaaaagaaatacattaaaaaccagcttataattagtattcactccaataaaaaagagttttctaaaatatttaaatggacacatacatagccctattcggaaagaaaaaaaacaagtgcagatatacaattcttaactttcataaatgtaattctaatttatatggtagattttaaaagttaaattggatctgatatacaactcttagcatatgttagatagatatattgatagatagatacactatctttattaaaaaagaatgcaattttagcaatgcacgtggacaaagatatgtccaagttcatagctaaaattatattctttttcgcatggcagtaatatataaacatataaatagatggatagagagatagatagttgaaattgttttttttctagggaggggggatggaggcactagtagatagatagatacattaattccaagatactattgaattttaattcctaatatacattttttgaagggaaaaaaagaagtttgaaaatgtgacacgcccaaatgtttgtttgggtagttctttatttaggtagtagcacagcttaagaggcacatgtgtcccaaattgcgaatctttgcagcccagtaataggggggctcacctaaattaaccccccaactcgcctcttaatcctgcacgcgccgcgcccgcgccttcttcttcctctcccgcgctttctcttcccgccatctccctataaatggcgccctttctcttccttcggccaacccctcaagcagccaaggcgcctcccttcctaatcctacctcgatcgccttcttcctctcgactcgatcgccatggttgtcaacaacaaggtggacagcctcttctacgacgtcgaggcgccaccggcgcaggcgccgacgaccccg

SEQ ID NO: 49860 - DNA, 1804 bp, Oryza sativa
ctcaccacacgccacatcgtaagctaatagctaccacaccttcctagtagcgtatcacctgcagagatgatgcatgctctcttgattgattagttaattattgcctgttcttcgctaatcgcgtggtgattagaaggtaatcagggggttaattgctattactatttatagaaagttccgcagaaatggctaggcgccaaaatagtaagggaaccacaattaatagccacacgtatgaaatgcgtggggatcagggatgcaagcatgtcgacccatgaacctgcgtacaggttatttaaatgttgcgcctaatagaacaatctagatatttagtgattcacaagtaaagtgattttatagttcttaagaaggtattagaagataccatattttttaatgtaaaatttgatacatcttgatatcttcgatactaatagataccaaaatttacactaaaataatcgatacctcttggtatctctcaaggatcgtaaaagctggcctgccttgcctgtataagtaaaaatgtaatgagacaagacgttgtaaattctgagacaatggaagagtacagaacactttcggctaggggcagttatgagcaggactaaatggttattgttagttaattagtcggcaaattctttaataattatttgaccatggttaaagacaggtaacttatctatagctaggaaagatagtatggcaaagaggaaaggtggtgattaaaaccattacaaagtgagcttcatggaggggcccagagggtgcttgccactaacaaggaatttgactccactcagttaaactaatggccaatagttaatggaaggtgaagttaagctacctccagcttatagggatctcataatgatgggatattttgatttttcctaaaggaattccattcacataattgattgtcgcgaaattcgaatatcttactttagtagttgggtggttttcttaattaggggatcacataaaagttcctcaattttttcaaactgtttaaacttatttaagctagtatagtactactttagggtaatctaaaaacttctttagacttgcttaataaacagttgctatgccaagaaaaagtcatgtcttatgcctaatcttccaagatatctgaacgttggactaacacatggtgtctaaaaagttagtgttggcgtgtgaccagaagtatttaaggttgttaattgcataattgtgaaaggagtttataataatatttactccccttacacttgcagaaaagcactaattcttttagtaattaattaatcgatcatgtgtacaaaaacatatgtcatgaagcactctaactagtatgatgagcagttctagtttggatgatctcacaaactaaacaaaaacaaagaatgtttatatcttgcattagtcttaatacgattagaccatatacatcaattaaagcaaggcgtgtgtgtggctttagaatatattctaataaagccattttcaattggaacatttctcttttcccttttgggaagaatggatctggtttggccactctgacgtgtcacctgttaagctggttgttcacatgctcatctctctgaatttcggtgtcttttcagtctaaacagaatgatctgataaacacatccattagactgttaatggttttcctctgagaaaagtaagtcatctgctttgtaatgacgctgttcctcacctggaatgattaaaaagtgtcaattaatgcgacaattccacggtcatgggaccatctcagaacaattcttcagaagatgtgaggagatgg

SEQ ID NO: 49861 - DNA, 595 bp, Oryza sativa
cagaattgactaaatcgtcatctatgtgattctgggtaaaaatctttgaccacccactctgaccgcatgtgattgaagatcagttatattaatggtgaaaagaatgaaaagaaaaaggccggttatatcaggcgtgcatggagaaacatattaatcaactataggactgaacaaagatcgaactgcagatttgtaggactgaactggctgccgaagcatgcatggaaagaccaatatataactacagtacttaaagtgaaaagatgagagattatatgcttttagagatttaaagtggaatttttttgcggctaactgcatgtgtgtgtgtccggagtcaaaaggcacctcttgttagttgtgttaggatcagggcactcactctacagtttggcatgcagctactagatatacttaattaactgtaaaaaggaacataatgcaagttcagttcagttccctgtttcttctcttctttttttttcttttgagacaccagttctgttatgtttgatttaaattattatcttatattatcgatttgaataaaatgaaaaataatattttaagaaacaggattaacagatagcttaaa

SEQ ID NO: 49862 - DNA, 985 bp, Oryza sativa
tctctcccccccccaagcataccccagcataggcctatctagccgattgcgtcgtgtaacaaaatctctatttcttttaatatattgacgtgcaatccttttgcacgttaaaaaaaatcaacactatgcagcatgcatggcactgatgaagattcgaaaggtacaaatcatcaacatgcatatacatcacatatagtcatatactgagctaaaatcaatgttgcttgcaaagatgggatactacatactgacgagaaaatgttccaagatagtagtacaacacacatggattgaatcgggcttaaacctgaagctagctagtgacacacgcaaaggtgagggtgtgatgcatatcgttttcgatcgatagatctccatctctctctccccaagaatatggttctcatgagtagcttatgccagcttccaacagaacaaatgcatgctaagctagctagctctgtacaccgtcgaaatcgatcggtcccaagatccaatcggtcctagattgctagctgaacgtatctgtacgtaatcacctctccttttcttcgatatgtaccaaatataccattcgtttcgttacagacaagcaacttatacagcaactactctatcgtctgcactactgaagaatgaatgtctgatccagctaattgtcgatatatatctggagtatatatgtagtaacgtagtagctaccagtgttgtggaaaacggtgttaacggccgttaatacgttcgataatacggatacggagatcagtccgtcacgtcacgccaatgcggtcatcattagtcggtaacgaacgcataaatccgatcattaccgattaaatcgtccgtctccgtctaatcagccgtataatcggcgtgatgacaaaggtcgattccacaatccagctcattagctgtgccctttactactattgactagaagtttgctcttccgaaattctcacaaggcagcaagatgtaaaatgac

SEQ ID NO: 49863 - DNA, 755 bp, Oryza sativa
gggactaagaggagggcgaacgcatcaccctcgggcccgacgtccctcgggggtaccaggctacgtgtgcgattgtgtctgcctcaaacctctagtcatatactcctgatcccatgtcaccgacaaatatggttacgacggtattgtaagagcaggcacaatagcatcttataaccaactataacacacatcgagaagaccaaatttgtagccagctgcagcacaaatacaagacacaatgtttgtctgataagtgggaccaggtattactagtgtggtacatatttataaacaactattgtataaattgactgttaaattaactatagatgatttgaatctagtactattaaacttgctctaaacctctttgctcattacctgggtaagaagttaggtccccatcgtttggttttttatggaataaaaataaatttataggtaaaacttttatatagatgttcttggtggcttaaaaatcaatgttgaaaaagaaactatattgaaaatatcacaaaatcaaaaatttaaattttggctttttcttttactgattaggccatccgatgggagccttagtacttgtggcaaccagcctgatgctgctgatactacagcatagtggtgcatctgacggggctagggctgggtctggaagtatctggcagccccagcccgattgtccagctccagcgaagtgcggcaacgtcaacattccctacccgtttggcataagagaaggttgcttccgaccg

SEQ ID NO: 49864 - DNA, 696 bp, Oryza sativa
acgtatatacatacagtgccggcctgacaggtgggcccacggcaacctgacaggctataaaatatgctggtggccatacacgcagctcacagaatcgacgttgctgctgctgctgctgctgactgaaccggtttcgcccgaaaactaagagcgttttcgcggtcgcgtcgcgttcgtcagagcgaaaactgccggcaaccgagcggcacacatccacggattcagaccaaaactgacggcaaaatcacaacacaacgcgtcacgatggtcgtcgcattcgtgtgcatgaatcatgcatggttgttcacgggtgccgttcaaatgctactatacaaaattcagctgtttactgtggctggctggcttcaccctaccttgttcttcttcagagaacaaaaagtgccggttcagtacgtacacatgacggccgggtctccatatctccgaaaaatctatgaatcggatcaagtaaaacatgagtaaaaattcggcggtgtccaactcgaaccctaatgcatgcgtatgcgagtgttgaatcgatttgactaattccgtcaccaattcctatcactagcatatcagcacaaacagtccagcttctgctaaaatcaaaaactccctcatatatatagttagcttttcatccatattctcaaaagctgtagttaaaaaattcagaaaataaactagaaatag

SEQ ID NO: 49865 - DNA, 1290 bp, Oryza sativa
  unsure (1)..(1290): unsure at all n locations
ttaattaggagttgttttctacgacaaatatgattttactcacaaaggacgtactagtaggtgtgtacttgtggtgtactgagtgatggtgtgcatgtgcatttcttttttaaaaaagaagtcttattgcacccaaatcccaaccaagtacaattatatatggcaggtagttcctcttttgatatgtgagcaacagtatgtgctcatctatatgatttttaagatgattttaatggtggtggtaacgaatatgtcacccacctactatcattctatttttttcatattaccctttcaatttcttagtattacataacaactagtaaatttaaatggatagtcacatataaaataaattaaggttagtcttccctatagaaaaatgtagacaacaaatttcatggaaactatgcttttatttattttagaaaaatgtatgacatttnttcttttatccatagccaagtacgtgtatttacgtagttatgaagaaaagaaaggcatgcaaccagtgtttacaaaaccaacaaaaatcagtcggttttcatgaaaataagacttctcgggcttgttcgagaacacaaactgcccagtttcctggtcaaactattttttacaaattttgactggatttttaacggtagtcaatactccaacccggcatgcaacttcccacttgcacctgtaggaactagctaggaagtcaacctgcttgtgcaatgtgcatatagcgtgtcccctatagtgcaggaagttgccgtgttatttgggtgtaaaggtttgagtagtctgacttcaagcagcactcatctcatgctaaaatgagctgtggcccagaaacatgatctcctctattaaaggatgcatgatataactaaattaacatgtaactttaagcccccatttggagctgagtttttttttacagaattatacatagagaaatctcaccaacttttttttttgttaaagctcatgcagttagttagaagttattaaattattctaaaattcacgttttatcaacaagatgactgtattttaagagtatgtaactgaagggcacacgatgttgtaagtaaggtagtgtgcgcgcacaatttttatagatacatgcgttgtcaggtaactcgagcaaaattcagtttatttagttgaattcgagtgaaccaaaacctactcataattaacgacgtgattgtacagctagtgataactggtttgtctcacttcatctatgagagaccctatcctatagagctaaatcgagagcacttttgaaatagattt

SEQ ID NO: 49866 - DNA, 1322 bp, Oryza sativa
tttagattgtatgggtatcgtcggtaccagggttatcgaagtgtaaacctctctagcgggaggacgtgagaccccccccccccctttgtgagttcggctaggggatagggcgcgatgatcaagagtgtgtcatcgccgtggactcggctagcgaggtggatggtgaacggggagtgagaccagagattatctaggttcgggccgcttggaagcgtaataccctactcctgtgtgtgggtttatgtttaggttgttacaagggatcttgaatccgggagtgcaatctgcaagcgttcccccagagttcaagatcttccgaatcccccttactcggtaggcaaggtcctccttttatagtttagggggttaccacatgcaccgctctacacatcttgtcattggaggggggcccacatcaactctggtcgagccgccacccatgccttagatcggaagtaaggtggccacccgtcctcaggtgatccccagcgcagtcttttgtctgacacggggggacatcccctgtcattccctcataaattcttagagactttgtgggttcatgcataggggatgcaccggtcggacatcggtctccgggcgtcgatgagacggggcatacctgcccccacgccacctgacacagggtggggcatgggttagggttgtcaaaaaagcttgaggctcgcgaactactcgagctcggctcgtcctaggctcgattcgagttcggctcgagctccagacgagccgagcccgagcctatccctaagctcgcgagctttgtcgagccgagctcgagcttctaacgagtctagtaatatatgatttttgttgttatttaataaattaggagatcaaatatgttatttgtatgtcttatattgacatcatatatttattttgttcttttttcctcttctattaatacgatgaactagaaattaattataagattatctttgaaatatatattgtgttacttaaaaatcaagctcgagctggatcgagcttgagccgagcctgtcaaaaagctcgaacattttataggctcggctcgagcttatatcgagctcgagcctaggcagacgagctcgctcgagctcggctcgttgatagccctagcatgggtgcgctgccacccgtctcatccgcctgcgactagtctcagcctggtcaagggcgattgacgcacatcaatcaatcgaacgtcgcacgactagccatgccacattaaatgcggcggtggtggttggggcgtcgcccatcaatgcgcctggcagcgcctctttctctgcccactcagcagcaacgtggcagcc

SEQ ID NO: 49867 - DNA, 1331 bp, Oryza sativa
  unsure (1)..(1331): unsure at all n locations
aatccgttatctttgttttcttctgttgtccccttttgtgcaacaatactaacagttttgtaaaagaaaccaacttgttatcaacttaaggggaaaacctgaagttcagcatgtatatagttttttttttcatattttacatagcataataaatagtatggtctctacccatgtacgtcgggtcaatctagttaaatagcaaaaggaacaagaaggtggaggccaccagccattgtgatcatagataaaccacctnctttgatctcctaccttgcactcaataaaaacatgtctttttatgatgctcaagtttttaataagatggtatatctgatcctctgaggtatgaaaatttgtactattctatctgtcccaaatataaaaacgtattaatctggaaaaaaaaatgtgtctcatccattactaattttttatatttttgggatgaaggtagttaaaaaaaattggtacacttacaaccagtanaatcttttgttntttggttctgtttgtttgtgtacatactatagatatatacagattcaaataatcgaaaaaataaggaaggagatggtgttcttttaccatgnggaacttggacttggcggcggcggcgcttgacggacatgaggcgcatcagattcagcatccccatggagatggtggtggatgactcctatctgtctcaggggatctctctccggcgatggccactgtggtgagagaatcgcactgaaattagggggattggagaggcaaattaaacgagagattttccttttaggaaggaaagagaagacattgcaagcgacgcgtccgaggcatccacatctacaccggcagtggtcgtcgacggcatgcggttttctggaccgccggcgaccaaagagatcacacacaaagagcgcaccggagcaatgacaacatcatcacaccatataagctaagattggcctagcctggtcggttagatccaagccaggctaccaaaattagagatcatagattgatccacttcagacagttcacgtagaggctgatatatatggttgccatttgccaaggcattcgaatttcaacaacactaatgctgctgggtaagcaaaccatatcaatacaactgcaaacgatgacacatgcatggatatcaggttatccaatgattcagattggcacttgagaaccaagcatcagattgtcactggataaccaatcacacaaaccagtttgtcaggacatcctttggaatgggtttcaggaatcaatacagatgacttgcaaaccacatcaaacaaaatttgaaaatataatacgcacatagcagggcataa

SEQ ID NO: 49868 - DNA, 673 bp, Oryza sativa
tggagtactatcatttttctgcttgctagtgttaatcacttaattaataatttagcattttacccatgtggagatgaagggcaattagcaattgctagtaggttttttttttcttttctgaaactgacggtgcatgggctagattggtgcctttgccgtcagttttgggcatttttcggccggcggaaaactgtgtggcgctcccagttttcggctggggtgtttagagcaagtttaatagtataccccactactatcttcaattcatatattgtcaatctaatagtcaattcatacaatagttgcttaccatactattaatatctggtcccacctgtcatacacatattacgtcttggaatccgtgctgcagctggctacagatctgtagcccgctgctcttctctctcatcctttatcttattaaaaatatatttacagctggcttaatagctagctgctcttaggcgttggccgacgtcattcaggccagcttcgctctctgtggccgggctacaccctcttgtctgcatgcctgcgcagcccattgttctagggatcgcctatccccatttctgatgctatctatttccgtcccaatatataatattttagaatcatattagattcattttagatttgtagtttcaggataggtctaatctcattctaa

SEQ ID NO: 49869 - DNA, 677 bp, Oryza sativa
aaggtgtttgactttgagactgagcacacatgggcatatgacagcaatcatgaagccaatttaccaatcgagcgatgaattactgatacaacaaaatctctggcacttttatcatgcctcacacaacacagcctcggtgtacatattctgggtagtattacacaatgtggccattaggccctctattaaaaaccaaatacaccagggaggagttcagcttggctccactatcaagcaaggttcagacatggtagccagtacacaatcttttcatcaattgaatcagatccagtcagcgttctgtaatgacagcaacaaaaaaaaggaccaggttaggttgaattcttattgttacagaaagcactgaaataaagcattgcgtggcgggtattaagatgactattagtgcccactacagtttatatgttggcatattatctgactttgaaaataaagaaagaaaaatgcataaacacattgtagtcttaggaaccaaaccttgctctattctaagtaaatcttggttgtgattgcgggaagctgctggcagatgactcatgcaattcatatgtgaactccatatccatgagccgatgattctcttttgagcgaaccattgtaaaagaaactttaacattgtccccttcgtttactttcagaggcggagtcagcaagaa

SEQ ID NO: 49870 - DNA, 697 bp, Oryza sativa
gttctagatgaagatgagcacacaatcaagtatcagtccttggaatgacaccacaccaagaatcagctacaaacagcaaactcatctatccatccagggacagctaaaatggagaatcagacggccaaaatccgtaatccccaatttacaccacaggcaaccagcttccactagaaaccgaaatagccgcggggggcaaaagaaaaccaagaacccatctaccgttacctcctctcctccttcaaaccggccacccgccgccgccgcacgcgcaggatcggcggcgagggagccggaggcggctcagcgtgagggggcgctgctgctcgcgagtggcagcagcagcaaccctagctccggtttgggatttgggacgcggagtgctcctctgcgctcttgacatgacagattagttaggcattaatccgagcagaaaaggggacgatgattaatttgacagaggattagctactaactaatcacgtctctcctaatcattcattattcgggtaactggttcgtccgaactcgcggggcccaactgcaagtggcactggagtggttgctcgggtaattacgagattgcccctggaatgagatagagacgaagtgaaaaagaaaaaagcttcgattttttcttttgcagaggtggtggatagatagcgcggcagaagaaagaggagaagaaaagatggcg

SEQ ID NO: 49871 - DNA, 709 bp, Oryza sativa
tgcattgcatgctacagctcaagtaccatcagttgacgaatgcctgctctacgcatctcaactctgcacatctccagcgaggtttcaggctttcagctagtgattacagtacacagggagtacagcacaggtccagacccaagaggggtttgctgcgtccccaactcttcatttgcacttccatttggcattttgcatatcatatcatgctattactttcagaaagtagctaggcttgctccgtttgatttagattatgagcaaattattatcacggatacttgcaagcatgtggggtgtcagtgcgattcatctcaaagattggcttagttttcaaattttggacattttaattcatggaatttgtaacgagatggcgcatttaatttactgtaccacctgtctgtatgtactgtatacaacaataggctccaaaagtccaaataatctccggccacctatctattgggctcaaccctgtaggccggtcagagcccacgtaactggaagccccttacggcccaaccaacatagccgcatgtaattcacaatccaaaatgggccgaacgtaaggcccaatcccgttattgggtcgcacataatcgaaatcgctttgcaggccaaccctcatcagcccggcccatggaaaacgccttacctgggctgctagcccgagacatctctctctcccgaattttttttatttata

SEQ ID NO: 49872 - DNA, 840 bp, Oryza sativa
catacgtacgtctacaacgttatacacttaaacaatatggtattttttaagtatttataaataatcttttagaagtatgaaaataaatattttttttatgtgtgtattttaaaacaaagcgagtgtaccttttgaatttaagttttgatggtacacaagacgtcgatcttaagatatatcaacccggtcttatagagagagactcacagaaataagatgtgtgtttataaggataagtgtgtgcgtgttgcgaatgtctgtgtttgtactgtgtttcttttaaaaaatacgtgcttgtgcatgaactatttcattttgcattcctgcataccatccatccatccgtagatcaagggacggacggctgcgatacggctgttcagacggtagagtgtacatgtaagatgtaacctcgcccgttgccacggtcgcacggccacgactccatctctcctccatcgggtacctctctctctctctctctctctcctcttctcgtcgccctaatccccaatccaaaacgaatccccaatctcgtccgcgccgcggctcgccgtggcctcccccgtgcgccgcccgccgcttcgcatcccggtgagaagaaaagaggtaaagctttcggttccacggcgaaagtttggatctttgatgcacaaaaagaagcatcttttcctgctttaatctcccttgttcttgagctacaagagatcctctccccgtagaaaatcttgatctttctaagaaccgtgaaatactgattcttggagatgatcaatggtaaattagtgcagagattaaaactaggtttaggagaccccctccccggattgattgattgat

SEQ ID NO: 49873 - DNA, 597 bp, Oryza sativa
tcacaatgtcatttttcaccacagctatctgttgtcatgatattttaatagaagaaacagtaattattacaaatttgcaacaccatgctaacaggcgatgacacatacgaatgaagagcaccaacaaattgtatgaagcatgctacacaaaagataacacataatcactaaaataaactatgaaagtcatggtacatagaatgccatagtggcatggttgaatctcttttaaaatcacagacaaggttgatatatgttcaaggtttcagatgaaagattgtcgcacctaaaggaggatagttggggagatacaacattaccagattgttgttttcttgtgaaattaagcacttcaaactttaatgaacttgtattatgatatttagctatctatggtcatcgatacttctttatcagttacagaggtaatataatctataagatgagtgctatatatgttctccatccattcaaagccacttccctattcatgggtttataacataatttacaccatatgaaattactggtactttattatttaggtcaaaggaagaaaaatcatatagctattgcaaatcaagtatatatactaga

SEQ ID NO: 49874 - DNA, 547 bp, Oryza sativa
gtcagcgatacagtgatcctcattgatacacaggatccatacagaccgttcccttaaaaagtcaattctgaagaacctcaaatgccacaatgactgcaaatattcgtaggaaattagaactcagatgctagcacatgaccgaaaaaagctacatgcaaatttttactacctgtatgatcacatgcaagataatcaggtctttgtcagtgttgtctttttcgagaacataaatactttcgtcgctgatggtgcttgccatgtcctcacctgattgggcttaagttactggataataatgagattattatcctaagaatatataatcaccatgttgtgtaactgagttgaaaaatgggagcagagtgttttgctaggacatggatagattttgtaattatgaataaattaatttgttcacattaagaaatcaatcacacattactacgttcacattaacaaaaaaaaattgcatgtgcaaccaataattgtaagattaatatattcacatcaaccaaaaaaaaattataggtccaactaataattcaaa

SEQ ID NO: 49875 - DNA, 604 bp, Oryza sativa
gaaaaataaacaggaaaataaacatggtctttctttttattctacagggaatgctatgtttacctttgcggataagcttggctcttgacaaggtccgtggtgctccagttgttgttccacgactttccacggtgagtttaacgattgacatgttcattacatttctggaatgaagatttttttggtaccataaattctttattctatataaacatttctgtgatttttatcatataacattttaagcaatcaaataagatctctccacctggcatgactttttttaataaaaaaaagttacttatattagacattaagtatacgaaggatcacccacactgtgtgagaatgtgagattaccgacagcaatagttcaaagatgacacaactattaatagagctcacttttttcttattacctgataaatggctagttactgcaaatcatgttcgtaaaagcatctataagaatttcaaatattgcacattaaaggctctaatagaaaaagatggtgtatgacctgtgcttacttgtcgcataaccattatggacttgtttaagtttcataagctatcactcacactccattacttcgaatacaac

SEQ ID NO: 49876 - DNA, 527 bp, Oryza sativa
gcgcacacggaattcttctcgaggtgtaaaccccgtttggtaactttggggtattaatcaaagctgctaaaccgtgcaccgctatgtgccacatgggcgcagcattcttcccgagctccgaattgataagttggatctggtacggcgtagcgtacgcattgcatgttgcgatcgatcgatcgatcgaagtcccggcctgggcaataattcgctggtgcacatccacacacaccgcaagctgacagcggctggctgacgtggtggaaccaccaatcggcattacgaacagctcggcaacgcccaggatgactcgtcactgacacgtggatcccatagggcacatcacgatcttttcttagagaagggtattttttatcggcctctacatccgaccggatatatgcaatatttttaaattataaatttagcctaacccaatctaaaatttgctatcatgaatatgctacttaagtcaatgcaaccgctaaactacatgtggcacgtcacaatcctgcctgcgttgcata

SEQ ID NO: 49877 - DNA, 916 bp, Oryza sativa
ctgttttgtttttttttctcttccttctttttcgttctctttctgttttggttttttcggttttttttctctttctttttcccgttttttaaagatgtatttatgcaaagtttctttttcccgttttttaaagatgtatttatgcaaagtttatattcatatgtataccaaattttgtacttgtatatatacaaagtttgtattcgtgtttttttctctcggtttttaatatatacatatacaaagtttgtatacgcgtatataaagtttatatacgcgtatacaaaatttgtatatacgtatacaaagtttatatacatatatatttttggtacacataaaaattatatatacatgtgtgtatatatatatatatacactttgtatatatatgtataaactttgtattttatcaatataaagtttatatacgtgtatatatatatacacgtatatatacacgtagtagtattgttgtagtagtagtactactgtagtagcagcagcagcagcgcgcgccagtagtagtagcaggagcagtatgagtaggagtagacgagtagtagtagtactactagaagagcggtagcagcagcagcagcagtaggagcggactggtcgcgcgcccacgctcccgctcattagggtcacccgccgatttctacctgcaagaacaattgtgtcactccgttgaaatgaaaaatttcactcatatgtcccttttctatgagccgaatttcaatcttatatatcactcaaccataaaactaagtacaacacatcattatcctgcaaaaccggtgtaagtgaggttccaagataatattgagtccgataagctaacgtgtgatacctatgtggcttatttgatttggtctttcatcctaggtggcatcgacgtggcacctacttatcc

SEQ ID NO: 49878 - DNA, 551 bp, Oryza sativa
aaaaaaataggcaggggaattatgattaatagtttgttctttgattatcattttgcccacgcggtttggtctttaatcaagtttgcttcgaatattagtttacctaatagtacaactcatatgtttgggcattggataagaagacaaccgcacaatttgagatctttggtcttattaaggacaactaccactatttggtctatttggctttgcagaaatgatgtggtttttcaaaggaaaaacatatcttctcctttacaggttattttttttattacacattggctctgctcatgggctatccttcagaaggtcaatttgcggggtactatcattgcggcttgtcaacaattggagctagtggccatggagttttctaccccggcacatgggtggcgttctaggctacggttagagggctcctgaagttctttttgttccttctattttggatgatgagtttatcttttgtttcttttttgttggctgtgtgcactctttgcgtgcaaaagccggaggtgctctcagaataattgtatcacttgatgaaa

SEQ ID NO: 49879 - DNA, 535 bp, Oryza sativa
atttagttttttttattatttatttgtagaaacatatttcttcatgggcctctatgctcccttggccagttgtcctgagaacgcaacaatgcaaaatgttgtagcaacggcggctggaccgaccagggctagggcaggcatgtgcgattgggctgtacacgccaatgcattttttttaaatttcacggtgaaacttccagttcccgcctactagtagtttcctccacatggacacgtgttagattcttggctagggcattggcaaacttacggagctccacgtggccgaatagtaaggtagagcttggtccctggaatcggttttaaagattggagcattcgggtgagaattcggaatctcttctactactcctttatgccacatctatatctccctctctgtccctttcaattcctaattactatctttctcgaaaacgagtgacgtggatgggtaagaatataattgataaggaaaagcattatccatgctttgtgggaaccttttccttttaggaaaaaaaagttggaaact

SEQ ID NO: 49880 - DNA, 685 bp, Oryza sativa
ggcttatagaaaatcagagtggatgtaaagagcagtaagtagctacttcctccgtcccaaaaaaagacaaaccctggtttccatgctcaacgtttgaccgttcgttttatttgaaaaaatatgaaaaaaattaaaaaaacaaatcacgtataaaatattaatcatgttttatcatctaacaacaatgaaaataagaattataaaaaaatttcatataagacggacagtaaaagttggacacggaaacctagggtttgcttttttttgggacggagggagtaggtgccaaaggagtatttactccaacatcagtccaagaacaagcttgaggccatgcaaggtgagctaagagaggtgcatacttgcatgcatatactcctatatttcaggggttacaaaacactaggccctaggaacacacatattcctggctaggtaggctgctagctgcatagtaatatcaaatgctaaaaagcaatcgaacgagattaaattgtgtgttgggcttgggatgcatcaggagtgttaaaagctcaggaaactggccccacaagtaagtcactgtcattctttcctaagattcctccttttaactttcgtgctagtgatttacatgcttcattttatatgaaatatattttcctttgtagtatatatccggcaaactgatgggattctcttttct

SEQ ID NO: 49881 - DNA, 700 bp, Oryza sativa
cacaggaaattcgttggtacctgttcaggttatttttcatgaccgtatagaaaaattcatatatagctccaattaaactgaagcttcagttatgaaacacgaatgcaacacatgtgtgtatgatctcatctgctatgatctcttcttcatggcaagagaaatacccttatggtgaactaatttggcagacaaatgcaccttcatgaggggttggcctcatcaagaatgttgcatattctgcctgcgggaacaagaagattgctcacacctgtttgtcacattttaattcacagggtgggtctcgagattgatgcgaggttggattgccattgacttcccaatccctgcgtcggacaatccctgcctctctgactggtggttgcaggctagacaacattttcagacatgctacagggcgattttcgacaccgtcttcatgttgacatattgctggttcgtatggaaggagtgtaatgcgaaaatttttttagcagagatcacgaacacccgagcagctggtggaggatcaaggaagagcttataatttggatggcagcaggagttttcacggaatgtaataacagcaacaattaatctttcgttgtaagaaccatatttttgttgtaaactttacatccctttttaatgaaattggtcgaccgaatctttcggccgacccgacaaaaaagaatgcaacaca

SEQ ID NO: 49882 - DNA, 664 bp, Oryza sativa
acatttatgccgaggtccaatgcgcaaaaaaaattgaaaatgacttatttgtcattaaaaagggatcatttgtaaataaaaatatttacaaatagattcttggcgctagcttcattggcgccgaggacctatttataaatattttttatttaccagtaggtccttttttacaaaaatacaaattggtccttggtgctaataacgttggcgccgtcctccttcatatttatgacttagcttccactgggggctagggcgatggcgccaatgtcattggcgctgtcatgttggaccacggcaccaacgatgttgacagcacaaaaggaccatttctagaataagtttttttaggggtctatttatagaataagttttctaaaagtattaaaatgtgaaaaattcagtaggattgtgatgcacaaggacattaccagcttcttgttcatatccatttcttttctgtacgacgactgatctgtgtaagacacattgcacaaacatgttgatcttccggtttagctcaaactagcatagtaccagcttgcatacttccccctcttacaaatatacacattcaatattttttttagagattaaagatgaagggaaaaagtctctgatgcctctcattaaacaaagatggttgtggatgacacagtgggtg

SEQ ID NO: 49883 - DNA, 589 bp, Oryza sativa
tccacattttggaagttttatcccaggggtattttggtcatttggacaaaattgtacagtactaacggagactaactggacggcgatggtaaatcatagaagttaagtaaaagtcgatggtatattatagaacgtgacaaagtcagtggcaaatcggagagctatgacaaactcagtggcatataatggattgtctcttagggtttcgatcctcccccatggacacctgcgacgctaggggctactcctcatcttcctctgccacgactaggcgcttgcaatctctctactccttgtttggtgggaagtacaccgcgactgtgcaaattgctcaaggagcggcagggtcgggcgactgtgcagattgcttggtgtcacgcccagaaattcacgaaccagaatttctaagctgaatgtgcattaaatccctgtccaggaccagccagggtacacaaacgacaattgttgacatacagatccacgtcttacaaaaatataaaagattacaaatacagcggaaaagacaaaagcgagctaagcctgaagacttgactcctgcacgaggcgactccattccacaggcatcctt

SEQ ID NO: 49884 - DNA, 514 bp, Oryza sativa
tataaaggtctacttaattagtctagaccgttcatctttcccctatactcctttaaaagaagtagtgatgagtggtgaatctgccaccatcccatcaccaactccctagccttttgaaatagagaaagtacatgtggggtaagagagtccatctgtgaaccacccttacaaccaaatatgtactttttacggaaaggaaaatgatagtgtgggctagagggtctacgtgtcagtaacaaatatatgtagaaattaggagatgatgtatatagaaaataatggctataatgagttaatgataattttcattaattaaaatcccattgcgacgcacaagcagtatgctaatttaatctgatagatcatatctatttatagaactaccttaaactgctggcagtagaattcataaataaaagcttgagatcacttctcctcgtgataatattgggaatacttattctgtcccactgaataaagcgcacacccattttaaaatttaactctttaaata

SEQ ID NO: 49885 - DNA, 976 bp, Oryza sativa
gagcttttccttggagctgccttgacgccatgatgatgtgtggcgtggaagtgcaggaaacccagccgctgcagggaatgaggttaatttgctgcagctgaggtgggaagatctagcactagcaccggctgcgaggattgtttagtaagaaacacaacaggaatattttaaagtgacacattcaaggaacatagtagcatttttaagagaaagatatgttacaaagtattatgtactccctccatcctagaataaattataaattaatctgtagtacgggcaaagacgtttcctagcactatgaatctggtccaagtgcatgtactaggatatatcacatctcgtactagatttatagtattaggatatatcacatcccgtattagattaatttattctaggatagaggtagtaatatgtagtctagctaagtagctagcttaatctcaaaaagaaaacaaatgataacactagctagcaggtataaaaaaaatacattgcattccatgtcattaataatgcacaacttacagtctttcagattgatggtagagcaatacaaacctgaaaattgatcgaatttcccaaagcatctcatgcctatattccaacatagctgggtaatatttgcacaagtgaaatactagatcaatcatgttttatctgtcatgaccaacagagagtgtctgacaagtgatggaggaatggaccaatggtgtcggaggcccatatatatggccatatgtatatcactcttcagcaatttttatggtatcttcaaagtgattcactcaacaactgaggctctcatattttactctctttcattatgaccaccaaactccagaaattttgaatcaaaattgtgaaactaacctctgccttttcctagttataatgctatatgtcttcatgtcttgcctgtgcataactagtgttccttctgttcaatggattattagcatctctcctgata

SEQ ID NO: 49886 - DNA, 509 bp, Oryza sativa
tttttatatgtaaattcaataaagtctaaaactaatttacatatatcatataagtaacttaaaaaaaaaacgaaggtaactttaattaatgccttttttcattgaacaaattatcatatatataagttacttttagatttgattaaaatactttatatacattcataatgctctgaggtgattacttttttttattgtttttagttaattccataatttgtgccgattaatttaatttcttgatagagtcgtgtttttatctctataacggacttacttcaaatgacatgccaaagttaccttcgttttgttctaagttatttctataatatatataaattacttgtagactttactgaatttacttttatatgtttaagaagtaatttagtgaaatctaaaagtaatttagacatatcataaaagtaatttgtgatttttttatcaaaatataatcatgtgagatcttgttgtaaagatttaatagttacgaacacaacaatgtaatc

SEQ ID NO: 49887 - DNA, 510 bp, Oryza sativa
tgtgtgtgtatatataaccgtttgctgctcacaactgacaaattgtttatataaccgttggcagatccagctaggacatgagaaggttccgtgacatcactaaagaaatgtatatagtctaggtcaatgtgctgaaattatttggtttggtcatttcgccaataatgcacatgcaggtacatgtacatcttcaataaccaatagcaatattagaaatttaacaaggtcagaaatataccgtttaatataaaaaagaaatatactatacgtacttaagactgcgtttgttcccgcgctgaacaacccagatggaaactggagcaagcaattagcatatgattaataaacttgaaaaataaatttatttgaatttttagaaacttttatatgattttttctggacgaaaaatatatatgttgtttagcagttcgggaatcatgctcactgagaacgagatattatctcattctagatacaggaacaaacgcgaacgaagtgcgcattaagag

SEQ ID NO: 49888 - DNA, 569 bp, Oryza sativa
tcagatgatgccaaacagatcttattgaactgccacaaatgcaggagctactgttgctttcaaggtactttcacttctttacaggggatgttatatctgaaagatcccaatgcaaattattttgtggaagtattcagataactttattgctttagtaagtttggcatctcaatgaattgatgcggtacagcataataccaacacttgtattttaacctctatatcttagataattgtttggcaagatattttaataaatggtgtggggtaagcaaataaggcaatttgcaatccatatcttaatgcttgtaactgcaagagtttagaaagaaaattttctgtaatctagtatgcagaaaatgctcaggcaagagcatgtcgatcgcttccaaatcaataatttcagaaagtaacagtctcctcacgaagacatgaagtatggaacgattatttgcatcaccatcatgcatgattgtattttgttctgaatgtttggtaaatcatgtgcagaagaactagaacaatagttttttctccatgttcattatccactttcacgaaaggatgct

SEQ ID NO: 49889 - DNA, 666 bp, Oryza sativa
ctaactagctcgtagtgacagcagagacataatgatattgtgtctctgtgtaggatgtacaatactaaatgcatatttgcaactaaaacaagctagtgtgctttagtagtgcttaattaaatatgagtaaatttcagaaagctccgggttttcaattataaccacattttggtgtgttcaatcataaggcattcagatccctgtggaccctgccccatgcatgcgtgacatagctagaggagcagctagctagcaacctggaagcctagcaataaacaacttatttagatacacttctaatttatttctggttcttacatcggtttcaaccaatgtccatccgttaattaactgcacctgcacgttaattgaatcataattaagtaacattacaggattgtattcgagtgtatgatcatgtgaggtctgcaacgttctaccaatcaaacaagtggagtagtacttgtgcatgtacagtttcaatctcagaggctgaaagtatcaatatttttcatgttttgaatttggaaagttatgacgtgctaatgatcttagctaaccagtaaggcagtaaccacctagcgctggcttcagctgacaaggaattttttagatcaaaagctgacgaggatcggaatttccatcgagcagaatgcacagggggag

SEQ ID NO: 49890 - DNA, 682 bp, Oryza sativa
attgagggggtgcatacatggtgaaaatagatgaggtatagctaaaaatttttctggaccgggttcctgggcaccccccctaatatactctagctctgcccctgcctctgctccatctagcgggaggggagtcccgctcctcctctccatcgaccgactacggcttcccgtggcagtggagatggtggtgggaaggcggcggtgccctcctcctcctctcaatccgacaacggccacagtggtggagaatgaggttattgatgtgcttggatcatcttgattagagccgaccggtatttttttttggctcattcatccttataggtgtcttttttagctaatatcggtacctataaattatcataggtgagttatagaaccggtcattagtgctgcttgttgggtgccggttgggaaatccgacacctatgaccggttaccaactggcaccaatggccttttctgtagttatgtgaaaagaccaaaatcaacctcaaatttaaagtattacaatttaaattatagcaaaggctgataaggtgaaaggaaaatgatgagaggttaggtcagcagcggagcccaggaccggccagcacgggcaagtgcctgggctccgctacttgcaactggttgaatactactaattactcctaaattgtttaccaaattagctaaccaaacc

SEQ ID NO: 49891 - DNA, 805 bp, Oryza sativa
tttgccatggacgcacgcacagtgcgagatacatctaaaagaggcgacaatttctccaagctttttgcagccacggtttgacgcgatagagtggtagtcgtctcgtacacagagacagtgtatagtggcggcttcgataggcatgcaatgcatgattagtttggatcggtcaagctaggcggattgtcgattaattattgggggggatcagggatgggactcgggaacagctgagggaaaaagaatttcatttcctatatatataatcgtatatctcatatatatatatatatatatctgtttgaatgattgaatcctatccactactctatttctcctaaatattcccatgttatttatgtaaacagctgacaactacgtactaacatactccctcaatcccataaaaaaccaacctaatactacatgtaacatatcctactactacgaatctagacatacatatgtatccagattcatcgtattagaatatgtcatatccgattctagatttgttttttatgggacagagggagtacgttattatcctttgacaatttgattattaagttaaagatttaacggatctttgctatatcaaacttggatagaaaactcaggctagatcttgcaaatcgctttgatctttctattagctccatgattcgtcctccagcgatcctctatctccgacagcaccataaactctgactacagtgagaggggttgtgggcagagaaccggagcacgagtgttataaaaaggagagggatgtgatcgaggacgttcggtataaatccgatgg

SEQ ID NO: 49892 - DNA, 540 bp, Oryza sativa
cttgatttctccgctacttgttccgtggaaagccatgatccctctttgcaatttttaatcttttcgagagcaatttgaccccaatctaatacaatatgtcatgaatatattctttataatttttaatcacttgaagaagggattgggatgcatcaagaaattgactaccctacgcgcaatctatgcctgttaactgcattttgctctcagtacaaacatttcgagcactgcttcccgtgtggaatctcaactttgtcaaacggaggggtactcttgccataagaaatcgcgaagcaatccaaggaaggatttggagggtattcaaccaagggagcataacatgaggactgcccttcaaagagtctggaggtaaaaaagttgccagatctgcgacgcttggccgaagcagtaatcctgcaatttgcctcaaagctacctgttctttcttgtaagatattaatataaaactgttctttcagtccttaatccctcttggcttccattaattaacctctcttatatattctcaaatatctgcat

SEQ ID NO: 49893 - DNA, 706 bp, Oryza sativa
atattcagcccaaatatcatcgccgtgtagatatgggatatccataatctccacagctgttttttcactttatttttttccattggatttgagtatgaaaccctagttctctgtttgttcgtgattatttttcctcaaccttctgttgcccgtgagttttttctgtcaattgttcgtgagttgggtggaggcgttgttgtgagatgtggctggggtaggatggtgcatcgagcaggggaggctgggagcggttcctttttgggaaacgtcgcgcgcgtgcgggagaaggagcgcaaccttttttttggaaataggtaatgtcgctggttagcgctaagagcaagtataatagcaggctataagccagctataaacacatatcaagaaagaaaagagaagagagaagaaagcgggctataaatttgtagctagctgcaacattgactccaaaacgttatgtgtgtataagagatgggaccggatattaatggtgtagtatatttttatagttaactattgtataaataagctattagattagctatagatgatttggagccggtagctggctaaactattaaacttgctctaacacgctaccacgcgcggtatagtcgcgtccttcgcgttaacttctccgcgcgaatggcttccgacagcatcaggtgtgcatgttgctttcctaatcaggcaaattttccaaatt

SEQ ID NO: 49894 - DNA, 711 bp, Oryza sativa
aacttttggagctaagatcagctgatgctagcggtttgtcagctatggtcattataacatgtcataacttcccaaattacaacatgaaaaatttagacactttcatatcctccgagacataaactgtacatgtgcaaggtagtccacatgttgttaggttagaattattgcagacctggcatgatacacacaaattgggcgttaatgtgcatatacaagtttaccatattcttggtacctcgaggtaccacaattttttttactttgagatactttttagtgtaaaatttgatatctcgagttacttagtatatcaagaaaccaaaattttatgtgtaaaatgtgatacctccttatagcaaatgttggatggtaaatttattcgaaactgtacatgtgcatggccctccacatattgatatgtagagctaccattactgtaaacttcatggctacaaggagcacttgtagcatttgctaacccctacatgatatgcacaaatgtatagttatataccaacatgcagatactatataattaatggatcgaatggggttcaaaaccgatataaggatctaaccagaaatgcaagcagctgcacttgagaggcagaaatctgaaatacaattactcaccaatggcatgttctcactttgaagtacgaatatataacataagcttgggaggcaatgcgattgtgcaagttactg

SEQ ID NO: 49895 - DNA, 709 bp, Oryza sativa
atcctaagttggttggaggtcagctacgacgacatagtgaaactggaggttggctaagatgtcaccgtagacctcgcttcacacaacgccagctctgacaccgtcacggtggttgccttaaacattacgagaaggcaaacgataatggggagacacatatcacatgtgggcttatatctgaatgcctcgtgggtgaacatgtcgtacatgtgggctaggctgtgttcgctcctgacacggaaaacgaaacacgtgattatagtgagattaattaagtattaatctaaaaaaaacttgaaaaatggattaatatgattttttaaagcaactttcatataaaaaacttttgcaaaaaatataccatttagcagtttaaaaagcgtgtgcgcggaaaacgatggaagtgagttgggaaagaggggagaaaaacacaaccttataattgaaaggctggtgcttttctaaaatttactcatttttaatgaaacatctaattaagtatatacatgtttcgtctctgcttcttgcctatggaagagctagaaggcttccactctttccggtttgtgatccttttatggtagtcaatcatgtcaatgtattctaccctggccttgtgcatatatggagcatgggattgggatgtgttaggattcaagaagccgggaaaccttcattatgccggtgccaagccaaatggtgaagtaaa

SEQ ID NO: 49896 - DNA, 707 bp, Oryza sativa
aaaatatatatagcccttatagaatacatgcaagtcattctgaacaaataatgcactatatcttcagaaaaataaacagaaaaaacacattgtatgaatctcattgtatacttcacaaaaacaaatagggagaaaaaaattatttattagtgcaagtgcctgcagtagccgcaggcgatgacaacgaaattggtcgaggttgcaggggaggagatcaaccatgagattacgtgtggcaagtcgtcccttcgatgtccacaatgatatagttgattttgtgttgatgggttaggtccttgatgcaagggtagatggctttagtacctgcttgaatctggtactccttgtccttgccttcacaaatacttaaagttctgaaaaaacaactgatcaagatattgaaattttgaccaacaatgacttctaaattattcaattagtttcagtatatatgtgagtttatgacttcacaattgtgtgcaactcacatgtcactctatggtgctgcactcataatcttgcagtaacaacatactaggggagaaaagaggggctacgaaatgcttgaaaaaaaatccacacacaagaatagtttgcagacagctaaaaatttgaattaacatccacaagcgatcccttgtgcacttggcatctactccttccgtcccctaatataagcgatattcactacgtttgaccactcatct

SEQ ID NO: 49897 - DNA, 803 bp, Oryza sativa
ttcaactagcacacagtggggatctcatttaaaacctagactataggtttatatgataatgttggtttaataccaccgctctggtgttggttaaataaaatgaaccacatggtgggctgtgggtgcatggttttgctagtcgcacccatggcagttaaggaccggttcgcgggatgccctggaagaatttatcgtacttaccacaagccagcgtgggcaacggctgggcttgtagtgtagctttcctctagtcgacgcatccaggcaagggtgggcgtgatggagcggggcgggccctgcgacggcctctgtcgcttccggattcacctaggcacgagaggggactgcccgtcgcccgctggggacgggggtgaaacctgaggtgtggtgtgcttggctagagggggttatgcgaagggtcctgtcacggcctctttccggtatgtcgtggtggcatgtcggcgcacggaaacgtgtcgtggggctgtgtcttgtgggtacagttgtacacctctgatcagagtaaaactattcgaatagccgtgcccgcggttatgggcggtcaaccagattcaccgtgattagtctcaccctagtgtaatctgttgaacttggatagtttaggtggatggttgggcctgtcgcaacgtgggttagcgttggacagcggatgtttaatactgcttaattattacaaccgttttcgcattcaattcctgtttataaatgctagtttttatgcaaatgaaccactctagctcttctttgttaattccctgcatcatacccctattccggtatga

SEQ ID NO: 49898 - DNA, 516 bp, Oryza sativa
ctccaccataaagggtatcggtgtctagaccttaccaccaacaaggtcatcacctcgcgacatgtggtgttcgatgagacatgttgtaacgccccgattttcgttcgggaataaaaatcaattaataatacattttctagaaattaaataaaagttaaaccaatttaatcaagtggaattatagaggaaatttgaaattttcctttaaaaatcattggtcgggaatattttgtaatattctttgcgccctaatgtactctccagaattttccgtgaattttcggagctcgagaaatagttttaatagcacaaagatcattgcatcaattaaaataaaaaaaaacaattaaaattccacttcctctctttgggcctttttcggcccaagtcttccttccctcccgcggcccgcgcgccccttttctctccctctcgggccggcctcctccctcggcccgctcggctctctctctccctcaagtctgctttacctccctcgcccgttttcccctctct

SEQ ID NO: 49899 - DNA, 732 bp, Oryza sativa
  unsure (1)..(732): unsure at all n locations
agccctactatttttccaccaatcacctcccatttaaattctctttattttgatatctaattactctcttttccttaacaatatcaataacacatatataccagttttaccaacaaattattatttggttgcttacatgctattttatagcttaacgtgtagtggtagaaatgaaaataacaaggtacctaattgttcctcgattgaatttttctctgttcgttgcttctcgctttcgtcatctttctctgaaggagcaaaaaagaaagagaataatttgaattcgatatcttgtagtaggtaaaaggatatgtcgtaattgttgtcgcttgattagtatgctctctggaatgacgtagctgacgtttaccttgacgttggcctgttgatcgttccgtgtgtgtactagctacctnctncctgtggccttccttcagtcctctgctcccatcttctacagacttcacaatttcagcaaagaaaaggaacgggattatctaacagcaattcttaatcatgtaaaggctgatatataccttgcatgcttgattcccttgatatgttgtagcaggaatcgatcagtttactagttgtgcttggcctaaataagctgcggcaaggaaatcangacatgaacctcatgtggaaagatgacacatgaatctcatgtgtgctacttagacttctgagtttcaggcaacaaaggagatgatatagcagccatatgagaaa

SEQ ID NO: 49900 - DNA, 524 bp, Oryza sativa
gccgtccacgatggcagccatggcggcggacagaaacatgctaggaactcgatacaagcagggaaagaaggtcgtctagaggtggtcctgctagtgctggggtgcggcggcagaaggtcgacgacggcggattggtcgcacggccggtcttggctatggctggagaaaattttggaatagaacgagtttagcgcttagaggtctagagaggaaaccagaagtgattcagacttctgtgctcatttgctttgaggaagaggaggattggaaaaggagggaaaacaaaggagggattggcaacgagcagctgcgcggttacgagctcggggcggcacatggagcagcgcaagcaggagcgaggctgcacgcgacccgactagcgcgtgcgaacgcgggcagggtgcagggcggcgcgagcggctgctgcctcggctgggccaacggcagccgtgggccggaacggcccaaactgagggagatgggtggaagaagtgaaaagaaatggactacatatatatttgtcg

SEQ ID NO: 49901 - DNA, 778 bp, Oryza sativa
atttgggatgtttctttgatttgggatgtataatctgtggtgtatatgattgatttgtgtatttgggatgttacgttgatttgaggatatgcatcccacctaatttgggagaaaataaattagagattttgatttgaggatatgcatcccacctaatttgggagaaaataaattagagattaagcggtgagtagcaataaatgaaaaaaaaaactaaccggtactgccgctgaatctttagtcccgaaataaggatctttaatcccggtttaaaatccgggacaataggggggttacaaaccgggactaaaaacgatctctccaccagtgatattctcttgtcagttgctaaaaatttggagttcctttctctaggtatttcgctctccatttgtagcggcgcgcaagcccgtgttagtgatatgccctagaggcaatcatagagatgattgtatcacacactatgtttacatatttatccgactttgttccttgaaagagataaactcattattggttaatgaatatgtgattctttcatgagactctttatgttatgtgttgctatttctaaaggatccctgatcaaatatcatatgtagaacaaatatgtttagatgatcagcacatatattaattgatgatcatgtcttatggatcatggtatagagataccaaattactaatgtggacacatgttggtgaatatgttgttggatagacccaacatgagacactgcaagagccatatgtgttgtgtcatcagtgatcccattta

SEQ ID NO: 49902 - DNA, 615 bp, Oryza sativa
gtccaattaaattattaaacaaattcaaagatatttgcttaatactatattttatctatttgtcaaagaaataaatcctatcgatgaatctttttttatttaagatatttacattccataggtctcatttgggttcaaaattataaaatatgccaaatatcacatacatattctattatacaaataatattccaccatccaaattataacaattattggttatttatctgaaaagatacataactaataattgctactactccgtcccaaaatataaggatttttagaatagtatcaagtcaaacattttttatctttaaatattaatagaaaaaaataaaaaagatcaatcatgtaaaattgatgttacttgatttatcattaaacaaagtattatactatgcaactctttttatttaaaacatcttattttatagatattattggtcaaattaacatctcgaagactgtgtcaaagtctaaaaatacttatattttgagagacggaggaaatatattttaggatgaaagtggtatagaataaagtggtgggatggcagattggggaccaccagcatgttgtcttaggtcattcacaatgcagtgatgtgacac

SEQ ID NO: 49903 - DNA, 2962 bp, Oryza sativa
agccaactaccgaaaatgacctatcatgtttttggattgttggaaatatggtcaagaatcggcatattttaatccaaaatgttaaagcaataatcatggcataagcagtgtaggttgatcttaacataaccagtagcatactatgcgcatcatgaatgtgaagaacaggaacattacagcaacgcaataacatgctagaggcatcatgaatatcaggaacaggaacatagcgcacatagcagtaaagcgctaacagtgggaacaggaacaggagaatgatataccccgagaatggccctccgctggattatgaggcagaattgcctccgttgatgttgttgttcgcgccaccggctccagctcctggcggcggcgcaccacctccgccatttcctccagcagcggcggcggcaactccagacatggcgagcagtcgtgcgggaggcactcccaaaaaacctgatcatccgcctacccggtgcagatctcaggtgaaggtgtggtttcggaggcactgctccttccaatctctcgtgctcgcaagagatcagaagcgaggaagcgagaacagcataggcgcggaggaggaggaactaacaccgggaaagaagcaatcgatcagaacagatcggactcgcggcctccttatctatcaggagagagaggcaatcgtgaaaacgtggacgcgctgttgcggagagagtcgtgggaacgtcggttagtggctgcaaaagaatagcgacgtgacgcacacacgccgctagccagccacgcctcgccctcgccctcggccacgccccggcccggcccgcgcgcgcgtgcgtgtggcattccgacccccacctcaaccagtcaactgggagcctccaataactccctatttaggttgagatattcctcgcttaaatcctgaggtggtattattatccttaacatttattatgggcctttgagatttaataggataagttgggcctagcccaattattctaacaataatttcatttcacagcttgtctgtgaggatgttttgatttgagtaatatattttcccttcccaaaaaataatattggtcaaatatttaaagagttgaattttaataagatacatgtgcatcctagtgagggtgacgaagggagtagtatgcataatacacatcgctgaaaatcttgtcaagtttatttccaatgcaacaaatagtgtcatttggatttcccaataagaagtaaagatcaaattactgaatggcttcgcggaatccaaatgcgaattgatttcgggatgaccttcgaactagctgtctccagcaatttcacagccatttcatcacacaactaggatggttgttcttagcgtaaatatccctggtatctaagtacttgatagactatgttgattcaaatataaaccactttttgtcagtagtgtgatactctctccgtttcataatataaggcacaactatttttttgatgtttcataatataagacatacatgcatgcatacaattaattaggacctcttctccattaaattattgcttttttaaatcatccacccttaaaatttctaattctattggatgcatgcattacatttattagggtgatccaaactaggagataataataattgtttcttgatctttgggttatgggtggttgtgtcttatattttggaatggagggagtaataaatatttgagaaagatctctacacctttctcttgtgattgcttgcagtattactaatatttgatcactcttcttcataagtgacaactattcaccacgggaggattactgaccaaggaaaccggtcttcaagccattttcggttaatttctaagagaaaagaattagagggatttattttacaactattatgatgtggaattattttaccttaagccccttcaaacggaatgaagccttacctggatctaccactcttccgtatagattcagatccaaagtctaacttcaacagcggaaaggcaaataatgtgaacagtgtagtcacttcaagaagagtttgtaattaaccatttaatctatccacatttgtaacgatcccatattcccatccacaataaacagacaagaagaccgattctgatatagtgcaatttatactatgctacctacatgttaatgtagcatatctctctgtttacccatctgaagtcggaggattaggttccctttcgcatcagctaaaaatccttagtctatatcttatttggcaatttgtcaagttggcagttttgaagttttcgaagtgttaattgtagtagttacaggtacagatctagtagtgccacttggatgcaccattttcctacacagatgtataaatcgaaaactaatttaatagtgctatttttctagaaaagtctattttacacaatcctaaactgattcagatctactcaaggagctggtctgaacagggtaacaagcagagtggatagaagtagttttaggaaagggttaatttgatgcatgccactataaatatgacatattaaaaaaatagcgtactaaaggagctggtctgaacagggtaacaagcagagtggatagaagtagttttaggaaagggttaatttgatgcatgccactataaatattataaatatgacatattaaaaaaatagcgtactagaggagctggtctgaacagggtaacaagcagagtggatagaagtagttttaggaaagggttaatttgatgcatgccactataaatatgacatattaaaaaaatagcattacaatttgtgttatcgactgggtgccactcaaaatttctaaaattaaaaccatgccactctcgtaactaatttcgtcctcctctctcaggtcgccttcctcaccgtgacatcatgcacagggctccaacggcaaggtagggacatcgtgcaccgggctccaatggtgagcttcccaaggagggcg

SEQ ID NO: 49904 - DNA, 1149 bp, Oryza sativa
gggaccgatcgctgggcaatcgccctggcgatcgatcgcccattaggcccgcccagtatctaccatcagaagctagccttaggtgcactctaatacatgagagaaggttacaaatttagatttgtaccaatttcataccgaaagagtgcaagttaaagctacaaaaaaaacatcaactaacattctgttctgcgagaggtggtgtgcacacaagataagcagcggaaattgaatgaacccgtattaacctttcaaatggttagttctgaacttaatttgtctattaaatattggctgtgttcgctaggggaggatgggaacctgcacagtgcgcacggaaaacggattagttcattagcatgtgattaattaagtattagctattttttttaaaaaaatagatcaatatgattttttttaaacaactttcgtatagaaactttttgcaaaaacacacagtttagcagtttgaaaagcgtgcgcgtggaaaacaagagaggagtgttggtaacttgctcttgcaaacacaaccataggtgaacaacgggttaggttacttctggtaaaaatctactcatgtttaacttctagtctatctcgacataggtgctcgtatttattgtcaatttaacttttattgttgagcgagatatacacattgacactgagacacttgagatgattccatcattttaaaatatgacggctcagtctcggttctcatagggaaattaagtgtatattcatattccatagggtaattgtttctgcgtgttttatgagcgcatatgtccgtattatgttttgaaagaaatgaatagataatactcatgcctttttcttttaaaatatgtttgaaactttttattttatatcaaatgaatatatatatttttacaaatttatagaaatactccttcctctgggattttttttttgaaaaaaaagccatcatatccttccggaagacgggttatataatataataggatgagagtcatttcacatatagatcctttccactctcttggttgatgggatagaataaaccatggtggccgggtgcggggcggtggcgtcgccctcctctccgccagatccggccggaggggaggcggcaggatgagtggccggccggcggcgggatgg

SEQ ID NO: 49905 - DNA, 619 bp, Oryza sativa
ctagaggatcccccgcgacatctatggctatcaatataagaccccttagggaggggaagacaagcccatacaaatcaacaagctcagtcagaatagataccaatacaggccaccagacatcaacatcaaagatcagcctagacagacccaatctggtgccatcagaggacgacaagagggatctagcatcataggacgacaagagggatctagcactatccctgatcttgccgagtatgtattcaaggaggaagactaccccgtcgtcgactacttgttggagctccatgccaccaagccaacgatgactagatagggcatcccaaatattatacttggggaattcaaatgaataacagcaacaccggcttagggcaacaagagtcgggttataaccttccggggaaggggcccaaacctgtaaataaaatccttggcctctgctgttttacctcaacctcgcatatattctgataccaacaatgcccataccatgcaaataccgttaaacgtgatctcaaacatctacagcggcataccagataggcccattggttcttcaaggtttcgaccacatggggccaagaaatggaacctgcgacaacacactacttgatga

SEQ ID NO: 49906 - DNA, 541 bp, Oryza sativa
cacctatggctgcgtttgcaagagcaagttaccaacactcctttgttggtttccacgcgcacgcttttcaaactgctaaactgtgtgtttttgcaaaaagtttctatcctacaagctgtttaaaaaaaatcatattgatctatttttttaaaaaaaactgctgttacttaattaatgacatgctaatgaactaatccgttttccgtgcgcactgtgcaggttcccatccttccctagctgacacagatcctctttaatagacaaattatgctcacaactaaccatctgaaaggttaatacggttatcattcaattcacgctggttatcttgtgtgcacaccacctattgcagaacagaatgttcgttgatgctttttttgtagctttaacttgcactctttcgacatgaaattgttacaaatctaaatttgtgaccttgtctcatgtattagagcgcacctaaggctagcttctgatggtcgatactgcgcggacctaatgtgcgatcgatcgccagggcgactgcccagagagcggtccc

SEQ ID NO: 49907 - DNA, 835 bp, Oryza sativa
gaccaaaataaaagttgtacatcttgatgagaggatcaactttgttgttgaccatatttccatttgaaatcattttgtatttacaaatgctgtttagatttatcatatattcaaattcaatttcaaattgttgggaaaaaagttatatagaaaaatgaccaaaataaaacttgtacatcttgaaaggctctacaactttgttgttgaccatatttccatttgaaatcatttatctgaaaatgtatcatgactaataaaatgaattattacacaacagctatatattttgcacttacaaatacaaatacttcaaatgaaaaaatagaaaaaatagtcatcggtgatgggccttggttatagcccgatagagattaatctatctcaaaggccaccactctcttattccagctaaccaccttgcaacagtaccttagcatttcatattaattatcttgcatgatgatttattttctcacattcttgttccaacgtctaatcccgcttcgtatcaactttacgagggtgctttgcagcctagaccttttcttacctttcattgacacctttaaagtatgagctactttcacaatttttactgtccaatcaattttattgtgcatgtttacctgactcaaccttttgtaaccatttcacgaaaggtgcattgcacatcccaatgtctctgcagtaaactatcgtccattgggttctgtatgttgcctatctttttaatatattactgataactttcttgaaaccctttcctttgttgacatctttcatctgatacatgaacaagctgaacagggtttcttttttatctgggaaacaatac

SEQ ID NO: 49908 - DNA, 723 bp, Oryza sativa
attttggtgcagatgtggaatgctttaatgtggaaaatttgtggcggaatgctaaatgttaggtgcaatatagatttatggaatagagctttaaaatataaaattctactttgactaatctgcagtctaaaacaattgtccgatcagtaagacagatgatgttgttaaaaagaagttattaattattaggggcaatttcgcatttgatcctgttttgaggactaaggccgtgtttagttgttttggtaaaaaaaattgtcgtatacggacacacatttcaagtattaaatgtagactaataacaaaacaaatgtctgtaaattgcgagacgaatctattaagcctaattaatccgtcatcagtaaatgtttactctagcaccacattgtcaaatcatggcgtaattaggctcaaaagattcgtatcgcaatttacatgcaaactgtgcaattggtttttttgtccatatttaatgctccatgcatgtgtctaaacatttgatgtgacggaaaagttggaagtttgaagggaactaaacacagcccaactaccaatttgaccctcttctttcaactttgctcatttgagccttcttttcaaaattgaaaatataatctgaccctactccgttaagggcatgtaacggtgttaattggagcaacaaatgccccttcttcccttgcttatttgattctattttataaaaaatataaataaaatata

SEQ ID NO: 49909 - DNA, 624 bp, Oryza sativa
tttgtatggccacatgcgggggtccaagttttggtatggttgtggttccaaatactgtgctactaatgtttgcttttctataggacaagtgtgaaagaaccttaaccatgagaatgttccatactattctactgttccatgtcccttttaactgtgaacacaagcaaaggacaggtcttcattgacatgccatggtaggataccagtaaatggcttcgcttctttttaactgttatatgagaaatgagtataactccatggtctactttatgcataagttacctttgatctgttcaagtagtttgcagtgtacttgaattctttgttcatggttatgtacataaataagtagtttagattagatattgtaaattttctctttcagcagctgaaactaaacatgcatttacaaattgtttgcatgtaatttcagaggtaaggtttgttgtcttgctgattcatgaagagatggcagtatgttggtgtgatttcgatacgtgacattgtgtttggtaagtgaacctatgattgtatttggacatggttgggtcggcccatgtggacatgtgactttgttttggtcagtgacttatggctggatatgcatggtcaatgtactgatgt

SEQ ID NO: 49910 - DNA, 704 bp, Oryza sativa
atcaagcttctttattgcagatttctgcccatcactaagctctccaaagaaaactctggcgtctgggccctctcctattagggcatcattactgaagttgctagttatcttctccaatatgttcaggggaatgatcgatacaatagttggtggagttttgacaaacttcttggtaaggggaggggctacatgttggtttggtttgttgtcaccactagctgtattggagaaaccaaaagaataaaatccaatagattaagttaattgctgcttacaaaattcgtattttgttagttgtactccatccagtaaaagatacttgacatttgaaaattgaccttttttaatgtctttaaagtgcatctcttaacaataattttatgctacctccctttctgaagagtgcctttttagctataaacatggacaacacagtctaggttcatagctaaaaagaaatttttttaggaatggaggtagtaaaatacaagtttatgagattatggaagtacctttctggacaaccagacaaatctacacatgtcattttaatgtttttaaaataaaacttttaaacatcaaagttttaaaattttgactggatcgtatctaaaacgtccaagtatttgtggctagagggagtgctacttaagtacttagcacaataatatttatatttttgcaaacaaggtgcacatttaaat

SEQ ID NO: 49911 - DNA, 989 bp, Oryza sativa
gtgcaatgaacagtgacttttcctatttatcccgattttagtgtattttccatataaatttgaatccacaattcctaattttacatatatgcattttactcaatatttgtgttatcttaactaatgaattcaccctagattaatattacccatatttatttatttatcgcacaaatgaattctttttagattaatttgagttattggccctaaggtgaacttatatatttttgaagactttggggtactattaagtttaatataacgacttgtcatgattaatacattagcagattggtcaagtttagttgtatagcaatatattttacacggataggttcaatctatttattctataaatagtaaattgagactcggcacaatatttatctacttgtttaattaaacactcacatattcttatttatgtataaagcctaatttatttatatgaccattattttatatgagtgattttcatgctatgaggagcttgataaggtgtttcaaatattaattatatattctagtgagatgctctattatagatggggccattgatgtgatcatcatttcatgtgtacttatatttcatggcacgcatcacatggttcaagtatttaatatttgatccataaattaaattgctaattaaccttccctttgtctggctttgttttctcgtgcgtaaatatttatggggttcataataaatatcttattattataattattacttagctgtataactttagtttaattttccattgtgacaatttatagtttggcaagtaaaagcaaccataacatccagcatgatgcaaaaagttttaaaaagttcgaaattttagtgatttttattgttgggaatttttaggatgttacaataggaccccccttaaagaaatctcgtccccgagattcggtgggactacggtgacattaaactagttcgactaaaatatcgttcgacaacaaaacatgctaat

SEQ ID NO: 49912 - DNA, 763 bp, Oryza sativa
  unsure (1)..(763): unsure at all n locations
gggtcggcccgctcccgtttcggccccgagggctgggacgcnccgaccccctgtgttttggcgccacgtgtgtggataggtgagcccagcggggctcacctaccggcatttatagcgggttggacgagcgcgccacgccgcatttaatgcggcgcagcgcacgcttatccggtccgtgaccagtcccggtatgtgaccggtcacagaccggtcagatcgcgggttaggtggcaacaggcgtcctgtcgcacgcctcgcctcgtcccgtcggaatgatgagagtttcctggctctcgtctctagccgaagctggcgtgctgactcctggagttggtatgtcagtcccggtcagatccattttaggcttcagcgcaagcatggcaagaaagtcgctggccattgaatgaaggttgaaacgggcgtcccccgggagagctgacgagcggagcagaaggcgtgtgcagtgcttgtcagaggtcacttccggctgtagactagccctcattgtaaaaagcatgtttcctttcttaggcagctagaggcccatgtggtgacccctgaccacataaaaaggaggcccaggcctaggagagggggctggactctggccacttggttctagagcctgagctctctctggttctctcgagctgtattccttcacacacagatccaccagaacacaggagtagggtattacgcttctcagcggcccgaacctgtctacgtcgcccgtgtcttgtgcgattcttctcgctgacat

SEQ ID NO: 49913 - DNA, 1702 bp, Oryza sativa
tgtgaccgtttgcccaccgatatgcctccccctcctcacctccccaattctaccgcgtgcatgttattctgctctttcaaacatcgctgcatgccccctctctattgctcctccctcctcgacgcagtgtaggagacggtgcagggaccagatctgatatccaaacctcggggctgctcagggttaccaccagatctagtccttgtagcgcttcctccactacgcgggggaggagaactgtttgcctaccgatgtctctcccacttgtatccccaaccctaccgtggggatgtccttttgctgtcccaaacatcgctgcatgcctcctctctcttgctcctccctcctcctcgacgcagtggaggggcgatgcaaggaccagatctaaaacccaaatctcggggctgctcagggttccactagatctggtccttgcagcgcttcctccgctacgtgggcgacgagaagttaggggcggagaatgtagtgatagtgcttgattggtaggaatggcggtgatgacaatggtagcttattgagtaggagtgatggcggagacttggatccgctggttggggatctaaggagagggagtggtggcagatctggtggctccatggtcgatgactgtgtcgtgagatcacgaaggcccgggaagtcagcacggagattgtgacgacggccttgccctatgcttacggtagttcgatccctaggtggtggatctatattcagttgttccgaccctccccactcccttccgctgcgagcttgaggcacgagaccttgctacctcacaagttagattatctcatattctctttttttcttattgttgtgttttctctttgcacagtttttcgtctgctgcttttcttagcttgattgctataaacaaattgtggcaatgtggatttttgaaagcgtatgatttgttgaatgttgaattataacattagtatttatgtacttttgtttccaaagctagtatcactactacagaaaagggaattagtgccggttgggaaacccccttcggtgccggttttctcaaccggcacaagggaggcggcactgatttgaaataaaaaggtgccggttcattagaaccttttaggttcgacgaataaaaaaaagccggctcgatgcgttagctcgatcgagccaacgcatcgagccgagcagtccctcgtcccacatccagaagaatagaaagaacaagaaaattttttttggcaacattcatcccacaacatgcaaagatggaatcatccacatatcaaattttggcaacattcatcccacgacacaaattttggcactcaaatcaaatttatgcaataaaaaaaatcacacctcttcagtcgtcaccgtcgcacggtcagccgttgcgccacctcccatcgcgccgtcttccttcggcgagcccgccggttgccgccaccaacctccccgggagcccgcacccctaccgccggcttcccttccgctagatctagtggaggggagggctcctccccgccggcgagcccttcgccacctcccctttttgagccaccccacccgccgccaacgccagatccggccacccccgcctgtcgctgacgcctcccctcctgccggatctggcggaggggagggcgcagttgccgctaccgcctccgctggctgcgggagagaagggaggggagagagagagaga

SEQ ID NO: 49914 - DNA, 1185 bp, Oryza sativa
aaaaggattcaagagtttcttgcctttcttctttctcggtctccggaagaacgtcgtgctaataacgtattacgcaaccctcctgctacacgaagcagtctaaggggtcccgtaatgtctacaagaattggggacacagagatgtaagggtaggactcttttccttcattcattcacttatgtaacacaatagcacctcctcccctctatatataggcatagccatgagtactttccatatttagtgatgggtccaattagtgggtaaccgggccagaccttcatgggtcggcggtttcctaacacttgctacttgctggagggtcccgtaatatctacaagaattggagacacagtgatgtaagggtaggactcttttccttcattcattcacttatgtaatacaatagtacctcctcccctctatatataggcatagccatgagtactttccatatttagtgatggacccaattagtgggtaaccgggccggactttcatgggccggcggtttcctaacactcgctacttgctggctgattgggggaacaatgataaattcttttcaatttatttcctgaattttcggtgatgttgatcctttactcacctatgaatttttttggttgacgtctatttgtgttaatctggtgagctttgagctctgttgtggttcgttactcacctctgatctgtatatgacgtgtgcgtactagctattgcatcttcggtgagagggcaaagagaaaactaatgctggtccacggtgatgggtcgcccatggaaggctcatggatcggcgggccaaccgtgttgtgtgggtcggtgtgacccgtgacccacagataaccagcttgggtatattgggtcagacactggtggagaaatcatctttggtcggtccggcaaaatacacaatagtcccggatccaaaaagaaccgggatctttagtcccggttcatcccttgtcagatgtatgtcagggggccgagaatctttagtcccggttgatgttaataaccgggactaaagattaccactttagtcccgattggtaacctgttggtaatacgaaccgggactaaaattaaacacgtagtatataatccctatcactgtcctctcattcacagtgacagatcgaatctcaccccctctcctcagatctatcctctctaactct

SEQ ID NO: 49915 - DNA, 677 bp, Oryza sativa
  unsure (1)..(677): unsure at all n locations
tctctttttttttgccctttactcctgtaatgttcccagacttgctttatattgtctacttacttttaagtattgccttgagtcaaaattttgaaaaggggggcagtccagcctgttatattaaatgatcacttaaatctggccatgagtggaatgcagccacatagttctagctattctgcaactattggcaaaatactattttggtttctccattgaaggtttctgtaacatattgacttggtcaagaacagttcatagtcttacctagcttgttgagtatcttgattgtgaaaagacttgggagcaatcttgctaggtaacctacaaaggtggattgagaaagcgattttattatttnnnnnnnnnnnnnnnnnnnnnnnnnnnnnnttatgaggctattgcatatattttcctgattaagtgcacataggttgtcatgctattgatttttctgtaatgacagaaggtgacaaacaattttgtgtgcagatgctgtgtttagatttttacgagtcccgtcctgcaagagacgtgattatgaatcgccctcactacagtctcaagagagcttgcataaccggattcaatggcaatggagggcaagttgcactagtaaaatttatcctcaagaatgcagtaaaattggaggaaatggttatagatccaaaaggtag

SEQ ID NO: 49916 - DNA, 641 bp, Oryza sativa
  unsure (1)..(641): unsure at all n locations
agagaaacttcgggagaatgaatagggcttgggtaggaagaagactatataggggcatctttgcaggcaggccatataagtggcacctgtgaagatcgatcttcgcaggcgcacgacgtttgccgcctgcgaacatcgatcttcgcaggcgacgcttatatggtccgcctacaaagatcgatcttcgcaggcggaccgcgccctccaccccgggtacattttttgccagtggggttttggctccgaattacatgcccgcctgcgaaaattgataccctacgacgccgaaaatgagttttctagtagtggccggcaccagagttgcagccctctcttgcggacgcttttgcctcgagcttcggttattgcagccttgctcacgaccacgcgatggatcccctggctggcaacctcgcgctagggttcgcctgcatggcagttagacgaaacctagctagctaccggccaattttgtactgtgtgttattattttgcaaatttagctgaacagctctcagttgngtcatgtacaaacaatattaatttcgttcatctggtcatgacgatcatgtgattttacaatattcatataatggtatggaaataataccattgttgttgtttaacctaatatatacctt

SEQ ID NO: 49917 - DNA, 705 bp, Oryza sativa
agtagctcatcaagatcttgtcatatatagagagagaataaaatttttaatatctatttattcggtgcaatcaaaaaatagttatagtagtttgtaatatgccgatgatatgattttgttagattttcctaatgtactaatttggcaagtctgtgtaaaaaaaattgaaataaactttgtttttttattaatttacaattaacctttagttaattagttttgaatagcgataagttttttcagtaaaccctacaaatttggtattaattgtgcaaaattttatgtgcatttttttagagatatggaaagtcgggaatggatgtatcattggccgaggtttttgtctccatatagaaacgaagtgtctaaatttattgttattgccaaggcacacgctgaaaagaacaatatgaggaagataatttgtgaatgtgctgactgtaagaatgaaatagcctgggacttcaacgatgcttttaaagtaaaggagcacttagtaactcgtggatttatggacgagtacaaaatatggacacgtcatggcgaagaacaagtggacgggcctgaaaatgtagttccgacacaagttgaagacatggtgcgtgacgatggttctgttgaggacaaaatcgacctacaggaaatgttacgtcatgcagaacccgaggtgctgatggggtcggctagagggttaaataactttga

SEQ ID NO: 49918 - DNA, 918 bp, Oryza sativa
  unsure (1)..(918): unsure at all n locations
gcaagcaatggatcttagtgccattgccatggtggtgagtcgccttccaccatgcttgtcatgcttgtccttgaggcggtgactggcgcggttgcggaggagatgaagagacagcggtagacgctcggaccagaggggggcaatgactatggctcgatggtgtgcacttgtggatggaggcggcgatgacctgagctcagggatggagggggaggcactacaacaaaaccattgttttaagacgtttcacttaagtcattctataagtcgtctcttttttataaatgaaattaaaatagggacgatgtttgagacgctttattagttgaggacatagtttaagacgctttacaggttagcacaaaattaaatcgtttagagatgaatattgagacgtttttggaacatctcatgtgtagaaatgagttttgagacgtttttattatatccgtgtcatcgttattagataatatataattatttatatagagaaagaagaaaataaacacactgatcctaatcgtcatcatcaaataccattataataatattataattatttggaccaaaaaaaataaatatttaatattcagtcttagataaaaaagaagagaactgctacaggacgcatgtntgcagagttgcaatataaaaaaaactatctatttaccttcaagattgtcacgttaatgacttggttagtgcatgaactttgtaacctgcaggtgttgtgttcgagcccagatgaaagcattatatcaaatatataagatgtgcgtgcctatataaaagcgtcttatattttatagagatgcaatttacacgtctctagcaacggcttaaataatataggtacgctttaaaaagcgtctccataattttgagacggtgcaaacagagacgatcctacgacgcttt

SEQ ID NO: 49919 - DNA, 1315 bp, Oryza sativa
atatgtatatacatatagatatatataccatgcacaaaacagcgccatgcaaataaaaaaaatggtacaccgatctttagtcctggttattttactcgggactaaagatagctatatttagtcccggattcgtagtcccgattggacaactgggattaaagggggttacgaaccgggactacaaatagtttctccaccagtgtattttaactgggattaaagatcgtcatctttagttccggatgcttgatcccggtttgcatcctggaactatatgaggttacaaatcgggataaaagatggtttcttcacccgtgatcttttgttaatcgggataaaagatggtttcttcatccgtatcttttgtttgttacggatgggcgagctgttacagatgatacttgagccgttacaaatagacaggtttgtgttagtggctgctagttgcatgcatgcacgatgtatctgcacgcactggtttgtccccggatggaagatttggatttgctgcggaatgggctagttgcttgcgacaagtacgatacgatttttccatggaggacataggcacatatatagctagttgctaaattgattaattaattttagccgccatgcattcgtacgtgcagagcagcaagccaacaatcaagtccggtagttcattttacgcaatatcaatcgctccatcgatcgactattattgtctttttcaacaaagagttcggttttctttgctgtctatgtatatatgtttattccggttggtatatatgttcgtaagcacgatgtgtttttttcaaaacatttcgatagcaaataaagttgttttaaaaaattatattaatctagttttaaaatttattttagttaattaatacataattagtcaccccgtttgacatgtgctgggagaagttcctaacctcttccttcccgaagttaattcaattcttggaaaaaaaaagcttaattgattggcccaaagtaattaaattcagctaagtcgtagatcaagcaccttatatttatctattatattattaaacgaatagaaaaaggagcctttatgttcgctctcatggcctagaaattctcacattaatcggagaaaaagaaaagacagagtccatatagaaatacaatttaaaaatagctgaaattcggaattaaaaaataaggaatattagaagaggagactagagtccatatagaaatacaatttagaaataactgaaattcgaaattaaaaaataaggaatattagaagacgagacaagagtacatatagaaatataattaggaaatagctgaa

SEQ ID NO: 49920 - DNA, 561 bp, Oryza sativa
cacaaacaaaacagcagcaacaacaacttcctctctttccttccttttttttccttctcttcacttctgatttttttctttcttttttttcatttctttcttttttttacagcaagctcaaagcttcagccaacaagtcaaaacaagccttagcaaaataaccttttcccaaacattttcgaaatttcacaagcttcagccaacaaatcaaaacaagaagtaatgatgggttggttggctagttacatgattcagccaacaagtcaaaagtgagagtacttaaatgctttcttgggaagggctgattcacttcaaaaagttgcaaaagggttggctgttggtggaggcagcaataaatgcatttgggggtggttgatgtggtgatgagggtgctgctggttgtggtggacgaaatttggtggggttggaggtggatttcgtggtgaatatggtggtgatggtggcagcgggatgaagataaatgaagtgatggtggaagtgtatgtggtgacaaaatcgtgagtataacccgaacttttaaaagactaaactactagaacc

SEQ ID NO: 49921 - DNA, 581 bp, Oryza sativa
cctttgaatcaaaggatttatgtaaggaatttcataagattcaaatcctataggaaaattttctatttggcacattgattcaaaggattaaaactttccaaatcatatgaaattcctatggaatgacacattgcatgtatattttggaggaaacttagcaagaggtctaacctcttgaaaatttcctttgagtctatctctcttatccgattcctgtgtttttcctatggtccaatcaaacgatcattcctgtgttttttcctatgttttgcaatcatctattttatactttaattcatgtcagaatcatgtatttttcctatttctctactttttttaaccctgggattcaaaagggccctaatgatgagacatagtcctgatctttcgatagatactgataagtcgtttgtggagaactcatcattgatgtaggatcgaacaacaagaactaaggtcctgtttgtttcagcttaggattattataatctggattattaagagtaagctgaaacaaacaagtagattattatgatagattattataatctataagccatattactataatctaataatct

SEQ ID NO: 49922 - DNA, 1248 bp, Oryza sativa
tgtgtgtgtgtgtgtgtgtgtgtgtgtgtgtgtgtgtgtgtgtgtgtgtgtattcatgatatcctataataattaagaacctttgcaagatatcagtgttaaggaggtagattccctcaaagtcgactttgtatcaaccacatgcgatggtgcttggtgtgcctacattaagtctcctgagattttaattctaaacttgtcgtatgtcaagtacaaatggactaacacatgtgaagtatgtacgctaacatatgggactccatgcgtaccatttgaaaaaacagaaatataatacttaatgtatgtacatcaaacttgtcgtatgtcaagtacaaatggactaacatatgtcaagtatgtacactaacaagaatataataataaaaatgaagaggattcggacgaatagtggtcatatcatatcttaaaccatattttttaagcgggtgcatatagtgtacagatgcggattgtttcggatgtcggaaatagtgcagagtctgttaggaaacggattaaatttatcggatattacgtgcgtataaaatcaatacaacatcaagttagcaagcaaggaacaataatataataatcaataaacaacccatcataataattatgtgtttaagtgctaaacaatatgaatacatcatgtccataatataaaaatacagctacacaagggtgacatgagacagtaaaagcctcggactgagaaatctatgttaattgatgaattaggctattggatggaccaacttatgttatatgcaatagatagagtggttacatgttttgataatttcggattatctggcaaacgacctatcggataatttgatagaaaggtcggataatccgcatccgccggattttagagataccgtatcctcatctgcgtctgcatcatactatccacatctacatgcatatccgccggatttctgaaaccccataccatattcttatttcgaacggattcaaagcggatcaaatcagatcggatcggatattacccaatccgttttcacccctacacattactcagagattgcatcattaccgattttttttaatctgcaaatagccattccagctagcactgtatggccgcaatcacagatacaataatatattttattttcctttccacacacacatacacacacgcatatatatatatgtatatatatatatgtatatgtatatgtatatgtgtatatgtatatgtatatgtatatgtgtata

SEQ ID NO: 49923 - DNA, 568 bp, Oryza sativa
acggcggtgattctaaaattctggttgtttctgtttattttctccatatattgaatttaaccttgatattcctttcatgtgttattttatgaaacacaaaacaaacaaggatgcttatatacatgcacatacacagttgcccttatgaactcttacatgtataccataccctaatgagattaatgaaatcaccacatgtgtctcgcagtcgacgtgtatatattactccgtcggcgattctaatatttagatattagtcaaagtttacatatcttgacttttcaaaaattatgggcatactaaattttaagatggaggaagtaggaggaaaaatgtggagagagagagagatgggtaaatcttatgtatcattcacgtgagaccgtgtatatgtatcagaaaaatacaaaatataattttgacttattttgaagaaaaaatatataaaaactttggatcccacaatcgccactgattttggtagaaactaattgggattggggctagggatgcaagtgggttgaccgcggatcctcttataggtcaaacaagtggtaacccgcaggtt

SEQ ID NO: 49924 - DNA, 1436 bp, Oryza sativa
tcgactttacgcctaccatggggacagatatttttgcacgtgcattaatcgttagcaaacatattatcagttaatattggttttgatttcattttcttgtaatatttgatggaacattatatgctgtcaaatttcatttttctaattttcaagagtatttaatttggatgagaataatataaaaaaagggatagaatatatatggtttaatgtgatatttttttaatcaaaatatcgttgacatattcatatttgtaaattttctatgaaaaggcgagagggtggaccgatcgtttgtatatcaatttaattttttatttaagaattaggcgggaaggattaatattttcgttagtggtacgtagtctttacaaagtacgtacaaaattacctcctgccgattctgaccttcttctcctatgtacgcatgttcgtgtcatcatgctctggtactggccatgttcaccacgttcgtacttaggcaggagattaggaggaaggggttgactttaaaacaaatataatttaatggttaaaataattagtccatatttaaaagtgttggatgtattttttttctaagaatacaccagtaataaattaacggatgcgttaggatggttgtataggagtgtcaatatatatagggcgtgttcgattgctcgtatctaggttggctcgcatcgtgggagcagagagatgcatgtttggttgcctgctcatgtgtgagagcctgcacccgtgggtgcaaaaagcatcgcccagcaaggatgaggagggaagcttaaatcaaccaaacaaaatctccaataaaaagtatatgtaatacaatcaatcaaacaacatctgaccatagcgaggttgatttcatacagataaccaaacagttgcatgtgtatgtccttagccaggcccaactctacctggatgagggagatgaaccaggctacgtggatacgagcaaccaaacagccccatagtgacttaggttctgtttggcatagttctaactcttaactccaagttatctagatatggagctatgtcaaactatacagattctttattttttggaacgcaactagcacagctcctccacaaaattatactacaggggtagaactgaatttttgctgctccactctatttcaaaagacccactaccctttaatttttttcatgtatttacacgatataccactgaactaccccttcacacccctctcctcatgttctctatcctccccgtcttcctcccttgagccctagagcggtgactggcggcagcggtgttgatacgaaaaacacacactggcctgggagatctgcttagctcctgtgcaggtccaaaggttgatgagatgcgagcgtgccagtcagtttgatcctgcaactgacaagatatgtaaacagtagatcaaatagccgatcggctg

SEQ ID NO: 49925 - DNA, 866 bp, Oryza sativa
ttttaaaaaatagattaatatgattttttaaagtaactttcctattgaaaatttataaaaaaaacacaccgtttaacagtttaaaaagcgtgtgcgtggaaaaagtggaatgtgagttgggaaaacgtgacacagtggtatggtttcaatttttccaaattcgagtggcatgtagccgatatcgtgaatagtagtgacatttacctaaaatagtatatttgtaatggcatgaatccaactaactctaaatataattatactactatataattatcactatgttttgaattttttatttggaagaattgtaaaacaaaataaaagaagggaaagggaaatcatataaacaaggggaattctaggggtcacctacaaatcggacgcccgatttttttttttttacaaaaatcgggcgttgttccaccaagtagatcggaattgtttcactaagtagatcgaaaatgtttcaatcgtttaaaaagatgaaatacaactaaatcacctcatgaaatattttgctacaatgtatgaaacaatggtttttgaagttgtttcaccatatataaaaataatatttcagcaaatagcaaaaggatgtttcaattcactgcaagatttaatctatacacagtgaaacaacacaagtatacttactgaaatattgttggtagaaaaaaaattgaaacggattcctttaatacataatacaagtatacttactgaaatattgttggtggaaaaaaaattgaaacggattcctttaatggagcgtttctgtaatatgcgagtgatttgttgcaacgatgcgtgtggtgggacgcgtggtgagatggtgtggaagcacgggtggtgcggtgcccattttt

SEQ ID NO: 49926 - DNA, 627 bp, Oryza sativa
tcactctgtctcctctctcattatcctctcgcgctcgagtgtgtgtggcgagtgccgccggcggtggccatgaacagtggtgggcgcggatggcagcactgagcggctcggcagcggacgccgacggcggtgggtgtagcccgcggactgagctgttcgggggcgggcggatccacctcggccagccttgcaatgggcggggggcggcccggttgaccgtgaaagcggaggatccctcaaccttcccatgaagcttcgatggcggcctgaagcgaccacgatgatgaggaggcggccgggaggggcgccaccggtcccgagcgcacgccgggcggaaccgcaccgttctggccaacgacgatgaccaggaggaggcggacggtgccgcaagcccccgggcatggatctacgcccgtccgctgccgacaacgaggaggcaacggcggtcgggagcggggccgtccgtttcgggcacacgcgcgccgggcggattcacaccggtgccgtcggattctaggggtcctttttttcgaaattttattttttttgaaatctatttttccatgccggcgacataacccgaccgcacaccaaaatcgaataatcccgcgtgggctacttaaactg

SEQ ID NO: 49927 - DNA, 1099 bp, Oryza sativa
ttttttttggttacaatgtgagaagattaagtacagattgcttgatgcacacatgcatgatatggtataatttcagggcaagatcacttgtacaaagtcagttggaaccgaaacatcttagagtaatacaaattcggagctagtaaaaaatttcacatgatccagtaatactaacaatatgtaagtaaactggcactatatttttttgggtttctgtaagtgcagaaactaacactgaaacaaatttatactccatccttcccaaattgattatcatataatgaaaaacaaattttctaaaattgatcatcatataactgcatggacacggattttatcggagtgcaattaatatagcactgaaaaatgtatgcatgctaaggacctaattgtgcattgtatttttaatcgatgcatgcattgtgagagaatgtatgcatattgtgcatagatgtggtttaatttattttgggtcctagtccacaaacattatatgatgattaatttgggatggagggagtaatctataagtactgaaactaattccatgtaaaattaacaatctgaaactgaaactgattccaggcaaactgtaagtactgtacctcatctgaaactaaaagtcacttgaaaagacaaatcatgatgaaaaccagtaaataatatgaattgacaattgctgaacaactttctcagatgttacagataagatctctgctattccccaatgtgcatctctaaaaatagcaccgtcttcagagtaacaagaggctcacacaaagcatattagcaggcagaacaatttactgaagtgaaactgatctactaggttccatggccaaatctacaaagttcaacatctgtgaagtcactagaatctgaaaaatgaaactgtaaagtcactaggatctgaaactgaaacatatctactaagtttcatggccaacaaacaaatctacgaagtttagaataaattgacaaaccagtaaatacaaatactgcatgagcaagttcagggtttagcatcatgcagaaaccgttaagttatgaattccatggagtactaagttgagcatcatgcagtgtgtggagagttcag

SEQ ID NO: 49928 - DNA, 585 bp, Oryza sativa
tagtttggggttggtttatattatatcaagggttgctaaaaatattcttttgtgaattttgtaataataaatgtagctcggtgagccaagggccgaatggtattttgttattaaaaaaaagccccaatataggaactcttattttaattctagataatttttccttgcttcatattttacatctagtttgttgtctcgtttttctttgataattctttcgagattattcaaaaaccgaataatgtcaagatcggactttagatggttttttcaagttattatttaagctcttatttgaaaacatttagtgacaccttcaccatcttttgttttgctgtgtgaagcacaaaaatcaattgctactagaactcaacacgtgttgttgctatagatttcgccagttttacaagtaatgtacaactcctattttaaacatgcacaacttatgttataaatacatacaagctcttctcataattcagaggctgcatatacgcagatgtaccaatccacagtgacgtgaaactcctttttttttgacgtgtaactccttttataaatgtgtgcaacttatgttataattat

SEQ ID NO: 49929 - DNA, 1034 bp, Oryza sativa
tcctttcctctccaatcttctcgatgcgcagccagcggcagatggcctggtcgccgccgctctgctgcgccagccacgcgctcgcttgcaagctccggccgccgcgcgctcgcccgctagccgcttgtcaccgctgctccgctccaccggctgcacgctcgcagctgcgctgctctggccacctgctccggagccggattaatttggagtcggggcatgtcatgatgtcgttgaattgatggagttgacatgggcaagtaagcaagcgcatggcgcggtggcctagagacacggaggcgcgcccccctcgccagccgccgcagccgcgctcgctcgcctgctccgtacgcttgccgcgatgccgccgccagttgccgctccctcgtttgcggcaaagagaagaacaaaaggagtagagaaaaaaagaaaagagaagatgaaaaaataaaaagaagaaaatggtggatagaagggatgcggacccatgttatttttttcacttacacgtgggaccagattgctgattaggatgccacgtcagcaaaaccacccatacatattgtcatgagatcttgattgcactgttttgaacatttgagaggagaaaatttctgacattagaaattagggatgtcatacagactcgacgtaaagtttagtgacggtagtttaacttattcctttccttttccttttgcacaagctccttttctttttttcagcattgccgttggatgtagatctgatggcgcacagaatcgactgaaaaaaaaaatccaaaattttaagtgattgcagaataggtggtcccaattaataattaagggagtcaatcaatcatggtggaatggggcatgagtccagcttgtgacgtgtccaggaaacaagaatattatgagtttcagtgtaggaattaagggagtcaatcaatcatggtagcaccgcgtaacccgatggatggcgtgtaggaattctccaattggccagaaaagagaatagtcattcatccgtgcacgtcatagtttcagtgccta

SEQ ID NO: 49930 - DNA, 766 bp, Oryza sativa
tgaaaaatatggactttttgaaacaaagataatattatattaaattctattattcaaagatattttaatatttagaaagatattaataatgttattaaactttgacttacttaaaacaagtccaaaactgcatgtccctaaatcgccagaagataaggaacacctgtacccgtgataacagaggggtatgaaatttggacacgaggcttctttggcagacgtggcgctgagtgagcttggctcgcttggtcaaactccgtgcagggacattcagttagctagctagcagcattgtcgacaataagatagcctttaaatgttagcactcaccagcttgtcaaaaaccaaggcttggtgacggcggcttcagaatgaaggatagatggataaatgtctagaatattataaagtccaacaaaagatggagcacatgcatgaaagattacgtacacgaatgcagttgatacagtggatgttaggcataagaagctctataaatagagggtgcaatccccattgccctacacaactacacaagtcgactatcattacaaggaaatttaagcgccccgaaggtatgaaagcatagcagtactctgcattttttttttttgatgttgttctagctagctctgcttaaggttttcctttctttcgttctttgttttttttttgtaagctcaactagttgcatgcaatttagattttatccttttacagttggaaaaacatccctataaatattaccatgaatgcatagagattc

SEQ ID NO: 49931 - DNA, 740 bp, Oryza sativa
agctcgacggcgccgccctcgcgtgtttcttcttcctcctccctgaccaccagcatgatgtcgcccaggctggagagggcgctgcacgtcgcggccatcgccgtctccattgctctgccgtctgcaccgcaggctgttgccgccggccagctttgtccttcctcgtgactggtgtggtggtggagccggaggcagtggcaatcagaccaagcaagtgtcagcaagtgtcattgcgatggcgattgtgcagcgccgacggatttgtttagatttgagcgcgggacacctggtgtgtttggttggagggatatccctagatggaagatgacgattcagtttttaaatgtgtttggttggtgggcgaggatggatagggtggtccagagagggaatatttcacgaagatgctggatgagtgtatccgaccaaattggccggacgaggatatcaacctttactaatctttgatcattagttcttaattagcaataattaaagtatattattgttaattagtaattaacttgttaaaattagtgttgattagaaaaaggtactctattttaatggtaattaggaataaataaggctataataattaatatttaccaaatttaataataaataatacggtggtggtttccatccaatccattttcttccccccacccaaccaaaaaacttgaatgttaatatccccctacccaaccaaaaaactataccattgatgagctactgta

SEQ ID NO: 49932 - DNA, 653 bp, Oryza sativa
ttgaaatcatttagtatttaaaaatgttgtttgaacttggggaggaattatggactatttggatgggcctttttaacttcggaaattccgacaaactttccggaatttttccgaccgattccaagttccgacggaaactgatattatcatattcgattccgtttccgaaaaaatatttccgttttcgattccgtttccgcgaaattccgaaaaaattccgaccggctgattccgttttcgaaaacaggtccggaatccggaaaaattccgaaccgttttcacccctagttgctctgcataattgcctaaaactttgcactccttcaaatgttgacccttcatcgggagccccaattgcgacaatgaattcattatgttctgatgccttgatgtttgaagccgtagatctttcatattcattttgaaaattttcaaatatacaaggtgtgtaaatgttattttttatgaagaatgaatcaatttaccatctaccatctatcatctatttctggattgttatttttctagatttctttggagatccatacagttcttatttggattatatcctccacatagtatatctcacatgtttgggaattgggttatgggtgttaataaaaaaaataaggaacttattcttgtagaagctt

SEQ ID NO: 49933 - DNA, 612 bp, Oryza sativa
gatcggtatggaaagcacagttcccttgggaatttttaggttgccaagatcgatatctgaaccagcaatcctccttatgattactactgggctgtacagcctcagtgattccaagagaaccatgttaacctgaaggccaaatgataaattctcatgcaaaatgagggcaaaaacaacaaattaaaatgaatcgatagatggatggagtaaatgaagggtgagtttgtttgggcatactccttttaattttgtacacataactatgtaaatatctttttttttatagtagggtaggagcctctcctgttgtttcctaaaaaaaaaagattgtttgggcggttcattcaggatttttgttggaatgggaaacgagacaaaccgaaaggcgtatgactaattgagactggaataatggatttatttcattttttctgaaaaaacttttgtataaaaaacatttagcagtttgaaagcgtgctcgtgcaaaacgaataaattgccgcagcaagttatccgaacgaactcagagtaggtttgcaatttccgtttgaaattttagaaatttcgataatttcgccccctgcaaaaaaatccaatttcgaaattgaaaac

SEQ ID NO: 49934 - DNA, 644 bp, Oryza sativa
tttaggttgaaaaagtgatagtggaattgcccaaggaccaacctgaaaacaacctgaatatgtataacggctaggtgacgtcatctagtcgttactcacaattttgaactggaaactagataggaagttctggacctggaagacaggaacttccggactacacttaggaaaaactttttcacaagatcggaacttctggacctagaagacaagaagttccggacttgcacttttggacagatggagtatatgcaaaaatgactcctagggaaacttgacacttggttcacactaagagcacttgacatatctcagagcatcacctggaacccctcttaatagtacggtttttcctaaaaactcgatttcaaaagataaactatcctatgaacttctcaagttccggtccgctttgattttgtacttttggggggtctccaagcatccatcttccacaccttggactaatgcacctgaaagtcactcaatgaactcattagtcccttaaccacatttgtcattaatcaccaaaacccactagggggattaatgcactttcagccacgggcaaggagcataaaaaagacgagggctacgcatgaactcgcgtattgacaggatcaagatattggactgttccttcc

SEQ ID NO: 49935 - DNA, 553 bp, Oryza sativa
tgttaagagaataagttagcataggacaacaaatcgtttctaaaatttcttaaaatacaagataattggaattgtacaaagaagtctaccatcagtagttcagtgtagctactgatgaactcatatccctaaaaatcgttctcatttcttctacaacaattctctgcagctaattgagtttgtgctaatatgttcccatcttcttgtctacaagaattctctgctggtaattgagtttgtgccgatatgttcccatcttcttgttcctgggcaacataatagtgtgaaggtctacaagaaatatgatatattttcacaataagaaaaaaataaggcaagaaaatcaatctatatgataaagaaacatacagtggagattgatgtgcagcagtaactttagaggtgcttttttgtttttcttgtgccgttttttagtccaatttcggtatctctttaagcttttattctgaactggatcttcttcagccgtgcagctcttagatgtacttttggtgcctctaggatcatttgctcatcacattcagcatcatga

SEQ ID NO: 49936 - DNA, 592 bp, Oryza sativa
gcttaactcattaaaatgtattttaccaagcccaccaagttctagtccatttttcctattgctggattagtattttctttaaaaaaaaagaaacttgtcaccttatactccctccaatctacgattttagagtgtttgtaaatgcttgataaacttttataaaagaagtattaacatctatcacttcaaataataaactataaaaatgatacatatctcatatcaaataatatagttctctttataaatttagtcaaagttaggatatgcgttaaaagagtgtttcgtatgtgctcatagagttaggatatgcgtgtgagttaatagagataactatgtatgcgttgtgagcgtctatatttattttattctgtgtttctaaaagaataatctagggacggaggacgatttaaatttatcttccacgagactcgacgtagagcaagcctgatgcaattttatttcttacaattttttttgtccatgcagatagagcttggccctttggagtttctaactgggatatgcgggaccatgggcccatttaacgaggcaccggatagggatgtcgtcacatcactcacgctgatca

SEQ ID NO: 49937 - DNA, 1183 bp, Oryza sativa
atgcgcaccgaacaaaacaccccttaccaaaattacccctaaaggatattagaagattacttacctaccctttaaaataaacggtccagattaattctactcggagtataatacttcaagtatattgcaccggagcatcagtcttaatccaatggttctatatctatttttacttccaccagtaaaatgagcattactctctataaaaagtaaaaattaggagtacaaaaaataaagaggaatgactatgtgtcaggtgttcgagagtaaccaaactcggtcctcgcttttttggactgtttgatccaaaatcagagactcagataaaaaaaaaatctcaaatctaatccaagagtgcacgacaatgaccaagacttaagaaaaactcaattgcctggcaaatagcaacgccataaacaggaacctagaaattttatttgtgatgggtgattcgatggaatagtgagcaagatgcaccgtgagaagacaacggcgggactgaaaagaggaagcctaggttgaaagaactctacgtcgattcaccgtcaaatagcactcacttttgtgcctctgccatatacagttttccatgacaatgcaattgacaattgtttctctggcacagtatcgccgttgttgcccaagtagaaacccaacgtaaccttccttcttcatcactggtcataaatttcagggcaacaatacgatacatacgattcgattttaatttagttacactttgatcaaatgaacttgtttgtcgatgaagaagacagggaggccagctgccagcgtggttgatcggcatccatatcaccgggccggaatttgattgcattctagggggggcgtggttgccggcaactgcacggtcgaggcaccttcattcaccatgatcgtcttggtgctaaccttcgcaacgaggccaacagaacctagcagcagaatgtagagccagaataatcccaatacataatctgtcagccattttagccttctctaatacaagcgcacggtcgaggacaccagcacactttacgaagatcaactaacaaatttagctcacacgactgttctgcaactaatattaaggaataccatcagagggtgtgagaataactacgtacaggttcccgtttgccttccattcccattacattgttctgtaaggagagaaacaatc

SEQ ID NO: 49938 - DNA, 5315 bp, Oryza sativa
cctcccccctccctccacctattttcttttttggcaccacattactttcctattttagtaaatttatgtacctaaagtttatacacctcaagtttacacattttaagtttagagaccaaaagtttatatatccgattcaaatttaaatttgaattcaaatatttttttatatataatatttctatacatctaaagtttatacacctaaagtttatagaactaaagtttataagtcaaaagtttatatacccgattcaaatttgaatttgaattatatccgattcaaatttgaatttgaattcaaatattcgattcaaatttgaatttgaattcaaatatttttcatatatagtatttctatacatcaaaagtttatacacctaaagtaaagtatatagacctaaagtttatagaactaaagtttatatacccgattcaaatttaaatttgaattatatccgattcaaatttgaatttgaattcaaatattttctatatacatctaaagtttatagatccaaagtttatagaactaaagtttatatacccgattcaaatttgaatttgaattcaaatattttctatatacatctaaagtttatagatccaaagtttataagtcaaaagtttacatacccgattcaaatttgaatttgaattcaaattcaaatttgaatttgaaaattcaaattcaaattgaattcaaatttaaatttgaattcaaatttgaattcgaatttaaattttaatttgaattcaaattttttatatatagtatttctatacataaagttttctaactatttgattttttaaaatttttttgtggtttactgtagtaggaagagaagaaggggaggaggaagggaagaagtgggaggactgcgtatagggggggaggcgggggatgcgatcgctgggcgatggtcctggcgatcgatcgcccattagcacccccctataagttatgcctatgtgtactgggaagctcaaacaattaacaagaagcaaaatacaatatttttttatttgatttttggtcataccggcctgcacagttgcatattcatcgtacaccacgattgacctttttcttttttttttcttttttttttatgcgcgagaagacgccaagatttctccaagacagaaaagcactacagcacaggagtgtgaccttgcagtttccagccattgattaattctatcagcgggctttcttgtttggacataacattccaagaagcagctgccagcgatcaccaaggaaccaaatgtcctccaagcaattgatcacggaagcaacctacgagttacaatgggtagcccatccactggaatcctgcagcttcccattcctatggcttttctctaacttgcaccagagaacgcacaaccacgacagactaaattgaattactcaagcccacattttcattgaggaggtatagagagctagcgtgtgttgtgagcaagcagaacaatgttatgccatatgcgtctggttttgtaggaacgcaccgcttctactgaaattaataatggtattgctatagtagttgagcacgagcaatgcaaatacatgcaatctattttgatttatccagattttttttaaaactaggaaggtagcccgcgcattcacgtgggcatgtgtcgtgcgctaagtttgagatacttataaaaagtgaaatattaaccggagaacatctcccgcaatttctctataaactattttcgtggcattaattgcctttataattttataatctattagctttattatgttatatcatatttaagtaatatctataagtagttacttataatcttctttatcatttgaaaagaaggtagacttactttctttagaaaacatgtcagcgtaagtacaaataagtgtaaagtaaaagtaagttgcttttcttttttttaattgcatatatattatcatagtttactaaaggatgaattgggtgggacatgaagctctagtaattgtatgtgtttataaagcctaatatgatttatgcagtttgagagatgatccatctatgaccaattcatgtagagtgagatggcagtctaacatgaatatgataacaacgaaatataattgcgcgataatattttttaaatgtgatgtaccatgaatatacgattgtttttttatatatatgatagatcaaatggatagtaataatggtttcactggtttaaaagacataggagtattccatagcttatggttgttttaactatgtagttggtgaagaacgtttaattgatttttgttatgtgcaatgatttagtataatacaatacatattttcaattaattttctttttatttagtgtccatgcaaacgatagggtctaccttcaaatgatgtattttaacttttatatagcaaaatatagctaatgtctgtttaattataaataaaacaatagctatgactgttttaatattatgttagttagaaaattagaagagaagataattgaattggagaggagagggtgtaagagccagagggggaggatcagtggtataagtaaggcaggatgatgggaagagattattgtttttaagatatatagaatgggtcctatagttttgagttatctatttatataaatacatctaattgtagatctaatataaaatactttgggttttgtattttataattaaactacttaatttgttctaatttttgtgtgtattattaatcagaaggtttaaaaatctatttgattttttcataaacatatatggatcagtgaacaattgttagtccgtaaaatatatatatgacccaaagtaatgaattttttaataatatagttaatttggatcttcaattttaaattttataataaataatctaatggtgtgaaaaaaaaatagctatatgatttagataatatagttgtttaaaatttgttatcataaaatattttttccatctaactaaaagaggaaaataggagagaaaggaaatatgtgggaaggtaagtgagggggtagaatatggtggcccttttttttatccttttgtatttggataaatcatttagttctttttccatctaactaaaagagaaatatatgagagaaaggaaatatgtggggatgtacatcacacgtatgtacgggaggggtgggatatgcaatgggtcacatgaaaatttatcacacgtattcttttctatttgaataactaaatttaatgatagaaaacaatggatcacatgaaaatcgactgctagatgatttgtttattcttagaaatttatgattttaatgtgcagctggagagcaaaaccttctttcctcgtcactggagcaacacggcaaaagttttctactggaatcctttaccaggttgcgctaattaccaaagcacatctgtgccatttcatccatcatgagtactctcatatcaaaagacggttcttcgacccggagggcgtcctggctacaagcaaaaaatacaagaatcttcggaatgtaataacgcgatgccataatgtaattagataccgtatttgaagtgacaatgtaaaaaatattgtaacatttcgacaacgcttttcacttatgcaacttatgtagatttgtcagtatcaaaatgttttttagttaataatattatttatgcatcaattaattaattaattagaaaataatttatcacaaataattattgtaacaatttttaaatttttgtacctcttttcgcaggcagcgaattctaatttttgcaggcggacgttgcatattttcctaggcagcccgtttagctccacttcgcctgggaaaaaaatcttcccaggcaggcgtcccgccgccgatcttcgcagtcgtttgggtgcaagtggagcgtccgggaagactcatttcccccggctgtgaaaatgctttttctagtagtgttgaccagaagatagatttcaattagtttcgattgatttgattgtagaaaatgaaacgaagtttgatgatagtatcatggagataagacatataacaaattgttaatcgtcttatcatctaccgcttgatgaccacatttttccaccacctgcagatttttttttttgaaacttcatcgctgagtaagagaggtttttttagactgactaattaggaagaggaaagatgggagagagctcgagaagttgaacgttgaaacaggtggggagcagagcgggcacatgcgcatgggagggggtttttttaaaagctaaatctaatctaatgtttaaaaataatggaactaccaatttgagtggaaaccgatgattggatgttttgcttttttctcagaatttttaagatttactcagtgccacgtgttggctttagagcgtttatagaaagtttaatggacttttagtatataatatatagatggttaatattatctggtcctttttaaatgaaattaaaaggttagatatttttctttttcaatcataattttgtatgaatttctctcatttattagagggtcatgtggcagcttagaagcgtttatagaagcgtcacgtggtagcttagaagcgtttgcatgggttgtactcggttgaaaacctcaattatagtttatcatggtttaattgttctaaatttcatgattaatgaatatataattgtcctctgtttggtttcttaattatagaattttcatgattaaatgatttcgaaatttagaattattgagttgtatttggtttaaagttggcccttttaaagtagagtcgttgcgaactttgagaggagaaaataccatttatcatagttggagaggttgaagaagactcccataatccttgtattgctataaatcgtcaagtatggagagttgcccttctacgtttttttcagattgacacattaaactacttttgtacaacttaacgtgcacaactaattcggagagaaacgtacaggtggattagatggtggcccatacatatccgaacaatttttttttaaaaaaataagagaaaataaatctaatctaacgttttggaatgttgggtccactaattttaataaaaatcaaaggtcagatatttagcttttttctcataatttctcagattttcttgtgccatgtggtgacctaggagcatttgtaaattaccatgtggcggcttaggagtgtttgtagaaagtttaatggacttttggtatataatagatagatagattaatgtgtgtttgattattattttgtgatgaacaattggtttgaagattattggttttgatactttgtgtagtggtgctccttgtgtgg

SEQ ID NO: 49939 - DNA, 954 bp, Oryza sativa
ggttttacttttcttgtcattaccttaaccaacccttgaagcaagggtcctagaaaaaaaaaattcagtatgactcagctttttggtcatctgtgtatgatgccatgggtcttacccatgttcctctagagaaagattatattcttcctttgttccatcttcttgttttctcgtccttcattattttcgataataatattgctaaaatcagcactattacttgcacatgaatactagtagctagctcatgtgtgtcctccgtaatatatattatctttgtttttacatgagtaaataattattattatttttgttgtatttatataaggtactcagtatcgtggaaaacggtcgtaccgatcgattaattggccgtatatacgttaacggtagtataacagttcgttaacgtgatacggtgtacatttatcgttcatgaatgttaaaactttgtttttaacgattagttggtccttttccatttaatcatccaaataatcgtttgtatattgtatttgatgataatttagcgtagtttttttacttaatttagattttttttgttttgtaacatatatttttatgttttacttatttaatgcaaccaattctaccaccatgtgatatataaatcttgtgttaaaagagttaatattttacttatctatttaattaaaaaaacaacatgaacatatttgatttatatagttgtacacatctaaatcgtatataatgttataaaatttgtacatatattcatgaatgttaaatttccgtataattccaattaattgtccgtattccgattaatcggtgaacgctaccttttccgtccgacaaccatattccgtcttacacaacactgaagttacttgactaggtttaagaactaaaaaagatattttttgctaaacataatctagaatgctatagattaataatattgaacaatat

SEQ ID NO: 49940 - DNA, 1153 bp, Oryza sativa
agatcacaacatatgctacaacttctgtaaatacaagattctcggattccatcattaagatcctctaaaatccctctgaacctcgactacagataaatgcatcgacattcagacagccaacttcagaaattgatacctcctaaaccacttgatataaaatcattccatttggtcagaagatagatatacacgttatctacaacttttgtatagagactttttgcaggaaatcccattatgttggccgaaaaggcatccaaaacagaactgcgcagggggcatatcagcaaaaacctggctgaggaataaatcggtggatcccaaacttactcgcttccaacacttgatctaaaccctaatagaaaaccaaaacaggggaaaaagatcatgtattggtacctaggcctccatgggcagcggtaatcaaacccctcatttccatcttcacattgattccctccgcttccttctttccctttgttctccttcccttcttcttcttccaaggtctgcaatagggaaggcatggggaaggtcgaccagagggggaggtgggcgcccccagggtaccaaatgatggctagggggaggtgggggggggacctcctagggttttggggatgtggagggggcagctgggccttgggctggccgaaagctcgcccagctagcatataactattgtttttcttctaatttcaaacaccaaaaccttagggacttccaatatatcctctacgatattctattttttctagggcattacaaatggacagctatacacactatgcaagcgatggttgaaccaatggagtagttggattgtgccgaggcctcatgcatggttgacacggttcctaagttagtggaactgttgttcctctgaggcggtgatatcagttatgaagtggtcaacccaagtcaaagcctcctgtggcgacatcctgaagctttgtcaatccaaagttgtcgaaatatccctcatcggaaaatccgtctcttgaagccatctctcaacgaatcctctgaataccggtgctcccctacctagcatgccattgttgatgggttataccctaatcccaagatccgtgcctatatggtatgttttgagggtgtagggatcagctgatatgaagatgcaaaaaaactt

SEQ ID NO: 49941 - DNA, 916 bp, Oryza sativa
tgtatatatatatatatatatatatatatgttacttcgcatttatcctaatacatattttttatcttgtagaaaagacgtgctgtaggagtcgtccgtcaagcctgagtggaagagctagccctagaaggaattggagcaggcaagtgacgtaataatataaatgattgttatatttgtaatgcaattaattaagattattagacctgtaattagacttatcatataagattgtgtagtgttcttatattatttgagttttaatataagattattttattgcaaattagacttagtatgacattattgactacggaattggtgcgactcctaggaattgactattgtagtcttaattagacttagcatatacgcacgaaacacttagcatacattactattttagtcttagcatgtaatattatttgagttttaatataatattactttatttgtaattagacttggtatgtaattattgactacggaattggtgcgacaagtagcaattgactattgtagtcttaattagacttagcatatacgcacgaaacacttagcatatacatgactattttagtcttagcatgtaatattatttgagttttaatataagattattttatttgtaattagacttagtatataattatttactagctagggttgtataatatacatgacttagattgttaaaacataaatgtctcgtgacttagcagatgtttcttgtatcaacagatggctgaccgcgatgaggaacagatattgtacgatacaatcgcggagggaagcagccagtactggaatgaagaagaggggaacgaggatccaaaccagtacttgaacgaggaagggaacgtggagagggatactgaggggaaccagcaagggcacgtggaaagggatgtggaggg

SEQ ID NO: 49942 - DNA, 1078 bp, Oryza sativa
gccattatggaccctctgctaaaaatcgggttttgtagtgttagctgcctagctagctaggccccgtcccacatgaaatttgcttgcagtgcacttcactgcgctactgcacgatggataaatcgagcacagctagccagatagccagctaggtggaggatttgctgtattggacccaaccggttatccttgcttaggctggtgctccctcagcctgcggcagcacttaccccacccaccatcactccactccacgccactgctacccccaattaatgatgacatcctcatgggaatgatggggtgcaagcttttccccctgtcaccagacactcattcatcaccctcgcttcttgcctttgcacatctatgggtctctttagatcccctagcaaattttttaccctatcatatcgaatgtttagatatatatatatatatataaaatattaaatatagaaaaaaaattagttatacagattgcgtgtaaattgcgagacgaatcttttaagtctaattgctctatgatttgacaatgtggtgctacagtaaacatttgctaatgacaaattaactaggcttaataaattcgtctcgcagtttacaagtggattatgtaatttgttttgttattagactatgtttaatactttaaatatgtgtccatatatccgatataacacggcaacaaattttacccgtggatctaaacacagcctatctctggctctaatttctaaggggaaaaaaacaagaggcaaatctaaggacgacaaattacttcttttatttttctttaccccttaaacaacctaatctaaaatttgtttttagtgtgatttgatcttaggacctttgggtgccaagtcagtgcaccactagactatatgccatttcacaaaaataaagactatatgccatttcacaaaaataatgggcttgagaaaaataaggggtaaaaatgtgacttcctttttcaataatggataacaagcatggtggcccgcataaattgcgcgcctcccatcattatattttttttcatataatagtatatatgtgtatatatatatatata

SEQ ID NO: 49943 - DNA, 1908 bp, Oryza sativa
tacgaactctaaactctacttttaattatattatgttttattctgaattttagttagttttaaattcctatatgtacttctaatattccttatttttattccgaatttctattatttcttaattgtatttctatatgctctctatactctacttctaatattccttatttttaattccgaatttctattatttcttaattgtatttctatgtggactctagtctcctcttctaatattccttattttttaattccgaatttcaactatttctaaattgtatttctatacgaactctgtttttctttttctccgattaatatgagaatttaatttctaggctgtgagagcgaacgtggaggctcatttttcttatattcggcttttacttcaacataagttataatcaactatatattacaaagtttatagttgaaccaaatacaaatgacggtcccaagggggaaaaacatgtacaccaagtaccacctaaaggagaaacaaatctatatgtaaccgttgacttctatgatgaaaatatttgattattctatataagtacatactccagaatgccgtatatgatatatgctatatatagcctttgctatgtataatttacggtctctagaccatccacagtgccgtgcatactgcatagtgcatacccataaacacgttaattcacaaccatactaaggctgcgttttttaagtccaaatttccaacctcactctctcatttaccgcgtgcacgcttcccaatcaacaaaaaattcctataaaaagttgctttaaaaaatcatattaatctatttttaaagtttttttaagctgataattaattaatcacacactaaattactgctctgtttcccgtgtcggatgtgatttcccaacccccgcttaagaacgctgcctgatggtgttttctaaagtttaatgttctttattgtcacaaaaataaattactttaccaaattgaagtgtttgcaaatatgcatggaccactttatctataattaatattcaattgtgaggaccaagcaatctgccattaaaatggccccatcctaatctactccctagcattctagggtcagtactggattattgcatagctccacaatttactcccggtacgtactaccgatgtactgtacattacgttaatgaaaccccgtgcattgctgtgggagttttatatgataacaataaataaaaataatgtgcaaaatagctagacaacataaaattatttaagttaacatggtttacggaaatttaaatttacatagtatatagaatgatgattcaaatgtaaaagtgaatttatgaaaaaaaaagtattaaaatagtttggaccgtagattaatcatataaaggctaaaaataattaaggtgatatagattaatgagagagataatttggactactatagattaatcatttaagtacaattgatatgatatggcttaatgagagagagaagagataaataacattaactaattagtgaggatgaactatataggtaaatagcacattataaaaaataataaagatatatattgaaatattttgtgaattatgtgggatgatgatttaacatgtttgcattttaaaagctctaaaatttaataaattataaaatataaaatcatagataatatagcatgtttacatgatgtttaaatttaatgattggtagtggatgatgatgtggcatcttgttagtggatgatgatgtggcatctttacatgttaagctttatgagttaatgggttatgactttatagtaagagaagattcagcatgtgttatgttaatatcacctacctaatagaaaacataatttttggcctaaatatttgcttaaagatccatgtccccttcctccaattccatg

SEQ ID NO: 49944 - DNA, 752 bp, Oryza sativa
aaacaaacagttttttcgtttggctttttaaaaccataagccactctaatactattaagccaaaagctaggttggtggaacttttttggcttatatgaggtagatatatgacttcaccactaaattcaggacattaaatctaccggtttataaatcatataagccaataagttgaattaaaagtttaagggcccctttgaatcgcagggtagaaaaaacggaggaataggaaaaacataggattctgacaggaattgaagtgtaaaacagaggattgcaaaacacaggaaaaacacaggaatggtcgtttgattggagcgcaggaaaaacgcaggaatcggatgagagatagactcaaaggaaattttccaagaggttggagctcttgctaaattttctccaaaatctacatgcaatgtgtcattccataggaatttcataggatttggaaagcttcaatcctttgaatcaaagggccaaataggaaaatttcctataggatttgaatcctatgaaatttctacataaatcctttgattcaaaggggccctaagctaataaacctaagattaaacaaagagggccataatacccgatgtgacacgccaaaactttacacccctgaatctaaacatcccattagtggcttataggagaagagtgtgacaattgggccaatcattttatttagaaaaaaaatattaataatattgcttagcatccatgttatgaaaataacgccagcaacctat

SEQ ID NO: 49945 - DNA, 4681 bp, Oryza sativa
aatgtgcttcatgtagtatagagccactcataccacaaatacatgagacaaacaccccaatgcatggtgtagttcgggtcatgcatagtaatatgcactagttagcatgttgggaaaaaaacatgtttactaatagcggtatgatattttgggcattatatgttcccgacatgataaaaatatacacaatgtcatatgtaggctgctgtgtaggatggtctttgaaatgtgtgtggcaggatgcccaatgctaaggccctgtttgattcagcttaggattattataatctggattattaggagtaagctgaaacaaacagatagcttattatgatagattattataatctataagccagattactataatctggtaagccactctaaaagtgcttattttagattattgggtgactagcaactaacaaacatataataatccagagaaacaaacagctaccagcttattctatgttggcttattataatccagcttatagtaatctagttctataatctagattacaataatcttaaactgaatcaaacaaggcctaaatctcgcagctaagtgtcgagaatatttttagaaacggtttttattgaaggtctatttgtaaaaatatatttttaaaaacaatcaagattaaaaaaaagaagagcttatcactctccctattttcagttttgaccctctcatggtctcacattgtttctgttttgttcctcaccaatataacaattccttctatccttctctatccctggacactagtgcctctcccctcttctcgactatccatagaaaccactgttggaccaacacctcatcttaggccgtgtttagtttcccccctattccctactttacatcacatcatatcacatcaaaaactttcctatacacataaacttctaacttttttttcaaactcctaactttcttcaaacttccaacttttttcaagaactaaacacacccttagtcgtctagatatgcccgacattacacgctagccctgtgttcggatttcagggatgggaactcatccctcccacatgaaaaacggaaagatctattagcacataattaattaagtattagctaattttttttttcaaaaatagattaatttgaatttttaaaacaacttttgtatagaaactttttgtaaaaaaccgcaccatttgttagtttgaaaagcgtgcgtgtgaaaaacgaggaaggaggggtgggaaagttgggggccgaacacacttgaattaataagcgcataggtagacataacatgcacccatgagcccatgagcttgtcgaaagctagatttaaccatgagctatctatcttctttgagcataacctcacattctcactatgtgaagctaccatcgtttcaatagtcattgctcgcggcctatgtcaatctgttgctcgatcgactagtgttggccaagcaaaccacttgcgggcgacatgagtttaccccttttgacctctttattttagatcgcacttttctcctcaagctattctctctacagaaggcacacttaaccccaattaaaaaacaccatctcgccttatctctcctctacatggtgttagggttcacaattccagtggaacccggtttggattcgatgaaacccgagctttccggaccgtatcgaaaacacaaaccactcatttttcggtcaagttaaaaaaaacaagctaaactttaaatttttgacaaaatttattatctggattctattagtctttgtcggtttaacaacgaattccacgaaatccaattgtaccactcatgagcgggttttgatccgatatcggaattgtgaacccaccgtcttgtcccacgtagctcttcgaggccaaatgcctatttgaaacggtggaacgaaaacatggttttatcaaatttcatgatttatagttttaaataaatatagtagtacgttcatgtattacaacggatatatatatgccattggaaatggcctagatgtggatctagtatcgggacgactcaaatcaagcgttcaattttttttacgttgtttttactgctactagaggaatgtttcaccactatactaaaaatgtttcaacctattaaaatgctaaaacaaattcgaatcaattttgttcacattgatgaaacatcgaaattcaattgctgaaacatcaacatatctgtatgcattaaggaccaagttatgaaacactatctataatcctactgcaacatgtcaaatccaacgcaaagaaacaaaaaataaaccagctaaaacataaaaaaaaaatctcaacacacccattctcgtactcatctcctgcacactcccgacggtgaggcgccagcgtctacacagacctccttgagtgcaagatgaaaagggtcgccaccatctggtccatcagcttgacacgaaggtcgcctcatgctgctgcctcacacaacgtcttcctcaatgctggccaccacgctgccattgcatgttgtcttagtgccggacctcactctccttggagcttgcagcatatgcttggggaagagagagagagagagagagagagtgtgttgagtggaacaagtggatgagaatgatagatgatggatgagggagatgaggctggctggagtgcatgaagagataaggcctctcacagtgcggtgagctggaccggtgctacacggtgccagctcggattgaagcatacgtggcataaggaatcgcaccctagcagagctcctcgcccccaagcagagccgcgcgaaaccttgccaaaacgagggcgcgataaggagaggaagacgcgaggcgcgcacgctgtggggtgcggttcttggccgcgccgtgccctcgcgccgcatcgagtggagaaaaccctgattcgcccacgattcttcccgccaccgaaacaccccaagcaagaacgcagaaaaaagaacttgatctatcccaagaacacaagaggaatcaccaagaagcaaaagaaacaaagaaatctcgatccgtcccaagaacacaagagaaatccagggcccagatctcatattaaccaatgaacaacacatcccacatgcacaaaaaaaacaatcaataatctcgccgccgcgcgcccgtttcctcctcgccggggcttcccgtcggcgtcgcgccgtccgctcccgcccccctccccgcggccaccacatccgctgccacgacccccaaatccagcggcgaatccgcggccccgcgccgatgaccgccagcacaactcggatccggacgagccaagaaccggcggccgcccgggcaccggcgagccgccgccaagatcaagggagaggaggtgctgatgagcctccgaaagaccactgaagttgccgctgacgaccgccgcaactccgaaagatcacgccgccgactgctgcttgggagaagatgagaagaaggtggcgcggcggcgtgggaggcaaggaggcgcggcggcgtgggagaggagaaggaggcgcggcggcgtgagagaggaataaggcagaatagtttgaatggtatgaaaggagtgtctgaaaatttggttatttaaaagaagtgtatgaaaatttggtttgaaagatatcaaagtggcaactaaaggaataaggcagaatagtttgaatggtataacaatatatttttggtaggtgtggtactagcgccacaaatcaggaaccagtctacctcttattaacctaaccttcaggttaattggattatgctattataatttttgtgatttggaaatataccaataatattcaactatttagacttatgccattacaatttaatagttatttgatttataccattacatacccattgtattttttaagatttttagaccaaattgtccttatcttctttctccatccctctttcctgttcattttctccccattagatctgacagagcttatgcatatgtgataagtgataatgtgaatcgaatgcgagcatgctcttgccggtcgttggctaacattcgttggagggatggatggcggcacggcgcgaggtcagcttggtccttctcctcacaacacctgcacactgcgtgggttgagctcccctctcctctacccaacagcaagccatcaccacaggaatggattcattggagccccaaccagcagcagcaactgaaatggaacgattccctgatcccaccaagaaatcaaaccaaaaccattccccaacaaaaaaaattctccaaaatagaacagactcatgctagtgaccaccatcattacaacggctattaggcataatcaagcaagtgagcgaaccaaacaagaggcaaccaaatgcccaccaacactagaagcagcagtgctttggcgacaaccactaccgtgaagaaaaatggtaatttagttcaaaaaaatatttttagtgtagtgaagggatgagtagtggcatgtttcaaatacatgctaaattgtaatggtatgacaccaaatagttgaatagtcgtttcaaaaccatgaaatttgtaatgtcatgtatccaattaaccctgatttttagcatcttcgaccttggttcacctccaaaatgaactggcgcacgattttataaatgggagttcgataaaatattctatttataaataataaattatctcattattatataaagaaacgt

SEQ ID NO: 49946 - DNA, 2242 bp, Oryza sativa
ccctccaatgaatcttgctctaccaagcatccaccagtatgtagcactacttccactatgacttctttccttgcggaggcaaggtatcaaccttcacaaacatctccatggcacatcacactccacttggttggtcttgggtttctccttctccttctcttaattacaacctcaagttctccaacttgaagcacacaaactccacatcactctcaattccacactctagctacacttgaacacacttgagatggtgggagatcttcatgcggcagtcttgatcttcttccttccaagccttgcctcacacgcttcttcgacaacgaagatttatcctcagcaacttgtgacttcttatgacctcgaccggtttgttggtgttgcatagagcactttctccttcaccacttcatcgagtcctccagcgctaagcctccacttgcccttttcctctacatggtctatcgcgtagccaagtcttgccaaccctacattgcattttgcaccttcagtcatttgtagccttgtatgacaatgaacctcacatacgaagtagattaattaagacatcaatctaccaagtgatatggtattgttttctatagaataatattttctcgtagcatgtgcttgtgtcataggtcagtttgatcgataggctattgcatggggacacgagacatgtctcatgcacgtatgtgtgtgtatcggttggtcaataccaatcctaatcggacatgtggaacgaagcatgtgtagattgactttgtcagcaagtcagattttccactcctcgggtgtgtgtcgtgctcgagaccaaaaggtcacaggaggttgcacgaacaggcagaggccagcgttctggcgttccctactaaactaatggtgtaacaccccggaaaaccacataagcctgggatgccactaaacaaccatacaaaagtgccaaaacaagcaaatttcggcaacaactaccttagacaagaaaacatcacgaaagcatcaacatatagattaagtttatgatacatcaactgactgacatatagggatagcctttgaaaagtagttaaccaatggtcaacaactctagtatttaattagctcattatgtctaaacacaagaaatcttatcagcataatacaatactcatgactaagtgagatcatgttgtgtgactgtgtatctaatcccatcccttcatgcaaacatgtcacagcgagtacctgaaaagactataagggggtgagaataaatctcagcaagcaaacggctttaacaagctatttaaaccacatgtttattatatactaattaaataccaagttatgattcacataaagaaagttcaatatccaaggactaaaacatcatagcgtcaccaatcaaatccatatagtcacaaatcccagagaagaaaacacttctcaaagatattttcgatcgataattctcataacatcctgcaatatgtgcatatgcaatgcaatgatatgtactcctgctttcacacccaacagggtgaataagtgcatatgcaatgcattgatatgtactcctgccttcacacccaactaggtgtgaagctacatcgtattacagcaatatacgatgctgtaccggtacggtcgcaaccataggttcacgacatgacttcaaatgcaatgcaagtgatgcaaatgcagtatgaattccagagtataacatcggaaccacattccttcgatggagatcagtataaggttattataaccaagagcataaagtatatccataaacagtgtaaaatcaataagtatgatttagataggtaaatcctcggtgtaacatataataatcttggttgatgatatataatttcaacgtggaggttgttggtatttaatacggttacggataaaatccgcaagcgcacggatatacagatgtagcacttcccctacggattattccaagggtatcgaatccaagggaacgtgtgtggtcagatcttcctccggttcatccaaggacaccaagcaaatgataggccgggatagagaggattcactagtgagaaacagtgtctagggaaagtttaactttaatcctaacgcaatacttcaggcactggcaacccgctgttcctagatgtcgctctactacgtacctggacagggaggacttaagtgatctcgagggctgtcaccacctctacacctacctcaaacgtactatgggatacacaacaattactggata

SEQ ID NO: 49947 - DNA, 697 bp, Oryza sativa
aagtgccctccagcggtcatcaggcatgcatttggtacgtccacgccaaaccccacatgcaacggtgaaagtggtggttcgcccgaccagggggtcgggccgaacctgggctaggccctcctggcctggccttcggttggtggactccctggaccttcctctatccatttctcggagttttggattgatttaccgatgtttcaacgaagttctcaacccctccttgtatggatacataattctcctcactttagtctgattttcctcccaacttcagggtttatcatctgcatacaaatatacaccaacactgatggaatatgtgagattaagcacctatttctatgttggatgttttattatatcgactttatgcagatgctggcggtatagaatcggcatttaacagccgccaacagaggtagaatcaaataacaactcaaagctgtagcaaaccaccgctacgtttacttgccttcaccgatggcgagatgaactctagttgcattccaaagtggcatcacctgaataaacaccgactcagcctcaaactacacacatataatcattcaagaatcacacattcactttctacgctgggaacccaccccaaacaacataaagaaaattaccgataatcttcctataaaagcaacatatattaacaactcgatacctccaattctacatcacataa

SEQ ID NO: 49948 - DNA, 1160 bp, Oryza sativa
ctcctggcgcagctccaggatcttcatgttgttctcgaccatcccgcggcgtaccatctgatggaagtcgatacgagccgcgtcgtacgcctccaccatgcgtgccaggtgcacgatggtagcgtcatcctccgagctagcatcccggaaggtggcgtagtcgcgggctcctccgcgacgagggtggtagcggtagggcgagtgctgcaactcgtccgggtagcgctggtgaagggtgccgatggcgaggagagcggcgctctggcaagcggcggggaaggagtctccacccgcggtgactgccaacgaagcccgctcagaagagccggcgaggatcactgcggtgacctcccacccagcgtggggctccgcgtcgtctccctcctgatccggaagcggcctggcctggtagtccactccgtgtggataccccaagaccacgcacatgcctcgcaactccaagacgaagccagtcatgtccaaaccatgacgggtgacgctgccggccatctacaaacaaaaacaaaaagagaaacaacattttaaaggtcagattttgatgataagtgaagcagcaagacagagagagactagacagttttcacaaataacaaaggatttttatttttgaaaatattgctaaggcttgggatctacggctcgtcctagggtcaagggaggctctgataccaacttgtcacgaccggaaataacccaacgggcattccttacgtgcgtgcatgaatccttgtcccaggaggcaaggtacaccaaaagttgatacaaatcagagtttaacaagcggaagcgtaaatagttaacttattacatgggcagcgaaggcccagcacacacagagacaaacgagaaacagcggaagactagggcgacgaccacaggcgcttgacggcaggcacgagctagacaccaaagccttcatcttcaaggagctcctcttctgggcttgggaaaaattgagcaagactgagtacaaccaccgtactcaacaagacacacccacaaatgcagaataaatgcaagggagtacaagggaattataatataaagggttagggttgcagtaaacagcatttaaagacatttagttgctcagggctattttgtaaacacgatcttagaactatacaatattattaatc

SEQ ID NO: 49949 - DNA, 675 bp, Oryza sativa
aaaagacttttagggatttttctttttataaaccttttcaactttgtttatttcttttcaattattatttgtgctctgaaaattccactaaaatttgagggctccttttagaccaaggagaatttaacaaaaattctccgggccacatttgaatttttcttgtacgtattttagggtttgccaatttcttttcgaattttaattaattctattattcctttttgaaaatgatttttattttgggatgaatttatcaggacgtgacagtttgagccttttcttttccgttggtcgtgtagacgctgtagcttcggaagatccgctcttcgtggaagttgaagacggtgtttgggaaagcgagcaaggcaagacacatcatcttgatcatattgaatcccagtttataaacttatgttgatttaaattattgcattatcgctttatttaaattcccgcgttatcactgttttatttagccatgcctatttacctttgttatgaccttattattattgctattggtattattaccttggtcaccctagaataaacaaaaccccaactagtggacactctactcgtggtatcactagtatgatttaggtagatgcttcccaatttaattaggtaacattaggtgggtttacaactttagactttgggatattcatatca

SEQ ID NO: 49950 - DNA, 513 bp, Oryza sativa
tgacatctcaagcattgcagaccccaagtctactgtgattgccaaaagtgaacactggataaaaacccaaaaacaggctaccttaaatgtttaaaatttcagctgaagggactattagtggaccatcagagaaaaccaaatgtgtaccactgtgttgtattagtttgcataaggattaaagattatatgaggacaaaaaaggatctgctccatcaccctagtagcagaccatcgcaaacataaatgttgagttgaatacactataatcctaccagacacaaatgcattgctaaaccattactgcaccaactagaactgcccccattagtaaatagaaatgtctaaacagataaactaacagcacactgcacacgtcaagctacatcctgaaggatgaatactcaccagtagatccacgacggctaacacgagatatcacttcacccacgaagaggaacacagaattggaggcatctagtccattagcatcttcgccagcagccaactccatag

SEQ ID NO: 49951 - DNA, 1254 bp, Oryza sativa
gtgctcccggtccaccgtggaccgagaggctgacgcgtgggccccactcccgtggacccggtccgcgcgccctctctctcggctgacgcaataattcgatttttaaattaaaatttaaatgaagaaattcgcaaatatccatttaaagagcatataaacttcaaatggccataacttggccatttgaactcggaattggaccgttcaagtctctaatttttccttaagaagtgaagaacccatttttgtgctttgtttctgctgttatgtggaatttattagtgtttgtgtcgcgaccgggaaaattgccttttcccgaacgctagtgtattaatccccgtcccaggaaaagccggggtacaccacacaaacatggtataaaagacacatctttattatatcgataatatttacattattacaaaggcacttaaggcctgacaatcaaaaataaacagcagcggactagcgggcctacggctcaatcttcacaggcgctcaactggggtataagccaggactccacctaagacatcttctccaaagcttctcttactgaagaggggaaagattgagcaagaataagtacaaccacagtactcagcaagccacaccgggagatgcataattaatgcaagggagtacaaggggataataatataggggttaagttttgcagtaaacagcatttaaaagtcacttagttgccccaaagccattttataagacaatcctagagctacacagtattattaaacaaggccgtgaaccctcacgaacctgccttaacccaaggcctacgatgattcaaaccgaactggcaacccgaccctgggtcccaggtcgtcccaagccaacccaagccaaccattccacattttagttgatgagcaaattttaagaattgaaacactgacttgggtacattgctcggcttgcccataaccgagggcgcggctattcaaatagattatactctgatcagaggtgtacatctttacccacaagacacatcttcctcacgtgtaaccacgtgccacataccaccacggtatacagacggaagacgtgacatagtttccaacccattctagccataaacaagagtaccgacccaataccggctacgggcggaacaccccggacaggcaggcatgactgaccccctatcagcaaggcacccaaccctctggcatatgacatctcgactacccggccgcaactagggtaaccttcatttgccctggagaatgt

SEQ ID NO: 49952 - DNA, 557 bp, Oryza sativa
cacggatctgacgtaaccacttcaaggcaacatctggacaaccaaagtgtgagaatgggattataactgaaggaactttgcaactgacctaactgtgatgaacaatcaagaagttttgagtgtatagtaatcaaattgtagagatcgataaacaatacaaatgaagtatgacttgtatgactggcagataacattataagcaaacaggagagttgtacatgtaaagaatatcaatggtacaaagtatatatgcagtgatagattcaagagtaaacttacggccaagcaaaatcttagatatagtaggaaatgctggaccatggtaaaaagcatgcctccaagatccccgttcatcattgctgaggcttacgccattaattatctgaaagtacagaaaataattctccctgttacatcatggcctaaaaggatggaactccaattggctatttggctgaatcatattgaaggaagcatgtgtctttgaatatccatactaatttatctctcaagcatgaaacatgatcttctgtattctgaatgcattatcaaatgac

SEQ ID NO: 49953 - DNA, 2475 bp, Oryza sativa
aaaatgtttcaatcatttaaatcgtgcgctgtttcacctcatataaaaacaatgtttcagtaaatagcgaaagaatatttcagttcactgcatatttgatatatccatacatagtgaaacattataagtacactagatgaaacatttttggtggaaaaaaataaaacgaattctcttaatagagggtttctataatatgtgggtgatttattgcaaaagaatattttaattcactgtaacattagatctatatatagtgaagcattgtgagtatactaggtgaaacatttttgtgaaacaacaaatgaaacgaattcctttaatagagtgtttccaaaatatatgagtgatttgttgcaatggagtatgtggtgaggacacgtggcggggacgcgtggaggggcgtcgcgtggaggggcgtgagcgcgcgctagaggcgcggcgcccgatttcctcagcgctcgacgcgcggcaatttccgaaaatgttacaaattctaaaccacttaagtcgatggactcactgttaaatatttgatttggctattaaatacctttgatctataaaacaacaaacccacagctaatcctcctctctaacgtatgtacgtacggcccatgtagcagccctcaggatggggattgtttggacatagatgtaatcaaaatcattttcagtgagtttgttgatgatttgtcatgccctgattttttttcagggttttaataattatttaatattatttctagaatttatattaaatgtaaaacaatgtgtaagtcaagttaaggtgagaaatactattttaataaataatggctgagaatacttttcttgtattctccatgccctgaattaatctatgttcttttctcggaatttcgagagctatatttataatttgaataatacaaggtttatttcaacaattatttggtttggaaaaccaattaaaattccctttctagttttgggcagaattcggccaaagtccttttcccctactttcctctctctcccgagggtctgctcccccttccctcttttaccctcctccagccagcctggcccaaccatgcggcccagcccggctcgcccccgcatccgctcgctgacagatagcaccgagacccacctgtcagccacgtttcctacctacggccaagcaaccaccgctccattgtgcccatgtcactcccacgtcgcgcgtccaccacacgcactcctacccacaccttcccactcaaatcccctggaaccaatagcccaccatctctaacttttgccccacccctcaaatcacaccagccttgtgtaacaccctaaaaattttgaatctgcattacgaaaacaaaattctggataataaaaaaatcttttccaaagtctgtcatgttggattttattagattttatctcatgttttctgttgcgcttgaaccacgaggacggaaatctagggacaaaatctattttagattcaaatattatttgttaaaagaaccatgattataaaatatactaattaataaaatatttgtaaataccatttatctttctgaaaacccttttctatgaattagaacctatttgatgtatttgtttgataaataaaaacaaacactaaatatttagaaaaacattccctgaggaaaactactttttcaaacgagggctaatgtttaactaatctctgaaaaatcctagctagaaagttaaacattttggagtagttttacaaataaagacaatagtaaatttactagcaaaactctatttacgaactaaaatattgatagagtttatttcgaaagaattcatggaaaagtctagttttcttccttgaaaggcctggcccaacccgcataatgggatttgtgttacttgtgtgcatttaagtgtttgtgccaagatctcggttaatccatccttgtgaatcccaactcttgctatatttttcgcaggattcaaattccgtagttcgattctcctttttagtcgaacccctcccgaaccaattgttctagtgtctggaattactcgaacacagtagttcttccagaatcgcctctcagggtaaaatcctgtaactctttgaaaattcgacaagtaaaaacaaaacccaaaattgtgtactttcaaaaacttttgaataaattgcatcggcaagttcttctagaatcgcctctcagggtaaaatcctgtaacactgaaaattcgataagtagaaaagaaacccaaaattgtgtactttcaaaaacttttgaataaaattgcatcatgccgatgttatttgcctcttaatcatcgaagaaatgaaaattcgacaagtagaaacgaaacccaaaattgtgtactttcaaaaacttttgcctcttaataaaattgcatcaaaaacttttgaaatactaaggatgaaaatagcaccagtattgatatagaagaaagaaatggtgagaaaacatgcgttcaaag

SEQ ID NO: 49954 - DNA, 1809 bp, Oryza sativa
gtgccaccccgcgacctcccttgcccgtgcaccgtgcatggcatgtccgtgcaccgcaccgcgtcgcatcgcgctggtgtggtccccgccgcccgaccaagccaccgaaaccccgcgcaaaagctgcgccgctcgggtgcgggcatcgcctcggagccaagggataacggcccatgtgccaccctgcgtcatcctagagaccctagctcctaggcccaactaccctaaagtcgcctggctggatatccgctctcaccgagccgcgccgctctgccattgcccatgtgcgtgcgtcatcgccgtcgcatccgtgacgccgtgccatgccaggcggacctcggtcaagccgccgtcctctcaaaccttctactccaagggttggggagtgaaccgagtggccacatccaccgcctcatccacaactaatgatgactagagcccttctttgtgtccgatggataaaacagagccctctccctcagctagtactagaacacccattccataggtcctagatgtgatgattacctacaaaaccttaatggagaaggaaatccactcttatctgcgtcggccacctcattgcccttattcgagtgttgtttgagcttcttaagcttccctctagtcggcctcatccttccggaggaagctacccatcggatgtctgatgctaaaaaaaaatcggacggtcaaatattgcagttgaccaacaaatgaaacattaagttatatattgtgaaacaaaaaaattagcaagtgaaacatttaattattttatgaaacatgatgaagatacacgttgaaacatgtcgctgccacgtataaacaacaagtattaacggattgaaacatgtgttttcttttatcaaaatataatcatgtgatatcttgttgtaaatatttaattaaaacgaatacaatggtgtgattggatcatatattggataaataatttaagagaaaaattattttgaagcttactaaaatacatgcacgtgtgcatggatgagatggagagagaggagagagagaagtagcgggcagtttcaggaatgtaatgaaacacactgaagacgcacattgaaacatatcactatcacgtatgaaatatttagttttaacggtttgaaacacatatttttctttcgacataatataatcatatgatatcttgatgtaaatatttcattggaacgaatacaacagcgtaatcagtttgtagattggataagtaatttagaagaaaaaatatttaaagagatgaggaaagaatgaaaagaaatagctaggcatacatgttacagtgatagggttcatccgatctgccgatttgcagcatttccagtggggtagatgaggcgtccgatatttccgattcgtcggacgtgcgatataaagcgttctcccatccttccacaacctctcaaacagtttctcactcaaacctctctctccaacccaaggtgacgagtgtcgaacacctggtgggcggggactgcgctgccgctaccttgccacttggctagagctggtggcggactggcggggtgtggagttggcctcgaggcgctgctgctgctgttgttagaacgagccggaggctatcggaagccgaggaacgggcgtcgaacaccttcgagcgccgctgacgccgttcgcctctgctttacccggcccggaccggcgtcgttgaccttcgccttactccatcatttggtaagccctcacgcaccgagcacctcctagtgacctagaagccggcggccctcccaatttgggctatgtgccgccgtagccgtaccacct

SEQ ID NO: 49955 - DNA, 1341 bp, Oryza sativa
ttggtaagccctcacgcaccgagcacctcctagtgacctagaagccggcagccctcccaatttgggctatgtgccgccggagccataccacctccggccgccaccgcgcctccgtcgagctccccgtggagagggcgaattcaaatgcaacctaggctacatttttgattaaatggcaaccctactgattctagatggtgaaatcgtgctcggccgacgttcaactcttctacttttgtgccatcgccgtacacgcataaccggctgccaccgcgcgccgttgcgccgtgtgctgggaggccgccgcgcttcgccgtcccagccggggtcggccgccccaggcgggtgcgcgccgccgttcaccgaccgcgcgccgagccgtcccggctcgggtcggccgcactggccgcatgccgctcctctgctccgctgtgagcgtgaggaagaagaagggtatgaaagagatagagagggagagttggagagatgtaagccctactttctattagcgcatagtaattaccatgctaatgatggttagttgaaacaatgacatgtgggcccgagcaatcaggaatctaattaaaaaaacaatttatatggtacccctatggcatgtgggtcccaccgggattaataagaccggtttgacctcggtcaaaagaggcaggcccaccagtcagtgacacgccaaatttttccttagaggaataaagccagaaaaaggaaatagggatggcctcacatgtcagccactgagacttagggatagagttcgattaaaaaaataaatcaattaggaacaatgctgtcggtgatatgggaccgggagtattgcgcccggaggcttgaggcagatggaatcgcccacgtggcctggcaccttcggggacgtcgggcccgagggtgaggtgtccgccctcctcctgatttccccgagggggggtcgggttgctcctgccccgaccccgagggccgaggtgccccgaccccctgtggggtttgcactatgtacataggttgggtgaacacggtagggctcacctaaccgcatttattgcggtctggtcaagcgtgtcacgttgcatgcagcgcgctcttttatccggtctgtgaccagtcacagaccggtcggatcaacggttaggtggcgactggtggtctgacgcacgcctcgccccgtcccgtcaagacgagagcctttaggcacacgtctccagccggagctagcgtgttacctcttagagatggcacgttagccctggttagatccaataccaggcttcatccaaccattacaggcaagatgctacaaaaagaagggtgatcatgcagatcggg

SEQ ID NO: 49956 - DNA, 1923 bp, Oryza sativa
ttgatttacaactcgacaaacaaaaataattaaatcaagcggtggatatcacctgtacaacgaagataaattttggtttttcttttaacttgcacgattgtatagtggtttatactacataatctacaagcatacatataggtgacatgatatcatgggtagaaaatacttttccaaagcgaagcagctagctaacgcatatagcagtagtaatgcagctgcccactggcattggatgtactggtttacaaagcacactggtttgatgtttttttagcgaagttagaaaaaaaaatacatgagtgtttatagctaagttcataatagagtccaacaagtaattgtcaagtaattgtcgcgaagatatactatatcacatctatcttatggaacgacgtgacaagtacagtgcaactgattttttttataattaaatagtaaggcccacaaggtgtctatatgtacagtaacatttctaagtgtgctcttgacgtgatgtggcaaaggttaatgttcttgggtgctaaacatttgggatgctataagtctattgacaaacatgtaagattaaatttgatctacaactcgagaaaccaaaataattaaattaggcagtgcatattacctatacaacggtcataaaatttggttttttcttttaaactgcacgattttatagttctttagactatataatatatatgtatacatctaggtgacatgataccaggtgtagaaaatacttttccgaagcgaagcagctagctaacgcaagcaacagtagtaatgcagctaccagctggcgttggactggtttacggagcactggtttaatgttttttagcgaagttagaaaaaaattaatacaggagtgtttatagctaagttcataatagagtcaaataagtaattgtccaaagatatacgataccacatctttctgaaggaacaacgtgacaagtagagtgcaactaatatttttctaattaaatagtgaggcacacaaggtgcctatatctagagcaacatttctaagtgtgctcttgacatgatgtggcattggtaaatatacctacataagtttgaaaaatataaaatattcaacatagtggtatgatataattctacaattttcacaagtgttggtgtatatttggatacaagtgacaaactatcaaagttgagacgaattacatgtaaaagaggaggctctcacccatcgagtattgggcccacaaactcatcgaaataccagaaattgggcgaaaccaacacaccactaggccaaggactcaattgctaaagtccaggagacaacccacggccaggggagctggcagggtcggcggaccttgggtttggccgacctgagcctatcccggtccaaccacaactgccttctgacggttgctaccgacatccttatggctgttgtggccggtattggtgctcccaactgttattcacttgctatataagaacctctcctccttcacttcacacacaccaagcacgagctaaattagaagtggttctttgtatcttttattgtatacttagaaaatggagagaatgagtgagaaagagtcggaggaatttcagagttgtcgatattgttctatttacctttttgtaccttgtcaattactctacttaaattgataatatctttatcgagtaattgagatttactttgtgcggtttacctacgtgatgtctatactgttgaatacctatatttgctgcgtattcaacagttcgtttgaggctgatgtagaggtggtgacagctctcgagatcacttgagttcatcctgtttgggtacggattagagcgcgtgtgggtagcaacgagaaagctagtgcatgaagtagtgtgataatgttaaatttaaactttcttaagaccctggtccttactaga

SEQ ID NO: 49957 - DNA, 759 bp, Oryza sativa
cctatttaagttgagatactccacttttaattcccagggtggtattattatccttaacatttcttatgggcccttgagattttaatagaaaaatcgggcctagcccatttattctaacaatccccaacaaatttcatggctcataagaaatgttctcaaagttcaacctgtttgatataccagtgttttggtggagactgttaagttgaacttccacctaggaaaagagttacatcagaccacaactgaacaatggactatgccttgaattgtcagtcttgtgtgagcaggtttcactcaaacccttgactggtactgggctgccgtttgcatccgctctgtttggagcatataagtcaaactccaggccctttcatgagtatctagagatcgcccaaatctcatagactgtgactagcagtcgaactcatataggtgtgttccttctgagatgttttgcaggtcaatatctctgcttagaaaagccacttgaaccacattaaggcataagccatcctaccatgcataatagaagagaagtacatcatgaaaatgagcccttttcaagggggcttttaactatttgccacttttagatttggtaattaactatttgccacacctatctcaatgacatgtaggtccacatgtgtctatgacatgtgggtccagtggcaaatagttaattgccacatctaaaagtggcatatagttcaatatctccttttcaagagtctcttctctcaggggctgcaggaa

SEQ ID NO: 49958 - DNA, 2430 bp, Oryza sativa
agagtcgtacgagtgccttgccaggccagaggcgtctcaggcgaagagtgcaaggcgaagactatctgccgaaggaagatgacttcgcgttggcaagttcacccccgcaagggccgaagaagccttttcggcctatcaagcctaggggcaatagggccggcgatcgccagacggcccatcaggggcccatgagcccctatatcatcatgtacctctataaatgtccctttcataagggtaatcatgtaaattcccctgtataacctagagcctactagtaagaacctataatggggctataaatagtcctctagggccatgtaatgggaaaaaaggaaagaagggaaactcaaaatttaatacacttcgttttcttcctaccactgttgagtaaccacgtctttcgatgtatgcggttgtcatttcgacaacacacatatttgagcccttaaatggcatcaaacttaaaagttgtccaatagaaaattggacatctcatcgagagctataattttcacaaaagtttgtctcaaatgatctggtccagatgaaaaagttccgttcatatccaaatttgtataaatatatatgataagggtcatcagtgtcagttcataacctaacccaaatttgaaaattttacacagaaaaataatgttgttagtgccggttatcgtaacgaattgatactaatattacttattggagatttttcttatctaggttagggagcaaccacactgttttttttatgtagtgttaaaagtaactagttgatcagtagttagcttgtttgaaatcaaagaggatatcaaagaggatactgatgtggcaaactgacactactgtgtttgactagcatttcctctagatctaggatgagtagcataggtttggccgggggtttctatttggagattgttgataattttattttcgtattcttgtatggtccgactcaactcaaagatgaaaaaatggaaaaaagataaggtatttgtattagtattaagagtaaattgcatcggcggtacacgaacttgtcaggtaggtgcaatatagtacatgaacttgtaaaatgcttattttggtgcacgaacttatttggtgcgtgcgaacaaggtcaaaatcgcactgcaaggttaatcttgctgattttgttgttgatttgaactctatacgttttgctacatactccatccatttcaaattatattgttattcgaggtatgtcctaagtcaaacatatgcagtatttttgacatataaattatatcttacaaaagtatttctcatagtaaatataatcttctgatgttaaactatatgaaaatttttgttaaaatttaaaatgtttgacttaatataagcttaaagcgtatttgaagctttgaagggaccaaaggagtatacgagatatatatgagcttgacatagtggctggtaactttaagctcgtctttgcttcaaggagcgtgaagtcttcatctatggggtcatgggggtgtatctatatataagcccctaataataacagcttttcaacagtaaataacattatatattgaggcgtgctgtacactactgtttataccattatgcctagactaattcttaatttccacttggtactactacatgcatccatgaaaccgatgaacccatactagatctacctatctagttgtgtgcgaaccccacattgccatgcacacacagtgcatgcagctgatcaacttgtaactgctaactaccagctgtttgtgcacgcatggactatagctacagtagtatatgtacaaattaacgaggaacataggagccgataaatttgttggctttaattggacgatagaatgtagtaggatgcgttagttggacatatataacgtaggaacagtgctcaaaatatatatatatataacgtaggaacaggatctgttatagcatgggcttggagattcccttaattatatactacctccatttaacagatgacgtcgttgactttttcttacatgtttgaccattcgtcttatttaaaaaatttatgcaaatgcataagatataaatcacacttaaaagtactataagtgataaaacaactcataacaaaataaattataattacataatttttttgaataagatgaatggtcaaacatgtgagaaaaagtcaatggcgtcatctattaaaaaacggagggagtacaccacaacaggttcctggcatccaatggaaatttgtaaccacctcatcacgaaatgcaaattaattagttgcagaggataaatttgcatcattggaaaaggatgcaatgcgggcttgttgcgaaaattttaaatcactcacggaagtttgtcgctattcttctagtcaaatgattcaaaaaacggatcaagtgattctatgctaaatggcactcacct

SEQ ID NO: 49959 - DNA, 1095 bp, Oryza sativa
ggaaccatgagtgcaaaaacacccacgcgggatctcccactttgacaaagcaatggagcaagtcaacaacaggaaaagaaatgaaacattcaatgacatcaaatgcacacaacctgcaaacataacgtggtggttgtagtgttcatgcatgccaattgccatccattgatttgatttcctggctggctccatcgatctgatgtcctggccggcggccattgatctctgatgagttagagctagctatatatgcatggacaagtatgagagcacaagcttacaacccgtactccgtgcacaccaactaataccaataaaaagttctagaagaaaattgtgcatgtattttcaatagtgttgtatatatctataaaatattaactttaaattcattatattctagccataacaaaaaggaaatatgataattttatgagtatatcactgatagaagtttgttttttttttttgctaacatataatgaattgaagatgagactttatatataggtataattaatactattgacagtacatgcatacttttctctctaaagttttttttgttgaaatttgttattacctctgtctgaaaataagcgcagtcctctaatttaaatttgaactagatgctgcacttttttaaaacaaagggagtagatggtttgcgcggagtatacatagaatgcgttccggatcagagtttccagagatacaattaatgcagataagccagcatatgtacatgacatgtcagttggtgtacgtacaggatttgttcgatcggcattcatatctacatcttttccaactggcattctctcctaccgtagttttagttaattccctcctctgcgttgtactatgtccattggacaacaggccatatatgcgatcgaacactgaaacagtaaatagatcgaagatcgaattgacttaattaatagcgcagccgaatatatagaaaatggtaggtccttaccagggcgaattgtatgaatcgtatatttgttatagaactttaaaatcataaggtttgaatgaggtattatttgtcattaaatttactcgatattacctactgttgaaccggag

SEQ ID NO: 49960 - DNA, 3243 bp, Oryza sativa
tacatctattctcttatttctatatctacactaatataaaatataccagtttcatctcgtagaaaaatgtacacagatgtttcctatccataggatctcttaatctaacattgttccatattacgagttggattcaacatctgcaattagggatccctcccctcgatgtccactacacaccgccaaaatagtggtcggttaaaaaataacacttctccactcctgactccttccagaaaacgccgctccaccgaatccagcccaccgctaccatcgtgcgcactaagccgctgtcgcctcctcccacacttgccctacccggtgcaccgctactgcactcacccctagcccaccgcctcatgcatgctctctagtctccattccactgcacacactgtcgatcacgagggcacatcttggtcgcgctatgagggagaggggggctcgagtcttgtccctggctttcactgatgcggttactcgccggtttccttccatgcctcactggcccaatcaactgcccgtctcgcgcatactaagccgttgcctcttcctgcacatgccctaggccatcggcaccgtcatcgtttccactccagcgcccaaccaacacccttctaggcgtagggtggtggttggtgcctggcgagagtgccgagatgatgcggtctcctaattggtgagagggtaggtacatgcgatgctgctgcttattgaccttaattgatgagcttgtgtctttttgttcaggacaagaatcaagttgcaatagtcacccaacatctctatctctactaatataaaacacaccagtttcatcaaaacaagcattttctaactcttagatctattcatccaatggttcataccaagagttggatccatcagagcaagtataatagagggcaataagaaggctaaatgctgaggtgtatgagagaggaaaggagagagatgagaagcgggctgtaaccttacagctggcttaggtacaggaaccaagaaaatctatgaaatagatagatgaactatatatttatactgaagagctaaccactatatgagtgagctgatagatatgccataaagatctatacagtaagtagttggctgtattattagccttgctctcatccaattagcactctcccactctgcgtgggacccaccactccgcacgtctcctcacgcctgcgcacgttgtggataccagctgcaaaccccaatccctgcaatcccgagtcggatgcccgacgcgtggatggagtcgggatccggttcaggccgctcggctccaggcgcattgtgagaaggctcagttagggtgagcggagtcatcgagcaggacggttcgcctttctctggccgtgatttcccttctccccatctcgtctccattgactagaatcacctctcctccacgccgtcggctcgctcacctacaattgccctacctcaggtctcatcaacttatgcgccgctgtcgccgtccccctccgcctaactcctggccacgtgcgccagctgatggcggcggctgggtcagcgagggcaagcatcaggcagcggaagaaggttagattattaagtcagggagttggactgatgcgctgcctgtggtggaggtgagtgtatgttaaattaagctgcatctttgtgggcatgaaaatatcataccctttataccgtggcaaaagttctgaaagaaggtttagatgattaagtaaaggggggatgagttgatcaggagatgcatgcacatgtggttaagtttctcgatttgtttggaatgcagtgaacaatagattttttcagtggtctatctgccaaattagatattagtgttgttttagaaataaattgttttctcattccgtggaactaattaaatatttatgcttttgggtttcttccttgcctatcccttctttctataaagttaaaacccaaagctacctccaattcgccacgtcattaacatcatatcagccattcgatcaatatgtacatcagatatataccattagatcttcatttacctacaagaaaacgtgcccaaattgctgggtcagcccaggtagacccacctcctaatcaaatggtaaagctgcgctccttccacccatggaaatcattcgccaatgctgaaactgtcgccatgaaagagcaggcgaatgatcgcatttaatccattttattccacccatcaccacgattgtttttgtttttattgcgccatgtaatcctctccatcttcctccactaacccagaaattatcacgatcattatcgtcgatctagctgccagcttactctcaatatatatagaccgtccgatcaatatatagttcttctgcgtcacttgaaatcttcccctgatcccatcgcatcaccaacaagaagtaccatgtacttgccctgttgctcagcctgattctctcatcatctgtaactgacattttctatgtgtatcttcctttgaatttacttaatgaatctatgctgtatcctttcgcacaagtgcacaacctgtatacacatgcataaatgtcactatatatccagatgtcagatcaattgcttgctatatgagtataattagacatttgagcaccacacaacatttgtttcattgctttgctgcaaactgaatttttcatcatctctgatgtttctggccattaattatcatcagtagtgcagcttcgagctaaccactctcaactttcaataacggtggcggtctactgccactgattctgctcgataaattgtagctttcacaaggcatcatagtttcctgatgacctctgtttttttaatctctcaaaggtataagtcaccactgcactaaaattatatttttactattgtacatctttagggtaatcgtttggatgattatagatttacatgacttattagtttcaggatgttgtcaccttggctatgatttaagtagttaggtttcccttgttggaaatatagtcatatatcggcatattttaatccaaaatattaagacaataatcatgacatgaacaatgtgaagtgatctagagataaaattaaacataaccaggagcatgcttaagatagaataagcatcatcatcatgtagagaatgcaataacattgcgactaacagaagtaacaaaaacagagatagcgatagaatgttataccctatgaaattccctttgctggattgtgaggcagaactgcctccgttggtgttgtcga

SEQ ID NO: 49961 - DNA, 761 bp, Oryza sativa
ttttgggacggaggtagtacaatgttgcaattttgtcggcttccttggcgcatcggacattaagtccaccccttgttaaacgagaagtacaatgtgttgatttcagaatcgaccgacccaatgccaggccacccctgacagccgcccggactcgtcggtgaatctgaatgtattttggccaagtacacattggtagagtaaaccggatgcttttatctaacgaaatcttcattagagcttgttcggttaatcacatgagaaaggaattgaaagagattaagaggatttattttacacctcaattttttttttagaaacacggtacaaacattgacactcatagcacacacacacactcacccctaaggcatttatggaagattgggccggcataaatccacacctcaatatgtatagaataaatcatatctaaaccttatagaacaaggcattttttgaaaagaaaagaaaaccgaggcatatgccttagcactaggcgtgcaattgaacagtgaatttagctcgtctgtgttatctgtatttttaactctaccctacctcttgcactgtccatttctttgtaaagaaaaccgcaccgtccatttcaaaatattaagattgtccatgcacatattaaattctgtgcatatagaatatatcgccgatagattcgatcatcctaaggaccaaacaaacaggcttcgaatgatccatccgttgattcaattcggatatatgcacagcccatacataattaagta

SEQ ID NO: 49962 - DNA, 717 bp, Oryza sativa
tcatttggcaccatgtacagtgtcttgcttcagttaaattaggctactcaatccttgtgggactcctgttgataatccatccatccatggctgatgaacaggtatctaaattgtaataagctacagaggttccctactgttgtcgctaacatacaatacaaaggtcttttttttttcaaaaaaaaaaatacaatggccatttggttcgtgtctaacctagacatgcaaaggtttagtcatgtctagtcacactttcttagcctgatgacctgcacacttcaaaccttagggagttggtggatttttacaactcgagtgcatgcacactttgtttgcttcccacttctcaaataccaatcaaaagagttacaaaataaaaaacacttatgtaatagacatatatcttcttgcgaaatttcaagtacaattctcagtttatacaacaggcatggcaaagcgggacaacttccaagtgtaccaatatatccggttgttagtggatcatgcagaacttcacaaggaataaggaaagcaaaatggcaagatggcgataacatagaaaaagaataatataccataaactcagaacatttgagtaaataatgttgtacattaagtgtcaatacaagctagcagatatcgaacagactatatatctacacaaaaaaagcatcggtattaagttgctacatttgctttacactccaaaaacgtgac

SEQ ID NO: 49963 - DNA, 1017 bp, Oryza sativa
ttcttcagttacagttactgtgttgtgttgtagccggccgtccgtacgtctatggcggcgatgggtagggggaaggtgttggggggaggaaggtatttataggaagcgcgcgaagaagaagggaggcggttttgtgcatgtatgtcgccagccatggcatctttctcaccgtagtgaggtttttgatttttgcagcctctgaattattgcctttcttttttcttcttaaaatgtgcatttctttcttttttatatacagtttgtccgctgtgtcgtttttcgatattacaattatttgcgattaatttatggtcatgttttatacataatgctcggttaattgtatataatgcactatcgatccaccatgcacgattaaattcagctatatccatattgggaggacataaatactatgcattatgttaagaaaaggctagtgcttccatgatttgtgcctgctaagggcttgttcggatcacaggataggaaaaacataggaataggaaaacacaggaataatataggattgcatatgcaaaacgtataattgaaaaacaatggaatttgatgatatgaagcgttcggaatacatgaatatataagccatagaaatgttctaattaatattgatctcatatattatagtataattatagtataattaagcaataaatattagttcccatctagtcactccaacgtgattagcatctaccctgtggtagctaatgaaaaaaatgaggtgtgagtggatgttcagaatcctatgaaattcccgcattttcacagggttgttatagtattcctacaaaattcctacacgtgcttcctatgaaccgaatgcatgaacatggccaaatccaaaggatttgccaatcctacaaaatcctgtgtaatccctccgttccgaacaagccctaactaaataaaaaagcaaaaaagtagtatctaatgtatggaaatgttcatctgtatatgtttcatctttactgtttgagaatccgtttttgctag

SEQ ID NO: 49964 - DNA, 2820 bp, Oryza sativa
aattccgtaccatatgacagcttatttaattaaagcctaatgcattcgatcacagcctaactaggttttcaaagatggatatcagtactagttaagacaccatgattaattagctctcaaaaaatctttgcttgctgatcagtacttgatcgggccacggtcgacaacgtgcagaccaaaacgtgttgtgtgtatgggtaggagtgatagatttatgtccactgttttgatcttttgacacaaacttgagcctttttaatttcctatggattaagaagaagatcaatatagtttagtaacctcgctttgaaagtgtagttaattgatggtatcaaagccacttcattataataacaagtggcatgcattttgcttggtctaactagattacaagcaccggtttcagattttcagcgaactgataattaatttcaggtcatgggagcataacacagtggcccaatccccatcaacaacgtatcagctacggcattttgggtgatgaccacatgacacagggtgctataagtatgtagcctaattacctatacaagattaatcgtagagacaggatggctgacatgctgatgagcagtagagtagtactaaccacacctctaatggatgattgattggtgcccatgtgttgtggttgacaaaaacttcttctttgcatggcagcatggcaccacatctcctggttttctgcatgccctctggcaaacagacattcctctggaagaaaaggaaaagtgagaaatagaaaacaaaacctgtcccttgaatgagtactgagaaggcaaatgtacaacatttagaatctgttctggagtatggactatggaggtacaaattgcacctaaaaagagagaacatttcaatagtaaacttgaaagagatgcatgcaaacaaataagacatgaaagggatctgtcatggttgctaaaacgacttcacatagacataatttgcttattttatcggtactatatttgcaacgtttacatcgaattttaagtggcctagactgattaatattctgacttgtgactgaaacaaaagatagagcagcactgtaaagcatttagtttcttctgtagggaatagcgagttttcatctaaccgatcgagtgataaacaagtaatttgtttcttctctaaagaaacattgttggctcgttttcatctgcctgttcattgtctgaatgaaaattgatgttcagattatgtgcctcacaacttctgcacatggcttgtgttttcataatagctagaatgattatggtgttgaaagttatacctgaattcgtttttgacggcgtaaatcaaattagcacttctggggttccttttgacatttcagagccaaatcattgagtttttccctactagtatgtttgaagggctaatagaatatggcccccatataagaatccatggcacgggagcattgacttattgggacaaacatattagtgccaccgtacctgccatgacttgcttacaagacctgaaataaagatgaaaatgttcagaggtacatgaatcaagaaaacagaaatattgtatgtgcaagaacaaatgtaagggtaattagggaacaaaaatcctttgagaagactaacaggctgtacagaaaatggacgaatgtgaattgtaatgtgttatatagtactagtacttatcattatcctagtaaatagtgggaaatgtggatctcagctggtgctactaatcctcgcttccttggagattctaaggatttgattaatgatgttgtccatgttttaagctcagtggtggcaggcaaagcgcaggaaaaactccagctacagcttcatgctagcctgtctttgggacaaaaatcattggaaatgcaactattactccaactagtcaacagcaagaaaaggctccaaatattcagtgcagataattcaatataagaaagaatatgctgttcaatacaagacagaaacttagcagcatttctatgctgggaatattaatactatgggggttgacacatactaagtatgatcttagaataaaaccagagagatgtatgaagttaatggcaagccagttcataggatagcacggaataataatactatcaagtatgtcctaaattgcaaaatcattaaaaaaaatgcagcggaaaatagctttttgtacctatcagcaaaatgcagggtccagcagtaactggaatattttatgccacagctcatagatattaggtgctatctgggaacaatctaggtggaccattagagagtttagtctttaggtactacaaactagatatatagaaggtagctaatcaatgtgattgctgaggttagctgttgcagccaatttagaaacatggataattttgtatgtattatagatatactccaagttaaaagatagagatgcctgagaacaattgacatcaattgcatgtctccagaactcggaagcttcagaactaatgtacctgtcagattatcaattggcaaaaaacggagctgataatcaacttaaccatatgggcatacagggagcaaactaaagaagttaatatgcaaatactaaattccaccaaagaaacagcattgtacaatcaggtcacatggataggaaatctctagacatatagatatatccaaatttcactgcactaacagcaaacctagtataaatagtatgtcgcagtttgttgcaggaaggaacataaaggagaagcataggtccaaagtaagcaatctgggtaccattagttaacaaagattatttgcagcaacagcggtgagaagatggaatctacataac

SEQ ID NO: 49965 - DNA, 1794 bp, Oryza sativa
gtcgcgggcatcatagggaacctcgtgaccacgagaccgcatcccgcacgagcagcaatggcaccatcacctcgcacttaccaatgctgtgagttagcacgcgcgcgcgaaggcgagagagagagagagagagggcagtggcatcatccatccgatatcgccgccgcctcgttttctcgcgcgcgaacggcggcgcgggaggagaagggcggggacgcggggagccttggattggaggagagcggaagcagccaaccaacggcggacgggccgagaaactgagaaagagacgtggtgggctaagcccaggacgaagcgacttgatgggctggaaatgcgagaggttttgggctccgaacgccaatttatgggcctgttcgggactccatacaccaggccagattcggaaagctaacgcgcgcgtacgcgccgctagcgcgcgactccatttaactcgattagcgattccagaggacgtaactaactcaattagtttaggttaatgacggtaattaataaaatatttccttttctccggaattttttttactaaaaaaatctggaaatgctctttgccggtcgcccggtgcggagggagccggatcgggcactccccccgcgccccctcccccacgtgcctacttaggcccacctatttatgctcctcttttttccacaaaagatgtttcacataatgtatttacaatgtttcactatttatagatctaatgttgtagtaaattaaaatactcttttgcaaaaaaaaaaacccacatattttagaaactctctattaagggaattttgtttattttttgttccacccaaaatgtttcacctagtgtactcataatatttcactatgtatagatctaatgttacactgaacgaaacattccattgcaacaaaaaacccacatattttggaaacccctattaagagaatttggtttattttttgttccaccgaaaaatgtttcaccgagtgtactcaaaaatgtttcactatgtatagatctaatgttgcagtgaactgaaacattctttcgctatttgctgaaacattgtttttatataaggtgaaacaacacccaatttaaacgagtgaaacattttcgatctacttagtgaaacaattctgatatatctggtggaacatcttgcaacatttaaaaataattcaataataagataaaagaaaatttcgtcgaaatatatccatgcgtggtcttgttttgaagatttaattgcaatgaatttaatagtgcaatcggatcatcatttggataagtagtttaagagataaatcagtttaaagtaattttgcatgtaaatcggacgctgacgtcagcgcccgatttaccctctcctgatcggacgccgaccaggagtcatccaaaaaaatctatacgtgaaaaaaaattctcatttaaaaaaaaaaaaatttaactcaaaatttgaaaatctaaattcaattttttaatattttaaattagaaatttaaacttttaacttagatttgaaacctttcgacttaagatttgaactttgaagtcaaaatttaaaaaatttcaacttaaactttgaaaattttaaactcgaaatttaaatttgtaagacaaattttaaaaacttcaagtcagatttgaaaactttcaactcgagattgaaaactttcaagtccatatttaaaaactttcaactcaaatttaaaaactttcaaattttaaaaaaaagaatgaaaaaaatatatggaaaatacgctgaggggagggaggcaaaagggaaaaaatc

SEQ ID NO: 49966 - DNA, 763 bp, Oryza sativa
aattcttttcgtagcattgcagttcttgctccgtccttaatgcatgattcaataggctacgcaatctcgtttgtagcaatgaattttaaaaatttggaatcgctaactatcgtttgacagatttatgagccttccatcattcgtttttttaagctgtcagatggttaaaaattataatttattatgaaccgaataaatagcttcgaacaagctaagctatgctgatgtagaaaaaaaatagttcgagaaccgtggtatatccccccccccaaaacctccccaacccacccataaaaaaccggatggcagcaatcacaacttagcattgcttctcatagcaatgttcgtatactataagtgcaggttagttcagacttcagacacctatggtaattgttttttattttgttcgttaggtggtgtttgggtccatggattaaactttagcctttatgtttagacactaatttagactaaatatagattacttacaaaaataattaaataaatgagagctaattcgcgagacaaattttttaagcctaattaattcataattagagaatgtttactgtagcatcacataggctaatcatggattaattaggcttaatagattcgtctcgcgaattagtccaagattatggatatgttttgttaatagtctatatttaatacttctaattagtgtacaaacatccaatttggaaagtgctaaaaaattttagtcccttccaaacacccccttattatttttatcaaa

SEQ ID NO: 49967 - DNA, 747 bp, Oryza sativa
ttttcagactgaatttcgtatatggttaactatactatgttttgttcaatatcttcgtcacgagatagaaggtatggaataccatggatggaggtgaattgtaagataggccttggtcttgtgattgttatcttagaaggtcgatactaatgtttggtcttgtggcgttagtgaaactgttttcgtagcaatgtttggtcttgtgatgttagtgaactgttttcgtagcattgtagtacttgttccattcttcatgcatgatttggataggttattgacaattgtttatagtaatgaattaaatattacactcctaaatctattatataattaaaggaatagaaaaaagagcctccacgtttactctcatggcttagaaattctcacattaatcggagaaaaaaaaacagagtccatatagaaatacaatttagaaatagctgaaattcggaattaaaaaataaggaatattagaagagaagactagagttcatatagaaatacactttagaaatagttgaaatttggaattaaaaaataaggaatattagaagaggagtatagagtccatatagaaatacaattaggaaataatagaaattcggaattaaaaataaagaatattagaagtagagtatagagtccatatagaaatacaattaggaaataattgaaattctgaattaaaaataaggaatattagaagtagagtataaagtccatatagaaatacaattaagaaaaaat

SEQ ID NO: 49968 - DNA, 1798 bp, Oryza sativa
acgattgatcagaggccatgtaacttagtaagacattagtattaattagtatattcacaattcacaaatgagtgaatgactaacacatgagttacagaacatgtcaatgctctacctttacatgcatgtctctcactttttgttcgatgtaaaataagtgttcccaaccagccgatgccactagcttatcagcatgatcagatgggctatctaccaactccttttaattacatcatggatgtacctgttaactcagttacctgatatgtagctaattagctatagctattactacccacgagtagctaattaattagcaaatgcaatgctaaaaatttagggttatcttgatgctaaaagaatttcattctaaggagataagtggataaacataaaggcagcatatatgtgcaatgaccatgcttgcagcccatgaacaagtagtggttagggagtagctttcatgaagggagaatagttaagtgcttgactgttgccaagatttgaaagctaaaggacttattaacaaaccaattaaatttttaagggctagatgacctccccctaatttggcacctttagcttgtcccttcatgcatgttaaaacattattttctttcaccatctttcgtagccttatcaatcgatcttaggagttaggtttgcaagcatgaagtcttgagagctacacctatgtatagccttttcgtttgtacgtctcatgcatggttcatcttgttactgtctgaacacttgactactgatccaaataaccaattgcccgctgtctagatcaaagaaaagaacgaattctacgtcgtcaactactgtgcgatgttaattaatctgagatttcgacattgctaataaatgaatgtgggacatcatatcgtgtacttaaaatgaaaaaaaaaaggttttgagaaatatattgacatgcaattcttttgcgcattcgcgaaaaataatgactgaaagtacatgatgttattatggcaaagtaattgctctatcctcatcacgcttggaggtccctcaataacgacatgttttttttcttttgatgtgtctattgattaacatgaattattcaagagcacgcagctgaattcaatatatagtttctggccggttatcactgtagctcattattcattcttaaaatatatagcgagaaaatacatgtagtggaaaccacatgtgtagtagtgaatcctggacgtaggataagaaaattgatgcatgcgattgttcacgtcatactaatttacttttactggtcacatatattttccctagtgtaaccgggcaaccgaacctttcaaaaaaaatttgctgggtaagttatccagcataactaaatttgtatgtttttaactgaacctgttgccccataaagatatatgaagagatcagattaattagcatcttaatctaaatgttcttctgcatttttcatcttatgagttcttatatatgaacaggaaatatattaattagcttcagaacttaaaattagtatttttagatgacagtacttcaaagttaaaattagttgataccctttcatgtgtgctaccagtttattttgatagaagccttttggtggagctccagctgcaagaattctttgcaccgcaccatcttgttcatattttagatcacgaagaatagatgcttaaatcattatattttaacctataaactccaaaatctagaggtttgaggtttgccaaacaagccctaagaatagtacattgcacttgtagatttgggccatatatgttggcctgcatgt

SEQ ID NO: 49969 - DNA, 1780 bp, Oryza sativa
attctcagtgagtgagacattttaattttaggattaggatgccgctattagcgacatagtacataaattttagaacaaacacaaacatcctttttaattctaacatatttaaccttacaaactagcttagtcacactctttattagaaatccttttaaatttaaatttatgaatattacacatatttaagtgggctttcaatagaaatctcaataggaatctagtgagataagggatgcaccgcttgtttgcttctctttagcttgtgttagggccaggcgcatttgtgggtatatgagtgtagtgttgtgcatatgcacatttgctgtgtaataaaaaaaatctttttaaccgctaaaaaaaagaaaaaaatctttttaaatttgattttgatttcatgccgtttcctttgatccaaagatgctatagctagcatttggggtatatattttccgcatattccagtgaactgtcaccgattacctgaagaaaccattagttttaggatttactcagtctcttacaatggacataaaaaaggttgcttcttctgttgcctcgtagcgacggtgggatcatcactgtaatctgttcgatgctatctgccagacaaggtgagtatagttagcacgatgattacaccctcagatcagaaaactaatcaggctagcaattaagacgcatccttcctgatagagccgatcgatcgatctgtttggccagttaaactatgctctatgcagaagccaaactgtacaactgtcatgtccagacaaaccggaccagaagagagagagagagagaaatgaaaaaaatttgtgccggcaggtgaatcttgtactgggttccggttgtcgatgcaaatgtgctgtggatctgatctgatctgctctgataagtactacctgtcccaaaataagtgcagtttaacactattcacgtttaacgtttgaccgtccgttttatttgaaaaatttgtgaaaaaattaaaaacatttagtcacacataaagtattattcatgttttatcatctaatagcgataaaaatactaatcataaaaatttttcaaataagacggacggtcaaacgttgaacatgaatagtgcaaaactgcacttattttgggacggaggaagtatgtaaaagttgatttaaaacatcatataaatctattttcaagtttgaaacaattagtataacttaattaatcatcactaatgattttctcattttgcgttcctgtactcaatcttcaccagttgatatgtcgaaaggggccttagaggaaaaagaaggtgattttaaggtgtattaaggattttaaaattaacattagatttaattctaagtttttttaaggttttttttaccttagtttatttttgtaatatttgtttttaaattgctaataatgtatatgtaaaagctttttttaattgtttttaagttcttggtaaaccgttatggtttgtgatcggcgtaagcggaaggacgaatgtggaaactggaaatgttgatctctcgaacttttctccacttgttcagcgatctgggatcctaaaaatgggcacatgtcctcaaatggtttctgcacaaaattgctaggagaatttctcatgattgcatcctagttttatttcgagtccacgttttctttaagtacctacatttggtaatcacatatttcgtttggtcgttggggagattttggcattcgtttttggtagggatagccgaaagcacgttagcagctttaccaaatatgtttggattttggc

SEQ ID NO: 49970 - DNA, 1002 bp, Oryza sativa
ttagagttaattcttattccatcgcatttaaatttaattcatacaaatatggtcgcaataatattttatttatttctatccttacctaatatttattttaaattatatttattttgccaatttatttttagggtttattcctaattaactattctttatttgcgattaatgaacttcgaaatcaaatccaaataaaataggcgaataaaattggcatgatgcaattaatttaaaaagttttcgaaggtccgtatttttagagttttgtttttattggtcgaattttcagggtgttacagatgctcaccaagcggcacggcaccggacggaggcgagatagcggtggtgctccaacggcggccgatgggcgacgagtgatggccggggacctccgggaccctggggaaggggatagagagtttaggtggcacggggaaggcgtggtgccgaggaaaacagcggccggaggcggcaaggaatggtgaagctcaccttgaacggggaaaagcgggctcccgtgggattccggcagcgaggggcagcggccgaggtgcggcacaacacagcgacgctgggggtggccacggcatggctcgggatggctgggagcggcggtaaacggcggccgaggcggcgaaagcggcggcggtctcaggttggcagtgaggagggagttttggtgggggatttggggaaaggagatgggggacgatgtgcggcgcgcgacggcgcagcacggcggcggtgggagtgttggtggcgcccggctggagtcggcggcggcggcaaagagaggtggtgcgcgtgacggtggtgttccggaggcggagaggggaaatggagtaggggccgggctgtggcacggcgccgcgaagccgacggtggtggcggattggcgcggcgttgggtggagcagcggtggcgggcgggcggagctcaccggaaaccagccggtgcgcgggagtggcgtggggatggcggtagggaggcgcgggtagctct

SEQ ID NO: 49971 - DNA, 2974 bp, Oryza sativa
caattcatgcacaaatgcaaatgaaagagaatactaaacttagaggtagtgcttattactaaccatttccacaagtcttggtgaatatttgtacgtgggtgcattatggacgaaaatcacccgccatacgacaaaatacatatctagacaatcagacgtgagtacacggattggaggccctacatgtcaatcataatcgcctacaattgagcccatctgaggtacaacttgtaggggggccactaggcagcctcccagccaaaggattggctgggaggtgggccaatggggttggccgaacccaaggtcttttgaaccacctttgcctctccttgccatctgccgacgcgtggagcaagatcttgaagccccaaaggtggttatgcttgattaccggcagttaccgaccttccaaccgacttaaggaggctataaaagaaggagctcactacactctaaaattacacagcaagtggagtacaactcacttacacatttaggctgagttcgggagtgagcgttgggaaccctcactcccaacatgcaaaacagagcggtgattagtgcataatttattaagtattatgtaaaataaacttgaaaaatggattaatatgatttttaaaacaactttcctatatattttttttttcaaaatgcacaccgtttagtagtttgggaaacgtgcacgccgaaaacgagaaaggtgagttgggaaaagtaggggaagaacacagtcaaagggtgtgttcgggaggaggggttgggaatccctcctccccagcacggaaaatgaagcacgtattattgcatgattaattaagtattagctattttttaaaaaaaaagattaacatgattttttaaaacaacttttatatagaaaaattttgcaaaaacaacaccgtttagcagtttgaaaagcgtgcatacgtgccccaaatgtcggacttctctccgaaggagtgctagagatgtcgacattcttccaaggagttctagaggagtgccgaagatgtcagctctctgtctctctatctctttgatcttgtacctcgttggatgcttcttttacataagtatttgtgatctcatttggtattaacttttcttatttaagtaagatatattctcatcattccaggttcatcgctgtacttagagtaccttaatcttatataagtgtgacatcgagattggggtaataatcaatagcgtagacatggtgttaaggctagagtttacgtttgtttgttgtgtgctccacgggttgtagaagtagatggcaggtggtaacagccatatccgtcctttgtaattctccatgttcggtacgtcatcgagctgtaggccggagtctccttggaagatcacgagtaagctggtgttcgaaacaattgatagagttttaacttaacttaattaacccataggaatccgctctttcctaagcatcccaattagttgttgtccttggttgaatcttgttcttagattacacgcacatgttccctgtgatttgatacccttggaatactctaaagtgaagtgctacttcggtatccatgttcttgcggatttatttatgactgtagcaaataccaacagcgggccactattatgttgtcgctagtcatgcattgtgcacacattattaatagatgaggggtctcgacaagccattgcgtgcaataggtgatgacatgccctcccaagcaattagagcaagtttaacagtagagccaaatattagctataagatcatattagagttagtatgtatagtagatgggctctaactttgtatttatttttcttctcctctctctttctcatgcatatacatttagtgcatttattttaatgtgtgtgaagagttagctcttggataccatcagctcgccattgttgaagcccttaccactgcctaggattggggacttggggtgtgaggcccagagagaggttaggagatgggaatcggttgaatggttgaaacagaccagaccgggtggtcttcacgggtggcagggaaatcttgtcttttcaaaacatttctcttcttgtataggctaaaaataataaaataattgacagagcatccttcagcagattaccatattttttttaggatgtactcagaccgttctatatttttgttatgtctacatgcaaaaaccacaaattttcaatgtgcggtaccaaattttgccaaacaaccaccctggaatgataattaacaagtatgaagtttgttacaatcgtctcaaacttatttgttataaagttattgtcaaagtatgaccattaataccatggaaaatgattaaaaaggacaattatcgttatattggagggaatataaatttgtttgtgcagttcattgatacaaatatgaaaaacaaaaattaaaatgcccagtggatagacctcatgaatgattttgctatatggtttatatatggaaagtggcgaataaatatcatggctagtgtagtgggcaccttatccaaacaatgcataaaaagatagcttgaacttgcagctaaattgttcctttattccacttctttttttttattctcccaacagtggactacgcatatctgggccacgttgattttttttttccgaaaatggccacgttgattcggtggtccaatttaatgcacttgcgagcaactaattccgttccataaaaataaaccgatataaaaataaatctattatgggatatgactgtcatttaaattaagttgtgctaatatgatcctaatgtttccgctgtcattttaatttatttcatgcttacaagtcaatcaaactacagtatatatgttcaagtcaaacaacaaaagaaagctagatcaatctgtgcactcatgcacagcacagcagtagcaaagcttcaaactgactgtaatatgtaatcacatgataaaagtccattgaacatcctacaaacacttctagg

SEQ ID NO: 49972 - DNA, 2090 bp, Oryza sativa
cggatttattaagcctaattaatttgtcattagcacttgtgggttactgtagaactttatggctaatcatggactaattaggctcaaaagattcgtcttgccatttccatgcaaactgtgtaattagttttttaatcaatatttaatacaccatgcttgtgtccaaagattagatttagtgtttttgagcaaaattttttggaaggccgtagtaacgcatgtaggggtgaaaaaaaagctcgggctcgtgagctcagcttgggcttggctcgagctcaaatgccaaaggagccaagcccatgcctccttttcagctcgttgctgaaatgagccaagcccgagctagctcgtgagtcgctggtttggctcatgagcctaggctatcatgtatttatatggatgattttattttatagtgaagttattatttgtaattatgcaatttataatttataatttgtagaattgaatatataaacttattttagttatacatgtcgacgatttattattgatcatctacaaattatatatgaagagatgcttcaatgggaaggctcgcaagcctgctcgatctggcttgagccaggaaacgagccgagccgagctcatgcttgagcctagtttattgcgagccattgcaagccaagcctcgtttccacccctgcacgcccggcgcctcaggtctccatgctcaacctctcccgatctctttctcttcctattcttttatgttaccaaattaaaagcaagaaaagctataattttagtattaaggtgaccataattttaaatgtacatatctaatttctattctatctaaattgttcctgtatttataattaaattgacaattttagatccaatgttttgctatacataagtaatatgtcattgtggtcttcttaacgtctggtattctcggaggcattcggatgggcgatttctggtgatcttcaatggtgactccggcaccgccgggagggtggaatttctctcccggggatgcaatctgcgatgaagcttggcattgtttccgaccgccggttcatttctcctctaagttcagctcggttcctttccggttagtggtggatctacctcgctcaaattttcgttaaacaacttcttcggtggccttagccctcagggctgtgattggtggttcgcctgctgatctctctgtttcccttctcaaagatcgtctttctctttttttgtctgctccaaacaagtgggtttatggatttatcgtttgagatcttatacttgcaatgattttgttctgcgcttctttctttggagaaatggtggaccaaattggtagtgggaacttgatgtttagagtcgtgaacaagagaaagaatgggtttttgtggctcctaagaaacgtgtttctgattctttgaggcaacctggtcgttcttatgctcaagctactcagcagcgggttattcctatgaagagtgtttttgatagattaaaggagtccttgaaggtgactggcggtgatactccggcaatcactgttccggtgaccaaagttccggagactaagctggtggctaatcccaaaattcaaaatgttagaggtaatcgggatcaactttctaagcaagttttaaattctaatttaatttgtgggcgttgctcagagaagggtcattctttgtctgtttgtgttgggccctttcggtgccgaatttgtaagagttcgggtcatgctgcccgtttctgtagctcaaagcaatctccctctgagggtaaattgccaaagtctgtttctaccccccgcattaatgcagttgctacggtcctaaactcccggggtaattgcaatcttgtttggagacctaaaaagcttgcgccggttatctcgtagccttctcgccttctccaatctactgttgagaatattgttcaagcctccccagcccaaagttccatgccaatggcagacctcaaccctaaccctcatcgtttccgccatcaaggtcacattgtgcatttgggaggaaatttgcgtgtccctagagttgatctcaccatccctcaaaggcctgttcgagttttgtgttgctttggtggag

SEQ ID NO: 49973 - DNA, 9342 bp, Oryza sativa
gagagaaaaagaaaagaagagggagaggaaaagaaagaaagaaaataaagaaagaaagagaagagagaaaaagaaaggagaaggagaaaaaaaaggaaaggaggaaaagaaagaaaaagaaagaagagagaaagaggaagggaaaaataaatagaaaattagagagaaattaaggaggattagaaaatttaaaataattagaatttaattatagattaattatagtcgtagaattgcaaaatttaatataattatagattatttttggtaatctctataagtaatcaattcacggtagaaattcagatttaattactaggaattttagccgtgtattatatttaatcgtttagtcatagactaaattaaatcgtacaatattataagataattttaggaattcgtccgatatttagctcgcgatagaaatttctaacctattatacggatataatactcgggctgattaaattaaaaacttgtgctaataaaatatttataccgcgaaatagcttaggatggataaattaagatcggattagctctaattcacgaacaaaaataggtaatgtaagaaactgacttccgctctcgatatcttcgtggatttacttggatctttatttgaaatctaaccgaattcaaatcgtttcttcgcacgtaattttagagccagagggagttgcggatccgagcgaggatcaagacccacagaactacgagcaaggcaagtcatcactattctttaaacatgttgatcccaattgcgaaactattttgtttacaaataaaattgcatgcaatgatgaacatcccacttgtgattatgccatgccttgattattgtttatccttaaatctttgtaaccatgattatgtatgagtccctagtcaaccatgacaattgcttagaaatgctactctagattcatgcatgctcatatttagcaaatgctatatgcctgggcaattacctttgggaaggtaattgagatgcgacatgtggagacaggagcgccacattgccatgataatgatgacatgatttatcaaagggaaataaaattaaacaactatttttgactaggacggacggaggatttgggtggtatctggaaaaggctagtaccgtccccggtcaattaaagaccgagccatgaagttaagcatgaaacaacccccgtacaaccgtacttctcgaatgggtatagacctagcggattagatagccgagcggaggcagtatccctgcatagatggttcacccctgagtgagacaggtgcgctacggtggggcagccgttgaggtagggccgagaggcgtgccctacattggtgtcgccattggtaggactgccatgagtgtgtgagagagagaacttaacttgaaccataatttaatatgtgtgtgagacttctctttcccgggagcgccagaactcctctcactgctagaaacatggacgcctagagtgcatgaggatttgagttcatggagcgggtactgccaatgcaaggttatcgaaaagctttgccgtgacgcgtctcatgtgttgagacgaggcttatgtgttgggcagtcgcggagtgcgggtaaagtgtacatccactgcagtgtgagtaaaccaaatctattcgaatagtcgtgctcgcggttactgagcaccgggacatgtattacacttggctagactctaaattcttaacctgtgtgggatgggatattgcatgatgatttttatgctgttggagccacttcctgagagacgggaaggtggacgtcctcagaaaaccatgacgattcaatggcgggaagctatccttgggatcacaatggatggtggacagaaccgtcgttgtctaatgtgaacactagtattaaaacttgatcagtctatgctaggtcttaggcttgtgaaaagaattacaaaacttgctttgtgcaaaagaaccatagccattccttgaataccctctatcatgtgcattgttgctgtggtggcttgctgagtacggttggtgctcacccttgcaatatacaaacttaatcagaggtcggagatgaagcttcggaggatccctacgcttactaccaggaggatgatgaagacgatggcgctcagtaggtcttagttacggtcgttacctgtggcaatggcgtgccgctgtcttaactccgctaccttatctacttctgcttttggaatgtatcccggaccgctcggtccgatgatctaagactatgcctgcgggcttatgatgtaataattagcactagactctcgtgtatgtgcatttggtatgttagctatgaactcgtgtgtaccagactacttgatccagggaaatggtactgtttacacgattgattcctgttacaaaaatgggagtccacagcatcccccttcctcctctcctttccgtcgcccttcgcgcgccctctcgcgccaccgctcaccgccggtggccgtgcaccgtcgcatgtcatgtctcggctgggccggctctgagccgtgcccgtgccctgggcgccctgccctgtggccgcccgtggaccacccgtggtctcggtccatggtgccgtcccggccgcagtggaccgtgtccaccgtgcgccctcccccttgtgtcactgacatgtgggacccgcctgtcggcaccggcttcccttgctgacgtcagcggcggtccttttcctttgtaaaaataaatattaatcgcgcaataatgcgttaataattatagaaatttatttaaatggctcaaaacttctaaaattcatatctaattcattcgaactccaaattgggccgttcaacttgcaaaattcatctaaaattgaggtctacatgattgtttacttttttatgtactatttgtttggtttttattagagtttttcctcgttttgcgtgccagcgagtagaatccatcgtttcggaagtccgcggtcgctaggaaaagagttcagaagatcaaagttaagaagcaagcaagtcacacattccccttgagcattttgatcctaatttacaaatgttttaccgtttgcaaataaaatttcatgtcttgctaattacatgggatcagggtttacctatctgctcgcttgtgccatgtttacttgatatctgtcctttgtcaaccgtgggtaataaatcgcctagcttgtattacttatgtgacctagctagaactttatgcttagccatgcttaattaccactagctcaattgatgggataattacagttttagacatctagtatcttgacaagctgcgtgctcgagacatctagccatgtttcatggtcgtaattatccaactaaaatgcaactgaatggtgggctgtgggtgcatggttttgttagttgtgcccatggcaattaaggaccggttcacgagaaaccctagaagaattacagtgcttaccacaagcgggagtgggtaactgcttgatctggagtatagctcgaccctttcctaggcaccggtggcgagggtgggcgtcatggagttgggtcggccggggtgtccggttgtccagctgccggattcaccgcggcgcacgaggggactgccggctgccttgcgaggagtgcaggtgaaaccttagcgtggtgtggatggttaggggagagttatatgaagggtcttgtcacaatcactcgacatggtgacgtgttcatcatgggcacatgatgacacggtgacatgccggtggattgtgtcttgtgggtacagttgtgcacctctggccagagtaaaactattcgaatagccatgcccacggttataggcgatcaaccagattcaccgtgattagtctcacacttaataaatcgacccaatgcactgtagttcaggtggattggttgggcctgttcaatgtggtgtagcgttgttcagtcgagagttaatattaccttaattactcaactgttttactgttttgatcaataaaatgttctacaaccgcctttatgcaaatagccacaaaccatcctcgtatccccttgcacgtctgcatcattggtatggcttgctgagtacggtggttgtacttagccttgctattgttcccccttttcagaagtgtagtgcttctgagctgaagccgaagttagaagaccaaggctcagaccccagttgagttttgcctgtggagtggagctgaagccccgctaggatcgccttttttcgctgctgtcgttctctttcggtgtgaggactaagtgcctcttctgtaagtattttacgctttatttacgtttggaactgtatattacttgtcgttttgtgtaccctggttggtcctggacagggatttagtacacaaaatagtctagaaatttgggctaaatttctgggcgtgacaaaaacccagcccggccgaggccgggctggcaacgatggcactcgatcgtcattccccctactgagggtgttgtcgtgccgtctcaccccatctagtggtggctgccgggtgaaagccctgtcaaggtttctccagaccttgacagacagcagcggcgatgctactgtcgcttctctccatggagacgccgtctaggtagcacccttgccaaaacctcccaaacatctgttgcaagctcgttctagagtcatttcctcttgtatcggcgtcctagtttatacaagttggctatgtcgaagggcctaggggggagagcggttctattattctctctcaccctctcttcctaaatccctaagatgtggatagagtgtgtttttgtgtcggttgtaagggttgggttttgagcgatcctagttgtagttcctttgttggcttagcggcggtcggccaagcttagaggcagccggtccgatgctagtcttctcctgggattgtgtttggcgtcgtcagtgtgtgggtggtggtattcttttttccttttcctggttacgatgtcccaggattgtaatcttataatttttttctattgtatcaatatgaactttgcactgactagttcaaaaaaaaatcttgtgtctttaggtagaccaaacaatccaattagtctgtgattttttttaaaatatgctcaaataataaaagcaaggccaatgaatcagggaagcattcaaaaaaatcacatcccaaaagtaatggtgcatctttagttatactagaaaaaattatctgggcattgcaacaggtgaaggctattttattttaatcttattattgtccactctgaaattcattgtgagaattcgatgttatatggtttagttaaggtgagattcactatgggaatttgcttggatatataattttttagaaaattatgagctgcagttaggagtccgttcgtatcaagttagcatgcgagtttttttacgactccttctgtattttcattcaaaagtgaacgaacttaaaacccgacttaaatacggatctgtattttcaaaagcaaacgaactaaaaaccgactcatacacggatgacgtacaaaattaccggtaaaaacattttatagtagtagagagttgccaaacttaaaaaccgactcatacacggatgacgttcaaaattaccggtaaaaacattttatagtagtagagagttctaaaaacattttatagtagtagagagttcccgtctgtgttctcgctgagctccttgaatcgatcccaaacgggtgtctcctacactgtgcagtacaattgaactctaaggccccatgaatttagccctcacatcccacagccaatccattcattaacttatataaaaggtgattgacttttttaaaaaagttggcaccttaggtgtaacatctttatttatcatctcacgtcatttgaacttaaaaaaaatgcttgcataaaataaaacaaaaaataggaaatgccaataagagtaaagcggaccaattagggaaaatcttataaggtcttagaaaaaattggttcttccttttcaccaaaattggaacacccgttaccatatccattgcgtcattttttagtgtttagatgctaatacccttcaggtggcattattagtttcactacatcatgcacacaaaagacataacccactaaggtagaaatatataattggtttaaaagttatattaaacttgatattcactttgtttttttcttaaaaaaatactatgggtctaacacatcgtagggaagcaggggctagataagtattcgaattatgtcaatatgaatcagtaagagggattgttaacttcatggaacaactgaaacataattatttgcaataatagttttaaaaattttgttaaaaaagagagcccgtaaacattccatttgaataaaaactacttacttttaatttacacttacctgtttccaaaacaaagtatacttttcttttgaatgataagtcagatcatagttaatttcttaccgaatgaatattgtatagtatgtagtgtaaagccaacgaatagcttagaaaaagttacccaagcaataccgattaataccgattaagaaggtttttcagacaagtcacaatttttgaaatatagtatgaataatccggttgatggtatataagtctctaaagctgacaataagatacacgcccgcacatttgcgtgggttacctttctagtctaatttaagaaactgttgggaacaaactcgatacaaattggtaaaacacctggagaatataataataaacaaactcgacaaagacagggttttggtgctgtcaagcagcagcattttctggtttatactcaatttaaaatagcaaatcaacatacatatcatgggagggcaatgccaccatgtgcgccacccccgtccacgtcatgtgccatcccacacgccaagcatgccacgcaactagacgcactccggcttgagccagcaagccacaagcaaatacagacgcaacaagacaaggaaaaaaaacagaaaaaaaaaaagaaccaacaagaaatgttccatcagaaatagacttcaaaaccattagttcattacaaacaatctagatcagtcatatgctgaacccagataagagataaacttgatatatccaccaatgaccaatcactgtagggactttagtgttgttcttccaagtatatgaatcttgtatggatcgatcatcgatgtcggtgaccgttgtagtcaattgaatctacctgcagttggaattatagaagaaatatatcagatttgcagaaaagaagttgtgccctttcaatatgctccatatatgataagttcacaatgcactataaaaacaggttctagtttttgacctcctggtataaaagtttgaatatttggtacaaacataatgtctgacatatgtacatgtctatataaatagaaggctactgcagaacactataccattccaacagaatagattatatataacgacatcagcacggtatcttagttagatctgatatttttaatactagataggtaccagatctagtaccgtggtacctgatacaatacccataggtattatatttggtgccaatgataccagatgatactgcatggtactaaatcctgctacctaggtaccatgctgacatcatgatgatgtcagctattccgttagaacagtgtatcgttttgtagtattatgatataaataccatgcaattaaaatatcagaagaacaaataattttgaaataaacattttcatgtttaaatttatctaaacttggtgaaaggattccataggttatgaataaaaataatatagatgcatatgggttgcacactagtaaactagaccatatagcctttgcttaccgtactactaagtaacctagttgaaaacaaaatggctaattctgtgtatcttttctacacctccatcttggtgtgcgcacataattgttgctgatttactatgcagataaacaaggagtaccaaatgacagcaggccgccattatagccagcactcaaaagttagccacttagcttcaaacagtcttatcatttttttttttgccgaactaatattttggtgcgacttttcatcagatattttacagtgctggaacttcaaaagagtgcaaaaatagtttttctaggggaagtattgagaggttaaataactattcctgaatcctgaacagtgccaattaaaatgtagggcctgggtactgtgggcctgctggtttcctattagttggaaaatacagataagaatagtttgtttccttgctaatttggtttccctcagatatattcacatgtattaaagataaaaattacattgtagatagagttttatcttgtggggccaagccaagtaatctgtacaaaaaggtagagtgctagcatgtataactattactagtaagcaagcaatgaagatgaattaacctagtctctccccctttctcaaaattgttcatccaaatctatgatctcccatcatgtacatacatacatacacatacacgcacacacatatatatacctcactatgttacctctcaattaacactaaaaacatttctagttcccaaggtccggagaaaaccacgcaaggaaaattaacactaaacattttacaaattgcacttgtattcttctcttaccaacctgttacaaccaagaatcgcatgcctagtggtattgctagccatgcaattcatttccaataaatccctaaatttcaaataggacctttactttatttcccactatacaccactgtcctccataacttcatttggggtttctcaaaaaaaaaaaaacttcatttggaaaaatcaaccaatgatggaatcagcatgatcaacaaaataaagaggaaaatataataaagcagtgttgcagtaacggaaacaaacttgaaatggaattctgttatactagccatgcaaatctatagaatattttttgcttattggcttatagaggtatgtggatagatttgacctgagaatagagcctttgggcaaggccttcttatagtattgcgctgactgccgcttgtagagcaatgactgatcatagccaccttctttctgaggccacactaggttatcccaccaatccttctcacagtatactatgggtcttggttcatgcaatccttggacgtcaggcaggtgtctaagactacagcagcccctgatcatgatggcctccagcatgggagctgacattatttttgcctcacatatccctttcaagctgggaagctcatgcaggtggacgtgcttcagctttgggaaatcaatagcatcattgcttactgtccccttggagtttgctgtgttcaaagggaaaacatatatgaggctggtgcagtacaggatctgaatggtctc

SEQ ID NO: 49974 - DNA, 655 bp, Oryza sativa
gaggaaaagaggaaaaagaaaagaggggaaaaggaaaaaaagattttcatgggatttaaataatgcacatgctcatttttaattggttaaaattatttccaaggctctgaaaattccactaaaaatcatgttagcatattttgacatgtagaacccaagaaaaattccacatgtcgattccgattattatttgtatttttttaatttagggtttctctcttgcctttaaacaaataatttcttgcaacaatttattaattaaattttggctagggagaataacttcagggcgtgacaacatgcctcctcaggaaggcagcgttcgcttggtccgatgatgcggagcgcgcattccgggcactccaacacactatcacgtctgccccaacactgcaacttccagatttcgcgcagcccttcatcatcgagtgtgacgcgtcgagtgcatggtttggtgccatcctgcatcaaggcgctggaccagtggcgttttttagtcggccgatagcaccacgccatcctcgccttgctgcttatgaaagggagctcattgggttggttcaagcagttcggcattggaggccatacgtctggttgcccatttgtggtacctaccgaccaggcaatgtgggtctattgagagtgcatttatttg

SEQ ID NO: 49975 - DNA, 3930 bp, Oryza sativa
cgatatatggtttaaactttaatttgttctctagaccgtatgaatatggattatacagtctatatgtcttatctttttattatacagtggaaataaagaatggggctctgatggagatttcctgtgccatgttaagcacgttttctggataatgtcacgcgtatcttttaatttttgccacgcgtttgataaatagtttaattttggaattttttgtattcatattaaaacggatagtccattttatttttttatatgtatatgagtatagtcaagggcggatccaacgtgggtgcagagggggactcgagtcccccctacacccacaagacccatggataccctctggagcacccccttcaattttttcatcataaatgataaactaaaggtctctagatggctggagattgaataaactatgtaattgagcacccccaatttttttgttcctggatccgccccaggtatagtatacgttgtgccgtgtacgcaaaaattatcacgtgtgattttttatataactgaatatcgccaatacttgtataatcagacatggattttgaccactttcttttacatatttgccaaacaaaaattatatttctaaaaaacaacaatcatgtgaattaaactgagtacatgcaggaatgcagaaccatttaaaggtcgtcctcacctcaagttgagaccaccctgaagctcatccctcatcaaagttacgcaaatacataatccaaatagcgtagttaatgagttaattaatgcacttattatatggttcatatagaccaattcaaatctaaatttcaacaaacttaacaaaaagaacacttgtacataattttaggtactgccatccaaacagaattcagttgtcattagagaatcctagaagtaatatttagtgttgtcgtgtgctgcacgttgatccatttcaggttgttcacataaagcaaaaatgttcggtgataccagagagtttcaggcctgctgtccagtaatttgaccatatagctggatttatactaccagcagttagcgtgggctctaatgacaaacataatgggagagttgtgcgggtatatgctgaacataattttcttcaagcgacaacaacaatatctactgtactggatgaatcatttagaatgcaaaacatcagtaaatagttaaactttacaggagcacaggcagattccatgaaagcaaatttggagagaaaccggctagggtttaggcggatcaggatcagtgcatcgtttgagggtttagtgtgatgttgatattcccttggagatgaaacaaggtattcagtgttctgagatgaaacaaggtattcattgttcatctattagcatttaggatttacctagctagcatggcccatttagtagccacttctgcatgtatgaagcactgtgaattgcctcaagccaaatgtcacaggctattatatacatttttcgttgtttgtattaacatcatatgataactacaaacatgtgatataattattatttccgctacaattatttaatattatcttactgtttgggtttaaattggtgtacaatttttacatgttgcaacccaacgcgcaggcatttgtttgctaacatggaaatttaagtaagacaatagaattgcaccgtaggaaattaaaagttattgacacaagagaatgtttccatgcctcaccttggagagagatggcagcacgcacgatgggcaaggacttggcagtgggtggtgaatcgtggcgtgagtacggatcggaggcggaggcggaggcggttggttgtcggaggagatcagtgagccgtgacgatgatgacgatccactctgccggccgaggatcagttactgccaacatgatatagttactaaagacagccattcatctcaaatttcatacactctcacggctataacctggcaacttgacagtacctgtgatagagatgctcacattcaaaatgtagcaagcatcagaaaatgggacgactaaatgtattatgatagttctgataaccgaatagctctattatgatagttccgaagcacgcactatgtcgccgaaaatagaagaacagagacaaatttttctaaacatgtaaattataacagcaccaccaaaaatagaagaacagagacaaatcattcagggtaaattaccattgattctgagatggcgatcgttgccaataacaatgaatcattgtgtttactgcattagttttttttcctaaacatgtaaattatgtcagcaccatattattgaatgtgacgacgccgaatattggcaccatattaaaattgaaagatcgacggcgtcggggacatatgggaagagaggtgacatattagggatgggtgaggggatctgtacctttctgcggcggaggagatcatcgtcggtggcgatgctgatcggttagatgggcggaggcgcgcgagcagcggggaaccggccggtaactgtcccggcggcgcagaccgatgcgatggtcggaggggcggcgggcggatagggggtggcctcggcgagcggtgggcggagggggtggcggcggcgagatggagcgcgtgattttgctgggggaggaggggaggcaatccgatctggatcggatccggagagtggtggggagccgttggattcgagtcatcggatattttcgatcgtcggatgtctaatgagtaataaaatcatttgttactatattatagggtacatgtcagaggcagccagcagcaagcatgtgatggagaacaccggctacgaagaacgtgaattgattccaaagcatctagcacagaagaataaataaagggtcctccgtgacaagaatatggacaaaagtaaaatttgttaacagagaaaggtacctgaaattaattaaggtcatgtttggttggaaaaaaattttaccccgacatgtcacatcggatatacggacacacatttgaagtattaaacgtagtctaataacaaaacaaattacagattccgccagaaaattacgagacgaatttattaagtctaattaatccgtcattagcaaatgtttactatagcaccacattgtcaaatcatggcgcaattaaacttaaaagattcgtctcgcaattttctggaaactgtgtaattggttttttttgttagcaaatgttttgttgttggaactaaacttagtttccaaacaaaatttttcacgctgtcacatcgaatgtttggatacatacatggagtattaaatgtaaaaaaaccaataacaaaaagggttaagtccgatttaccccctaaactcttgcgaaagtacgctgtaccctcctaaactataataccagacatattacccccttaactatttaatccggacacttaacccccccccccccccccgcgaccaatttcggctggttttaccgtttgatccgacggggcacacccacgtggcaaatgatgtggcattaacatgaaaatacccctaccctcccacacacacactctctctccctttctcccgtgaaaaattccccaacccaaacccctaaccctagcggtgaaggcgaagcttggcggcgcggctgcgtggtgaacggcggcgcaggtgaggctctgcggcgcggcacgacgctcgcaaggcagcgcggcgctgcgcaggcacgatgctcacgcggctgtgcggcacacatgcggctgtgtagcaaacagcgctcgcgcggcggcgaggcgcacgcgcggcagcgcagcggcgcggcgctcgcatggtggagcggcgcttgcagggcggtgcggcacacacgcggcggcgaggcgcactcgcaaagcttcgatctgaatgcaaaggtgcagatggaggccaacgctgctaggcacaaggaacatatggaagtaatagggaagcaaaaggatcctggaa

SEQ ID NO: 49976 - DNA, 598 bp, Oryza sativa
  unsure (1)..(598): unsure at all n locations
ctccaagttctctctgttcctccccttcttcctaccccttctctctgttcgaatctgctcctctaatcccaaaactcccaaattcgcaagcagattcgtaacaataggtatcagagccatccatcctggagtacctcgacaaacctagataccattcccgtgcgcaactcaagtcccaagagatggagcagcaattggcggaactcgcggcggccatggcgacaatccagaagcagaataccgccatccaagcttcgatgggatccttggaggaaatcaagcctatggtggtggaactcgcgagctggaagccagcggtggacaaggccatgacggagatgcgggacgacctcggcgacctgcgttagcaagtggagcggatatcccgcaatccgattctagccgtcaagccagcggatctgccccctcttctacccacgccgacggtgcctcaaatctcggtgccgaaggaggaggagacggcttacaaaggggcggacgcgagtccagggcccgtaggccatggcgttgcaacgatgaatcgngggaaggcgtctggagatgatatttctacaacgctttcccgggcaagggtacg

SEQ ID NO: 49977 - DNA, 579 bp, Oryza sativa
  unsure (1)..(579): unsure at all n locations
catgtccgccatcgctcgcgggaccgttnacgttcttttcctaaaacgacaccgccttcgccatccttttttcgcgaggcctcctatacccccgacggggcaacgcgatcccagccctaccatggccattacattttcctttgtttcactgttaagtctggtgaaatgtctataacgccctcgacgacttacgctggaatataaccttgaagaacaattaaaatttttgtttgagcgcacaatatgtgcattttgtaaaatcaatgagattaaataattagtgcggaaaattttgacataaattctgaaaataaaaaatgtaataaattaaatttttatttgaatctttaatagggcaatggatctttttttatcaggagcattcataaaaaaataccgtggacgttggtaagcctatgtttgtaccaatactcctcaatttttatgacttttttaaaaaataaatgcatatgtttcatttcattatctaaaaattaaatggccataaataatgtatcccacaacaaactcataactataataatcctcatacgaccaaacatgtaccatttcaattat

SEQ ID NO: 49978 - DNA, 704 bp, Oryza sativa
acatggtatatctatgcgtacgcgaatatttcctttgtgattaaaggaaacctttcgtgaaatcgattgatgaggagagtccttctcggacaagaattgggttacctacgtgtcgtgccaggtctagtatattcgagtcctactcggagagcatcagacctgcgatataaaagggaccccctggggaggccatggatcatcgaatctcagagccaacacaacccacacagcctacgaagccggagcctgcgaggagccaaatcgacgagagctagtcgaatcaactcgactacaatctcgccaaaccccccgagttccatcttttcctttgtaacctgtgttttccaccatataatcccatatcgtcgacaacaacgccaacaccagcttcagccaagtttttcctacttcaacaatgctggtatggactcaagtcggcgaaatcgtctacccggtttacaccacgatgccgatctcaaccggtcctccaatgactggaaacgagaacgccgtggctacgaaccaagacgcctccatgtcgaaaaatccacccgttgaaacggagaacggattgccgactacgtccaaactcgtgaaggattctgatgtggccaagctttgtccttctgacatgaatcgcgggccgataaggataacttccgaagctaccaggtcttggtgtcctatccacaaaaccaagaaac

SEQ ID NO: 49979 - DNA, 1638 bp, Oryza sativa
  unsure (1)..(1638): unsure at all n locations
agacgcaggtgtgccgggtgagaacgcgcggcgnccgccttttccgccatgacgacccccacagcggcgaggtgcgccacgaactgcgccacgaggaacgcgcactccgcggcgagccatgcggtcctcgggagcagcacgaccgcgagcacgagcagcacgagcgacgcggccgcgaaacacacggacgccgcgagcgcgagcgcgtgccgcaaccccccgcgcgggggcggcgggggcaccgcagccaccacagacggcttcgcgagcaggggctcctcctccgcgtggtccccgttgccgttcgcgataccctcacgccgggaccgcgacaagcgagcgcggacggcgacgaacaccaccgcgaggaggaaggcgaggtcgacggcgccgccgaggaccacgcgctgcgggcatggggagaggaagaggaaggcgaggcggtcggagagggagaaggaggaggaagacggcggaggcggggagcacgcggtggtggacagccaccacgggagcgaggtggccggcatcggcatggccggtgagtggtggcgcggtgtggcgcggcggccggagagcgttacatctgggtgtcgggtggtcggcgttgcagcggggaggacgcgtggcggttttgatggggagcggagcggagcagagcagagagcaggggagaagagaggtgaagccaggaaggggagaaacgttgaccgagtcgttgaaaaggagtgctacaggaaatttatctaatttgctggaaaacattataaaaacatctcattgctgaatacactttaaaaaattgataatttgttaaagaatactttcgactgaattattgagagaaattctaataaaaatgagaatcaccctagagtcaaaagttattgtggtaaggtggagtgaaatgaaatataatgtaggttaatgatgaaattaagagttgcataatttctaaaattttattctaataatgtcatgtttgaagcatgtggtcttatggtattctcgtctttcttaatattttatctcttcaattgagctgaaggtatcttctagaaaattaaagggttttaggatgtattttagccgtgatatgtttattcgacgtctatcaacaaattacacaaaatttgtgtcctttcgaaaaatttgtcaaaataaaaagttcgaatttatttctttttcctaccgcttcggatacagcaggtttggcccgggatctagggggctgtttagattgaggtttatttttactacaatctgaacatgtcctatattactttcacttacagggtgggtcccacgtgccagtcactagaaaatgtttagtgtgaacagcctgaccaggtggggctgaccaatactcgggcccacttggtcgtgggcttgcgtagtgtggcttcgtgccaaccaaggagacgcggcgtcatggaattttcccgtgatcgcctgggctgcgacggccgtcgtcgtggatttctttcaaaaacgtggacatttgtaatatttattactacgcaaataagatattctgtcccaatctatgtcgcaagcaacgtcatattatatactcctacgttggtcctgtttggatccgaaaggctattaaatagccctccagaatcttgttattta

SEQ ID NO: 49980 - DNA, 695 bp, Oryza sativa
gtggcacacttgcatcacttggttgaacacttcattgtttttcttcctcatgtaagcccaatcaatacacttcatctcaaccactggattctctctagccataatcactgagttataccaatccaattgagtgaaagtcctgaagcgaggatcctgtgactccttgtcacgcccggaatttctacccaaaatttcaaacgcttacatgtgtgttaaaccctcgtccaggaatcagccgaggcacacaataacaaatcgataatagagtacaaataaacagctatttaatattcgcaaataataaattattacagaggtggatagttcctctcaaagaataacattctacgcagcggaaaaaaaataaaagcaaactacggaacaactatggagactccactccacaggcaacttaacccggaccaagcctagtcctccagatcaccttcactgaagtactcctcctctgatgaatgaatattgcaagaatgagcatatgacatactcaacaagccacacagcaaatatgcaagtgcataggataacaaaggacggcataataaagctcatttgcaaaaaaaggccttttgcaaattttggataaacagcattaataaatattatgagaatagaaaccagttgaattattaagcagtattaaataaacaccatacaacacttgcgtgttgcatggg

SEQ ID NO: 49981 - DNA, 2323 bp, Oryza sativa
  unsure (1)..(2323): unsure at all n locations
tagtcccatctaaacagggcattataaacgtttcgtgctatggtggatgggcagcaactctttgcttccacctggatcttctcttgttgcaggactaagcctagcactagcatacacgcaatcaaactgttcacaccttccatgtttcctagcttgttttccaatcagatttactcgaggatcaactaaaggaagagggctgtggttgtgcatacgattggagagtgagacacgcctatttataggtgaagcctatacagatgattatgttattttaattcacaatagttatattgatgatctgtactctgtattgtttgtttagagaccaagccacttacactagtacataatagacttttcgtgcggtcaaaatacattttttccgtgcagaggacctgcccgtctacacccaggtatctacgaaaatccatatttttgcgttcggacgggcggaccgcacgtgataattgattatcccgtgcggtcgtgttaagtagaccgtacgggataattagttatcccgtgcggtcctattatattgacctcacgagataatggataatcccagtcggctagcatgtgctagggcgnctgcccggtataatanattggngcagtcaccntagcacatgctagccgtttggaaatatctacacactttaaccttttttttgtgtgtgtttttgaattgtaaagttacatataaatcattattgctcaatttcatacaataaaagttgctaaattataaaaaaatgacttaatacaagatcctcggcgtcccaaggtgtcttggttcgttccgtcaatgcactatcccgaccgaaccaacatggcacccggagcacctcgtattatgtgatgaattgataagctaggaactaaatccatatataaatgaataattatcaaaaaaattacatatataccacatatcctatatcccaaaaatcacaaaattgacatataaaaaaaattgcatctacatttttgcctaacaattgacatcgcacaaatttgataattggtcatctcacaaatttcataaatatcaccctaagtcccaaatttcacatatcaaaaattgcacatatatataaaaatattgcacatatcctaaatttcacatatcacaaattgcacatgtcacaaattgcgcacatatcacaaattgcacatatcacaaatttcacaaaaaaaactcaaaaatgattaccgccaatggcttgcagaggaggtggccggcggtggaggtcggcgacaccggcggtgagggcgaggaggagaggcggcagcagcggcccaaatcttgatggctagaggtagaggaggagaggtgtagaggaggcggcaacggtggtggttggggaggaggtcgccggcgttaagggcgaggaggagatgagccgacggcgctggtggaggtcggcggcgtcttttggtgctcggtgaggaggcagcggcggtgaaaaactgggcagtgtaggtgcaaatttcgtacgcccgcccagtgcttatatatccatattatcgcctcgggtggcttatgccacccgcacgggataatcgatattcccgtgcgggcagtttaagtagcacgcacgggatgatattatcccgtgcggacggcttaagccacccgcacgcaaaaataaatgcagataaattaataaatcccatctaatatggttaattaatcaatataattattcaaccacaaattaaatatagctatagttaattaaacccataaattatttaactataattctttaactataactaaatatagttatagttaattaaaccacaacttaattaattaatcaatacaattattcatccatatgattaatgcaaataaattattcaaccatagaaatatatttatttaaccacaaatgaatttcaatcgcatctaattaaatcgcttgtatattgatcaaacctcatcttaattattcaaccatatgattaccagaaataaattattcaaccatataaattgagaacgacacatatagtatggataaacatggaaccataagtttgatacattaatcgtttgaagggagccataagttgggtacattaatcgtttacaaaaacaagttgtacacaacaacatatatatatacatatatatatatatatacatatatatatatatatatacatatacatatatatatatatatacatatacatatatatatatatacatatatatatatatactaatgttttacaattttcgcaacaccatcctttcacacggacgaaaacttctcttcgtcaagggttgtctcaattcgcttga

SEQ ID NO: 49982 - DNA, 514 bp, Oryza sativa
aaatggcgctcgatctccactgcactctctttcgcctgcctgtcgtactcggcaatggattcttgcaagctactcctctgttcattaggcaacccacctaggtgtggccagatgatggcagacatatttgggaaggtgtacgccggcgccctgatggcttcaaccattggccccttccccttgccgggttgcttgatagcataacaagtgctctccaacggtcgcagctgtgaagtacaaacagcgcgttagtaaaaaaaaatgtatatgcaggattaccaacgaatatacgataataggggtgcattgaaagctatatagaaatgaaaatgcaagtgcattgttcaggagccctcatgataactttatgattgggttttagtgtacaaatttagtgatcattaaaaatacccgcgtacgccggccccagtgtatgtgagcacatgaatgtttattaatggaaaggaaaatggggaagaaagaatgtgaaacacttacagggaggttgcaaaac

SEQ ID NO: 49983 - DNA, 634 bp, Oryza sativa
tgggcatctccattgtcggtggctggtttgctgatcgccaccacgagcggcgtaccctttgtagactctccaggacgtgcaggttcgtttgtttttaacgcgtttgttttcattcggaatttcggatgatcacccgatcgcttgttctgattccgtgccgtctcaggatcatggtcggggcaacgagacatcaggcgatggtgacatcctggcactgcttgtagcagaggcaacgggagttcaccccgatcgcagatcagagcagcccatccaagcggtggagaaattataagtagtgagggcaactccccacaattgtctcgatgatggtaagaacaagactttccagtccgatatttcatttcatattcatcaatggcggcgacgacaacacggcatcgatcgatttgcgaagcttatgcatcacggcatcatggtggcggcgacggcaccgccgcagcaatcgaaggagcagagaggcggctgcaccacagtgcgccgctacgactcctcgctaccgatgtggaagaagaatgatgaagctcctaattaactagttctttgctccatacagatgcatgacaaatacaccattgatggtggccaacaccgggcagtattcgcatagttgcat

SEQ ID NO: 49984 - DNA, 603 bp, Oryza sativa
gatctctactctattcctattccactagcttaagaacactaaactaacttgagagaatatgagagagctcttgcttgaggtgtgtggaagaagtaaggagatgaagcccttttatagctaaactatgacggttctgacagttggaatggtcggaattaccctccaaccgtcataggggcttcatctcagccgtccagccaaaacctggatccaacagccaaaccaggggcaggcccatccagccaacaacttcgctggtggcctactctactgctcctctccgcagacttgtgaattttggcccaattcgtcgtgtcatttctgagttcttggcccatttatacataagtctgattcacgacatcgtccgattgatttatcgtctgatttgatgtcgattctcctccactttatggttattctctgcaaaaggttagtgaaccaaatactagtggaatattattgttctaaccaaatactagttctcctctattttggtaatattgacggtcgaaactgatcgctaacgaccgtcaacagtgtccctcaatgtacggcttgaggatggcgagttgttgcagcatgccgctatgtgcttccgct

SEQ ID NO: 49985 - DNA, 4084 bp, Oryza sativa
actttattttttttactggcggctatataagaaatttgcttgtgaaatcgtaactaagagatggggagtttagaaataaatattgcaacattaattaacagtacaaaagaatagagaaatagagttaatagttaagtccgttttacccgagttacggtgaagggtgaaatgattgtaaggtggctggcaactcccatcaacatttttgcagccagagagtttagcacaagcgtccattggggcacggtatcagcataagttgaagacttttcttgccgaggtggatgggcagcaggtcgtagcttccacatggaatgtttcctgctgcaggagtaagcctagcaccgcagtaggggcgtagctagctggtggtccatatggacacaggactaccctagattctagcctagagaccttaatccccactatcaaaataaatttctttggccacaaagtttgctaaagcatttcgtatttacctttgagatttatactcttaaattgatttgctcttattcagtctttacaattcatggatcatttgcaaaacgaactatacttactgatatatcatgcttcttaaacttgtagttaacctaatactctagagtgttatatatttgttattgcatttttgtcaagctttgagtttgagtttgtttatacgattagattagagctagctgtctttttttctgtcatggtgtttatgttacgatggtttattcgaattgggcggtctttaacaaattttgtaaatgcatattagatagtatggcgatattaaaattgtagtataataagttggcacaagcagggacaaattttgtaaatattgtagtataacttgtttttcatcattctttttctatctactagggacttggtcacacctatttttttttacttggtcacacctatttttttcctccctcacaggaaataggactacccaacaaaaaaattcctagctacaccacttagcaccagagcacacatgatcaaactcttcgcaccttccatatttcctatctagttttaagtgatgtttactcgaggatcaacaaactaaaccaaaatggattcaaaggctactgctaatttgttgctctcgtctatgcggatattgggagtgaggcgcgtatttataggcgcagccaagcatctcacgaccaagctacactgcatgatgcagtgattatttaactaattggatcattaataactatatatattgtgcgccatatatattgtttgtttgcattagctgtggtacgtagtagctgcccatgtggatcgagcatgtacggtgttctgtagactgcaagttccgatttctgaaatattttagctgcacatgaggtgaacgtactggtatattaaagccatatcttctgccttaccagcatgtagctagtatattactggcctgatatagttagatgtttgttaaaaattttgctgaaaaaataattcaatcactactgctaccacgtaatgggctactgctggcttatcactgccggtcgggcgtgagcaacaccgctggttcatttttaataaaaaagcaatcaattaatcgctactctctcgctctctccaaatatagctttgtagtcttaaattttggaatggacggagtactacacaatacacaataggcagagtaggtaacactacacaaatcattttcctaaacgccggccctgtttggttctaggagggccgtaactagcgccgcgtgaaaaaaactcgaggaccggcgccgggccggcgcccgcacgagaagatgcattatcctgtgcaggccatttaatccgactgcacgcgatgatgtcggtctatgtacactctagcccgaccatgccgcttttattccggcgttttctctcgtaaactttgaaaaattaaggggaaggttttcgacctcaaatctttgattttgatccatatataaggtgtaatgcttgatcttctccttcatttgcttctatttttgttagtttttatcggtgcaatgcgaagaaatttacagttttataaatggagagtgtaggcactttttgttttttatttattttttgagctaatatgtattgtttgtatcacatgtttttcaaagtattccgtagtccgattcctttttaggtttgcctccattaatttaatttgtcattggataaaggctaagaaaatttacaattttttggaaatggacagtttttattattgattacaaatgttgcatgcatgtttaaattctccgtagaactttaatttaatttttgtttagttccctctgtttatttcaaattttttcagtggaattcgacaaatatattaggtttgcaaatctagtaattctaagtaatatttaatttattaatttaattttattggaacccctagaccatgaatagcaatataatgtccgtttaagttgtatttttttcatatgttaaatatagtacaattcgactcatgaaatatgttcttttggtagatggaccagcaaaaagaattcatctggcgttcttgaagaaagcatccaattttgttgatcaggcaaatgcacatgctttgagggagaacaagagggacattttctgtccatgctttgattgcaggaacgaaaagatgatgcaagacccaaatgatatttgcacattgtagagcgtggatttatggattattacaagatatggacttttcacggggaagtcgcgggtcgtaacgaagaggctgatgatttttgctttgatgcggcaaaaaattttataatcgaagacatgtcacagggaacgatcccagtgaacgtgcagagatgtagcctagagggggggtgaataggctttcctgaaattttctcaacaattgcatcgggtcaattgacagggcccggaacctcctggtgatgaacaccggaacttccgggcagcatgagtagcccagaacttccggagttcttgagccaggaacttccgggcagcagagataaattaaactgagatgaaaaacaggtcctagcaagagaagtttaggcacataggggaacaagataaagatcgcagaatatcagcagattcacacaaagatcatgcacaagagagacaaagacgattttttcccgaagatcggatcacacgaatcctactctccgttgaggtgctccaaagagccgggtctcgattaaccccttggctcacttatgcaaagatcccagaagagatccacaaccttcaactcaacacttctaggtcattttctagaattgagtgaccaccaagatccaactcaaaatttcttctagaaaagaccacaagtgcaagttgctctgcctaggacaacctctgaaaactcagcacaagaatctttactcagttacctcgtttccttccggaggtgaggaaaatcttcacaaactttcccgggacatccacaagatctttggaagctcacgggaaacacctaaccgtctatgagaagatctccaagagtaataagcccaagtgacagctcacaaggtatccaaatgtcgcgaccgggaaaattgccttttcccgaacgctagtgtattaatccccgtcccaggaaaagccggggtacaccacacaaacatgatataaaagacacatctttattatatcgataatatttacattattacaaaggcacttaaggcctgacaatcaaaaataaacagcagcggactagcgggcctacggctccatcttcacaggcgctcaactggggtataagccaggactccacctaagacttcttctccaaagcttctcttactgaaggggggagaaagatagagcaagaatgagtacaaccacagtactcagcaagccacaccggagatgcataattaatgcaagggagtacaaggggataataatataggggttgagttttgcagtaacagcctttaaaagtcacttaggtgcccaaagccattttataaagacgatcctagagctacacagtattattaaacaaggtcgttaacccttacgaacctgccttaacccaaagcctacgatgattcaaaccgaactgcaaccccaccctgggtccc

SEQ ID NO: 49986 - DNA, 1914 bp, Oryza sativa
catgcctacattattaaatactactctatatccccatggatgacatagagtaatcgaatattcagaccttaaacccacaccactgcacctctctggtaagctaacccacaattataacaacatagatataaagtagaacctatactcagagaatgtaaactaccgaaagtatatccgctatgttgtattgatctgatgatatggttgtgaatatgcctttggagggctcccttcccatcttctacaggttgggggcagggttagaacggtaggaatacgacatcagttttcttcatctactttacaattttaccaaaccaggactacaggtcgtttccttgatacacaagcaaacgtaatacccgaggcccctataatcagtcggatagcccatccatctacgtatatggtaccataatctctacactgacaatttaaaatacatagatccatcacaattaaggtaaaagaaaagcaaaaaaaaaaaaacacaagtgtaagaatatatggatctaaccatggtcaaatgtttactttagcaccacattgtcaaatcatggcgcaattaggctcaaaagattcgtctcgcaatttacacgcaatctgtgtaattagttttttttgtctatatttaatactccatgtatgcatgtgtctaaacatttgatgtgacagggtgaaaagtttttgcgtgggaactaaacaggtcttaactcatgaggcattggcgtaaaacaaatgagaaagtttatttatttgccaatgatatcatcgcttatcgtatgctcatgtcctcaggacaagacaacatattgcaattatcatggcttattggaaatacaaagagacacaaaacaagagaagttgatagcacactggcttggatatcaggatatccaacttatttatgactactccaggttcatagcctcgtatgggcttcgatgtgtgtgaaaccctttctggttgcatgttgcgtttgattaggacacaacggtgacagtctgagcttcatttgtgcagaagcgatcgcatgcatgctcgcaacgctccacggcagcattcactccttcattggcagcaactgaaatgaaaaggaaaatgatcgtacgcattggcctttttcgttgaaaactaatggtgattcagtttcatgtttttccagcttacaagtgtttatcttgctgcacactgaagaagtacatcccagcttgcagaagtcaagtacatctgatttctctgcaaaaccatgcatttctatttatattatagtaaaactactgtcgcgaccgaaaaaattaccttttcccgaacgctagtgtattaatccccatcccaggaaaagccaggtacaccatacaaacatgatataaaaggcacatatttattatatcgataatatttacattattacaaagacactttaggcctgacaatcaaaaataaacagcagcggactagcgggcctacgtccatttcacaggcgctcaactggggtataaaccaggactccacctaaaacttcttctccaaagcttctcttactgaaggggggagaaagatagagcaagaatgagtacaaccacagtactcagcaagccacaccggagatgcataattaatgcaagggagtacaaagggataataatataggggttgagttttgcaataacaacctttaaaagtcacttaattgcccaaagccattttataaagacgatcctagagctacacagtattattaaacaaggccgggaccctcaccaaccttccttaacccaaggcctacgatgattaaaccgaactggcaacccgaccctgagtaccagatatcccaagccaacccaagccaaccattccacattttagttgttgagcacattttaaagaatttgaaacactgacttgggtaca

SEQ ID NO: 49987 - DNA, 1042 bp, Oryza sativa
ccactggcatcatagctccgggacctggatgttaatgccatagtcaagctcccaaatgtcttgtattatccgtagtatgacttattctcccctattgcgtccaacgcctccacacgaactccactattctaacctgcgcttttcttgtccttgcctatgtgtaaaacataaatccgccgatgtcgtacaattgccatgagttcatgaggctacttgggccagttgccagccagtgcaagcgattcaccgaacggcaagtttttttccttcaaccattcaggaaatttgcatttatgttcctttgagatccaagtcgccgcccttctagggttccaggctcttatctcgttcatgtgtctgttggtatttcttaacgacattactagaaatataattcccagcaatggcgcagaaatactcctagtatattatggttacaaagttcatccgcaagcgcacgaatataccattgtagcatttcacccgagagtattccaagtgtatcgtatttatttaatccagtggcaagatcatggtatagagaacttgactaataatttatttgttacttgtaatagtcatagtctaagcaggggttaagataatctaagggtacagtgacacacaagcagactactcattctcatactaaattatctaagctaagtggaaagaaaagagaaagagaatctattcctatacttctactatacatagtatacatacattctagttatttgatatactagctaataccctctatctgatgccctcctggtactttgagaagccacccctgacgaccaagctccttacgacagcccgtcatgaccatacaaccggggctaaatacggaggagtacccttcccaggaaagtaacttaggactatatacacgcctggaggaatacccattctgagctgtcaccatcagcggcccacctctcatccgcagcatataaccataatgataccccgtaatttagacaccacgtctaaactgccagatactactctaatatcatcgtcatggcatagagta

SEQ ID NO: 49988 - DNA, 724 bp, Oryza sativa
ccgggagggggaggagaggccctggagaggagggaaagagagggaggagagggagactttgggctgggccgagagagagagggaggactttgggccagacttggcccaaagggaggagggggattatttttaggttttctttttaataaactttgataattgtttttggttgcttaataattatttccggtgctctgaaaattcaagtaaaatttgagggctccttttagaccaaggagaatttaacaaaaattctccgggccacatttgaatttttcttgtacgtattttagtgtttgccaatttcttttcgaattttaattaattctattattccttttagaaaatgatttttatttcaggatgaatttatcaggacgtgacaactacttgcacgcaagaattattgagccaaaaatattgcgactttaattaacagtacaaaagaacagtgaaatagagttaatagttaagtccattttacccgtgtcagagtgaagggtgaggtgatcgtaaggtggctggcatctcccaaaatcaattttgcagccagagagttagcacaagagtcatatgagccacccacgaaacggcatgaggtatagatgtttcttgccgtgctggatgggcagcagcccccatcatagttaagggtgaggtgatcgtaaggtggctggcagctcccatcaaagtgtttgcaggtagatagtttagcacaggcttc

SEQ ID NO: 49989 - DNA, 749 bp, Oryza sativa
ttgcaacagaggcccgagcttaatccttatagtacccgaggtacgactagcaaaacccaaccacgcacctcgagcccagcctaaaaccaatttggggattttgaatagaaggagcggtgtgaagccaattccacaataaccaaaccattccatagtgtccaggtgatatgaaaattcccaaagtctaaagttataaaattacctaatgttgcctaattaaattgcgaagcatctacctaaaattaaactagtggtgccatgagtagagtgtccactagttggggttttgtttactctagggtgaacaaggaaataataacaatagcaataataataaggtcataacaaaggtaaataggcatggctaaataaaacagtgataacgcgggaatttaaataaagcgataatgcattaatttaaattaaaaataattttgtaaactgggattcaatatgctcaaggatgatgtgacttgccttgctcgctttcccaaatgccggcttcaacttccacgaagagcggatcttccgaagctgcagcgtctacacgaccgacggaaaagaaaaggcttttacgctaataaactccacataacagcagaaaaaccaaaaaaaaggccaaacccaaaaaaaaaaattggggggggattcttgacttcttaaggaaaaattagagacttgaacggtccaattccgagttcaaatggccaagttatggccatttgaagttatatgctctttaaatggat

SEQ ID NO: 49990 - DNA, 2002 bp, Oryza sativa
acagtagtccatcagttaagtattggatggatggaagttgcttctatctatactataaaaaacccttgtagctgattcggtgtgggttgttgcgcccctcgaaggtactcttggcagccaccgtgtattgatctgatcgtcttgatcacagacactgaaactttatagcggtgactttttccgtggattaatttgttaaatcaaataccacatatattaaggtaaggtcaggaaggctgcggcttccacttgattggtactccataatagtgccaagtaaaatcagtctcactctgtagtggtagttgaatgaagttcagttccttatagtatatgttgggcttttcagatttttgtacttctcattctgcaaccaatcattctacagaagaaacaaatagcacatatttattagtctgtagagaaacttgcctttgcaatgacatagaaagtactgatcaatcaatacatagtgtaatgagatgtatatataagatagggcctgaatgtgtgggaagtaagtggattggacatggtctgaatcaacgattagaaaataatgttgggaagataacatcaaatttatacagatattttctaaagctatgtttcttgacatcacttgttctggataaatatgtatctcacattcagtgatagcatgtttatctttgtctcttgctgattagggttgcattattttagttaacatatttcctgtacagaagagatactggatggtatatttatctttgcctcttgccgatcagggttgcattgttttgattaacaacatatttcctatatagaagagatatgtaataacactgaaactcattaggtctttatattaaaaggacatatttcttagaagagagcttatctaagcatggaagcatggttgaggccaaaaatggcattggaagagagcttgtctatgcatggaagcagggttgaggctgtgctgtagcatgtaggttgacaacttgacaatgttaaatgaaggttgtgccaaagtggcggatgctacgacgaagcaaacatattaaaattaataaagttgtagcagtagaaagataatatgaggtaatactgcatttctttttttctgtacacatgatgactcaactataatcaaaggatgtagctggctatttatacttcagatggccttgatagaacttttggctcgcggaaggatgtatgccgctggaaagcagaaacgcatcaggaatggcttgcagcttgctgacaaatacttagcttgaatgcttgaatcagcgataaccaaaagagtattatagtcacggcggtatttgataatgcaaatcaaataatcaaaagacaatatatgtttcagtaaaggagattgatttaagacatgcaaaagaagtaataatgataagaagagttatatattttgttgttaatacgtcctgttataaatatttgaggtttactctccagcagggtttacaagaaaaatcaaacttattagactggcaaaaatgtttggttttgtgttttcagcaagtttaaaaattcgaactgactttaaatttttgacaaaattcaaccatattttaccagaagtcaatgttttttttgtagtaatcagttgggtcgttaacggtgcatacttaccaaaaaaagattcatacttgtctatcttaatttcttgaggaataactcaaccattcttttttgtgtggatatgcattgtcctcatacagtgtatattgaattgattagatataatcattgatgatcttgaataaataattttaagttatatcataatatttttttttgatatatgaccttcatatagtgtatattaaattgattagatataatcattgatgatcttgaataaataattttaagttatatcataatatttcttttttatatatgaccatggactgaaagcttaaatggacagattctaggaaaattattttcattgcagtcgaattttaataacttattaagaaaaaat

SEQ ID NO: 49991 - DNA, 1095 bp, Oryza sativa
aatgtttctacttttcagcaatttggctactgaaacagaaacaaattatcaacaattccttctcagatatagttgtaaagatatttatgcatcatggttcaattgcaccttatgagtattgacatgaaaatggataagaaatatcttgcagagatgcttctactctgagtagcagcagacgtttacctgcatgataagcttccgcatccaaccagtagatgaagaaacacaaccaaattccactgcagaaatcttgcgtttgtagcaaaattccacacacggccttctacatattacttttggtgctcctcatatgcagcaggtgctttatatttcccttaaccagttgtcctggtaaaaagcaaaattaagacgccacaacatctagtcatatgtagataaatatatcattttagccaactaaaggtttggataaaatatcaagcttagcctacttaatcatggaagaagatttcagattcaggaaacagtgtttcttttacagtgagcaattgtgaatttagagagaacatgtaagcagagtctacttgccaagagcacctatcttatcataacagaagcgattatttcagaacatacaaccgtttacacgctagaacacctatcttatcatagtagaaatgttttgtgggcaaacagttctgttcttcagaataatgggatattgtgttgaatttcccttgaaacagttttgatgtgtgaaacagcagtacgctggaacactgagagcctaatgcggtactacttgcattcagacaagcagccctgcaacaagaatcttgtgtagcatgtagtaagaaagcacccttaaaccaatgcagcttgcagcgttaacctaataaagttgtgcaaatgaatgtcaaactaaaagattacaaagatagagaagcccttatataggcacaccgcacacatctacacttgaaatatattctgtaattaaatctaaattgatacgaaagacagagttgctcttgctaaaagattacattacattaaccttaatgtcttgtttaaatctgatgatgcagatttatagtgttcacatgaactggacaatacagcttgcatgcc

SEQ ID NO: 49992 - DNA, 657 bp, Oryza sativa
acaaagcacttccctagttagatgtaggttaaacttcccgttcgagaaactctaacttttacctgccctcaatttatgcacgagtaatgaatgcccctgggtggaagcgagaggggaaatggaaggtcttagttcggaggtgggatctctacctgatagttgcattgccattcatgatgatcccctggcattcgtccattcagccattcaccattcacccattcaactggaattttggttgaatgccggaattgtgtccacaaattgtggatggatagttggttggctggctggatggctggctggatggctggctggatggatggtgaatggctggcggcggttcggttgctttgaaacatttgttgctatctaaattccatttaaagtcgtaccttatcgcccagcatcatcttattctctatttgaattccctccatctttcagatacggatgtagccttggatgtgcccgtgcccaatgaaaaggaagagcgcaacatgaaaacgtaagtcaaaaattaccggacacccacccagatcccaatagaatccgccaaatcctgcgggaaattgaatcccattcacaaactcctacatttaattaacaagaaaacttttgtatttatctacacctggattatctccacctttcatt

SEQ ID NO: 49993 - DNA, 637 bp, Oryza sativa
agatcaacatcaatatttaacctaatcggctaccctctattaacagatgttaaccgatggtaggttagatgatgatattgctagagattatgtaagacatatgataactcgacgaattacataaacgggattagagtatcatacagatggaagcactaatcctaagaacgcaatccgtcataacgaattttacctttgttgaagattgaaatcgatgcagctcaacccgaaagcaagaactcgtcaaaacaaaactaaagcaaaaagggtggcgatgcgccgagattgtattgaacatgtgttgttaaaaattacatagggctcggggtctatttatacccgagaattacaagatatgcccataccggacacgactattatctctaacaaactctaagatatcataagtctttgcggcagacttttgcccatatttatctataaggaatttacataagatatcctaattaatagatacaattgccttcccaggactctatccgtgcgtggcaatcatcttgaagcacattaacttgaccccgatgtcgtgtacaagtcgtattgtccgaatcggctgtatcggcttacttagcccgactcagacccagccgatcctaaccgtagccgatctggactc

SEQ ID NO: 49994 - DNA, 707 bp, Oryza sativa
  unsure (1)..(707): unsure at all n locations
gagaaggaaatatctatagtatatctggtactgcatccatttcatattatagggccggttcactatgatgccattttcatctcttaccaaacctggtaaagatacaaaaaaaagtggcttcatttagtttgctaccaaattttgctaattacataagacatcctggccaaaatttgggcagctaccattctggctatgccaaaatttggtaaggatgtttttcggcatcaaagcgaacagtccctataagtcgtgtaacatgctcctttatcaagcatctgtaagtttatttttggtgaaacacaatacaacacatacgctgaccgcttctataaacatacacactgtgcctatgagcactctattaagtttgatcgagtntatagctaaatataataatgtttttttcattacaaaacaacacattatatgagaatatactcaacgttaaatttaattaaactagtctggtgtcgtggacattactatcttttgtataaagctggtcaaacttaaagaactttgattaagaaaaaaattgaatgacttataatatacaaagagagggagttcaatgccgtgtccagtgagattctatatatatccctatagggatttggtacatgagttggacgtgtcagtcaaaactatatgctcgttaggcgtaacgatgtgtcttatatgttgacaccagtgctctataaaga

SEQ ID NO: 49995 - DNA, 638 bp, Oryza sativa
gcccggaaatgcaatggatctggttgagccaactctaagtttgttggggggtttttagtaagaacatgggatgctcatttgttctttatgtaaataaatccttttcttcgggatgagctcttcagaaaatgaggcggctcttcttttctgcttacgcaaagggcctttaattctgtgtcatacctatatttaatttgcaggtatgcggtacgatcaaccaatgcttcttggcggactaacgatcatttgggtagaaacgaatcgcagaatatatgaatacatcctgttctcagattactttgggcgatactagttattttcatgactcatcatatcactttctggagatgctgaaacaaacatccactgtctagcagaaagatcaatcattcattatttcacagcttactcctcagcagattatatcccttgtcacagcttgcaatctttgctactctgcacatatatgaagaaaactgcagctatttacgcaccatgattggtggaactttactgcatagaatttggtgtgacactaggtaacgaacgacatagcttggcaatatgggacgggtatcatttgctcattcagataggggcactacgccctaccgacattagtgaagcttgatttagct

SEQ ID NO: 49996 - DNA, 2589 bp, Oryza sativa
gcctctccccctccccccagtggcccgcctcccccgccaccagtcgctgcccgcggtagggcaggtatgccgccgcctcgcctcggccgcgagatcgccggtcgctaccgccgccgccgccgccactcgccgactcgcggtgcgagagggaggagaatgagttggggagggggcgggggggaggggtggggagggttagggttttgataaggccgtgggccgaccggaagggacggaaataagtctattttaggtccctcaggccggaaataagtctgtattaggtccctcaggccgaaaaaaaaagagaagttcatttttagtgcttcattttttcagaagcatttataattatagttattaaatgtgtttatttctaagcaaacctaaaaggaaggattttctttctttttccaattaaataattattaaatgatatttgtattattaaaattagcaattaagttctgaaaattccaataaaattccaaagagcgtaactaatcatggagaatttaataaaattaaatttaacaatgtcattttatttctcgtacttgctttacttgtaaatttatttaattatacacatacctacttaaaaataccaaatatttcagcgaatttgtattttaattaatttgcatatttttactgatctgtgcgcttcccagtgcaacgcacgggcacttttgctaaactaaacaacaattttggtcaatatacacactccgtaatcacccggtgcaacgcacgggcacttttgctagttatttttatattcttttattttgaaacagaaacgaatgtgcaagaaacaaaaaaataaaaattattgaatacagatatgggatgaataagaagcggaatgaatactttcacggatatttgttggaccataaaaaccccttacgaggcttccgaaatcaaccgagagataaagttcgtttaaattttaacaactctatatacatatagaggtattgtatggacatatataaactaatagtatcatttggttttattacaataaagatacacagttacactaggcaccataaaaagctccaacattaataagaaatatcaggccattataaacatatcatatttgttgacgtcgaatcacgccatcacaccttgagcatgttatgtgcaacctgctgttaacaactaaatttggtaacatatgtgtcaggaaagaggatttgatcaaagcggagtcggaggcggagatcgggttcaaaagcagagcagaaatcggctggagtccagatcggctacggttaggatcggctgggtctgagtcgggctaaataagccgatacagccgattccgacaatacgacttgtacgcgatatcgggtttaagttaatgtacttcaagatgattgccacgcacggataaagtcctgggaaggcaattgtatctattaattaggatgttttatgtgaattccttatagataaatgtgggcaaaagtccgccgcaaagacttatggtatcttagagtttgttagagataatagtcgtgtccggtatgggcatatcttgtaattctcgggtataaatagaccccgagccctatgtaattttttaacacacacgttcaatacaatctcggcgcatcgccaccctttttgctttagttttgtttcgacgagttcttgctttcgggttgagctgcatcggtttcgatcttcaacaagaggtaaaattcgttatgacggactgcattcttaggattagtgcttccatcttcatgacactctaatcttgttcatgtaattcgtcgagctgtcatatatcttacataatctctagcaatatcgccacctaatctactatcggccaatatctgtatgcagaaggcagccgattaggttagatcttgacgttgatctagattatataagatatctaccattttacgaaacttctagcggcttgattgtctagatatcgttcttcttttcatacttaatgctgcatcagttgagtttgatctattaagtcgtgcttagaatatcgatctctagcctgccttctagttgccgattagaatagcatcggagtttcagccgatcgtatctgatttagctatatttattctatatgcctcattgatacgttaaatatgccctttatatcaagatattgctgtatctaaatatgttaggcctttgtttgatatattattcttgctttaatatcctgacatagagtagtatcggagtattagccgatacatgatagatctacctgatcggctacgctataaacatatatagtcctgttattgatatatatttcgatctaagtgatttatactgtctcggcatgatgaccgatctatcccaatcacttgatttaagtatacatcaatataaggagtatatatcgttaatatctacagccgatcgagtagatttagttcttctttacttattcatgactgccgatcgatacacagatgacatcggcccaaagataaatgatatgccatcggcatctagccgatcggctatgatttatagatttaaccacgggtcctttgcttctatttcttgttgattacaggatcaaat

SEQ ID NO: 49997 - DNA, 2446 bp, Oryza sativa
aataagtaaactctaaacagtagggtcaaattggtagttagggtttaaaatggggtcaaataagcaattgcccatttagattaaatgcatatttatgactgaagggagtaatatttatcttgtggctacgtacacttttagtagccacgttacgcaaacacacataggccctagtataaagttacagaggatataaaatttattctcaatccatatgtactagtttatatcgtgagtctctgtctattactttctaggtgaactggacaggcaaccaaatggcttgctcgccaaagcttaatatggggatgatattattataagtcaattacgaccactagaacggtcattcaagtgatattcttataaaattgaaaaaaccagtggcaaattcgcaagttcccatgttgttattggtgttattgacagaggtaataagtagttaaggtctaaaacagtaccacgtgcaaccagagactccctaccgtaaaatataggacaacatatattttagtcaaaattttataattctaaccattaataattcttaaatgcttattttaaaaataaaaagaaataatatgcatagatttgccttgtatactactgggctgaaattcttggagagttggagggttagccctctcgaggttttcaaaatttttgtgcaataacaaagtaataatcttaaaacaaccatacactcattaatactcctagtttttcttcgagctccatcattgaattgtacaataacatggtaaacttggtccataagctgtgtgtacgtatatttagtaccaccttactagttcaacatataggatcgcacaagatcaaacaaacctatgaatggtaggaaaaacaaaaaacccaaaaatcttttgtggaattaaagattaaccttgaacagagtagatgatgaagccttgtcactgccggtcgaaccgcccgaacacctacggtcagaccgctgctatcccatcggtcagaccgcacgcacacctgcggttagaccgtcgggacccagaaacaccggtagatgacaatctcgaatatgtagattagaacttttgactttattgcatcaactagtgtttacaaagtgcaccaacaacactcctcaccaaaatctcgaactaaactcgaaaccctaactttctctcaactcaagtctctctaaaatcgatatcgggaggcctcaccctccctctcattttatacatgaggtaggctgtgcaaagcccacgaatctaacacaatttaggactcctaaccatgtaggaaactctctcttgcaagtatccaactcatctctttccttatctcagtcaatcttcccgaatccggattcccttccaaattcgactcctctttccatacgtacacaatccctcttgtataccatatgaatttcttcatcaccacgtgtattgtgatgaaaatatgaacaaatggtttgtggttcataagagttgttcatacgaatttcttcatcaccaccttcacaaatccctcatttgtgtagtttataagagttgttcgcacatgtttagtgccacgttactagtttaattagcaagagtgaaaccaatttataagatcttgtccctccaactatatcactcccgagttaaccattttacagaaaacaaggaaaaaagtgtaagtgatgtggtatgtataaatagatccgcccattggatggactggggcatggcataggtagactcggtgtgaggcacatggcacggatgatttgtcctgtatggcacataagagttgtgtgcacatgtttagtaccacattgctagtttagtaagggtggaaccaatttataagatcttgtccttctaactataccacttccgggttaaccattttgcttgaagcgactcccgggttcaccatcttatacggagcgtggacgtaaatgtaagtgaaatggtatgtataagtgggtcctcccgtaggatggattgagctatgtggttctggagtgcaagctattacaactgattatctagttttagcaagttttatcttaaataatatttatgtctgaagggagtaattatatatatgttggatcttggatggttgagttgtcagttctgactccattcattgtgtggctacaattttcgtactcactttatgcaaacacaaatgggtcctagtataaagttagaaggttaatagatttatccacaaaccatatgtattagggtattatatcgatagtctatatcatttttattacagaggactcaatagaaaaaacagtagtggtgaagtataagtaattcccagctctacatcatcaccttaatattgctttttcgtgaattggttagcataaataatttaataattgtttgttataaaatatcatttagattttcaattatttgctattatcatgtaggtatcacacctgagtcac

SEQ ID NO: 49998 - DNA, 541 bp, Oryza sativa
tgtgaagctccgaaatttcacaaaaaaatccggagaatatattaaggttcccggccatgatttttaaaggaaattttttaattccctcattatttcacttgattaaattgttttaacttttatttaatttctagaaaatgcattattcaatgatttttaatcccgaacgaaaatcggggggttacacgtgcgccgggtgctgcgcctttccgccacgcctgcctcaccgacgcttccacctctctaccatggccgccgccgtgcgcgcctactgccggcccatccccacgcgccgctacccgcctttgcctccgtctccgctgccggctgcacgagcgcgccaccggtgcccgagtgagccccgccttccccgccggccgttcgcgctaccttctcctccgctccgccgacggtcgccgagcaaccgccgcgccgccagcacctgagcgtcgtcctcatcgtcaccatccactcctccattgccattctcaatgccaccgtgctggtgagctggtgaggagcggcgcggcagtaggatccc

SEQ ID NO: 49999 - DNA, 556 bp, Oryza sativa
cgcgctcctccctcaccagccgccagccgcctcaccccgacgatgacgcacggtcacggcaatggcgccgggcggcacgtgggggaggagggaaggcagacgaccaccggtcctccccgcgtgacggcagccatcggcggcgctcgccttcccgtcccggtctctcgcaccgtcctcgatttgctcccctccccttcccctgccgaccgccgttcccatccccacccccgccgctgccgccgcccacctcgccgtctccacgcccgacttcgacgccgcggtgggggcactctttgcgcgccttagcagccgtgcgcgccgtgcggtcgaggagggtggggccgccgcactcgccttcgacgaggccgatgccgtgctgtcaccgccgtgtcgcccgccgccattcctctgcctcgtgggcctcgtgggcggcggccggcggaggagcccgcgcgccgctcctccccccgtgcgccgttcctacccccacgttgcccgtcgacgggtgctgcaccctcctcgtgccggctgatttagagaagggagagagagagat

SEQ ID NO: 50000 - DNA, 2956 bp, Oryza sativa
ctcaccctgagtccccggccgaaccggcaaagggaggcctgcgcggtctcccggtgaggagccccacgctccgtcacagttatttagaaagtaggtaaaattaaatagggagatgttctgattagttgagaagtggagataggtgagaaaagtgaatggttaggaaaattttttggtggagagattattatattttaggataaatcctgagtgctaaaggttgttatgtcttgagaaggagggagtacgttcttacatgaacagggcatggtgtgctcatgagaaaagatgggtaaattgtggcacgcttgacgctagcaaggaagctatgcgcagagctcgtccatctcccgcttccctcctcgacggcaatgcaacgtcggcaacagtgaacacataggatggatcaaagctgacgtcataccacctcttgttatcacaccgtcatacatccaccacatgctatgagttgattcagacgaccccgtcaactcatagcaacactgaacgacgctcatcatcgccatcagtgatgcacgaggtggtgaggatagagtttctcttgaattgcgcagcagcagccgctgcacatgagacgggtgaaatatgaggtaaggggaggacctgatttttcgacacccgtcaattgtctccaaagcattttcctaggagttgtagtaacaagtggaattggagctctgaacccttagcagcgtaccattttacaaaatggagtactccctcagtcctaaacggttgtttatttgaagttcaaatttatcctatattacctgtattttaaaagtgctagtatttgtcaaatcagtcatctccaatttaaatttctatatattttattctcacaactcttttgcttccattcaaataggggttaatatagtctttatttctcaaagcttaatttgtgctaaacagtataaaaatataagcattgtgtgacggaggatgtattttgtgcggagccgcggagtatagagccgtcaggccgtgcgtttaatcaaatcaaacctaagattagcgtactgccatcgctcgcaacgaagataacctagctactcccccatctacgcgacacgacgccgctgtctccccacgctgcacgagcagtcgttccctcgtcagataccaccaacgccaccacgcgccccgtgcgcacgctgctgctagctccagtgttcgtggtggggtccgtcccgtcgtccgatgcacgcaagggctaaacgctactgcatggctctactcctactgcacctcgacgtgctagcattgctaggatcagtagctcgtgtcctccaatatgtcttgctcgtcttggctaagctacgtccttttcacaataagttcttatttattccattttataaacaattttaaaatatttttaaataattgttaaactggagttcgtgaaagtacatgataaatatattaagagtagataaagtgaaaataaatatatttgagatctgacatagtaagaatattttaatcctttttagttttttttaatttttttagtccgtaatattagtaagaaatgaatttattttgagacctcgcagtatggcaaggcgccatgaccgtccgcccccctttttacggctgatgacctgatgtagcgtgtacagataataaactctagtactcctaccactggctactgctcatctattgctccagtacgcagctatgctagcgccgtagtgtacccagcagttactaccactccactcctaccgttgatttggtctgtgcttccgtcacactcacatggtcgtgtagtggctcagcggcattgagcagcgaaaggtgcaccgtggacggtgccggccttgaggcgccgtgcgcaggcagccgtccggaacatctgaacatacgtgtggtcgaacggtgcgcggtagaattgatttgaggtgacgcgagttgtgggttgaggagcaagcggccgaccgtcgagtttaaataaataataatttataaattttcgtgtcacgacccggcttgtcgtatctaaatatataaataaatgtatccgctaatcaaaccgacggattacgcattatttttatctataaacgggttcgcgggtaaacctacttgcacccttatatgtgggtgaaacggagaacgggcgtactccaaccccgtgccgttgatcgtgttaacttgattgatcaacggccaatcacttgattgatcaatgaccaatctgtcaacgccatatagtagtgtagtactaaaagcaaccgagtcctactccaatatcagcaatttccgtggaaaaaaaaaacttagtcctactctctccgttttaaaataagtgcagttttgtactattcatgtctcatgttttaccgttcgtcttatttgtaatttttttacgattaatatttttattattattagatgataaaacatgaataatagactaagggtgtgtttagttcacgccaaaattgaaagtttggttgaaattaaaacgatatgacggaaaagttagaagtttgtgtgtataggaaagttttgatgtgatgaaaaagttggaagtttgaagaaaaagtttggaactaaactgggcctaagcctaacttattttaattttcttataaattttttaaataagacggacagtcaaacgttggacacggattctcatggctgtacttattttaagacggagatagtattataatacttgtctctctggaatttaaaaattgtcctaaaacaattgtcacttggaaatacttattgtcacatcaaccacttccaattcaaatttctcccaatcatacccctaaaccatcatgccacatctacctatataatattttattaagggtattatagtatttttcttttaaccttagacctataatgacaaaaatattctgggacaaaggttgtaatcaattttattacgatacactagtac

SEQ ID NO: 50001 - DNA, 1572 bp, Oryza sativa
cccccccccccccccacgtgaggcccccaccatgacgttcctcgtctcactgacacgccgggcccaccccgcggtgtgccctccttcacccctggcatccttatcctgtgcctattcgacacgtcacacgtgtgcggcgcctaaatgacgcaacagtacagtggctagctatcagcactgtagcattctgctttcatcgatctcctgctatgtgagtagtaatagagtggtactagtagtaggtcacaattcacaagccatacatatgagtatattgtacaataatagaccctgtttaaatccttcaaaatagcaaaagttttatcattttaaagtattttttgttatgttgaatctaaacattaatagtaaaagttggcaatttgtcatttgccatttgctaatttatagtagcaaattgtgtcaaaaagtgctttgggaccactctctctttaaaaaaaatgataaaatgataaaagtttaagcatcttaaataccatacttttgccattccaaaagtatctatagatgcccatggatgcacgcagctgggagctgtagatgctatcgatccccctgcgatctcgatccgattcctcctctaatttttcacctgtcatgaagtccgattactgttccctttaatttccctccgcttccgctgctgctgctgctgcatgggcgttcgctttcgtccgtcgacgcctgcgacaagcaaaaaaagctcagcgcggaatacggcgggagcggctctctctctctctttcggatgccttgctgaaggcgggcgaggacggccacggccagcgtacgaaccacgcagccgtctctgcgggctgtgctgggtacagtgcgcactcgcgcatgcaggcgcgcagaggcatatgcatgcggtaacatgacatcacggccgcgggccggggtcacgtgagtagccgaacgaggacgtttgggccggccgcacggcgctcgtttttttcccctgcgggtgtcaggacgggcggcaggcaggcaaaggcagcgagccgtatacggcatggggaaattatggcacacggccggccgctgcctgccgggcgggtccgggggggtcgcggcgcgtggcagtgcacggcgcgggcagcggcaagcgggcaggggtactggtactactggtacgtgcgtgcgtgcgtgcgtggggcgtcaccggaaaagacaagacggaggcgatgccgtaccgtacatggtaggcgcgcggtaggcactatacggagtaaaggtgccgtggcggccgtgcgaggcggtttatttgaatgctgtgcggcgacagtacgggtacaaggcttgaaaaaagcggtgctaacattgattaggccaggcgtcctgtgaatctgggttattagttcggtgaagccgtaatgtttgctctgcacgttccattcgttaaatcttttgctttttttttggcatgattaaatctttcagttgtctgtgcaatttataactgtctactagcaccgcaacattatcttcatttgaaaaggcgagggtaacataaaatgctgcactgacagggagcatcacaaagaaatg

SEQ ID NO: 50002 - DNA, 616 bp, Oryza sativa
ataataaagaggccggccggccggccggccgggctggagcagtactaccggtctagccggtccatccaaaacagcatgggcatggctaccctatacagtacacacgcacgcactgtgccaacgcctttggcctttcatcaatggtacgcctcttcccaaggcaggggtcgtcgccgctcgctgcgctgcaccatcagcgctcgacaggtcctcccgctgtcccacccagcagaaggcagtcaagcctcgcgcgttcccaaggccccccccttctctcccttcccttcctcccgctgctgctgctcctgccgcggcagcctagctagctgcggccatgccatgcccgtctcttccccaaagtattttttcccacattcaattccccacgagatttggacgggtcgagccgatccatcgtcgggtaggcgcgagatagctactgctgcccgcggcgctgcgaatctactccggacgaggagtaatttggagcgtgacaagcggctggctacccacccaccgaacggcgtgcgcgcggacaacgccgtgccggataggccacccacccaccggggcgcgccgaggcgactgctactgttgagcggcgccgcgccgcacg

SEQ ID NO: 50003 - DNA, 717 bp, Oryza sativa
tgcagcccgaactgactaaatgactgaagaccgaatatcgagaccgggatttggtctgaccgaatacccacccctacaccacagtctaagtagaagtactataaattttcataacagtagagaaaaaatgttatgttcccacacgatacttttttttattattttgttgtagggagaagccgagtactagtgttttattctccacttagtacccgaaacatgtaaataacattatatgtaacattttgatctaactaattaaacatactattacctcggccccagaacataagaagttttattgttggacacagtttgtcggtgacatgggaccgggagtatcatgactagaggcttgaggcagacacaatcgcccacgtggcctgtcaccctcggggggcgtcgggcccgagggtgatgtgttcgccctcctctttgtctccccgaggggtcggaccgctcccgcctcggccccgagggccgaggtgccccgaccccttgtgggttttgcgccgcgtatatgaggtaggtgagcatagcggggctcacctaaccacatttattgcggtttggacgagcgcgtcacgccgcatgtaacgcagtgcaccgcgctcgtttatccggtcagtgaccagtcacagaccgatcagatcgtgggttaggtggcgacaggcggtctgacgcacgcctcggcccatcccgtcaggatgagagcct

SEQ ID NO: 50004 - DNA, 578 bp, Oryza sativa
actggcacactcgcatctcatcaagatttggacctgcacaggagctaagcagatctcccaggccggtgtgttcgaatttttcgtcaacacaaattggcacgcttggtgggaccacgaattttatatccacatgtatgaagaagaagtcaatgccaagatcatggtcacggtggagaatttaatggaggaacaacaatattggctcggggggcaagcgcatcagttttagcatggtggagcacatcagtatcggctcatgaaactgttcaaaaaaatgttatatagaaaaatgaccaaactaaaagttgtaaattttgataagttatacaactttgttgttgacattttttccatttgaaatcatttactaccctgaagttattttgagtcataaaatgaattattatactgcacttaattattttgctatagttcaacttacaaatataaacatttcatacgaaaaatgaaaaaaaaaaactcatcggtgacgggctttagttaatgcccgatagagataagtcatctcaatcgggaattagtatatagcccgtcaatgatgagtcatctgtgatgag

SEQ ID NO: 50005 - DNA, 752 bp, Oryza sativa
ataaaattaccctttacttaaccactgatatttttccatggagaaacaaactacgaaaacagagtaaacgaatgagagtatccctttaaattttagaaatttattttactgttaattgtgggtgtttcattgttttctaattctcggcaagccaccctagctttgaaccgctaaaagtaaaagtataaaagtcttattttaaaattaaattacttttagttgttttgtttatttttcttggctcgtagctaagccatagctttattggatcactgtccactatatttattccatatcgaaaaactattttaaaagattttagtagtggtgtccgttctaatattctaccactaccacacatgattcgttcgatcgtgtaccaacgttgagatggagacttagcactgtcatggtcgtgtcacccaaatttatattgtttaagggttggagtgagccaatctgcgaagcttcaaaggatgaatgtgtacaatataactatttataactgtcataggattacttatagtcactttgctagctattgaaaaaaagctaaagaagaattcctatgtcctttgtttagtaagggaaaattggaaccaagacattataattttgtaaaatttgagatatgccatcctgaccaacatgtcattgactcatgtaggtcctacatgtcattgatatatcgatggcatattttaaactttgcaaaattataatggcatggttccaaatcttgtttttttagt

SEQ ID NO: 50006 - DNA, 680 bp, Oryza sativa
ttgtcttcattagagttcacatgaaaaagttataaattatttttaaatataaagtcttttagaccgtcctatttggtccagatgatatacaaatccaagtttagaaactggtgtgacacaactgaataagttggaggacctaaacgagtgatctgcaagtttagggattgggatgacacagtcgaacaagtttgagatctgaacggtcgatttgcgagtttagagactgggataacacaacggtaaaagtttagggaccggtgatggactttactctaagaagtttttctagaggtttattagtaaaatatttttctaaaaaaaataaaaatcctgatggatcgatctctcacctgacgatcaaccacacgtatcatatccccgccgattcaggaactgaacatgagaacttgggcgtccatgaccatgatgcatgtaatgatgtagtacatgcgacattggggaataacaaaactacaaatgggataacaagatatcccaaaacaaagggaagaacaaaatcctggcaccggaaactcaacgcccagcaagaaatccgggaatgatatcagggcatcaggcaggcaggcatcccgtcccgcgcatcccatgccgggcggtgcacctaatctcttcccgagacaaaggccacgggctcgaccaggcccgatccctttgtt

SEQ ID NO: 50007 - DNA, 648 bp, Oryza sativa
cggcggcgggggacggggacagcggcggcggtagggaacggggacggcggcggcgggggacgggcgcgcgctgatggcttcggccgtgtcgcatgggtgagaatcgcgtttgtgggggaaaagcatcccgttgggaaacggtatcccatcccctagcattcccgtttttaaagccttattttataaatagatccttaggaaaaccttattctagaattgaatccttatggtgatgttagcatccctcttgttcctaagaaaactaaatcattgatgtaaaatgatcgacgcaaatgacactaacgtcaaggggatggtatcatcatattgtccatcatgttaaaccacggcgttaatgacgttggtgccgcgaaaggcatatatttatgtaaataagaagttaagtaaagtctatcaccggtccctaaacttgtaccactgtatcatcccgatccctaaactcgcaaatcgaccgttcagattctcaaacttgtttgactgtgtcatcccggtccctaaacttgcagatcactcgtttaggacctccaacttgttcagttgtgtcaccctggtccctaaacaggacagtctaaaaactttatatcaaaaaataattcataactttttcatgtgaactctaatgaggac

SEQ ID NO: 50008 - DNA, 929 bp, Oryza sativa
ctatgttgaaaaaatattaaaatcaaattcaaaaataagttttaaaattcaaattttggctttggcttctaatgaggcccttgctcttgcacggcacgcacaagtatcagtatgtatagtactagtatcagagcaagtacaataatgagctaatagcctgcttacataagattttaacatacgtggcagagagagaaagagcggagagataaaagcgaacgactatattatcaccggctcaggcgcgagtgcctagaaactttctctgagggcacccacaatggttatctataggctctctacaagagatccatgtcagcatattttcctacttggaatgtattaaatgaagagagagagcaaagctatctactaacttagagatagtctatagagaaaaacgagacaatgcatgagagagctatagatacaaatgtagacatactattaaggtggtttactattaatcgagtctattgctgagatgtacatgttttatagatagcaccttactttaccattgcgggtgctctgacgcagccctgtgcaagggaagagatacctgcgaacagccaatagaaagatagaaccttacgttgggtaaagcaaatgttatagccgattactgtatttagcgtggtttaattagctgttagatgacgtggtaaatttttagcgcttacaggtgactgtactatttaacttactcttagttcgagtgtccgttccatatcactacatttacagtgactggggtttcccagaaggaataagttcactttaggtccctctatttgtcggtcagttcgattttggtcccttgacaacaaatccgggtacgacccgtcccccaacttacgaaaccgggcaaacaaagtccctcgccagtatggaggacggttttggccgatgtggcatttatgtggcgc

SEQ ID NO: 50009 - DNA, 2163 bp, Oryza sativa
ctgagctcgcgcagaaggccggagaagctctccggcccgcagcccccgccgccgtcgtggtcgaactccaccacggagtgctcccagaggaaggacgacgacgcggacgtcatggtaagagtgtccgtcgtcgtcgaccccgacgggttcgtcccggcgctcctgcgccgcgtcgccgttgtcgacggcgtccccgccgccgatgccgagacggacacgctcttcgcgtccttgcagccgcagccgagcgtgaaccccgcgccggcgtggcgcttcttggccgaaacgccaggactcatcatgccctgtgatctcgtcactcgctagctaagctgcggatgcaaactgtgcgtgcgttgcaacctcaaaagagacttccggtttctctcgttggctcgcgcgctgcaagcttataaagcaacggagatggcaagcgtgcaccgcaagtgcgtggtcctcccaaattgcacacggttaaaatccaggggaaaaaagggatcaatgccgggattgtctcgttgcacagaacacaacccgggccgtcaaatgattcctcacccaatataaaacaaaaggcagtcaaaacaggctgtcgcatgcacaagattttctcttgttgcaaagctactgatctgtatctgtatgactgtatggttgtataatgtattgtcctgtctgcaaaatgtatactgcttagtacagtgtttacaattaactacgtgttggatagtacagtagcaccattaacttctcgcgatgggctgatggtccattggtccctggctccttgcaactgcaatttcggggtataccgttttggcgtttggcgtagctggtcagctcggggcatcgctgatgcatttccgtttggtgtttgccgtgcacggcagggtgatttccggacgcgcgtcttctgttaggctgttaattgctgtgcatgcattctgctggaattctgccgtcgttttcggaagtttgtaggtagtctctgagatttgataagttaagggcagcgcgaaaatgtggcgtactttcaagtccacgactggccatgatttgacttggtaaatgctctgttctgttgtgcagcagcagagccaataacatggttgagtcgaacggctaataacgtttctttgattatcaactatttttcgaacatcaatggtaattcttagtgaaagttacagtggcggagcctgatctgcgcgggagtttccttcgctgcggtcgtttctgtttgcatgaatgaacacgggcatgtgtagagtaaatggaggagcttcttaagttaggcaacaaaatgtgagaaactagtacagtagtgttccaagtacatgcataatgcgttcccgaaaatgacaaagttaaggatcgcatggtgaggtcgatggcgggcgcgtgtggataattgtacggggccgagagcccgagacagctgggctctgctctgaatgacggtattgatcgtgagagcctaactccacaccccacgggcacacacgattcagttttttggtagagaaaaagaggtagttgattcaatccaaaacagaaaaggaccagagccaacagcttcaacatgggctgtttgagtgtttgggacaaaaagatcgtcacacgtactattattgttttggtggattgaagatacgcacccatgttgtacatttacgtagcaggaagcttccaaggcatatcagctagatcgtaccaagattgctaacaatattcttgagggtccacttggctgttggttgattgaaacgttcatcgttagaagtctaaactagaattggaagggaaagaaaagaatttcgctagtgcaatctgtttcaagctaatcatgcccatcatctcctaagactgaaggaacgctggtttgtatgagtatcacatctcaaactgcatttaattttggaaaaaagtacgaattaccgcccaactatcgcggtcgtccgaattacccccctaaaccataaaaccggacattcttcacccccaactatacaaacaggatgaattaccctctcgatccaatccacggtggttttggtctacgtggcatatacctgcagtccagtcagcattctaattataaaaaaaaagttagacccccctgtcatattcaattccactattcctttttctcactcttcctct

SEQ ID NO: 50010 - DNA, 658 bp, Oryza sativa
agcggcgtcatcagcgtcgctccgcccaccgcccgccgccgttccatttcgccgcgctgccgctccgcttgctcccgtcacccaccgcccgccgtcacttattcatcgctggccgctgcgccgcttcgctccgtcgccactccgctccatcgccgctccgcccgtcgccccctcagcaccgtcgctcgcccttctctcctggcagtgtaggggggagagagagggggatagagataaggaggctgacatgtgggaccacatggccccacctttttttaattattttttgtgtagctgacatatgggtcccactatttttattattttttcgagataaaatggccacgtaatcgccacgtcaatgccacttgggatgaagacctagtcaaaggagccacgtaggcgccacatagatgccacatcggccaaaaccgtcctccatactgccgagggactttgtttgcccggtttcgtaagttgggggacgggtcgtacccggttttgttgtcaagggacgaaaatcgaactgacgcgacaaatagagggacctaaagtgaacttattccttctgggaaaccccagccactgtaaatgcagtgatatggaacggacactcgaactaagagtaagttaaatagtacagtcacctgtaagcgct

SEQ ID NO: 50011 - DNA, 588 bp, Oryza sativa
ggcccccttgccgccctgggggagggcgatttttgcctcccccctataaagcccagcccctcccctatgaaatttcattatattcactaaaaatccaaaaaaaacgaaagagagagagaggggagggcagcagaaggggagcggcgaagccctgctggttcgctcacttcatcacaggtatgctcccatacatcttttgcatttgtactaatatattacgtttgagtacatatgttgcgttttagttttagttccatatattttagcagatctgtagcacacagcacatatgtgtagatccagagcatagaatataatagtatgaattgagacatagacagtagtgttaattgtaagatgtagtttagtttgatctggagaatgtaacctacttttagaaatttagagaacaatattgtagagaatgtaacttagggcgtagtacagaaatgcgaggtttacggaagttattgttttcatcagggacaatgtcaagtaaggtctacatttcagatagttcatggtgaaggaaatattagatttggtccagatggtgttgatctgtcagattttgtaatgacatctaag

SEQ ID NO: 50012 - DNA, 1525 bp, Oryza sativa
attcgtctcgcaaattagtccaagattatggatgggttttattaatagtctacgtttaatatttataattaattttcaaacatccgatgtaatagggacttaaaagttttctcccatctaaacagggccttataataagaagtgggcaccagatggggacccaagcgagcaaccagcactagagtgggctggttggccgactgctgtacgcctgtaacgactgcatactgaaaacaacgcaatgcagcagaattggatcctgcaactcctaggatttctgtgcaagcattattctttaccggatctgtcagattcatcctactacctccacttccgtcccataataaatgcagccgtggatatccgtgtccaacgtttgactgtccgtcttatttaaaaaatttatgaaaaaatttaaaaaatttagtcatacataaagcactattcatgttttatcatctaatagcaataaaaatactaatcataaaaaaaattcaaataagacgaatggtcaaacgttaaatgtgaatagtgtaaaactacacttattttgagacggagggagtatcttttgtcacagtcatatttgggcttgtaggttcagccaccggctgttcttcggagttcagaggatgctgaatttgctgatactgatcaaagttggagcaccaactacagacgagtaccaactggttcaaggagacaaccgcttaacctaactcgtgcctccttgcatgccctctttggtctttgctgctgtcgatatctattgacacagtgatgcccctggtcgtcttttctacagtcccgatcaagtactacggacgaaatagatttgcagatccactaacatcgatcaggatgctgccggccgggttaatttatcagcgagtcgtgacaaaagctagctatactcatcaactgacactgtagcgtacagttgacgtcaccgctgttaatcctgacgagctgtgccctttgtcgaaggctaggagtattgccaggtatattgaaatacagttgctaaactgtgacgacagaagaaacagcagactgcacgttgatgatgatgatcgaccgacccacccttgctgcatctgaatctcgcgcccactcgccagtgtccaagttgccagttcaacttgtattaattcggaacactgctggaaccagggtgcacaggccaagaacagatatggtccatagcgtactcgatccatgccataccctatcgatctcacccggagatattctctgatactactgcctcagcttaacttgactcggactatcttagctagggggagactgaaagtctgagctctgaaactcaccgtcgtcgcctgcttataatggtctgcgagaacgaatcggattcccaagctattgcctcctgcttgctctgatgaagaagcatttcttggagatcagaaatgagtgtatatactactactagcacatcggtcagcggagacggtgatgacgcaagggaggatgccggagacgggagtggagacaagcgctt

SEQ ID NO: 50013 - DNA, 666 bp, Oryza sativa
tgcaccccgtaaatgtttattgatgttcaacatttttctggtcagctgagtggcagatttaagctaatcattgatttattctatctcaaaaagtcattgtatttttttatccattcagcgagtgctagatgccaaagttggcatgtaagtgtaagttattcccaatgtttttaaaggctgggcaacaaactgctactttatgtttgttagtgtgttactgattttgtatgcaaggcgaaaagtaagcttcaaagtctctgcccaaaggtttttgagaatttagtgtaatggtactttcatgatagtaaactagttattgaagagaaatgtatttaatacttgaatacaatggggcccttgtatttcctgtttactattgcccatttcctccaaaggtttttccttaaaagttttggattaaatgctataaaattcacgaataacttaagctcttgagagatgatcttgctatttgttagctactccatattttcttaattcagaacaacctatttaggttgtttcaaatcatagactgtttctgaccagttttccatcattgtagatgcgcctgaacaaggtctcagaactcatacacaattcttctaaccaccagaatctagacagtgctggggtctccgtccattttcaagaaatcattgattt

SEQ ID NO: 50014 - DNA, 1513 bp, Oryza sativa
aggtctcttccctggccaaactggctaaaaggtgctgagaagtctctccaccgataatttcagctcgtcagtcattcggagcttggtgaagcactaggaaggcactttgcaacattgtatctctagctaagcttcaagccttcaactgcagaatgtgtaagggtgcaaccgtgtacagtaggcttgcacaggtgagatctgtctatagcggtataatagcctaattgtgtatatatgttagccctgaagcgtgtagttttcctcacccaatacctcggtcgccttggcgcgcaaatctttctctagttaaaaggctgttcttagtaatgggaaatggaaaggaaattttgagtgatgctggattgctggttgctccctttttcctccattgagttcagctggtgatggcattctcgtttctgtcatctggcagagaaggcactactgccccaagtgacccatggcatagccagaaacagaatgctccatcagtccatctgatgagatatgtgtgaagaggtttcagctgagctgattatagtgctgtaaagcggcttagcactatgtaaatcatgtgttatgcaccatgtatcatgtatgatccttggaagttctggatgcaaaagtgagttgtgcacttgccatgtaagttctctatgatgaaaaaggccaagtgtactattgtctatgtatatcatttcagtttttgcataactgcaatcggtaaggagtgaaagcctccggatacctaccgggatttgaatatttgatcatgctagactaccccaatgtgaatgctacattttgtttgggttaagggaattagttatttaaccttgtttggcaactaatctagttagtctagtaatgcgtttggccgtttgcctatcttcataaaaatcgatgagtttgttcatctcacgctgttgactttctctttttttttcggggagtagggttactaatcttggactacaagggtgtgctttaagtaagtttatgataattatttgaggccgtaaagtaaaaagtgtggagtatttcaggaaatgctgatgaataaagttttttaaaaaacaaaaatcgcttagtaagcacgcctatgataatggtgcaccgattgctttttcatcggttgagctacgacttgtaaaagaaaaaataaagcaacaaaaatagtaaaacttttatatatgtattatttgtgaatttaaattcaagacggaaaaaaactgctttaaaaaaccctcacatcaactatataataaaattttagctgttgctgataagttaaaagaaaagtattaaattgtaaaataagtactacattcaccttttcaatatataatatcgttaactttttaatcattcgtcttattaaaaaatttaagtaaatattttttatttgttactaaagggactttaagtattatttatatttctaaattttgtaaaaaaaattaaataaaatgaatggtagttacttcctctgtttcacaatgtaagtcattct

SEQ ID NO: 50015 - DNA, 2092 bp, Oryza sativa
agaggcaaggattatactggttcaggctccttgcaaggtaatagccctaatccagattatatgagatatggcaaggattatactggttcaggcccctcgcaaggtaatagccctaatccaatttatatgagatatggaaatccacagaatacaatagagaacaactgattccgaggttaccggcgagatccttgttgagagagtctcgacgagatctaccggcaagtaggcttcaagtaattcggattgcttttgtagtggcggattggctggtgctatgattcgataccctagattcctcagggggtatgtatttatacagtgaatccccttagtctccaagtagaactcggatacctcggaccctgcacgatatagtatgatcctaaccttctccgagtagaactctgttatgtacttgcctgtggggattatttctataatctcttgttgatttccttatcgtatacagaaatctatcacacatacgaaagtatgtcgtatgcgtatatttcataagtcgtaggatagaaggtatgtcttatccgtaacgatgacaggaaatacctgcctaatagtgatgagagggatgggtggtggtgagatgaactgggtaggggtcactgagggcgggtttagagggaagacccagaagaccagtggtgggcaccgtagacgagcaaacaacgaggcaatgatgtgctaccaaagtcgcatgagtgaatgacggcaatgggggtaaagaataggtcatgaggttaggcgacggtggcaacagtaatagatattggtggcacgaaccatcagagacaggggaggagtggtggagcagggaattccactggacttgacaaagagaggtaatggtagcaagacaagagagtatgatgaggaggaagagagggagggaggagttgcacagagtaggcattgcctcgtcgccaatgagtaggatagaggcaacaagcgcaatatgaaataaggtgaggcccttgtctcgccatcagttcaagcgctataggtaatggactgaatcaggaggagggagaaggggaaatggttatttgttatatagtgtgcacatatcttggcgtactatatgcctttaaaaagtgattgatgtattagaaaattttaggcaactgatgaacaaatagtccaaaaactcatgttcatgctctacccctccaggttgttttttaaggcaataaatagatacagcctcatatcataatcaggttgcttttgtttgatgactttaaattggcgttattcccatccacatccaaattaaattaaaagtcagaaatctaattataagatgatttatagcgttctttttttatttttttgattgagtatatatatttttatataagaaagattaatcacaaccaaattctatgcacgagattagcacattccagtaaaattactagacgaaatttgcctgtgggcatcacattcaaatcgatattttttgacagaacgaagaaaataaaaggagccataagggcactaaaaatgatggcaatggcactcgtcttcattgacgccattttgtagaacaaaatatttgtcagtagtacgtaaaacatagaatttctcagtataaattggtcaattctgcagcagtatcaactccgtcaatcctgtgatcaaagctgcaaactttttagtgcttgggagtattctcatgcacgaattgtgttaggacgtctgttccaacttgcttcaaatttccatcatttgctcgtttccaccacaacttcaaacagtagttcacaggtgatgtacctttcggatagaaatgcaaggtactcccttcgtcccataatatagcaatctaggaccgtacgagacattttataggacaataaatctggacaaatttgtcctatgaaatgttttgtccgatcctaggttaaaatattatgggacgaagggagtaatgtttaggtgtcacactgtcactcggtcagttcttacggaataaaccagagaatattcaagatacctactcaaaagtctcgtcggctttcggtaatggagaatccaaacgatcacatcgagaccgcgacctcttccattt

SEQ ID NO: 50016 - DNA, 665 bp, Oryza sativa
ctgcgccccaccataggttttttttttttgatctcctgccaccatagttttggtggttgactgtggccgtttttttaacacgcttctgtgtgctgcagtgcaagcccagccacagctttctgctccctttcacacccttcttttatttatttttttagacttaccctttttttattttgagcggcaaatctatcgcctattgatatactctccgtccctaaatatctgacgtcattgacttttttaaacatgttcgaccgttcatcttattcaaaaaaaattaagtaattattaattcttttgatatcatttgattcattattaaatatacatatagttttacatatttcacaaaagcttttaaataagatgaacggtcaaatatgttttaaaaagtcaacggcgtcaaatatttaggtacggatgaagtatgatttgctaatatacgtagattcacgtatactactagttcatagttcacacaatcactcgcccaatcggcaatgcaagaattcttgagaaggcgacatcactgttgaagtagagtactccctccatgaaaaaaacaagagacaaacttaaacatgaatgtgacattataatgaatctagataggtttattgtaccagaaaatattatatccgggtctaggtttgtttttttac

SEQ ID NO: 50017 - DNA, 1007 bp, Oryza sativa
ttgttttgtcgtcggcgtgaactcttcattgtttgattgccgcgcgcgcgccgccgtgcgcgctgcagcgccgtgcatgccgccatcctcgccgccgtcgcccctgtctgcatgcgtgcgcgccgctgcgccgtgcgtgctgccgtcctcgccgccgtgcgcgtctcggccacgtccccgtcctcgccgccacctccggccccgtccgcgtgcgtgcgcgccgccgccgccccttggtgtccccgcctgccgccgtgcgtgtgagagagaggggaagagtgagacagagaagagagagagaggagaggaagagtgagagagaggaacagtagaagagaatatgacagatgggtcccactttttttttataattagaatgctgactggactgccacgtatacgctacgtaaacaaaaaccaccgtggattggattaaggggggtaattcatctggtttgcatagttagggatgaagaatgtccggttttgtggttcaggggagtaattcggacgaccgcgatagttcgaggaggggggggggggaattctactttttttttctttaattttcaattttttcatacttgaagtaaaccattcacttcgacataccagtctaaacacaagaattcatttcgaggcaaagtttacaagatccataagggcccgtgaagtttggagttgtatgtctctctctctctcggcccgacggcccgcaaaacgcctcctcaatgcggcagtccaacgggtgaaagactgaaggcctgtttggtttggttccaaattttgccccaacaattatttggcaactttaattttttttagataatggaatataacatcccggtttttactcaaaagagttacacccaattattacatagaaacgtttgaccaacatagtgtaaatctaattgaatagaacacacccgcaaggaacaataaaaaatctaccctaacataaagagattacaattattgaagtctatttgtaaatctccaaccat

SEQ ID NO: 50018 - DNA, 1356 bp, Oryza sativa
gaaaagcacgatggcccatcgtgcttcgggccggcccggcacggcccgaggcgtggtgggccgtgcctgggctgtgagtgcggcacgtgggctggcacggcacggcccggtgcgtcggtcgggccgtgccggcccgacaagcctcggcccaggcacggccgggcctgggccgtgccgtgccgggcggcccacatggccatctatagctggaattcagatagaagagatcaatagattagcaaacaattgcaagatgtgttttcaccctggaggagaaaacataaaacatactttttttaaaaacattactgcataatttcacatgagaatgcttggaagccatgccctcttatgcaccaatgcctgaacattagaagcattgatgtcctgcggatgagaaaaggttcaatgcttgaaacctcaagtatgctaaatcaggaaagtactggccacagtgtcaagaaaatctcaatctaccgccactgcaccatgcctggccattagcctgaaggtcggtgtatttggagtgcgagtattgcaaggccacagagctccagtagtcattgatttggccaagtcaatattgatattcccaggagccgatcatgttgatgcgctgctaaagaagacagatagggcatctgagcatctctacatctgcacaggtagagggacgataaaagaaatccaacaatctgcaaagtttgcaactgcaaatgatcaaactggctaggtatgctgatcttagcctaatgtggtgggattttttttattttttaattttattaatagaccattccaaaaatattgcgttgtttagccacgccaaccatggtggcgtggccaaaaggttcagatttggaaatactttttggaatggtctattcataaaatttaaaaataaaagtctaaaaaataattaaaaaaatcatgtgctagtgagttgttagtttccaataatagggtatagatggcaaacccaattcctcaaacaaagcaaaaagaaaaagaaaagatgtccatcattatattatggaggttgcatattggcatatgtatcttgctttttgctagtagagactgttggttttaatgactgagtttttttttttggtgtgtgtgttgggggggggggggggtgatcaataactgctttttcctgtgattttgtggtgtactgaagtcgtctcttttcttggtatggttttctttgtataaggagctgagtgttggtttttgttaagcatatcattggttttgattaaaagaaacatgtgattggttgcaaacggcgaatgggaacacaaatgctgccagggacattggcaggttcattctaaggtttgcagggtaatt

SEQ ID NO: 50019 - DNA, 1760 bp, Oryza sativa
tttgccttcacattggaagatatttttttggtacgttttggagttttggtgaaaacaaagaagtagtaaaatactcctacatgttactacatccgtttcaggttacaagactttttagcattgcctacattcatatagatgttaatgaatccagacatgtgtagattcattaatatatatataaatatggataatactagaaagtcttataatatgaaacgggaagtatttaacagaaggaacatatcgtgcataagaacacattcagccctgtcattatacttcgacggcgttatacaccattttgccccaaaacaaaggtgatgaagaaaatggcccacagtttagtccacttgccttttcgccaatgctccaaaatctccaatgtggcaacagtgaaggctatgaggcatactggacatcagttaggttacctgatgattgtccaccgtaacatgaacataccgagtcagcagtttgccctgacatgaacgtgccgcataatccgaccatcagcggccccggcgattggcaggtcaaaggagctttgacgcgtagcctgcagcggtcaatactatgcgactgtgcgataacaagatctgcatgctaggactaggtatctggtaggggcaagcaacagcaaccgccatatgtagtgtaatcttaaggtgggctctatgaattgtgaatcattgttagggtatcaccaatgtatattgcaaagtgatccatatagatgtgacccacgtaaatagtttttacctataacaatctccacaatgtatatgtatacaaggtatcattaggagaagagagaggagtagagatagataatataatttattccatatgggtagtccatatgcatatggataccttttgttattttttctatatggactagttgcacaatggtaatagatggctgaatggaatattctattgcttatggactacttttgcaccacattgtggatgtccttaaagccaatacccacaatgctatggttagaatttagtcacaagatgaacccacatagaatggaaaaataattgtttcatctcttgatcatgaagtgaatgagagagaaaatattttctttttgcttgtggtagaccttaaatataaggtgcactctaagctaatgctactttacacaatgtatatggctcactttacaagtgtaatcattgccttaaggtcacttttttcatacattgtggttgccctaacacttaacagctactactagtagtggtacaagtatattcggacacgatccaactgagatccagagacccttagagcaagtttaatagtatagcccattactagcttcaattcatctatagtcgttctaatagccaattcatacaatagttgcttactatactactccctctgtcccagaatatagagagttttcgagttgggcacgactattaaaaaggtagatataattaaggaaaaagtacgaattacccccctgaactatcgcggtcgtctgaattacccccctgaacccaaacaccggacattgctcaccctgaacttttaatactggacgaattacccccctcgacccaatccagagcggttttgtcctatgtggcgtacgcgtggcaatccggtcagcattttttttaaaaaaattgtgggacccatatgtcatacatacccttcccctcttcctctctctctcttcactcattctctctctctcggggtgcgcatgagcggcagcacgagcggcggtggg

SEQ ID NO: 50020 - DNA, 546 bp, Oryza sativa
gaaagaaaagaaaaaaaaatcgtgaaaagaaagaaaaggaaaaaaattacttggggggagggggccaacttgcgcacgcgttgccgcgccaatttgccacacccgagcggagcaccccgtcggatccaacctgacccgaccattaagcgggttgtgcttgcccaacttatatcgggcctaggcctggtcgtgcacgggccgggtggctcatttggtcatctgtagttgcgaatcagcatcgttcctctcatcggctccctctgacttgcttgttccattcgaacccatcccggcttgcacacatagacctctccccacctcctctcgaacgatccagatggccaggcgaaccccgacgccaagggcggatctactatgggcacggaggggctcaagcccccacaagcatcggtagaactatgtaagccctcactgaggttcttataaaatgagggttaaaattatgtctagtttggtcagccccacggtgtacttcctttattcttcatttgtagtgcttacaactgctccttttgcattatgggc

SEQ ID NO: 50021 - DNA, 566 bp, Oryza sativa
  unsure (1)..(566): unsure at all n locations
agtccccggggagcatcgtcggggtagcggcgcctgtccatgtaccagaacaggtagccaccattgacggcaagggcggtccgccatcgggtgatggggtgtggaggatcaacggcggtctccctcaccggcgccgggctcgccgacggtgagcacctccatccccatggagacgggaggatccatggagggggagcggtagaaggaccgaaccaccttgtacctgccggtaccaggatccagccccagccctgcggtgtggctgtggccatggccgtcaggcaacgtgatggcttctcttgttgccgggttgaagaggtagagcttggtgatagtcggggcgagcactaggccatcaccaagnttgggggggtgggggttttggtaagggtttgggggggggccccttttggggggaaaattttttttaaaaaaaaaaaagggccccccgggggggggggaaaaaaaaacccctttgtggcgcagggaagtcttggatccatgatcctcgcaagggaggaggcaccttgctcccactggtagaagctgatgtgggtggaaaattt

SEQ ID NO: 50022 - DNA, 642 bp, Oryza sativa
caccagcactactagcatccacaaagacacaactttcagggttaggctgccttttggtgagtgatcaaatcaaataatcaatacgaggagtattaagataacacaaatatctatcactgagcagagtgcaccaatgacaatattggtgttttggtgtcatgcagggagcgtgcgactgaagaaggtggctgtctttccacagtgcgacagagtagtactgaggctggggaagaaacatctgcacggggcattctcaacctacaaaaattgtaagaagcacgcccaactcgtaggcacaatatacttgcgctcaatctggggttgttttgctctttttatgtcactatataaacaaaaaattaagaggttataatttgttttacatattcacaacgtagtaaaattattgcttccgacacagtaaatctaaaagtagttttttggggcgcaacacctgaaaatagttacaattatcgagattatcacagtctaacgaaatgccaatggttatcatacacaagaacattcttctgctctacttgcatgagtacacttgtttgtctcgatcgatcgtgccacaagacagtacccaccggaagtccggtactgcatcatgtcacctgaagtgtctgccttttgctt

SEQ ID NO: 50023 - DNA, 753 bp, Oryza sativa
cgaatataccatgctatttcactaaatatagtgggaatagtgtcacgccccgaactagtctcgactggaactagcccgtgacgctccaaattaacctgttaatcgataccagtcccaggaaacagtgctggtatcacaggaagacagaatatcacagcaacagaggtctctttattatagagtaggagtacagtcatgttgggctgcggacagatcccgagctcacaactgcattacaaaaggaaagcgaaagccaggactaggaccaaacatcacaggcgcgacttgggaactaggccgaaaccctaaaactcatcgtagccggcttgctcctggaagaactcctcatcagccggatccgcttcatcttcttcagcaactgggggggaaattatttatatagagcaagggtgagtacgagagtactcagcaagccaggggaaataagtgtttaatgcaggcttcaaggagaggctggtgtttttgcaatttattttatttgaactcttttctgaaacaactaagtgagtgcttctcaaacgacacggatgagacagtgcgtctcgtccggtcagagtatgtgcaatgtatcagtctttagattttgaaacaaggttggcacccggctaacagcttttcaacggccacccgggccaacaacttttcaaacggccacccgggccaacaacttttcaaacgggcacccgggcctagctgatcccatcagctacagatttttcaaacatggaaccc

SEQ ID NO: 50024 - DNA, 687 bp, Oryza sativa
taaatatttgagcagctataaaagggaccaccttcgcatctcatgatttctaggacttacgatcatcttgtcattaccttaggtggtataactttactaagcaatctaaattatgccctcccagaattcctcaaagggactgataccatacaagaagcagaaaacttgagagtgaatctagtactaccaaccattttccccaacaaagtattaacaccaaagtcatgacaacccccagtcagatgaaggtgccaattaactgttcgcggcatcgcggttgataaggcttgcgaattgagtggcatataataaattttctctgataaacaactcatatattttttttcgcgaacgcaaactaactcatataggaattgatacaaataggtgtatcagatgcaaacatgaaccaagctagatactagtaatacattccacttacaagctgagacctgtataatcgaatgtaaagactaaaactacagctaatttagcaagttatcaggcataattgaagctactagaactcacagtgaaagctctcccaataggtgtggccatgaagtcagtcagctccctcctatactgcacaggaaaaggcaaatcagccacaaattaatgaattccccctaaaagagaggatatgagataaggagaaagctaaatggtgatgggggagaaaaagat

SEQ ID NO: 50025 - DNA, 664 bp, Oryza sativa
  unsure (1)..(664): unsure at all n locations
atattgagagatgagtttagagtccacatagcaactcaattagaaatattaaaaattcagaattaaaataaattaatattagaagagagcngtaaagtctatatagaaatacaatttccagaaaattcggaattaaaaaaagaaatattaaaagccgagtctagagtccatataggaatatatataatttacaaatacctaaaatttgatattaaaaataattcttaaccaacacgtatataaaatacaatataaatattactcatttgtagtttcgtaaagttattgcaaaatttaaaattatgatatcattttaatatatttgaataatataatgagaaaacatatatgctattatatgagagaaaatataatgatgctagccgcgcaatctgcgcgggtcaccatgctagttttttaataaaaatctaaaatgtaaaaagtctacgatgaagagtcgcacgagaggagcatatcgatcagctgatgacaagtacatatagatcatacatgatacatcacacatataggagtatagtacgtccacagtccactgcatattactgtacgtaggtggctgtgcctgttcggcgctgtaccagcagatagaatttcatcaatattagctggccatgtttattcgtgtaaccatattatttcatgg

SEQ ID NO: 50026 - DNA, 3605 bp, Oryza sativa
actaaactaccaaaatatatgtacttaactgccaagtgtcaaaatatatctgtaacttgaaccataaaacatgtagttttgtaaaatttactcttaaaaaattatctataatcttcttcctcatctaaaataaggcagaattagtctgttagaaaacatatctaacaaattaaatgtaaattaaaaggtaggtgttatttttttgaattgaatgtttagaagctatctttttttctaccaaatcttaaaagactataattgctaacaaatatgttttatttgtatcatctagttagccctccttttatttagtttatagtgatgcaatttatattacttacatatgaataaaacagaggagatatacatgcaccctaggtcttgtttctctataatatgtgtgatctagtgtactttctaaaagaaaaatataatcaacttgacccttaaaaataaatttaatagtaagaaatataacttatacactctatgtgctgtaacgttatggtccctttgtatggaatgaaaaaacagaggaataaaaaatagacaggattcagataggaatgaaaaacagagaagtgcaaaacgtaggaaaaatatagaaataaccgtttgattggaccgcaggaaaaacacaagaattggacgagagagatagactcaaaggaacattttcaaaaggttggaactcttgctaaattttcaccaaaatctctatataattgttcatcccataaaaatttcaaaaggatagggtatgattaaatcctttgttttaaagtcctttatatgaatttttttctagagatgaaatcctccaaaattcatatatttttccttcaaatcaaagattttattagtattttgcttatatttacaataatatgtggagaaattcataatatagtggcatacgatagagaaaaaaatttgctacaggacaaaaaaccgtgtaattaactgtagaacatctaaaaaaaattgatttagctcacatacactccaaaagaaaaggtgtaatttgctagaggacactaaagctattatttttattattttcaggtcaaatgaaggaagaaacaacatagaaaagatgagtttgccctttagatccgctccctttggtttgggtattaacattcttgtcttctctcccacgagttagcagctcaagcgttcagccatggcgactccccaaatctaattcaaagccctcgccttcctcctcctcctcctcgccaccgccacggtctccacggtgtctgctgactatgtggtggccctcaccgagtactgcgccgccctcatcaagttctacgcgccatggtaataagcgatgatggctcgcctcgccgggtttcgtctcctcccgtggccgctgtgtctcgctgggatgtgtgtttgggtcggatccgtgggtgttctgggctgagggtgctcggatctctgtggatgagatgggttcggatcacgctagatcggtggaaatggtggcggcgtaacttgcattctcgaatttgtagtcgatttttgtgacattccacagccaattacatgttttttttcctgtagcaaattttgctaaaaatcattaatatctaagcacttaattaaaaaaatgatgtaatgattatggtaatggttgtttcaatttaagtgaaaagtatgaagaaaaagaagttataagattttctccaattagtttcaattaatgtatttcatattggcatttttttctattttctgttttgttttatgcaagtcttattttaagtttaaaatttgtgatatgttaaatagagatgaagcgttacaccttttatgtcaactttcttgaaaaagaaaacaaccaccttttttataagcatgtaagaccgatgtaggttttcactgtttactaaatgcatgatttgtagagtccaatattattgcatagtgtgggaaacatcccatctatgaacatttatgtagagcgtgtgaggttccgtatagcctagcgtaaatacaatcagagggctaaatttagttgtgcacgcattattattatttttggaatgtgatttattatgaatacatgcttgaataaatatgtgtgatataccaaaaatgcattaaacaccacctaaaatctattagatggtacctaaaaaaatctgttagatggtaacgtaatatagtttagagcaattacatgaaagatcatttggcttactcagattatttgactatattaatttcaaaaaaacatgaaaaaattggattattttcgttaattaaagccactatattttttagagtaaatttcacaaaactacaggtattttgcacaatttatcacaaaactacagatttaaaagcttgtttcacaaaactacagatttagggtcaccgtttatcacacaactacaggtgctttgtacaatctatcacaaaactacatatttaagaacttgtttcacaaaactatagatttagtgtattcgtttatcaaagaactacacatttagtgtcttcatttatcacaaaactacagatttaatttctccattatcacaaaactacatatttaaccatgctaaaacctgtagttttgtgataaatgaagacactgaatctgtagttttgtgaaacaagttcttaaatctttagttttgtaatagatcatgcaaagtatctgtagttttatgaatttttctctattttttatgtagtgacttggactatttatatttgagttaaatttgttttcttaatttggctatacatgtttgcataacaatctatggtgatgcgacttgtattattgaattatttcataattatttgtggtaatttggatgacatgacaaaggccaatggtatatgtcccaccgatttttatttgttacttcctccgtttcacaatgtaagtcattctagcattttccacattctattgatgttaatgaatcgagatagacatttttcacattctatctagattcattaacatcaatatgaatgtggaaaatgctagaataacttatattgtgaaacggagggagtatgttcttttctcatgtacagtatatttaatttagttttcatgtttacaaaataatatatgatggtgaatcctatgttgttgaattatttcacagctattttattatttcaaagacatataaaagggcaggtgttgtccataaaaaatattgttttatacttggatttatatttttttatactattgattgaatttagctatgcatgtttgtagactaatatataatgatgtaatctatgttcacaattttttacagtattttgttgctatttggatgacctgcaaagtgcatgggtcgattgttcccaaatttcatgtttcttatataacaaaatataggaatatgcatcttactttttttttattataatagagcaaagttagattagacattgcaggtgcaaatattgattgtttctctttcactttgatagcttatgactagtgaagagcatagagctagagccagagaggaagtggtgggtaatgctatgtgcatatgagggagggaggtggaggcgactttctttttctatctttcctaaatgatataatg

SEQ ID NO: 50027 - DNA, 994 bp, Oryza sativa
tctaacatattgccaggataggtataacaatcctcatacaaaaaatactgatttgcatttcaacagctcagtagaaaataatcatatatggaaaattaataggagatatggttgctgatttgcatttcatggtaggaatttaaaggaattgtagaatttatagatttggttatccacttgactatttaaataaaaaccaactatgttttttatactaagttatctaaatatccttctgtagaacatgcaaccatttcaaattattaaggttgccacatcctctccttagtgtaagaagaaacttcccaattgaaggtcactggacctggacagaaaataggcaattgcaccatgcatagaaatatagtatgaaaatatattcatctattggacttgcaaacaaaaactgaagtctgctattccatattgggatccagataattacctcattgtgcaggaaggtactgcaaaacattttcatcagaaagtaacaattgcttttgttccccatattgcattgagtcgtagatgtcaactaataatctattatgaatggttgcaaacctgaaattaggaataaatattttaatatcagaatgcccgctatcactatcagtaagttccaaaatgcttgaatgaatcacacaatagtattgggtaagaaagaccatagatattatagccttctatcataatgaagaaataaacacggatggaaaatcaataaaaagatccaaggccataaagaattgttgatctatgggcctagaataagcttactatgtaaaaaagcatatagagattaataaattaagtcaatcaaaatggagatataaaataatgtacctttggagtggctaaaatcaaaagttggttgtggacttgtggtaatatgccaagattgttaggtttacatataagctttgatgacgttcattaacattgccaatataagattgttcataataaacatcatctatctattctatactat

SEQ ID NO: 50028 - DNA, 7070 bp, Oryza sativa
cggcgcaccggcgctggcggctggcagcggagccggggattcggcaggcggcgcgccggcggccgccgcggcagcaggccgttgtcttctctcttttttttttgttgagattctgtgattcagatctgagacgatttgtgtgtgatgtgaatatgtgatgtatttgtgatggattttgtaaaagttgtgatgtaatttttttaagattttgtgatgtatttagaaatattgatttgagaatttggagactattcggggatgattgatttaggattttgggataggatagagtgaatcaattaattaaaaacaatgaagaaaagaatagaataaagtagcaatcggagctagccagctagcctctttagtcccgattacctactctatctttagtcccggttggtgctaaaaatagatttttactttcggtttttttacccgggactaaagataacgatctttagtcccggattcatagtcccggttggaaaaccgggactaaggggggttacgaaccgggagtaaaaactccttctccaccagtgcacgttggttttctatagcaaggtcaattaacctcttaatattactttatctttttctttggtttttaacgatgaaaataatagtattcccttttccctcttccttcgtgttctctccacatgaataaaggatatgatttaccttttaactcgctacaactgtaacgttttagggaccagtaatcgtgcacgtgcaatgcacgctactcacaatatgtattgcacaaaattacattcaagatgtaaaagacaaaaaacaattaagattttattattgcaatgattaagacttttacattcaatttgagaagcatacatcagtatagaaaaccttcctaccagaagttaattaacagttgaaggccttacaaactctgagatgaaatctaatgggtaaatccgagatgcaatccaaatggtaaatctgaaataaaaaaacaaaagttaagcggaggacattatccatatcaaatccattgaaaagtcatgcatgtgaaatcatgtgtagcaacattctggactttggtgaacatatctcgggaaactgacattcatttctttttattatgattgagctgagggatcaatcagtgactcagtgtacagtaacagtatacttactaaaaatgcaaaggtcagctaattaaaaaatataaccagaacattcggtctgataattttggtctgtttttggactcaatactttaacattttttggtaattagaatctgggtacgtgtactggccacatggaatatattgccgagggatcaagcatactgtaatatattagctgcttacctcctcatgaaatttgccattggcttacaacaaattcagatataaatgaaatgtgcatattattagtgctttcagaaagtggcatgagagctcttttgatatttgtgtagaaatagataatatagcagaagagtatcagtagcctaaacttttcagaaatccattgcatgtgaaagtttgagaccctctttagtttagatggtaataaaacttttaagtcactatcacattggatgtttggacactaattataaatattaaacatagaagattaataaaacccatccataatcttggactaattcgcgagacgaatctattgagcctaattaattcatgattagcatatgtgatgctacagtaaacattatctaattatggattaattaagcttaaaaaaattgtctcgcaaactagctttcatttatgtaattagtttttgtaaatagtctatatttaatactctaaattagtgtctaaatacagagactaaaattaagtcactgatccaaataccacctaaatctcatagcaaatgagcaaatcctgacaaggatgtcagatcaacattcaagatatacgcctaatcgtgcaagtgcaatgcatgtgcaacatttatagcaaacaactgatgtcatgttcgcataatctaggacatgcttattttccatcatcaagaaatacgtggagattttgatgtgccattgtttttattgacagaatagtagaaaaaattctaccattggagattgatttatcgcaaggagcaggataatttggagatggcaaatcacaataaaaaataattaatcttaccagctgtaaccaactgcatttccagccactataggatcatctccaaacctccagttttgatattttggctatgataataggtctcgagcaagcaagctgttgttgcaacgcttttagcttcaagagaaacgaaaatggcgacaaactagatgcgtgctaaagaggccatcaataacaaaaaaaaaatacttagcaagatttacaaaatgaccagagagccataagctgaccttatccctcccaaggttgcgctcccgggaacaaaaatgagataatagcaagttttaccagcaagatgcgtgaaatgaacaataactcattgcacatatttcagttggcaactaaacattgaagtttctaggataaaatttaggggaaaacttactgccactctgccagcatgcatatgggaatttgtctgcgcaagctgccagatagcgagccgtagcttctagtcaattgcttctcatctctatgatcttgctgtatgcaccaaaacaaagcaaaaatcgagtcaaatcaagagcacatagcatcaaaagccacagccactcaaaacctcaaacagaagggatgaattgatgcaaggaatcaggtggtttcagggatgtactcactcactcctggaattggcacaaaattcagaaaatatatcaccgttagcgagcaggcccatctctcagattagtagcaatctcagagatcaaagattaaaagagagatgggatcttgccttgaccagccgcgcgattccctcctcgtccggtccgcatgctccatgggtgtacctcctcactacagccccgcccttggatatggatatggagctcacaccgttcgcaaaacctcctccttggcgcagcagcaatggccgcctccgtctccgccgctggcagcgctaggatggcgacctggtggagaacaaggacggcgccctccatgggtagcttatctcaatagaggaggtgcagtggcgtccataacgggaggcggcaccgttaccagaaggttggcgcggcggcggcatcatcgggcggatgccacggcccgaagatagcgcgatggcgtcatggcgatgtcaccgcgcgtccgctgggtggggatggggaatcaccgctcaatcgctgaattactgagttgaccagacgcgttgcaagacacaatcctccacatccgtgttcagccgttggatggatagatcgaatggctgagaaagcaaagttgatttcacccgtagtattggaagggggcaactcctcctttttatattagtataagatgaaatagctcaagagctccaccgtttttccccaggtacagtgtaaacccagacactcattatatacacatatctccttgtccaatgagtatccgaaagcgtgtagaattaaatcttacgagtactttttctttcagtcatatttatcggacgagtcctaacaatctagggcacattatctattttctatctgagaacagatagagaatgttcgaccgattttttccctcaaaacttttaaattttttaccgccagatattctttaagattcttagtagagatcaaaagaaaaatatcgtgtgcacgctagtggaggatcaaagccatgaccacccgcttgcttggtagccacactctagccatgtagattgccatgtattcttagaccgtgtttagattcaaacttccaacttttccgtcacattaaatgtttggacacatgcgtagagtattaaatgtggacgaaaaaaaatcaattgcacagtttgcatgtaaatcgcgagacgaatcttttgagcctaattgcgccatgatttgacaatgtggtgctacagtaaacatttgttaatgatggattaattaagcttaatagattagtctcgcaatttacaggcgaaatctgtaatttgttttattattagtctatgtttaatactttaaatgtgtgtccgtatacttaaaaaaattgacatacgaactaaacgcagccttattagatatgggcatatacacattacagttacgtgttatttataatttaattgcattacaactatataattatatttggaagtttgtttttttaagaaaatgttgtatggatactctcttcctatcttgcttaggcatgggtaaggattaactagcccagctgagctaagctcgaagcagcaagcgttgttgttttgtttgtagagcaaattaagggtgtctttggttggaaagcagatttaaaagtcatagctgcttctacccaaaagttgcttttgctctggtacaaactgaaaacacctccacccctgctttcagctgtttttgatcaagtatttacctacctgctattagttatgatgcataccggttcgttctttgcttccccatcgcctctcaccgtatcgttcctcacgcgctgcttcgccctagggttggggcaccgccgcccctccacccgtcgccagcactttggccagcgcaccgccctgaccgagcagccccagcgagctcgggcatcccatgatgacgagaggaagaagatccaatgtgtgtatgacatgtagggcccgcttataagcgggactagttatttcaaaagccatagttgttgaaccaaacgagtttttccaaaggccacaacccatattctagagctgctttttaaaaagctacagcccacagctactttttcaaaagccacagctcaaccaaacataccctaaactaaccagtgatgttgatgcaagcgctcgcttgcttgccaacacgagacagacgaatattggctcttagttctcaccgccgtgagcaagtttttggtggtgtttgaatctcctgaagatgaagacgaacataaagattaagtgttttacgtaaaacgaggtggtaataacgtgtgattaattgagttttaattattacaaacttgaaaagggattaatttgatattttagaaaaactttcatataaaaagttttcgcacgaaactgtatctcatttcgcagtttgaaaattgtgccacttttatccaaaagtttatccaacttttgtgtgtggttaccgattatagcctagattgcttaacaaaacatttttttttctatatatcaaatggctctcctggctttactgcccctaaaaatatcacatatcctcctcttagaaatcctcctcttagaagtaagtatgagtattagggaatagggaatggggagtaaattttcaactagtagctagctggcttaattagctggcatccggtgatcgtttagccatatctagattgttgtatttgcaagacttcccattaaaggtcgtccaacgttacttttgtggttccttttggcgtttaaccttccttttttcttttccctacattttctactgaatacagtggacccgatttttttttttgacatatatacatagcagctagctgtgagattggcagaaacggaggattcgtgtgcttgttagctgtgaacaacgagtgagaatcgattcatgccaagagaattgatgcaaacgccgtgccaactccagtaaacgtagtaataactgctagtagctgccaacatatgtacataaccacttaacctgtgtctttgcgtggaagtaaccacgtactgcatgatcccgttgtataaaagtcatgctaaattgttgaatcattgtagtaacgatgtatgagatcatggactctttataagcgctttataatgtgcaagattaagcgtgtaagtgtagaaaagaaaaggtaattgcaagatttcagttgactttaagtaaccttcaaactctggatcatggagatggaaaaagagaagaggtagggagatgacgaggacgatgatgacggtaggggcggagctatcgtacatggggtgccaggtacctgatttagataggccatctatttttatcatatatgcatcccctcttaatctaaactcagatacatgtatcagtttaactcgatctaaagtaaagtaaaacaagcaggtagcacctctctatttagttctagctctgcccctcatggcggcaatgacgatagccaccgtaggtggtggcgcaccaccgacacatcataattactagtagtagtaggagaaggcaaagaagtaagcactcccagagtctctcatgcatagaaagaaagaacatatcctccaagtatcactctcttcttttagatgaagaaggaacacggtagccttcactccttcaacctttgcacatgagttcctacaaaacgtaccattcaaatacagaaataaagtaaactcagagcatagataaaacccaccctaatagcaacacacttaaggaaaaaaaaataaatttatggccaatctgttgctaccatcatgacaaccatagtactccttccgtttcaaaatgtttgacaccgttgactttttagcacatgtttgatcattcgtcttattcaaaaaaatttgtgaaatatgtaaaactatatgtgtacatgaaagtatatttaacaatgaatcaaatgatatgaaaagaattaataattactcaaattttttgaataagacgaatagtcaaacgcgtactaaaaagttaacggtgtcaaacattttgaaacggagggagtatgaaaaatagacccattacagtgaccaactacaaaatcgtatttttaaagaattcgtcgaatatggtaaagtcatcccaaaagatttgctagacaaggagaaagggtaacttgggacaaccttaactaacggttagtgaaaattaacatgttctacaattaattagggagtaaatattaggagaagggttgcattagtgattattttatagccagcattttaatgagaatcattcacatggtctgataatattgatgaaaataaattgtgcatgatttagttaacacaaaata

SEQ ID NO: 50029 - DNA, 1847 bp, Oryza sativa
tagtaggccattctcaatcgcatgacctttcaaatagttaatagcccatcctaacttaatatcatattgcaaagtacgagtaactaattgaaaaaacacacatattcatccaatttgaaagtgataaaaccatgggcagatccaccgcccatcaaccttgagtaatcgtcctgggctcgtcagctggacgatagaatttgaatgtttttcgatgaattggtcacaaatttctcatagcaaacactcgatataacaagatttgtctaggttcaaaattttttctgatatgtgatggaataaaatcaatcactcgatgacaattgacagctagcatgatgtaggattaaaaagagaggtaactaatgactcctagtcttgatcgatgacaactagcatgattaggactaattagtaaatactattatattattttcatgtacaagtgatggttatttgtagctggtactaataagaatgatcctacagatttagatagcattagtgaaacacaaatgtagtcatttaatgactacagctacaacgttcaaacccttcttcttttagatgaagaaggaacatggtagccgagtttctacaaaaccattcaagtacatgaataaaataactcagcgtagataaaactcaccctaatagcaacacacctaaggaaaaaaaattatggacatccaatctgttgctaccatcacgacaactatagtatgaaaaataaacccattatggtgaccaactacatatcgtagttatgaagaatttgtcgaatgcggtaaagtatcattccaaaagatttgctgaacaacttgagacaaccttaattaatggttagtgaaaattaacatgttctagaattaattagggagtaaatattaggagaaggtttgcattagtgattattttatagctagcattttagtgatgatgatcattcacatggtctgataatactgttgaaaataaaatctgcatgatttagttaaggcaaaataaaggtaactatatccactttataatttatactagtgaaagtgcatctaatcctctaagtggattttggttgattaataataaaacggttaagggactaacaaatttatcaagatgtgtgtagataattagttccaggatgcttaactttgcatggaacctctctacaaatagaatgaaaaagcagagcaaggactcggagatgcatttatatttattttatctttgctcttgagtctaggaaaattgtactatcaaggggatccaaatggttgcctgtgtcaatctaaagtgctatgagttcacatttttagaagagagaaacattttcacaacacttgcatgaactgtagtgtcaatggcaaagcttgccccaaacttcatggtgttttggtctgaacttctgggtggctattttccagccaggtgctaaagtgttgcctggaagttcccaccttttcaattcaaatatgtgagtaacggctacattacgtcatggggtgagggataaatttcccatacctctcacagctcctttggatccactttcatttttccactttccttgcctcttccatcttgttcttgagtttccacggtgatttgagtgtgaattttggggtggtggtgagggttggtgtttgtgagatggctaggaggatctaagcacatgtggatcatcgtcaagttgctagagggtaacctcttagatggttaggtgtcgcccatgacatccatcctcaagccatggattgacaccgagcaagtttgtaaaggtggaccccacatccgaaaggaaaataggtagtcctatgtgggcagaccgggtggcgtgcaagcagtgg

SEQ ID NO: 50030 - DNA, 6665 bp, Oryza sativa
ataacaatacgctgatttaacatatgctggagtagtggaggttagcgttggacctccaaaattgcaataggctgtgatttgaaatgctgttctagatatgcatgcttatgcattaaatgggaccgtaggagagcattgtgtgtggccttgaagcctcaattatttgtagcctatggggccacatgcgtatgcacacatgtgtgttgtaactgaacaccaactgaatttcactgtgaacttaaaactattataggcacatagaagcccaccaccacatacgtacctcacatctgcattacttcgttcaaatcttcctcatcattaagtaagatgtggagatactacaaaaaaaatgtggattgggtgatgactccaatatagggcaatttgtatgttgggatgccattattggaggcataaaaggaacttaggtgaacatgttttggcacaggagtatttaccagagattgaatttactttgttaatctcatatcaatatatattttgttatagtttaatatttgattggttacttgagttggagtcggttttggtttgaatccatgttggagagagctaggctatttaaacctttattgatgattggcttggcaatcagaaataatacaatctattctctcatctctattttctgatcccttatcctgagttggagttggtgtggttgagtctatgtcagagagaattaggctattgaagcctttagtgatgatcagtttggcattctaataatacaatctattctctcttctctattttctctttccactaactttgttagggcattttggttgtggtaaccgaacaacttgctagtagagcttcatagaaacttcaggcatggaagattactttaaggacatgctatcttcgcaactgaaatttttaccacaagattgaaagttttcttggtgacattgagcaaggaattcaacaggcttcatgacaatttccacgtgatgcaagcatcggttgtggcctaggtgaaggccaaaggagtcttgggggtgacttggtgtcagcattggtagggctgctgaaggccgcacaaaagttgctagatgccagcatctttgtgcccctttgcttacaacggcttgattctaggtagattggatggaggaccatagtcaatagtctaatgaagtcaattgatgaagtttgtgcctcaataaattggaaattcccatctatggtggtgaggataagctctagtggctcaagacctacgggcaattgtctcaaggatggtgcatggcagacatagtctaatacgcttgctacatctccttggtggttttctttgaggtatctggggtcccattagagcacgaccatcacgctcaagagcaaagtcatgggaaggttattgggtggagttgccaagaagaaaaggacattgcaacgatcttttgctgctcgagtgcctcgcttgtgcgattggagggcagatgtgtaaaggggattgtgcgcgtcaaggtagcaaacgacgccacaccggcgttggtgatatcatgtgggtcggggagggaagagccgggagatgacatggcgtgatttggattcggaacaacctctcatgaaaggggatggttggagccaagtatgacccaatgggttaggcctcctttgctttcctttgtttcaatgttgacccatttatccaccggagccatatttgtgggttgggccaatgtatccagtgggttgctttagaccacaaccacccttagcaatctctgtggcgaccatgggggtggattgctagagtctacctcactattaggaggcacataggacagtttgaatgtaggagcaatgggctaggatacatagctctagggcagcgattcagcaataagtatagggttgacgctgcgatttgcatgttggtagagagctcggtggcaatcctctttaatatcaagccatcagtaccacttggcgaccccttgaatatgccatgcaatataatgatttataagtactaccataaaatggaaatgttatgtaagagtggtaggagggctgcttcacatccaaatatagcaatgaaattattatgaaactatgttgatagtgaagttatgatgtatgggtgctatatgcttgtaacaatatagaaaacaagtcactcgtactagtctaaatcgacatatggagcactttaacatttgtcgtgctacttttttagcaccaatccttggtggttttagtatatgctttatagtccatgtgtatatgtagtcaattatgggaaataccttagtgctccatcattcttattgttgtcaaatgctaatgtttagcatatattccataacagaaatctatagatccgccaattaagccgttctctcggtactctggcaagacctacttcaggcgaagacggaaaggtggtgaaaagcctgcccaaccatagggcaatggccatcatgctatgtggaaatgttccattctgaatttacgcaatgacttgatactatgttcacaaatctcgtactctatttggtaaaattagcaaaattgtttggctcttagcaataggagacctggaaattctttaggggacaaaaagtttgtttaccaaattgttatattctctctttgttgtctagtcttcttaagccatgttggtagaacaaaggacatcctccattgatgtccataacacttgctttaattgcgattatggtcacaaccattgtttgcctttttggattcttgtatgcattgtttgagttcgatgactgcttttgaagcaatatgtgctacctttgtaacttagtcatgttttcatcattcaatatttaactttaggtgtgcttggttcgtaggatgggggagctcagtttttttaggctgtttggttcaaggttaggtgtaggggtgggtaatgtgctagctcggctcattaccttaatgggccaacttgactcgttaatcttaaatgagctcaaagcttagctcggctccgctcgtgagtaggctctttaagctcgttaggcttgttaacgagctccatctgatttatatcactttgacaatttaataatttaccaatttattgtgtaggaacattaaacactaactaaaaaagaactcgtcaaatacaaatagtttggatgttattaacaaactaagcactagctaagaagcaaacaagtacatgaagatgtgatgatcttttgtactagcgagctaaacggggcctctcgtgagctatgaccttcaagccttttttccaccacttgttaggtgggacggatcttctccctagagggcaatattatctctagatgcggacaagctagtgcctgaaaatcgagtggaccaactcatcccaccatgtgacacggctcattgttgaatagtataggagaagaggtatactgcataacgtggaaactttgtattgagcctcaggggtcaatttatataggttacatggattgggcccttgatggaggtggtcgtggacgcatccaccaggcagggacggcgcgggctagtcatcggcgcgggggctcgttgtgtagatatgacaagcgcataggtgggaggtagtgaacgtgcagagaggagatggaggtggtggaagacggtgccgatggcgatccaggcacgtgagacaggctacccggcgcgatatggacgaagctgttgctgctgctgactgacgtagactattgacgacgaacggtggtcgcgcaaccacccaggagtttgaatcgtccgggcgtgcgatgaacagcgaagacacaatgatgaaaacaaaaaaggttgaccgacctcaggagatcgctactcccgggggcaacaacggcggaagcgtgagaggcggctggtcgcccgctcttatactatgttgaatagtataggagaagaggtatactgcataacgtggatactttgtattgagccttaggggtcggtatatataggttacatggattggatcttaagtaacctcagagagatagagatggaaactaatcctatcctaccgtaagaaaccggatacaatacgatcctatccatatactctacactcattcccaattccgacaattgggtccacgtgttagatgcttgatcccatcatccatgtatcttgaacccaacaaaaactatgacgaccctatcccctcaatcaaacagtacacgggaccattccaccccatattatacctaaatcaaacgcgtgcttggattataccttatgtggtccttcattttcagtaccctaaacaaaaagctccgtttagtaaggaattgtttaaaactaatttattaaaacatttggtggtaatagttaattgtaaaaagccacaccactttttggcatatactccatgtaactagatttcttaaggtaaaacatcactactaattggatttttcaaggtagcacatcattttttggcaaccacttccacaacttggcaaccaaaaaaaaaaaatccacaacttgggattaaaaattgatcagtaataaagacaataataattggttaatgggacgactactacactactaccctcaattgtattacattcacctctttaggattttggaatgcgggattggcataggtttttttttttaggatttagtttctaaggattttcgcccctataaacccctttagttgataggcgagaggtccaacctcttgaaaactttcctttgtttagttttctcttgtagtattaacagaacgcttctcttttcctctgttttccattcatggaggattagagtaactaatatgccatttcagttcctacgtttttcctatcctatgttccaaagggtgtcttggtatggtttattctcatgcctacatatcctaacaaattatacaagtgtcattgtagacactttaaattcaatggcatattgaagttaacattgatagtttatagccaactgataagatgccatcctaatcttgatcccatggttttgaggtactatagtgccatgattgattattcctagaattattgttgtactagcacaatgaaatgattcttcttaagaccatgatcctgataatgagattcccaccacatctcaaaagccaaatgtcacatgattctccatgagggaaggatagttattgtgtttgggtgggggccgtggtttaggagtatagggagaacgagtcatgtggcaatataactgagtaaggctagctcaaatttaaaatcatatgtttatcgaagcataaaatttaacatcaaattagatcaaggtacctatgagtgtagttttagtaccatcaggagccagaaagtcaaataactaagggaaataatacaaatcccaccatcaccatccaacaaacacaacaggaggaataatattttcatgtattcttcaccttcacaatcattttgatgtgttcaaacccgtagcatctagccattatgccacccgtataagtccattccccacattcttgttaatttattgcaaatcacgatacattgcacccatgagcatgaggtatccagtgggcacttggtatggtcctttccgcttcttgctaattggtagcctccctctttctttagtgcacaatggtcatcgatggtagcaactctagtgggtcccatgtgttttgtgggatgtgtatatgtttatgtggtagctaacgtgtcatggtttgaaaagattagtttgtcggaactttgtacaaatctatattttctgtgcaacataatctatgtcgattgcgtgatagaagaaaagaagatcaataaagggtggaaagggaatggatatatgcgattttcttatccacatcgtagaatattcaaagtcagtgcagaaaatggaatgcttgtttggaagaagcacttggttttgagctcttggaaaatggtagtctaacatgccaatttaattttggatggtttggtcagaattaagtgtgacgatgttctacatcatacaatgagaataaccaaattagtttttacatatatatattatatttacaagctaacaagctatcgtaccgtgtagctaataagttgtctctcggcccaatacccataacactaacacaagttaattggaaaatattgtggcatgttaccgacttcgaatggaagttctattggcacctcaaagactaaaatcggacgctaactgctctaactttgcaataacattgttatatccccgctaactttgcaataacggagctgttttggccaattaggatgacatgttggcactttgtcaatcttaagtgctcgagattaaccaagtaggagaaagttaagttagaaatattgttccttttctagagatctgatactttatgttatactagcgtaatttttagaatcatgggaattgggtttcgaagatgcaaaaaagaaaatattaataatacggaattgctaaatttttgtcgcaagaaaaatgggtagataacttgcgaattttagaccctcggataggctttaagattcgtgctcgtgctggcagagaaaagaaaaattttgtgtgaacacaacgctgctgggagttcgaacccacgatctgttggtcgaacaacaggcacacaaccattgagatagccgagctttttataacatatatacttaagttacatactcca

SEQ ID NO: 50031 - DNA, 544 bp, Oryza sativa
aacatttcctcttcatacaaatactacttccatcacaaaataaattgatttatactctctctccgtcccaaaataagtgagtgcacttattttgagatggagggagaagctacgagcttaaatatggatatatatatatatatatatatatatagccaagaaaatcaatttaatttggaatggagggtgtatttatgtatactagaaatagtggcgcgctacgctgcgccggttgatgatgccaatgaacaaagaataaacataattgcgcaaacaggctccagaaaattgcaaattgaatgtggaattaatcatgattgctataacatgttgaagacacttactgagtactaattaccattaacttgtatacacagaatattgtatgcaagtttgctttagtacacatctgaaagtagaaaactttagatgaaacaaaatagttttggtatattatacatccgtccacctcagaaattaaacatactcaccgaatggttaaactaccgtctaccactggctgaagacgatcagatcagctgta

SEQ ID NO: 50032 - DNA, 1259 bp, Oryza sativa
tgtttaacgggcccaacgcgcataaacccttttttcccgaatcgttcctttcttttccctttgcacgctcgaatcgattccttttcctgcatttcgttccgccgcccctttcgtataaatctcgccgtgatcctctccatctcccgcatcgtgctcgcccgtaccggcgctggcatgtcatccgcctcccgtgccacacggaggcaggatgagggtgtggcgcttcccctcccgtcgcccccatggcggctcgtgcgctgcttcccccttcctctcccatgctaaaggttgttcgcccctttaggttgccatgattaatgaaaaccgtcgacaaccaccgaggaaaacacttcacggctgttatcaagtaaatccattaatggcttaatgcgttttcttctcctcttatccctttatcagttctgcatctatatccaatttatcatctcgcttattcgtcgatctaccacactctaccaggctggtggcgttttactaccgttcttgcaactctgcttgctggattcatatgcagccctcacctggtcgatcctctccaattacttcaatgatctaacacaagttacctaccgatttcccctttctttatgttcaataaatctgatacccaacagagaattttattgttgctgtatcctctttttccaggtttcaggttcttggctactgatttagttgattcatattctttatttatcctgaattatagaccacttctcattcttaagtggttgaagacgtggcaaatatgcatctattggttgatttgtcgtcacccgatcagatctaagaactcatcgagctaagtaacaatcatatgggctgctaagcggatggagctttcttcttttggtattttaattatggtctttaactggtgaagctatatatatctcggtacatctatgtcgttgatgtgcttttcacttttgataaggtcctcatcaagaatgatgtcagattctccacacacagacacacaggtttgctcttaaatagataaggttgtcttccgtctcaaagttcattttattttctgatcatgtatactctagatatgtttttaagtatcttttgtcactcttgaattagcttggtgatataaatatttttggagttttctgaaagctaaaatcactccaaagagttaatcaaggatgagtacttaattatatatacgaggtaataatccttttcccaacttcccatatcttactcaagcatgaaaattttctacc

SEQ ID NO: 50033 - DNA, 581 bp, Oryza sativa
aatattacatgccatattatattaacttatttcgggactgagggagtagttttaaaggacatatcctctaacttccctattttggagagatcaagagagagagagagagacgagatgagttgaggagaggttactgaccacctaggtgtaactgatgttgtagaggtcagaccagggcaaggcgcgtctcaaatttaccgcatagctatcagcctgctgcatgcattatcaccatgctgagtctctagccaaggttaccaaaactgtctgacagttaatataacattggttaggtgaaggaagcaatgaactacatgggcgaataacagagtggtcgcttgcatgcactaaaaaaaggagatcataaattcccgaccacataaaattaaaaaaagttggtttttcaagaaccttccagattgttgcagagggaagaaccgatcgatcctttggcccgcatgtgctattgtgttactcgcatgcggatgcagatagtccgctatatctccagactgattcggcccatccttcacagcaaagtaggaaacaaagcagagcagttttagtttagtattgaaggt

SEQ ID NO: 50034 - DNA, 622 bp, Oryza sativa
aaggtaattttgaactgacaaaggactgaaaaaggtggttgatttttttcacttgctacattttttctcttaaaaaaaaatttgtaagcccatatacaataatatctattttaaggaatccgcataactttaaaaaaattattaaaattgtaagtgattaaggaagtattgaagggatcatttcaaatgtgtgaattttttgttacaaattttactggcataaaactaaggccctgtttagatcccaccccaaaattttacaccctgtcaagtcgaactcgaacatttaaatatctgcatgaagtattaaatataggctaaaaagataactaattgcacatattgcgataaatttgtgagacgaatcttttaagcctaatttctccatgatttaacaatgtggtgctacagtaaacatttgataatgacggattaattaggcttaataaattcgtctcgcggtttactggcggattttgtaattagtttttattagtgcccaaacaccccatgcgacaccctgtataatacccgatgtgacacgccaaaactttacacccttagatctaattatctaaacaccccctgtcttagttctttcccctatgtcccaacgcatcac

SEQ ID NO: 50035 - DNA, 558 bp, Oryza sativa
atagttgtagggtatctcaaactacctaaatagttgaggagtaatttagatttttcttttaaaaaaagagtgaagccaaatcctaagtgtgaatgctataacagaacaaaagtctgaataagttatcaagtactcaagattccgaaattccataaacagtcgatgtgcacggtttatatattattatatctctcattttgcaaatttaagttgtaagtccgtatttcgagctacagtcccagaattagggccccttttttttttgaaacacagtacaaacgcaggcgctcacaacgtgcgcacactcacccctatgaacgcacacacgcacactctacccctatgagcacctccggaagactgggccggcatatcttgagattgacgaagtcaccacaggcgcctcgctgtcgacgggtacgtcgcctaccactgaaagaataattagccgtaaatgcgagcacccgtgtcaaatctaggatttaaacccgggtgggctggttccaccacaaggaacctaaccagttgagctatgctcacttcacagaattaggcccc

SEQ ID NO: 50036 - DNA, 938 bp, Oryza sativa
aattagaaatattaatcatagactaatgacaaacatattccataaccctggactaattcgcgagatgtatctgttgagcctaattaatccatgattagcctatgtgatgttacggtaagcatgtactaattatggattaattaggcttaaaatgtctcgcgaattagctcttatttatgcaattatagttttattataagtttacgtttaatacttctaattagtctcaaacattgatgttacaggcctaaaatttaggtggtgtttggattcagggattaaactgtagtccctgtcacgtcggatgtttggacactaatttgaagtattaaacatagattacttataaaactaattacataaatgagagataattcatgagataaattttttaaacctaattaatccataattagagaatgtttacggtagcatcagataagctaatcatgtattaattaggctcaatagatttgtcttgtgaattagttcgggttatgaaatactagtaggttttatcattagtatatatatatattttgagcgaatcattagtacatattcaatacttctaattagtgtcagggaatttttttttttagcacctcccgtctcctcattcctcaatggtcatcctcctcccaacccacacggtccagtcctcctcctcgcgtagacgcggcggccgaggaacaagtccgtcacgcgaaccttccagaacctcacacgtcacgcaacctcctcctctttattacgactactaccaccccctctctcctctccgttccaccgccggattcagattcggagagagctactcctcgtcgttagccatggcgtccaagcggatcctcaaggagctcaaggacctgcagaaggatccccccacctcctgcagcgccggtgagatgcatatccctctcatcacctttttttgc

SEQ ID NO: 50037 - DNA, 680 bp, Oryza sativa
ctagtaagagaactaggaaggtagcccgcgcatatgcccgggcacttatttaatgtggcttaattttttatggttataaatgtttatatgtagattatattttcaaaatagatcttcactctatttaaaacatgttttagttattatctagttatgacatattacataaaaccatacagccttgaatttatgataatgacatgaatttataagaacaacatgtgtcacgataataaaacaataatagaataatggagttgtttcatatctatttgtactatatgtgatttttttacctaaataaagtgtttttttaattaccaccacggtaaaatctccaaaggaccatattgttggttatattttgataaatatctataattttgcgtctcgtgtttttcaacgcctattcttcataatcattcataatcacagaagacaccttgaccaattaatttggagaatgaatctattttcccaaacttatttataataactaattgattaaagtatacttctttgtcacatcaatagagtgcatgacatacattcatcgaattatgcctgatatgctggaattcctcaactataagaaaatatagagtgaacttcactgtgggctagtaatttttacccaagtttcattttggactaggggtggacaaatcttttcactttgg

SEQ ID NO: 50038 - DNA, 607 bp, Oryza sativa
ttacctgcgaaatttttttattttttaaaactttttattttttttaattttataaatagacctttcaaaaaaatatgtcccaatctgaaccttttggccactccagcccgcctggcttggccaaataactttggcatgccacgcccaactggcatggcagtgctgtcctgtcatgctagcctcttgccacgccaccgtggctggcgtggcaaaacaatgctactagcctatcatggttacggataaggtatatctcctatcctacgatttatggaatatatggatacgacataccttcgtttgtacgatatatttccgtatacgatgaggaaattaacaagagattatggaaattatcctcacgagcaagtgaacaacagagtcctactcaaaaagggttaggttatactatatcgtgtggggtccatagtcaccgagttttacttggagactaaggtgattcatgttataaaagacacaccccttaaggggtccagatcatcgaatcatagcaccaacaccaccaccatagcctacaatccggaggacgtgaagcctactcgctagaagatctcgtcgaaaccatctcgacaaggatctcgctggt
